United States Patent Application Publication US 2013/0332133 A1 - sequence listing, part 25

SEQ ID NO: 215027 - DNA, 775 bp, Unknown
  Bacterial polypeptide expressing nucleotide sequence isolated from the Sargasso Sea
aatgaaggttgcgattaatggttttggaagaattggaaaactagtttttagagcttttttggagaaaaatttaaaaggtgtagaaattgtagctattaatgaactaggtagtttggactcgagtttgcatttaatgcagttcgatagcatccatggaaaaattccagaagaaattaagaaaactaaagatggtttaaaatataaaaataaagaaattaaattttttagcgagagagatccaagcaatcttccctggagaaaacttaaggtagatgttgttttggaatgtagcggagtttttgcaagtaaggaaaaggctagctctcatttaattgcaggagcaaaaaaagttattatttctgccccagcatcaaatgttgatgccacaatcgttcaaggagtaaataatagtgttttgaaaagtaaacacaatgttatttctaatggatcttgcacaacaaattgcctagcacctgtagcaatggtacttaataaaactgtcggaattgaaagtggttttatgacaacaatacacagctatacaggtgatcaaagaactgttgatcaaaatcatagtgatctcaggagagcaaggggagctgccatttcaatgatacctacttcaaccggtgcagctaaagcattgagtctagttttgccaaaattaaaaggtaggttagatggaactgcaattagagtacctacgccaaacgtttcacttatagattatacatttacatctaagaaaaaaacatctgttgaaaaaataaatgat

SEQ ID NO: 215028 - DNA, 749 bp, Unknown
  Bacterial polypeptide expressing nucleotide sequence isolated from the Sargasso Sea
cagggtgtggattttgttattgaatcaactggaatttttaccaatagagaagctgcaggacaacatcttgatgctggagcaaaaaaaattatcatttcagcgccctcaaagaacccagatattactttagttttgggtgttaatgaggaaacctatctcccagagcagcataatattatttcaaatgcctcttgcacgacaaattgtttggccccagtcgccaaggtattgcacgataatttttttatcgaaaagggtttgatgacaactatccactcatacaccaacgatcaaaggatattagatttgcctcatacagaccttcggagagctcgcgcggcgaatgtctcaatgatcccaactacaacaggagcagccaaagctgtagccctagtcctcccagaaatagcagggcgccttgatggaatggcaattcgtgttcctactcccaatgtttcattaattgatcttgtagtagaagttaaaaagaagacctcaaataaagaagtaaatgaggtttttaaagaagctgcacgtgaaggattgaaaaacattcttagggtggaggataacccgcttgtgtcgattgattataatggggacccttattcctctattattgatggtctttctaccaaagtaatgaaagacaatatgataaaggttttagcttggtacgataatgaatggggatattccaaccgcgttaaagaccttttaaaattcattgttagtaaaaataattcttg

SEQ ID NO: 215029 - DNA, 818 bp, Unknown
  Bacterial polypeptide expressing nucleotide sequence isolated from the Sargasso Sea
tatgagaatagcaataaaccgttttggaagaattggcaaattggtattaagagcatttttagaaaaaaaaataaaaaatgttgaagtggtagctataaatgaactaggaagtattgactcaagtattcacttattaaaatatgacagtatccatggaattttaccattaaaaataacaaaaacaaaaaagggaataaaagttggaaataataaaatcaatttttattcagagaaaagccctgaaaatcttccttggaaattattaaatgtagatgtagttttggaatgtagtggtgtattcacttcaaaagaaaaggcaaaatctcatattaacgctggtgcaaaaaaagtaattatttcggctcctggctcaaatgttgataaaacaattgttcaaggagttaataataatcaactaacaaaaaaacataatataatttcaaatggttcatgcacaactaactgtttagctccactagctatggtgctcgataatggtataggtatcgaaagaggctttatgacaacaattcatagctataccggagatcaaagaactgttgatcaaagtcataatgatttaagaagagctagggcagcggctgagtcaataataccaacttctactggcgcagcaaaagctataagtttagttcttccaagcttgaaagataagttagatggtactgcaattagagtacctacgcccaatgtttctcttatagattttactttcgtaagtaagaaaaaaacaagtgttaaaaaaattaattctttaattttaaaggcttcaaaatctaaatcacttaagaatattt

SEQ ID NO: 215030 - DNA, 777 bp, Unknown
  Bacterial polypeptide expressing nucleotide sequence isolated from the Sargasso Sea
tatgacaattaaaatcggtattaacggttttggccgtatgggacgtttatcaatgcgtgcagcatttgattgggatgatatagagattattcaaatcaatgatcctgcgggaaatgctgaaacacttggacatttaatgacgtttgattcagtacatggtcgttggcatcatgaggcgaatcatgaaggcgattcaataattatcaataacaaggctattccttgcacgcaaaacaaagcgactcaagacactgactggtctaagtgtgatgtagtaattgaggcatcaggaaaaataaaaacgaaagcgctgttacaagcctatttagatcaaggtgtaaagcgtgttgtggttacagctcctgtaaaagaagatggtgtattgaatatcgttatgggagtaaatgaaaatttatacgacaaagctattcatcctatcgtaacagcagcttcatgtaccactaattgcctagcgccagtggtcaaagttattcatgaaaaaataggtattaagcatggttcaatgaccactatccatgacattactaatacgcaaaccatattagatgccccccataaggatttacgtagagcacgagcatgtggcatgagcttaattccgacaacaactggctcggctacggcaattacgcatatttttcctgaactaaaagggaagttaaatggtcatgcaatacgagttcctttaactaatgcatcaattacagattgtgtttttgaagttgaacgagctacaactgttgaagaagtaaataa

SEQ ID NO: 215031 - DNA, 901 bp, Unknown
  Bacterial polypeptide expressing nucleotide sequence isolated from the Sargasso Sea
aaaaggcattgatatagtagctataaatgaattaggcagtttagacgcaagtatacatttaatgcaatatgacagcattcacggaaaacttccagttaagattaataaaacaaaagataatttaaaatataagaataaaacaattaaatttttcagcgagagagatccattaaatttaccttggaaaaaactaaatgttgatgttgtactagagtgcagcggtgtttttgcttcaaaagaaaaagctagtgcccatcttaaggctggtgcaaaaaaagtaataatttcagcaccaggatccaatgttgatgcgactatagttcaaggtgttaataatcatattttgcaaaaaaagcacagagttatttctaatggttcatgcactacaaattgtttagcgcctgttgcaatggttttagataaaggagttggcatagaaaatggttttatgactactatacatagttacacaggtgatcaaaggactgttgatcaaacgcatagtgactttagaagagcaagaggtgcagcaatctcaatgatacctacatctacaggagcagcaaaagccttaagtttggttcttccaaaacttaaaggaaaacttgatggaactgcaataagagttccaaccccgaatgtatcattaattgatttaacttttacttctaagaaaaaaacctctgttgaagagatcaataaattaatgattaaagctagcaaaactaaaaaactaaaagatattttaacaacaaatgaactaccattagtttcaattgattttaatcataattctagcagttctgtatttgacttaactcaaacacaagttttgaatggtaaattttgcagagtattatcttggtatgataacgaatggggtttttcaaacagaatgata

SEQ ID NO: 215032 - DNA, 788 bp, Unknown
  Bacterial polypeptide expressing nucleotide sequence isolated from the Sargasso Sea
catgacagtaaaaattggtattaatggtttgggtagaataggaagaatgatcatcagatcattgattgaaaataataataaaaaagtagaaattaaacacatcaacagtagatcaaattctgaagttgtctcctcattattaaagtatgactctattcacggaaaatttaattgtgaaataaaatatggagataactacttaaaattaaacggtaaaaatattacattctcacaacattcaaatttaaatgaaattaattggaagaaatttggtgtagattatgttttagaatgtacaggaaaatttaattcaaaagagaagctttatactcatataaaaaatggtgcgaaaaaagttattgtttctgcgccttgtaaaaacgctgacaaaactatcgtttatggagtaaatcacaaatcgattagcaaaaaagatttagtaatttctgcagcttcttgcacaactaattgccttgcgccaatcgcatacgtgttaaataaggaatttaaaatagaaaaaggttttatgacaactattcattcatacacaactgaccaaagactattggacaactcccacaaagatccaagacgggcaagatctgctgctcagtcaatggtgccaacttctacaggcgcttcaaaagctattggagaaattattcctgaattaaaaggaaagcttgaaggtttggctataagggttccaaccccaaatgtttcattagtagatcttgtatttaattcaaaaaacaaactaacagtaaaaaaaattaatgactctttta

SEQ ID NO: 215033 - DNA, 360 bp, Unknown
  Bacterial polypeptide expressing nucleotide sequence isolated from the Sargasso Sea
tagggttagtaatgccagaactcgatggcaaacttgatggtgttgctataagggtacccactccaaatgtttcagttgttgatcttacatttgaatcttcgaaatccaccactgaaagtgaaattaattcttttattgagaacgcctcgttaagcgatttaaaaggcatactgggttttactaaagaaaaattggtatcaatggatgtcaatcatgatccacattcctcaatattcgcagcagatcagacaaaagtacttcaaaataatatggtacgagttttaagttggtatgataatgaatggggtttttcaaaccgaatgtcagatacagctttggaaatggcaaaatttctgtaag

SEQ ID NO: 215034 - DNA, 280 bp, Unknown
  Bacterial polypeptide expressing nucleotide sequence isolated from the Sargasso Sea
atgaaaattggaattaatggttttggaagaattggcagattagttttcagagcattatgggatagagctgatatagaaataactcacattaatgagatagcaggagattcgaatgccgctgcgcatctactcgaattcgattcagtccatggcagatgggggaaagatataaaggttaaagataaagaaataataattgacggaaagaaattaacatatacatcttttaaaaattacattgatgtaccttggcagaaatcttctgtagatattattttgg

SEQ ID NO: 215035 - DNA, 913 bp, Unknown
  Bacterial polypeptide expressing nucleotide sequence isolated from the Sargasso Sea
atggttaaagttggcatcaatggttttgggagaatagggagattaattttaagagctattttagaaaattacaaaaataaaattcatgttgttgcaattaatgatttaggaccaatagaaactaatgcacatttgattaaatacgatagcactcatggtatcattaatgaagaaatccaaatttctaaagaaggttttaaaatcggcaatcaagaaataaaagtttttgcagaaaaggatccagctaatatcccttggggtaaagtaagtgctgacgtagtcttagaatgtacaggcatttttatagataagtcttcagcagaaaaacatattaaaggcggagcaaaaaaagtaataatttctgctcctggtaaagaagttgattttacaattgtccaaggtgttaatagcaaagagttaaaaaaagagcacaatattatttctaatggttcttgcactacaaattgtttagcgccagttgcaatggttttagaaaaaacttttggaattagctatggctatatgactacaatccatagttatacaggtgatcaaaaactcctagatacattgcataaagatttaagaagagctcgatctactgaaggagcaatgatacctacttcaacaggagcagccaaagcaatgagtttagttctgccgagtttaaaagggaagttagatggaacagctataagagttccaacaccaaatgtttcattaattgatttaactttagttactgaaaaagagataactatagaaagtattaataacgcaatgtcaaaagctgcaaaaggagaattaaaaggtatactggatgtaaatgagaaacccttagtatcaaaagattttaatcacaatccgcatagttcgatatttgatttgactcaaactcaagtgatcaaaggaa

SEQ ID NO: 215036 - DNA, 464 bp, Unknown
  Bacterial polypeptide expressing nucleotide sequence isolated from the Sargasso Sea
gatgaaaattggaattaatggttttggaagaattggcagattagttttcagagcattatgggacagagctgatatagaaataactcacataaatgagatagcaggagattcgaatgctgctgcgcatttactcgaattcgattcggtccatggtagatgggggaaaaatatagaggtcaaagaagaagaaataataattgaggggaaaaaattagactacacatcttttaaaaattatcttgatgttccttgggaaaaatcttctgtagatattattttggaatgtacaggaaagaataaaaagccagacaaactaaatccctattttgattctctagggatgaaaagagtaatagtagcttgtccagttaaaggagttgttgcagaagccgaagcacttaatattgtttacggtataaatcaaagtctttacgaccccttcaaacataaattagtaactgcag

SEQ ID NO: 215037 - DNA, 931 bp, Unknown
  Bacterial polypeptide expressing nucleotide sequence isolated from the Sargasso Sea
ggacggattggtcgccttgtgtcccgggccctctggggacggcctggcatcgaactggtgcatgtcaatgatcccgctggcgatgcagcaacggcggcccacctgctggaattcgattctgttcatggtcgctgggatcgaggaatcaccagcagtgctgatggattcagcgtggagggatccgcactcacctggtccagcgagaaagaccccaccgccgtgccctggagcgatcggggggtggagatggtgcttgaagccagcggcaagatcaaaacgccggagacgctcaatccctatttcgatcagctgggcctcaaacgggtggtggtggcctgtcccgtgaagggtgtggttgccggtgaggacgcgctcaacatcgtttacgggatcaatcaccacctctatgaaccggcgcgccacaaattggtgacggccgcctcctgcaccaccaattgcctggcgcctgtagtgaaggtggtgcacgagagcttcggcatcgagcacggcctgatcaccaccattcacgacatcaccaacacccaggtgccgatcgattccttcaaaagcgacctgcgccgggcgcgctcagggctcacctcactcatccccaccaccaccggctcggccaaggcgatcgcgatgatcttccctgagctgaagggcaagctcaacggtcatgccgttcgtgttcccctactgaatggatcgctcaccgatgcggtgttcgagctcaagcagagcgtcacggtggagcaggtgaatgctgcgttcaaagctgctgcggaagggcctctgaagggaatcttgggttacgaggaacgcccgttggtgtcgtgcgattacaccaacgacaaccgcagctcgattgtcgatgccctctcaacgatggttgtcgatggcaaccagctgaaggtgtttgcctgtacga

SEQ ID NO: 215038 - DNA, 324 bp, Unknown
  Bacterial polypeptide expressing nucleotide sequence isolated from the Sargasso Sea
tatgaaaattaatgttgcaatcaatggttttggaaggattggaagacttactctcagagccttccttgagagaaaagtaaatgattttaatatcgttgctgtaaacgatcttggaaatttagagagtaacatccatttattgaaatatgactctgttcacggaaatttaacctactcaataaaaaagacaggtagttcaatcaaaattgaagatcataatattcattttcttagtgaatctgatccactaaaacttccatggaaaaaacttggaattgacgtagtaattgaatctacaggagtctttacaaacagagaaaaagc

SEQ ID NO: 215039 - DNA, 752 bp, Unknown
  Bacterial polypeptide expressing nucleotide sequence isolated from the Sargasso Sea
gggcgatctcggcatcgatgtcgtgctcgaatgcaccggcatctttacatccaaggaatcggccggcgcgcaccttaaggcgggcgcaaagaaggtcctgatctcggcgcctgcctcgggtgcagaccttaccatcgtacagggcgtcaacgacaacaaactgcgcaaatcccacaaggtggtctctaacgcgtcgtgcacgaccaactgcctcgccccggtcgccgccgttctgaacaaggccatcggcatcaagcacggctttatgaccacggtacacagctacaccggcgaccagccggtgctcgacacgctgcactccgatctgcaccgcgcccgcggagcggcgacgtcgatcatcccgacctcgaccggtgcggcccgcgcggtcggcctggtgctgccggaactcgccggtaagctcgacggcacggccgttcgggtgccgacgccgaatgtctcgatggtcgatctggtcgtcgaggccaagaagaacaccacggccgaagcggtgaatgcggcgatcgaaaaggccgcggccaaggggcccctgaagggcatcctgaccaccaacgccgcgccgctggtctccgccgatttcaatcacaacccggcgagttccgtgttcgacctgacccagacccaggtgaccgatggccggatggtccgggtcctcagctggtacgacaatgaatggggcttctccaaccggatgagcgacaccgccgtcctgatgggcaaacttggctagc

SEQ ID NO: 215040 - DNA, 193 bp, Unknown
  Bacterial polypeptide expressing nucleotide sequence isolated from the Sargasso Sea
atgtcagttaaggtggctattaacggatttggacgaattggaaggaatattttgagagcgtccattgagaacaacagaaaagatattgaggttgttgctataaacgatcttggttctccagagatgaatgtgcatttacttaaatatgacagtgtacatggtcgcttccctttagacctatctatacacaaaa

SEQ ID NO: 215041 - DNA, 621 bp, Unknown
  Bacterial polypeptide expressing nucleotide sequence isolated from the Sargasso Sea
gatgaaaattggaattaatggttttggaagaattggcagattagttttcagagcattatggggcagagctgatatagaaataactcacataaatgagatagcaggagattcgaatgctgctgcgcatttactcgaattcgattcagtccatggtagatgggtgaaagatataaaggttaaagaagaagaaataataattgatggaaagaaattaacctacacatcttttaaaaattaccttgatgttccttgggaaaaatcttctgtagatattattttggaatgtacaggaaagaataaaaagccagacaaactaaatccctattttgatactcttgggatgaaaagagtaatagtagcttgtccagtcaaaggaattgttgcagaagctgaatcacttaatattgtttacggtataaatcaaagtctttatgacccttccaaacataaattagtaactgcagcatcctgcactacaaattgtttagctccgatagtaaaggtaattaatgaaaatttttctattaaacacggtgctattacaactattcacgatgtaacgaacactcaagttcctgtagatttttataaaagtgatctgaggagagcaagaggatgtat

SEQ ID NO: 215042 - DNA, 532 bp, Unknown
  Bacterial polypeptide expressing nucleotide sequence isolated from the Sargasso Sea
tatgacagtaaaagtggctataaatggttttggaagaattggaagattagttcttagagcaattttagaatcaaataggaaagatattaaagtagtcgctataaatgatcttggttccgtagatgcgaatgcacatttattaagttatgatagtgtacatgggaagctagataagaaaataattgttgaaaatggaagtataaaaacaccgcatggtattattgaggttttttctgaaagaaacccagaacaattaccatggaaaaaactagatatagatgttgcactagagtgtacgggactttttactaaaaaggatgatgcttctaaacatttaattgcaggagcaaaaaaagttttgatttctgctccaggaaaagatgtcgattatacagtagtatatggtgttaatgataaaggtttaaactctaaccataatatagtatctaatgcaagttgtaccactaattgcctagcaccggttgcgcaagtattaaatgaattagtgggtatagagagtgggatttatgac

SEQ ID NO: 215043 - DNA, 211 bp, Unknown
  Bacterial polypeptide expressing nucleotide sequence isolated from the Sargasso Sea
atgagtattaatatcgggatcaacggatttggaagaatcggacgcatggtattgcgggcggggatcaacaatccgaatattcgtttcgtggctatcaatgatttggtgccggcggaaaacctcgcatacctgatgaaatatgattcaacccacggaaggtttcccggaaatgtggaaacagacgggaacaatattctaatcgatgggaaaa

SEQ ID NO: 215044 - DNA, 892 bp, Unknown
  Bacterial polypeptide expressing nucleotide sequence isolated from the Sargasso Sea
atgactttgcgtgtgcaaattaacggctttggcagaattggtcgaaactttatgcgttgttggctgagtagaggggcctacaccaatattgaagtagttggaattaatgtcacttcagatcctaagactaatgctcatctattaaagtatgactcagtcctcggtcaacttgatggtgttgatattcaatataccgatgatacgtttgtaattaataacaagacaattaaatgtttctctgatagaaatccaatgaatctaccttggaaagattggggggtagatttggttattgaatctactggagtatttaatacagacgtaggtgcaagtaagcacttagaagtaggagcaaaaaaagtcatcttaaccgctcctggtaaaggtgatggtgttggtacttatgtagttggagtcaatgctgatacatacaagcataaaaattatgatattttgagtaatgctagttgtacaacgaactgtttagctccagtagttaaagttttggaccaaacctttgggattaacaaaggtttgatgactacaattcatagttatacaggggatcaaagaattttagataatagtcatagagatctaagaagagctagagccgctgctacaaacatcgttcctacttctacaggagctgcaaaagcagtagctctggtatatccagaaatgaaaggcaaattaacaggaattgcaatgagagttccaactcctaacgtttcagcagtagattttgtttttgaatcttctaaatctgttacagctgaagaagtcaataatgctctcaaggaagcatctctaagctcaatgaaaggcattattaagtatggagatgaaccattagtgtcaagcgattatgccggtactaatgagtcatcaa

SEQ ID NO: 215045 - DNA, 733 bp, Unknown
  Bacterial polypeptide expressing nucleotide sequence isolated from the Sargasso Sea
tgtcgtgcttgaatgtactggcttttttgcgaaaaaagagctggcaagtaaacacatcaaagctggagcaaaaaaagttgtgatctctgcacccgctgggactgacattgatgcaacgattgtatatggagtcaaccatgacaccctttcaaaagatgatgcagtgatttcgaacgcatcttgcacaaccaattgtcttgctccacttgtcaaacccatacatgagagcattgggctcgagagcgggattatgacaaccatccatgcatacacaaatgatcaagttttgaccgatgtcatgcacagtgatctcagaagagccaggtcagctacgcaatcaatgattccaaccaaaacaggggctgctgctgctgttggtcttgttttgcctgaactggatgggaagctagatggcttttcagtgagagtgccgaccatcaatgtttcattggttgatctcagctttattgcctccagagaaacttcggtcgatgagatcaatgaggtggtcaaagcggcatcagaaggtgctctaaagggagtgcttgattacagcgatggaccattggtatcaattgattttaatcacaatcctgcatcttccacatatgatgcaaccatgacaaaagtacaagagggaaccttggtgaaagtatgctcttggtatgacaatgaatggggtttttcaaatcgcatgcttgatacaacactcgcattggtcaacgctgagtaa

SEQ ID NO: 215046 - DNA, 604 bp, Unknown
  Bacterial polypeptide expressing nucleotide sequence isolated from the Sargasso Sea
tatgacgttaagagtagggataaatggctttggtcgcatcggcaggaatgttctcagggctataattgaatctcaaagagaagatatcaaggttgttgcaataaacaacagatcatcaattcaggtttgtgctcatcttttgaagtacgactcaattcatggaagatttccatttgatgtgagtacaactgaaaattttataacagtagacaataataatattcatgtttcaaatgaactaactattgatgaaattcgatgggataaaaatgatgttgatctagtcatggagtgtacgggtaagtttaactctgcaaaagaatgccaaaaacatatttctgctggtgcaaaaaaagttttaatttctgcacctgcaaaagatgcagacttaacagtagtattcggtgtcaatgagcaagatataaattctagtcacaacataatttcaaatgcatcttgcacaacaaactgcctagcccctatagccaaagttttaaatgataattttggaattgaagaaggctttatgacaacagtacatagttacacaggtgatcagccaacgattgatagagaccataaagacgtataccgtgcaagggca

SEQ ID NO: 215047 - DNA, 455 bp, Unknown
  Bacterial polypeptide expressing nucleotide sequence isolated from the Sargasso Sea
ccgactttggacggggcctctaaaaaaagattggcgaggtggccgcgggggcaatcagaatattatacctgcctcgactggtgcagcaaaagcagttggaatctgtatccctgaaatagcaggaaaaataaccggcatgtcattccgtgttccaactccaaatgtttctgttgtagatttaacagtaaaactctcaaaatccaccagctacgacgacataaatgcttccatggaatccgcatcaaaaggaaatctgaaaggaattttaggctacaccgatgaggatgttgtttccagtgatttcataggaagtacatactcttctatatatgatgctggtgcaggaatagggttgaatgacaaatttttcaaactggtctcatggtatgataatgaaatgggatactctgcccgcttaattgaccttgtcgagtacatggaaacaagaaactgaa

SEQ ID NO: 215048 - DNA, 253 bp, Unknown
  Bacterial polypeptide expressing nucleotide sequence isolated from the Sargasso Sea
tatggttaaagtaggaataaatggttttggaagaattggaagacttatattaagggctatccttgaaaattataaagataagattcaagtagtagcaattaacgatctaggctcaattgaaacaaatgctcacttaataaaatatgatagtacccatggtattatcaatgatgaaattactacatcaaaagatggatttaaaatttctaaccagaatattaaagtcttttcagagagagacccagaaaatatt

SEQ ID NO: 215049 - DNA, 640 bp, Unknown
  Bacterial polypeptide expressing nucleotide sequence isolated from the Sargasso Sea
tgcatcaaatgttgatgcaactatagttcagggatttaacaatgatatcttaagcaaaaaacataatgttatatcaaacggctcgtgtagtacaaattgtttggctccagttgtaatggttcttgataacggagttggtattgaaaatggttttatgactacagtacatagttatactggtgatcaaagaactgttgatcaaactcatagtgattttagaagggctagaggtgctgctatttcaatgattcctacttctactggcgcagctagagctctgagtttagttttaccaaaaatgaagggtaaacttgatgggacagcaataagagttccaacaccgaatgtctctttagttgactttacttttacttcaaagaaaaaaacttctatagaaaagattaataatttatttattaaagctagcaaaacaaaagctttgaaaaatatattaacaacgaataaactacctctggtatcaatagatttcaatcataattcaagcagttctgtatttgacttaactcaaactcaggttctaaatggtaaattttgtagagttttatcttggtatgacaatgaatggggtttctcaaacagaatgatagatacaatgcttaattttaaaaaattattatag

SEQ ID NO: 215050 - DNA, 547 bp, Unknown
  Bacterial polypeptide expressing nucleotide sequence isolated from the Sargasso Sea
aaaagatccagctaagattccttggggcaatgtaggtgctgatgtggttttagaatgtacaggtatatttttagataaatcatctgcacaaaatcacatcaaaggtggcgcaaagaaagtgattatttctgctcctgcaaaagaagttgattttacaattgttcaaggtgttaacagcaaggaattaaaaaaagatcacaatataatttcaaatggatcgtgtactactaattgcttagcacctgttgctatggtgctagaaaataattttggcattgaatacggatatatgactacaatacacagttatacaggggatcaaaagttattagatacactccacaaagatttaagaagagcaaggtcaacagaaggatcaatgataccaacatcaacaggagctgcaaaagcattaagtttagttttaccaagtctcaaaggaaaattagatggaactgctattagagttccaacacccaatgtttcattaattgatttcacagttgttactaaaaaagaagtttccgcagacacaattaatgacgcc

SEQ ID NO: 215051 - DNA, 781 bp, Unknown
  Bacterial polypeptide expressing nucleotide sequence isolated from the Sargasso Sea
catggcaattaaagtagcaattaatggttttggccggatcggccgcaatgtgttcagggccatgttcgagtccggccagcaggatcaatttgaagtcgtcgcggttaatgatctgggtgacgctgcgacaatctcccatttgttgcagtatgacaccgcgcatggccgtttcagccaggatgtcagcgtcgatggcgatgcctttatggtgggaaataggcgcgtaaaggtcctcgctgagcgcgatcctgccaagttgccttggggagagcttggtgttgatgtggtgatggaatgtaccggttttttcacaagcaaagaaaaagccagcgcgcatttagcgggcggcgccaagaaagtgatcatctctgcgcctggcggtagtgatgtcgacgcgactgttgtctacggagtgaatcacgatgtcctcaaagcaagtgataccgttatttcaaacgcatcttgcacgacgaactgcctagcaccattggtcaagccgctacacgacgcgattggtgtggtcggcgggttgatgacgacgattcatgcctacaccaatgaccaggtgctcacagatgtctatcacacagatttaaggcgagccagatcggccacacaatcaatgattctaaccaagacgggtgcagcggccgccgttggactcgttttgccggaacttaatgaaaagctggatggctttgcgatccgggtacctacgatcaatgtctccatggtagatctgacctttgaagcggcccgcgaaaccacagttgaagaggtt

SEQ ID NO: 215052 - DNA, 730 bp, Unknown
  Bacterial polypeptide expressing nucleotide sequence isolated from the Sargasso Sea
tatgactttgcgtgttgcaattaacgggtttggcagaattggtcgaaactttatgcgctgttggcttagtagaggtgcttacaccaatatcgaagtagttggtattaacgttacttctgatcctaagaccaatgctcatcttctaaaatacgattcagttcttggccaacttgacggtgtcgatattcaatatactgacaatacttttgttattaataacaagacaattaaatgcttctctgatagaaaccctatgaatctcccttggaaagaatggggtgtagatttggttattgaatcaactggagttttcaatacagatgtaggggcaagtaagcatttggaagtaggagcaaaaaaagtcattctaactgcgcctggtaaaggtgctggtgttggtacttatgtagttggagtcaatgctgatcaatacaatcataaagattatgatattttgagtaatgctagttgcactacaaactgcttagctccagtagttaaagttttagatcaaactttcgggattaataaaggtttgatgactacaattcatagttatacaggtgatcaaagaattttggataatagtcatagagatttgagaagggctagagcagcagctactaatattgttcctacttctacaggtgctgctaaagcagtagcattagtgtacccagaaatgaaaggcaaattgacagggattgcaaatgagagttccaacccctaa

SEQ ID NO: 215053 - DNA, 886 bp, Unknown
  Bacterial polypeptide expressing nucleotide sequence isolated from the Sargasso Sea
gggggcattgaaatcgaagcgcaaggatatcgagtttgtagcaatcaatgaccttgggtctctcgagatgaatgcgctgcttcttcaaaacgatacgacccatggcaggctttccaatcgcgtcagaaaaactgccaccggcataaacgcaggcagcggaacaattaaggtgttttccgagcgagatcctgaggcgctaccctggggtaagctcggtgtcgatgtcgtactcgaatgcaccggcatttttacgaagcgggagcaggctgtgcagcatcttaaggccggcgcaaagaaggttttaatttcagcgccggccagtggcgaagacttaaccgtcgtatacggggtgaatgatcaaagattgcgcaagagccataaaattgtgtcaaatgcctcgtgtaccacgaattgtttagctcctgtcgctgccgttatgcacaaagctttcgaaatccaacaaggatatatgacaacgatccatgcctacacgggcgaccagcgtatacttgatacactgcacagtgatccgcgtcgtgcacgtgctgccggtcagtccatgatccccacttcgacgggagctgcaaaagcagtaggactggtgcttcctgagttaaacggaaagcttgacggaacatcaattagggttcccactcccaatgtatccgtaattgacttcacatttattccgaagaaaaaaacaaacgtagaagcggttaattctgccgccataagagcctcaaaatctaatcgcctaaaaggcattttcaacgttaatgagcaacctttggtatcaagcgactttaatcatgatcccgcgtcctcgacatttgatctaacgcaaactcaggtcattgacggtaaattggttcgcgtggttagttgg

SEQ ID NO: 215054 - DNA, 505 bp, Unknown
  Bacterial polypeptide expressing nucleotide sequence isolated from the Sargasso Sea
gggataaggactggctatatgactacgatacatagttacacgggggaccagccctctctcgatacgatgcacaaagatttgtatagggccagggctgctagccttagcatgattcctacgtcgacaggagcggcgaaggcagtttcgctagtacttcccgagctagaaggaaagcttgatggttccgctattagagttcctaccccaaatgtatcttgcgtagatctaaaatttgtatctgaaaaacccgttactgcattagaaataaatcaagcgataaaaatagctgccacaaatgaattgttaggtatacttgggtatgaagaaagagcccttgtctctattgattttaatcacatatcagagtcttcaactgtcgcagcacaggagacaaaggttctacctagtgggatggcacgcatcctggcttggtacgataacgaatgggggttttccaacagaatggcagatactgccgtgacaatgggagatttaattaaatgaa

SEQ ID NO: 215055 - DNA, 769 bp, Unknown
  Bacterial polypeptide expressing nucleotide sequence isolated from the Sargasso Sea
atgacaattaaaataggaattaacggtctaggtagaatcggtagaatggtaattaggtctattattgaaacaaataataaaaaaattgaaataaaacttataaataacagaacagatttaaaaaactgtagccaattgcttaaatatgactcagttcatggaaaatttaatgctgacataaaatataacgaaaaatatttgtttattaataaaaagaagatttcttactcaagagaaatagaattagataaaattaactggaagaaaaataatgtagatatcgttttagagtgtacgggaaaatacaattctaaggaaaaatctttccaacatatcaaaaatggtgccaaaaaagttatagtatctgcgccatgtaaaaatgcagataaaacaattgtgtatggtgttaatcacaaatcaataaataaaaatgacttagttatttcagcagcctcatgtaccacaaactgtcttgcgccaattgcatatgttcttaatcaaaaatttaaaatagaaaaaggttttatgaccactattcattcatatactacagaccaaagacttttagataattcgcacaaagatcaaagaagagcaagatctgcgggacaatctatagttccaacttctaccggagcatctaaagctcttgctgaaattataccagaattaaaaggaaaaatcgaaggagtggcaatgagagtcccaacacccaatgtttctttagtagacttagtattcaattcatcaaaaaatttatcagttaatc

SEQ ID NO: 215056 - DNA, 649 bp, Unknown
  Bacterial polypeptide expressing nucleotide sequence isolated from the Sargasso Sea
cttgacctcccttggaaggagtggggcattgatctggtgatcgagtcgaccggtgtgttcaacaccgacgagaaggccagcatgcacatccaggctggtgccaagaaggtgatcctcaccgctcctggtaagggccccggcgtcggcactttcgtggttggcgtgaacgctgatcaataccgccacgaagatttcgacatcctgtccaacgccagttgcaccaccaactgcatggctccgatcgtcaaggtgatcgatcaggagttcggcatcgttaagggctcgatgaccacggtgcacagctacaccggtgaccagcgcatcctcgatgccagccaccgcgacctgcgccgcgcccgtgctgcagcgatgaacatcgttcccaccaccaccggtgctgccaaggctgtggctttggtttaccccgaggtgaagggcaagcttgatggcctggccctgcgtgttcccacccccaacgtgtcgttggtggacatggtgttcaacgtcagcaagaacacctcgcgcgacgaggtcaatgccgtgttgaaggcagcctctgagggcgcctacaagggcatcatcaagtactccaccctgcctctggtctcttctgacctggctggcaccgatgactccaccgatcgttgat

SEQ ID NO: 215057 - DNA, 790 bp, Unknown
  Bacterial polypeptide expressing nucleotide sequence isolated from the Sargasso Sea
atcaatggatttgggagaattggaaaattagttcttagagctttcttagaaaaaaaaataaaaaactatgaaattgtagctattaacgaacttggaagcattgattcaagtattcaccttttaaaatttgatagtgttcatggaatacttccttttaatataaaaaaatcagctaataaaattttagttgaaaaaaataatataagttttttctctgaaaaagatccaaataatcttccatggaaatctcttaatgtagatgtagttttggaatgtagcggtgtatttacatctaaagaaagtgcaaaggcacatctaaaagctggagcaaaaaaagtaattatttcggcaccagcatctaatgtagacgcaactatagttcaaggagtcaacaatgatattttgaaatcaaaagataatatcatttcaaatggttcgtgtactacaaattgcttagctcccatagcaatgattctagataaaggaataggtattgagtcaggttttatgacaacaatacatagttatacaggagatcaaagaacagttgatcaaactcataaagatttaagaagagcaagagctgctgctgagtcaatgatcccaacatctacaggtgcagcaaaggcactcagtttggtacttccaaatttaaagggtaagttagatggaactgctataagagtaccaactcctaatgtttctcttattgatcttacatttacaagtaagaaaaaaactaatgtagacaaaattaattctttgattgtaaaagagtctaaaactaaaa

SEQ ID NO: 215058 - DNA, 685 bp, Unknown
  Bacterial polypeptide expressing nucleotide sequence isolated from the Sargasso Sea
tttggcacatctcaagaatggttcaaaacgagttttagtatcagctccttcatctggagcagataaaactatcgtatatggagtaaatcataatactttaactggcgatgagttaattgtttcaaatgcttcgtgtacgactaactgcctggcaccggttgcaatggtgttaaacagggcattgggaataaaaacaggttacatgactactgttcatagttataccggagatcaaccatcacttgatactatgcataaggatctgtatcgaggtcgtgcagcatcattgagtatgatcccaacttcgacgggcgcagcaaaggctgtatcacttgtattgccagagctggagggcaagctagatggttcggcaataagggttccaaccccaaatgtgtcctgtattgattttaaatttcttactgaaaaagttgtaagtgcagaagagattaatgaaacgattaaaaaggcatcagagggcgagctcagaggaattttaggttttgaaaatcgatccttggtttcaatagattttaatcattggcctgcttcgtcaatatttgcttcgcaggaaaccaaagttctggcgggggggatggcacgaattttatcttggtatgataacgagtggggcttttccaacaggatggctgatactgccattaaaatgggtagtttagtgtaa

SEQ ID NO: 215059 - DNA, 361 bp, Unknown
  Bacterial polypeptide expressing nucleotide sequence isolated from the Sargasso Sea
tatgcgcattggtattaatggttttggtcgtataggacgacttgttcttagggcactctggggtagagaaaatatagagattacgcatatcaacgatccattgggtgatgcaaagggagctgcgcatttacttgaatatgactcagttcatggtcgttggaacaaagcaataagcaacgatcaaaacaacctgaatattgaaggtcacccaatatctttttcacaagaaagtgatttcacaaaagtgccatggaaggaaaaaggtacagagttaattctcgaatgctcagggaaattcaaaacccctcaaacattaaatccttatttcgatactcttgggatgaaaaggagttgtcgttgc

SEQ ID NO: 215060 - DNA, 682 bp, Unknown
  Bacterial polypeptide expressing nucleotide sequence isolated from the Sargasso Sea
atgagggtagcgattaatggttttggaagaataggaaagttagtttttagagcttttttagaaaagaatttaaaaggtgtagatatagttgcaatcaatgaactaggcagtttagattcaagtttacatttaatgcaatatgatagtattcatggaaaacttccaattcaaattaataaagctaaagatggtttaaaatataagaaaaaaataattaaattttttagcgaaagagatccattaaatttaccttggaaaaaattaaatgttgatgttgttttagaatgcagcggcgtttttgcctcaaaagaaaaagctggtgctcaccttaatgccggtgcaaaaaaagtaattatttcagcaccaggatcaaatgttgatgctactatagttcaaggtgtaaacaatcagattttgaaaaaaaagcataaagttatatctaatggctcatgtacaacaaattgcttagcacctgttgcgatggttcttgataaaggtattggaattgaaaatggttttatgacaacaatacacagttatacgggtgatcaaagaactgttgatcaaacacacagtgaccttagaagagcaagaggtgcagccatctcaatgatacctacatcaacgggagcagcaaaagccttaagtttggttcttccaaaagttaaaaggcaagcttgat

SEQ ID NO: 215061 - DNA, 488 bp, Unknown
  Bacterial polypeptide expressing nucleotide sequence isolated from the Sargasso Sea
tggttatatgaccacaatacatagttatactggagaccaacccgtcctcgacacacttcacagtgattattatagagctagggcagcttcccttaacatgatcccgacgtccacgggagccgctcaagctgtttctttggtgctgccggagctaaaaggaaaacttgatggatcagcaattcgagttcctactcctaatgtttcatgtgtggatctgaaatgtattttaactaatgagcattcaattaaagaaattaacgaagccattcataaagcctccaatactactttagatggtatcttggcttatgaagatgcaccattagtttcttcagatttaaatcatcatccagcttcctccatatttgcaggagctcaaacaaaagttttggcggggggcatggcccgagttctgagttggtatgataatgaatgggggttttcaaatcgtatgcttgatacagcgacttatctaggacttatttagt

SEQ ID NO: 215062 - DNA, 331 bp, Unknown
  Bacterial polypeptide expressing nucleotide sequence isolated from the Sargasso Sea
atgagcatcaatatcgggatcaatggatttggaagaatcggacgcatggttttgagggcggggatcaacaatccgaatattcgtttcgtggctatcaatgatttggtgccggcggaaaacctcgcatacctcatgaaatatgattcaacccacggaaggtttcccggaaatgtggaaacagacgggaacaatattctgatcgatgggaaaagcatcgaatgtgtttcagagagagatccggaacaactgggctggggagataaaggggttgattatgtgatcgaatccacaggacttttcaccaccctgaaaaagctgagcttcacctaaa

SEQ ID NO: 215063 - DNA, 682 bp, Unknown
  Bacterial polypeptide expressing nucleotide sequence isolated from the Sargasso Sea
atggctataaaaattggaataaatggatttggaagaattggaagaatggttttaagatctattattgaaaataaaagaaaagatatcgaagttgttgctataaataatagaagtaatgcggaagtaagtagttttttgctagcccatgatacaattcatggatcgttaaaaaacaaaataagtcattcagcacaatcaattagtgtagatggaaaaaaaattagcatgattcaagaaaatgaaatttcaaatattaactggcaaaaatataaagttgatgttgttctagaatgcactggtaaatttaattcaaaagaaaaatcagcccaacatcttaattctggggtaaaaaaagttttagtttcagcgccatgtaaaggagccaataatattgtttttggagtaaatcataaaagcttaaatgtaaaagatgaagtaatatctgcagcatcttgtaccacaaactgcctagcaccagttgctaaagtcctaaatgataattttgtaattgaaagaggatttatgacaacaatacattcttacacaactgaccaaagattattagataactcacataaggatttaagaagagcacgggctgctgcgaactctatgataccaacaacaactggtgcaacaaaatcattaggtgatataattccacaaattaagaggcaaagta

SEQ ID NO: 215064 - DNA, 745 bp, Unknown
  Bacterial polypeptide expressing nucleotide sequence isolated from the Sargasso Sea
atgatcaaagtcggaataaacggatttggaagaataggaagattaattttaagggctcttctagaaaattataaaggtaaaattcaagttgtcggaattaatgatcttggttcagtcgaagccaatgcacatttaataaaatttgatagtactcatggtactttaactcaagaggttaaaacttcatcagaagggtttcaaattggtgatcaaaaaattaaagtttttgctgaaaaagatcctgctaaacttccatggggtaaaattggtgctgatgttgttttagagtgtacaggtttctttttagataaagcttcagctggaaaacatattgaagctggtgctaaaaaagtaattatttctgctcctgctaaagaggtagattttactgttgttcaaggggttaatagcaaagaattaaaaaaagaacataatataatctcaaatggatcgtgtacaaccaactgtctagctccagtagcgatggttttagaaaatacttttggaattgagtatggctacatgactacaattcatagttatacaggtgatcaaaaattattagatactcttcataaagacctaaggagagccagagcttcaggagacgcaatgataccgacatctactggtgcagcaaaagcaatgagtcttgttttaccaagtttaaaaggaaaattggatggtactgcaataagagttccaactcctaatgtatctttaattgatcttacatttgtgccaa

SEQ ID NO: 215065 - DNA, 677 bp, Unknown
  Bacterial polypeptide expressing nucleotide sequence isolated from the Sargasso Sea
catgcggattggcatcaacggctttggacggattggtcgtctggtgttcagggccctctggggcagacctggcatcgaactggtgcacgtcaatgatcccgcgggcgacgcggccacggcggcccacctgttggagttcgattccgtccacggtcgctgggatcgaagcatcaccagcagcgccgatggattcagcgttgagggatcccagctcacctggtccagtcaaaaggatcccaccgctgtgccctggaccgatcggggtgtggagatggtgctcgaggccagcggcaagatcaagacgccggaaaccctcaatccctatttcgatcagctgggcctcaagcgggtggtggtggcctgtcccgtgaagggtgaggtggctggtgaagaggccctcaacatcgtctacggcatcaaccatcacctgtatgagccggcgcggcacaagttggtgacagccgcttcctgcaccaccaactgcctggcaccggtggtgaaggtggtgcacgagagcttcggcattgagcacggaatgatcaccaccattcacgacatcaccaacacccaggtgccgatcgatgccttcaagagtgatctgcgccgagcccgttccggactcacctcactgatcccaaccaccaccggctcggccaaggcgatcgcgatgattttcc

SEQ ID NO: 215066 - DNA, 830 bp, Unknown
  Bacterial polypeptide expressing nucleotide sequence isolated from the Sargasso Sea
acgcgcactctatacccagaattatcgccagcacctgcaggtcgtagcgatcaacgatctgggcgacagcgcgatcaatgcccacctgttgcaatatgacagcgtccacggccatttccctgaagaagttaaagtggacggcgaaagcctgtggatcaagggtgaccgcatcgccgtcagcgccattcgcaatccggccgagctgccctggaaaactcatcaggtcgatgtggtgctcgaatgcaccgggctgttcactgaacgtgacaaggccgccgcgcacctcgcggccggcgcacgcaaggtgctgatctccgcgcctgccaagggtgccgatgccaccgtagtgtatggcgtcaacgagcaggtactgacgcctgacatgcagatcatctccaacgcctcttgcaccaccaactgcctggcgccggtggcgcaggtgctgcatcgcgaactgggcatcgaacaggggctgatgaccaccattcacgcctataccaacgaccagaacctgtccgacgtttaccacagcgatttgtaccgtgcgcgttcagcgacccagtcgatgatcccgaccaagaccggtgccgccgaagcggtcggtctggtgctgccggagctggccggcaagctcaccggcatggcggttcgggtgccggtgatcaacgtctcgctggtcgacctgacgctgcaggtcaagcgcgagaccactgccgaggaagtcaacgccctgctcaaggccgccagcgagaagtccccggtgctgggctacaacgcgctgccgctggtgtcctgcgacttcaaccacaacccgttgtcatcgatcttcg

SEQ ID NO: 215067 - DNA, 304 bp, Unknown
  Bacterial polypeptide expressing nucleotide sequence isolated from the Sargasso Sea
tatggtaaaaataggaattaatggatttggtagaattggtcgactaatcttaagagctttattagaaaactataagggaaagattcaagtagttggcattaatgatctaggttcgatagagactaacgcacacttaatcaaatatgacagtactcatggcatacttaatcaagatgttaaaacaacaagtgatggttttaaaatcggagatcaaaatataaaagtatttgcggaaaaggacccatcaaaattaccctggggcaaaataggtgctgatgttgttttagaatgtactggctttttt

SEQ ID NO: 215068 - DNA, 708 bp, Unknown
  Bacterial polypeptide expressing nucleotide sequence isolated from the Sargasso Sea
acggagaaaaagcaacagaacatttgaacgctggtgcaaaaaaagttatcatttctgcccctacaaagtctcccgatattaaaactttagttatgggagttaaccacaaaaattatgatcctgataaagacaatattgtttcaaatgcttcttgtacaacaaactgtctagcgcctatcgttaaggtagtcctagaccagtatggagttgaagaaggattgatgacaactgtgcatgctgtgactgcaactcaaccaactttagacgggccatccaaaaaagattggcgaggcggtcgaggaagcaaccagaacattattcctgcctcgactggtgcagcaaaagcggttggactctgcatcccagaaatagcaggtaaactaaccggcatgtcattccgcgtgccaactccaaatgtttctgttgtagatttaacggtaaaactctcaaaatccaccacctatgaagacgttaatgcttctatgaaatccgcatcagaggggagtcttaaaggaattttaggctataccgatgaaaatgttgtctcaagtgatttcataggaagtacttactcttctatatatgatgccggtgcaggaattggactgaatgacaaattttttaaattggtctcatggtatgataatgaaatgggatactcagcccgcttaattgacttagttgagtacatggaaatacgaaactgaa

SEQ ID NO: 215069 - DNA, 748 bp, Unknown
  Bacterial polypeptide expressing nucleotide sequence isolated from the Sargasso Sea
aaggagattaataaaatttcaaacgagcaattttcaatagaagaaaataaagtaactgttacatctgagcgaaacccaattgatttaaagtggagtgacaagaatgtagatattattttagagtgcacaggtgttttcgcatctaaagataaagctatgtcacatgtcgaaagtggtgctagtaaggtcatcgtttcagccccgtgttcaggtgcagatataacaattgttcaaggtgtaaataacaaaaatattaatttagatcaccaagttatatcaaatgcttcgtgtacaactaattgtttggcacctgtggctttcgtaatagatcaggagtttggaattgaaaatggatacatgacaacaattcactcttatacaggagatcaaaatacagttgatacttttcacaaagatcttagacgggctagagcggcagctaacaatattattcctacgagcacaggtgcagcaaaagctgttggtcttgtgcttcctcatttaaaaggaaaattagatggaaccgcaataagagttccaacaccaaatgtctctcttgtagattttaaatttaatacaaaaaaaaatatttcaattgaatctttgaataataaatttcaagaatatgccaataattctcttaaaaatatcttaggagtggatagagatccgaaagtatcaagtgattataatcatgactctagaagttcaattttagatttgagtgaaacgactacagtatctgata

SEQ ID NO: 215070 - DNA, 478 bp, Unknown
  Bacterial polypeptide expressing nucleotide sequence isolated from the Sargasso Sea
atgacagtaaagatagcaatcaatggatatggaagaattggtagaaatgtgatgagagcactttatgaaagtggccgcaccgatgaattacaagttcttgcgatcaatgatttgggtgatgccaacagcaatgctcatttgacaaaatatgatactgctcatggccaatttccatattctgtagaagctcgagatgacgcactcattgtcaatggcgatgagattaaagtttttgctgagagagatcctgaacaattgccttggggcgagcttggtgtcgatgttgtgcttgagtgtactggcttttttgcaaaaaaagagctggcaagcaaacacatcaaagctggagcaaaaaaagttgtgatctctgcacccgctggtactgacatcgatgcaacgattgtatacggagtcaaccatgacaccctttcaaaagatgatgcagtgatttcgaacgcatcttgcacaaccaattgtc

SEQ ID NO: 215071 - DNA, 645 bp, Unknown
  Bacterial polypeptide expressing nucleotide sequence isolated from the Sargasso Sea
tatggtcaaagttggaataaatggttttggaagaatagggcgattaatcttaagagctctattagaaaattataaaggcaaaattcaagttgttggaataaatgatcttggctcaatagagactaacgcacatttaattaaatacgatagtactcacggtattttaaatcacgaagtaaaaacgacaggcgatggttttcaaattggagatcaaaatataaaagtatttgctgagaaagatccagctaaattaccttggggaaaagtcggtgcagatgttgtgttggaatgtactggtttttttctagataaagattcagcaggcaaacatattcaagcaggagctaaaaaagtaataatctcagcgccggcaaaagaagttgattttactttagtgcaaggagttaacagtaaagagctaaagaaagatcatagtattatttctaatggatcttgtactacaaattgtttagcgcctgttgccatggttttagaaaaaacttttggaattacatatgggtatatgacaaccatccacagttatacaggtgatcaaaaacttttagatacattacacaaagatttaagaagggctagggctacagaaggctcaatgataccaacttctactggagctgcaaaagc

SEQ ID NO: 215072 - DNA, 940 bp, Unknown
  Bacterial polypeptide expressing nucleotide sequence isolated from the Sargasso Sea
ctgcattaataatgatgattttaatctagtttcagtaaatgacttactagatattgatcatctcgcctatcttttaaaatatgattctgtgcatggttcttttgatggatctgttgaggtaagcgataataaattaataattaatggaaaacctattaaaattactgctgaaagagatccaaataatattgattggtctggaatgggtgtagaaattgtagctgaatgtaccggtatttttacttcaattgacaaagcatctagtcacataaactcgggtgcaaaaaaagtagtaatatctgctccaagtccagatgctccgatgtttgtaatgggtgttaatcataaagaggtaaaatcctctgacacaattgtatccaatgcatcatgtacaacaaattgtcttgcaccgattgctaaagttcttaatgataactatttaattgaagaaggtctgatgacaacagttcacgccgcaactgctacacaatttacagttgatggtccgtccaaaaaagactttaggggtggtagaagttcattattaaacattattccaagttctactggagctgcaaaagctgttacaaaagtaatcccgtcattagagggtaagcttacaggtatggcatttagaatcccgactgccaatgtatcagtggttgatcttacggttagattaaaaaaagatacatcatatgaagaaataaaaaaagtcatgaaagattcatcaaataatgagctaagtggaattcttggttactgtgatgatcttgttgtctctcaagattttattggagatataagaacttcaatttttgacgctaatgctggtatggaattaaattctaatttcttcaaaattatttcatggtatgataatgaatgtgggtattctaataaactacttgatttatcaaaacatatatattcaatttaa

SEQ ID NO: 215073 - DNA, 815 bp, Unknown
  Bacterial polypeptide expressing nucleotide sequence isolated from the Sargasso Sea
tgcattcactggtgaaactacaactggaagattgatcatgcagtatgctgcacaaaatataattccaattacacttgaattaggtggtaagtctcctaatattttctttgaagacatcatggataaagatgatgatttcttagataagtgtgttgaagggtttgtaatgttcaatttaaaccagggtgaggtttgtacttgtccaagtagagcattagtccaagagtctatttatgataaattcatggaaaaatgtattgctagaacaaaagctgtcatccaagataatccgttaaaaatggagacaatgattggtgcacaagcttcagttgaacaaatggaaaaaatcaaatcatatctagatcttggtaaaaaagagggtgcaaaagttcttgcaggaggagatgttggtaaattaaatagtggcttggaaaaaggaaactatatccaaccaactatttttgaagctgataactcaatgagaatttctcaagaggaaatttttggacctgttgtgtctgtaattaaatttaaagatgaagcagaggcattagaaattgctaatgatacactttatggtttaggtgcaggtgtttggactagaaatggaaacattgcttacagaatgggtagagcaatacaagcaggaatagtatggacaaattgttatcatgcttatccagctcactctccatttggtggttacaaacaatctggagttggaagagaaactcataaaatgatgcttaatcattacagacagaataagaacttacatgtttcttatgctgagcaaaaattaggcttcttttaat

SEQ ID NO: 215074 - DNA, 754 bp, Unknown
  Bacterial polypeptide expressing nucleotide sequence isolated from the Sargasso Sea
agattggggagtagatttggttattgaatctactggagtattttatacagacgtaggtgcaagtaagcacttagaggttggagcaaaaaaagttatcttaactgctcctggtaaaggcgatggcgttggtacttatgttgttggagtcaatgctgatacatataaacataaagattatgatattttgagtaatgctagttgtacaacgaattgtttagctccagtagttaaagttttagaccaaacttttgggattaacaaaggtttgatgactacaattcatagttatacaggggatcaaaggattttagataatagtcatagagatctaagaagggctagagccgctgctacaaacattgttccaacttctacaggagctgcaaaggcagtagctctggtatacccagaaatgaaagggaaattaacaggaattgcgatgagagttccaactcctaacgtttcagcagtagattttgtttttgaatcttctaaatccgtcacaactgaagaagtcaataatgctctaaaggaagcatccctaaactctatgaaaggcattattaagtatggagatgaaccattagtgtcaagcgattatgcaggtacgaatgaatcatcgattgtagatagtgatcttacaatgtgtattggagacaaccttgtaaaggtccttgcatggtacgacaatgagtggggttatagtcagagagttgtagatttagcggagattgttgctaaaaattgggagtaa

SEQ ID NO: 215075 - DNA, 433 bp, Unknown
  Bacterial polypeptide expressing nucleotide sequence isolated from the Sargasso Sea
atgaaaattggaattaatggttttggaagaattggcagattagttttcagagcattatgggatagagctgatatagaaataactcatataaatgagatagcaggagatgcgaatgctgctgcacatctactcgaattcgattcagtccatggcagatgggggaaagatataaaggttaaagaagaagaaataataattgatggaaaggaattaacctacacatcttttaaaaattaccttgatgttccttgggaaaaatcttctgtagatattattttggaatgtacaggaaaaaataaaaagccagacaaactaaatccctattttgattctctagggatgaaaagagtaatagtagcttgtccagtcaaaggaattgttgcaaaagctgaatcacttaatgttgtttatggcataaatcaaagtctttatg

SEQ ID NO: 215076 - DNA, 800 bp, Unknown
  Bacterial polypeptide expressing nucleotide sequence isolated from the Sargasso Sea
ttatcacaatatcaaagtatttgctgaaaaagatccttctaacattccttggagcaaagtcggtgctgatgtggttttagaatgtacaggtatttttttggacaaatcttctgctgagaagcacattaaaggaggagcaaaaaaggtaataatatcagctcctggcaaagaagtagattttactatcgttcaaggagttaatagcaaagaacttaaaaaagaacataatattatttcaaatggttcttgtaccacaaattgtcttgccccagttgctatggtcttagataaaaatttcggtattaattatggttatatgacaacaattcatagctatacgggagaccaaaaacttttagatacattacacaaagatttaagaagagctagatcaacagagggagcgatgatacccacttctactggcgcagctaaagctatgagcttagttatacccagtttaaaaggcaaattagacggcactgctattagagttccaacaccaaacgtctcattaatcgattttactttagttacagaaaaagaagtatcggtagaaactattaatgatgcaatggatcaagcagctaaaggatatttaaaaggaatattaaatattaataaaaaacctttagtatccaaggactttaatcacaacccacacagctcaatttttgacgtaacacaaacccaagtaattaaaggaaaatttagtagagtgctttcctggtatgacaatgaatggggcttttcgaatcgtatgtgtgacaccgctatacaaatttcgaaattaatttaat

SEQ ID NO: 215077 - DNA, 747 bp, Unknown
  Bacterial polypeptide expressing nucleotide sequence isolated from the Sargasso Sea
taggagttgatattgttattgaatccactggtatttttcgtcaaaaatcccagcttgaagatcatcttattgctggagctaaaaaagttgttctcactgttccagcaaaagacgagattgattacactgttgttttaggtgtaaatgatcaaggactaatacctgaacataaaattgtatcgaatgcttcgtgtactaccaactgcctcgctccaatggcaaaggtacttaacgatgagtttggaattgaattaggtgttataaatacaatccacgcatacacaaatgatcaaagactcgctgatgtcccacactcagattggcgaagaagtagagcagctgcggagaatgtaatcccaacaactactggcgcagcaagagcagttggaaaagttttgccagaattaaatgggaaattagatggtatcgctatgcgcgtacctgttccagatgggtcagtcgttgactttaatatccgattaaaaaaagatgtgactgtagatcaaataaatgatgcagtgcgtagtgctgcagataatgggcctttaaaatatgtgctggactattctactctccctgttgtctcaaccgatattattggtaaccctcattcatcaatttttgacgctcctttcactcgtgtagtggaaggcaattttgtcaaaaccttaaactggtatgataatgaatggggttattcaaatagggtggcagatttactatctatattatataagttaggttagt

SEQ ID NO: 215078 - DNA, 274 bp, Unknown
  Bacterial polypeptide expressing nucleotide sequence isolated from the Sargasso Sea
tatggtaaaaattggaattaacggattcggtagaattggtcgattaattttaagagccttattagaaaactttaaaggcaaaattcaagtagttggaataaatgacttaggctctgttgaagctaacgctcatttaataaagtacgatagcactcatggaatattaaataacgatgtaaaaacaactaaagaaggttttcaaattggtgatcaaaatataaaagtttttgctgaacgcgatcccgctaatttgccttggggtaaaataggagct

SEQ ID NO: 215079 - DNA, 778 bp, Unknown
  Bacterial polypeptide expressing nucleotide sequence isolated from the Sargasso Sea
atggcaattagaatagcaattaatggtttcggtcgtattggacgaatggttgtacgtgaggcgaataaaaaccctaatgttgaggtagttgccataaacgacttagtaccatctgacaacttggcgtatttacttaaatatgattccacccatggaagatttaatggcgaagttgtggtaggacaaaacaacatagttataaatggtaagaatattgagtgtctatcagaaaagtctcctaaagatctaccatggggtgacctagaaatagattatgtgattgaatctacaggattatttacagcaggtgaaaaagcatcagagcatttgaaggctggtgcaaaaaaagttatcatttcagcccctacaaaatctcctgaaataaaaactttggttatgggagttaaccacgaaaaatatgacccaaataaagacaatattgtttcaaatgcttcttgtacaacaaattgtctagcgcctatcgtgaaggtggtcctagataagtatggagttgaagaaggattaatgacaactgtgcatgctgtgactgctactcagccaactttagacgggccatccaaaaaagactggcgaggcggtcgcggtagtaaccagaacattatacctgcctcgactggtgcagcaatagcagtgggactctgcattcctgaaatagcaggaaagcttaccggaatgtcattccgcgttccaactccaaatgtttctgttatagatttaacagtaaaactctcaatatctactaactatgaagatataa

SEQ ID NO: 215080 - DNA, 403 bp, Unknown
  Bacterial polypeptide expressing nucleotide sequence isolated from the Sargasso Sea
atgattaaagtaggaattaatggatttggtagaataggaaggcttgttctaagagctatccttgaaaattataagagcaaaattcaagtcgtggctatcaatgatctaggatcaattgagataaatgctcacttaataaaatatgatagtacacatggaacaataaatgaggatatccaaacttcaagtgacggatttaaaatttcaaatcaaaatataaaagtttttggagagagagatccagccaacattccttggggcaaagtaggggcggatattgttttagagtgcacaggtatttttttagataaaaaatcatctgagaaacatataaaagctggagcaaaaaaagtgataatctcggcacctggaaaagaagttgattttacgatcgttcaaggag

SEQ ID NO: 215081 - DNA, 465 bp, Unknown
  Bacterial polypeptide expressing nucleotide sequence isolated from the Sargasso Sea
ccaatgatcaaagattggctgatgtaccgcacagcgattggcgtagaagtagagcagctgcagaaaacattatccccacaacgacaggtgctgcaggggccgtaggaaaagtactgccagaattagaaggaaaattggatggaatagcaatgcgtgtccctgttccagatggttctgtagtggatggagttttcagattaaaaaaagatacaacggtcaaagatataaacgaattggttttggatatctcagaaaaagaatctatgaaaaacgttgttgaatattcaacccttccagtagtatcgacagatattattggcaaccctcattcatcaatctttgatgctccttttacaaaggtgatagatggtagtctagtgaaaactctgaattggtatgataatgaatggggttactctaatcgcgtggcagacttagttaatatattatcaagattcaattagc

SEQ ID NO: 215082 - DNA, 895 bp, Unknown
  Bacterial polypeptide expressing nucleotide sequence isolated from the Sargasso Sea
atgagcatcaaagtaggtatcaacggtttcggtcgtatcggtcgtctcgccctgcgtgcagcctggagctggccagagttcgagttcgtgcagatcaatgacccggcaggtgatgcggcgactcacgcccacctgatcaacttcgactcggtgcatggccgctggaacaacgaagcccgcgccgagggtgatgatgtcgtgattggcggcaagcgcatcaaggtgaccgccaacaaggcgattgctgacaccgattggtcgggctgcgatctggtcatcgaagccagtggcaagatgaagaccgtcgccgtgcttcaagcctacctggatcagggcgtgaagcgtgtggtggtgtgtgcgccggtcaaggagaaaggtgcgctgaacgtcgtcatgggcgtcaaccagcacctgttcgacccggcgcagcaccgcatcgttaccgctgcgtcctgtaccaccaactgcttggccccagtggtcaaagtgattcatgaaaacctgggcattcgccatggttcgatcaccacgattcacgacctgaccaacacccagagcatcctcgatcagccgcacaaggatctgcgtcgtgcgcgtgcctcgggcatgagcctgattccgacgaccacgggttcggccaccgcaattgccgagattttccccgaactgcgcggcaagttgaacggctatgccgtgcgcgtaccgctggccaacgcctcgctcaccgactgtgtgtttgaggtcgaacgcgctactacggcggatgaggtgaatgcgctgcttaaagctgccgccgatggcccgctgaaaaacatcctcggttacgaagtgcgtcccctagtctccatcgactaccgcaccgatccgcgttcttcgatcatcgatgcactgtcga

SEQ ID NO: 215083 - DNA, 304 bp, Unknown
  Bacterial polypeptide expressing nucleotide sequence isolated from the Sargasso Sea
tatggttaaagtaggaataaatggttttggaagaattggcaggcttatattaagggcaattcttgaaaattataaagataagattcaagtagttgcaattaacgatctaggatcaattgaaacaaatgctcacttaataaaatatgatagcacccatggtattatcaatgatgaaattactacatcaaaagatggatttaaaatctctaaccagaatattaaagtcttttcagagagagacccagaaaatattccgtggggaaaagctggagcggatatcatattagaatgtactggaatcttt

SEQ ID NO: 215084 - DNA, 568 bp, Unknown
  Bacterial polypeptide expressing nucleotide sequence isolated from the Sargasso Sea
ccagcatcgaacgcagatctgactatggttttaggagtgaatgaaaatgaatatgacccaaaaaaccataaaatattatccaatgcttcttgtactactaattgcgcagctccactagtaaaagtactacatgataattttggaataaatcagggcttaatgacaacagtacattcctacacaaatgatcaaaaagtccttgatggaaatcataaagatttacgaagagcaagaactgctgctggaaatataattcctacctctactggtgcagcaaaaacatgcgctgttgttatgccagaattacaagggaaggtacatggtgttgcgttacgtgtaccaacacaaacagtttctgtagttgatttcgtagctacattagataaaaaagtaacatctgaagatattaatcaagcttataaaaatgctgctgaaacttccatggaaggaataatagaatattgtgatgaacctttggtatctagtgacttccgaggcagtccttatagttgtatatttgattctttatctacaatggtattaggtaattcaatggttaaaatattag

SEQ ID NO: 215085 - DNA, 612 bp, Unknown
  Bacterial polypeptide expressing nucleotide sequence isolated from the Sargasso Sea
tctatggtgtaaaccataacaaattaacaaaggatcacttaatagtgtctaatgcttcttgtacaactaactgtcttgctccaattgcaatggtaattaatcagggagtaggaatttctcaaggatttatgactactatacattcttacactggtgatcaaccaacattagatactatgcattccgatatgtatagagcaagagccgccgcaggtaatatgataccaacatcaactggagcggcaaaagcagtgggtttagtgctgccagaattaaacggaaagttggatggtgtctcaatgagggtaccaactcaaaatgtatctgttgtcgactttaaatttaatgccgtaaaatccacctcagtagaagagattaataatctaattaaaaaagcttctaataatgaacttaaaaacattcttggatataccgacgagcctcttgtatcgagtgatttcaatcatgattcaagatcatcaatttttcatatggatcaaacaaaagtgatggataactcatttgtaagagttttaagctggtacgataatgaatggggtttttccaataggatgtctgatacagctgtggctatgggcaaaacaatttagt

SEQ ID NO: 215086 - DNA, 542 bp, Unknown
  Bacterial polypeptide expressing nucleotide sequence isolated from the Sargasso Sea
tctagcgcctattgttaaggtagtcctagacaattatggaattgaagaaggtttgatgacaactgtacatgctgtaactgcaactcagccaactttagatgggccatccaaaaaagattggcgaggcggtagagggggccaccagaacattatacctgcctctactggtgcagcaaaagcagttggactctgcatacctgaaatagcagggaaactaaccggtatgtcattccgcgttccaactccaaatgtttctgtagttgatttaacagtaaaactcttaaaatcgaccacctatgaacatgttaattcttctatgaaatcagcatcagaggagggtcttaaaggaattttaggctatactgatgaagatgttgtttcaagtgatttcataggaagtacttactcttccatatatgatgccggtgcaggaattgggctgaatgacaaattttttaaactggtctcatggtatgataatgaaatgggatactcagcccgcttaattgacttagttgagtacatggaaacacaaaactgac

SEQ ID NO: 215087 - DNA, 534 bp, Unknown
  Bacterial polypeptide expressing nucleotide sequence isolated from the Sargasso Sea
aatggttaaagttggtattaatggttttggtagaatagggcgacttatcttaagggctttattagaaaactataaaggtaaaattcaagtagtcggtattaatgatcttggttctatagaagccaacgcccacctaatcaaatttgatagcacacatggaacattaaatcatgatgtaagaataactaaagatggttttcaaataggagatcaaaatatcaaagtttttgctgagagagatccgtccaaattaccttggggaaaaattggagctgatgttgttttagaatgcactggcttttttttagataaaaaatcagctggtaaacacatagaggctggcgctaaaaaagtaattatttctgccccagcaaaggaagtagattttactgtagttcaaggagtaaacagcaaagatttgaaaaaagagcataatgtaatctctaatggctcttgtactacaaactgcttagcgcctgtcgccatggttttagaaaatacttttggtattgaatatggatatatgacaactat

SEQ ID NO: 215088 - DNA, 577 bp, Unknown
  Bacterial polypeptide expressing nucleotide sequence isolated from the Sargasso Sea
aatgggtaatgtagcaataaacggttttggaagaattggacgttctatattaagaataattgttgaaaataattctgatttaaatgttgttgcaattaatgacctcggtaattatgaaaatcttgcatatcttttaaaacatgactctgtaatgggcattttggatagtgatgtaaaagttgatggagacaatcttttagttggagatagagttattaaacttacctcaataaaagatcctgctgaacttccatggaacgaattagatgtggatgttgtaattgaatcaactggaatttttagagataatgaatcccttaataaacacatatctgctggtgctaaaaaagtattacttactgtaccacccaaagatgaaattgacgcaacaatagtgttaggtgtaaatgataacgacttaaagtcagatgataaaattgtctctaatgcatcatgtactacaaactgtttagcaccgatagctaaagtactggatgataattttggaatcaaatctggtcttatgaccacagtacatgcatacactaatgatcaagcattagctgaaacaacacat

SEQ ID NO: 215089 - DNA, 226 bp, Unknown
  Bacterial polypeptide expressing nucleotide sequence isolated from the Sargasso Sea
caaggaggcagctaatggaccaatgaaaggattcttggaatacactgaagaccaagttgtttctaccgactttgtgggagacactcattcctccatctttgatgccaaggctggcatcatgctctccagcacctttgtcaagttggtgtcttggtatgacaatgagtacgggtactccaaccgcgttgtggatctgatcaattacatggctagcaaagatgcctaa

SEQ ID NO: 215090 - DNA, 871 bp, Unknown
  Bacterial polypeptide expressing nucleotide sequence isolated from the Sargasso Sea
tatgactttgcgtgttgcaattaacggctttggcagaattggtcgaaactttatgcgttgttggcttagtagaggggcttacaccaatattgaagtagttggaattaacgttacttcagatcctaagactaatgctcatctactaaaatatgactcagttcttggccaacttgatggtgttgatattcaatatactgatgacacttttgtaattaataacaagacaattaaatgtttttctgatagaaaccctttgaatctcccttggaaagactggggtgtagatttggttattgaatctactggagtatttaatacagatgttggtgcaagtaaacacttagaggttggagcaaaaaaagtcatcttaactgctccaggaaaaggcgatggcgttggtacctatgttgttggagtcaatgctgatacatataaacatcaagattatgatattttgagtaatgctagttgtacaacgaactgtttagctccagtagttaaggttttagatcaaacttttggaataaacaaaggtttaatgactacaattcatagttatacaggggatcaaagaattttagataatagtcatagagatttaagaagggctagagccgctgctacaaatatcgtacctacttctacaggagccgcaaaagcagtagctctggtatacccagaaatgaagggcaaattaacaggaattgcaatgagagttccaactcctaacgtttcagcagtagattttgtttttgaatcttctaaatctgttacaactgaagaagttaataatgctcttaaggaagcatccttaagctcaatgaaaggcattattaagtatggggatgaaccattagtttcaagcgattat

SEQ ID NO: 215091 - DNA, 697 bp, Unknown
  Bacterial polypeptide expressing nucleotide sequence isolated from the Sargasso Sea
atggtaaaaatcggtataaatggtttcggaagaattgggagacttatcctaagagccttattagaaaattataaggataaaatacaagttgttgccataaatgatcttggatcaatcgaaactaatgcgcacctaattaaatatgatagtacgcacggcactttaaatcatgatgtcaaaacatctaaagatggtttcgaaatttcaaaccaaaaaataaaagttttttctgaaaaagaccctggcaaaataccctggggtaaagttaatgcagatgtagttttagaatgtacaggtagatttttagacaaaccttctgcacaaaatcacatcaaaggcggagcaaaaaaagtaatcatttctgctcccgcaaaagaagttgatttaactattgttcaaggggttaacagcaaagaattaaaaaaagaccacaatataatttcaaatggttcttgcaccactaattgtctcgcacctgttgctatggtgttagaaaataattttggaattgagtatggatatatgaccacaattcacagttatacaggtgatcaaaaattattagatacacttcataaagatttaagaagagcaagatcaacagaaggagcaatgataccaacatcaactggtgcagcaaaagcactaagtttagttttgccaagtcttaaaggaaagttagatggaaccgctatta

SEQ ID NO: 215092 - DNA, 508 bp, Unknown
  Bacterial polypeptide expressing nucleotide sequence isolated from the Sargasso Sea
tggcatcaatcaaggttatatgacaacagtacatgcgtttactggcgatcaaagtattttagattctcttcactcagatgagagaagagcgagagcttcttctgtatctatgataccatcatcaacaggtgctgctaaagcggttggattagttttgccggaactacagggtagattagatggtacagctgtcagagttccaactcctaatgtctccatgattgatttggtattcaattctaagaaaaaaatagatgctaatacgataaataatgccatgattaaagcttcgaaaggtgaattgaaaggagttcttggggttgaagacaagccattggtttcaatagattataatcacaatccgttaagttcaatttttgatctttcgcaaacacaagttatcaaaggaagattgggaaggatattaagctggtacgacaatgaatggggttttgccaatagaatgggtgatacagcttctcttattggaaaactcataaaatcataa

SEQ ID NO: 215093 - DNA, 521 bp, Unknown
  Bacterial polypeptide expressing nucleotide sequence isolated from the Sargasso Sea
aatgacggtcaaaatagcaatcaatggatacggtagaatcggcagaaatgttctaagagcactctacgagagtggacgaaccgatgagctacaagtacttgcaatcaatgatttgggcgatgcaaacagcaatgcgcacctaacaaaatacgatacagcacacggaccattcccttattccgttgaagccagagacgatgcactcgttgtcaatggagatgaaattaaggttttcgccgagagagatcctgagcaattgccttggggcgatctcggcgtcgatgttgtgcttgaatgcactggatttttcgcaaaaaaagagttggcaagtaagcacatcaatgcgggtgcaaaaaaggtggtcatctctgccccagcgggaacagacatcgatgcaaccatcgtttacggcgttaaccacgacactctgagcaaagacgatgccgtgatttcaaatgcgtcttgcacaaccaattgccttgcgccactcgtgaagccgattcatgaaagcattggacttg

SEQ ID NO: 215094 - DNA, 874 bp, Unknown
  Bacterial polypeptide expressing nucleotide sequence isolated from the Sargasso Sea
gaaacaaatttgcatctactgaaatatgactcaatacacgggacgttagcagataaaatggaaaaaataaactccgatttatttaaaattaatgaaaaacaaataaaaaaattttcgtccaaagatccgaccgatataccgtggggcgaacttgatattgatttagtacttgagtgtacaggtaagtttaatgataaaaaattatctgttaaacatattaatgctggcgcgaaaaaagtattggtatcggcacctgcaaaaggtgtggatataacagcagtttttggagtaaatcatttagaaatcaaacccgatcacaaggtaatatcaaatgcttcttgtacaacaaatgccctcgccccactggcgatggtgcttaatgatacagtgggaattgatactgcctttatgacaacaatacactcctacactggtgatcaacctacgctggacagaaatcacaaagatttatatcggtcaagatcagctgcgcaatcaattattccaacaacaactggagcggcaatttcagttggtgaggtgatccctcagttgaaaggaaaaatagatggaattgccatgcgggttccaataccaaacgtatctgcgatcgatttaaaatttacaacaaataaagatactagcataaatcagatcaacgaaattcttgttcaagcttcaaaaaatcagttccaaaatattctaaatactacaaatgataagcttgtatccgttgatataaatcacgatagccattcagcagttatcgcattagatcaaactcgggttacaaataaaaaattagtaagggttatggcttggtacgataatgaatggggattttcacaaagaatgtgtgatatggccagacata

SEQ ID NO: 215095 - DNA, 805 bp, Unknown
  Bacterial polypeptide expressing nucleotide sequence isolated from the Sargasso Sea
agatcaattatagagagtaaacgtaaggatataaatgttgttgcaataaacgacttagcgcctgttgatacaaacgcattcttactagcgaatgatacagtgcacggacctttaaacgaaaaaatttctgtaaagaaaaacaaaatgaccattggaaggaaaactatttcagtacttaatgaaagagatccacaaaaacttccatggaaaaaaatgaaaattgacgtagctcttgaatgcactggtttatttacctcgaaagaaaaagcatctatgcatatcaaagctggagcaaaaaaagttcttgtctctgccccctgctctgaagctgacaaaacaatagtatacggggtaaacgaacaagaaataactcgtaatgatctagttgtttcgaacgcatcttgtactacgaactgtttggcgccagtagtcaaagttcttcacgaaaaatttggaattgttcatggatatatgactaccattcatgcatttacaggtgaccaaagtgttttggatacatttcatcctgatttaagaagagctagagctgcgtcaatgtcaatgatacctacatcaacaggcgccgccaaagcagttggcttagtgatgccagaattatcaggaaaactagatggaacggcaattagagtgccaacccccaatgtgtcacttatcgattttaaatttgtatcaaaaaaaacaatgaaagttgatagcgtaaataaagccatgactgctgcgtcacgatccaataagctgaaagacatacttaacgttaactcagaaccactggttcgtcagattt

SEQ ID NO: 215096 - DNA, 574 bp, Unknown
  Bacterial polypeptide expressing nucleotide sequence isolated from the Sargasso Sea
aatgcgtataggtattaatggatttggtaggattggaaggtccgtatttcgcgtattaaacaaccgcgatgatattgatgttgttgctataaatgatatatttgacaaggatgccctcacataccttcttaaatatgatacggtaatgggaagatttcccggtgatatctcgttggactctgatattttgagtgctggaaaccaaaaagttaagctaatagctgagcgtgttccagaaaagcttccatggggagagctaggagttgatatcgtaattgaatcaacagggatatttaggatgaaatcacagcttgagtctcacctaaatgccggtgcaaaaaaagttattctcactgtgcccgcaaaggatgaaattgactatacagttgttcttggagttaatgatgaaggactcaagcctgaacatcgtattgtctccaatgctagttgcacaacaaattgcttagctccaatggcaaaagttttaaatgaaagctttggtatagagctcggtgtaattacacaatacatgcttatacaaatgatcagagactggctgatgtccctcattctg

SEQ ID NO: 215097 - DNA, 688 bp, Unknown
  Bacterial polypeptide expressing nucleotide sequence isolated from the Sargasso Sea
aggagctcacttaagcgcaggcgctaaaaaagtcattatttctgctccggcgaaagatgtggatgcaacagtagtgtacggtgtgaaccacgatgtcattactaaagatatgaccatcatctcaaacgcctcatgcaccaccaactgtttatctcctatcgctaaaccattaaacgatgcgttaggcattgaatctggtttaatgacgactattcatgcgtacaccaacgatcagcgtttaagtgatgtataccacactgacgtgcgtcgtgcccgtgcagctgctatgtcaatgatcccaacacaaactggcgctgccgctgccgtaggtttagtcgtaccagagctgaaaggtaaatttgacggtttagcggtacgagtgccaaccctgaacgtgtcgttagtggatttatcttttattgccggtcgtaacaccacagttgaagaagtcaacgatattatccgtaaagctgcagctcagagtccgatgaatcaggtattagctgtcaacgatttaccattggtgtctgtcgactttaatcacaatccaatgtcctctatttttgacgccagcgaaacccgtgtaaatggtcgtttagtcaaagtcatggcctggtatgacaacgagtggggtttcagcaacagaatgctggacaacactgttgagctgatgaaattttcaaagtaa

SEQ ID NO: 215098 - DNA, 685 bp, Unknown
  Bacterial polypeptide expressing nucleotide sequence isolated from the Sargasso Sea
atgcccacaaaaataggaataaacggtttcggacgaataggaagacaagtattaagagccataagagaacgtcacccaaacacccttgaggtggtggcaattaatgatctgactgatacaaaaacaaatgctcacatgtttaaatatgatactaactatggagtgtctccggaaaccgtcgagtttactgagaattctataattgttggaggatatcccatttcggttctcgctgagcgagacccaagcaatttaccttggggaaaacttggagttgatatagttatcgaatcaaccggattcttcactagtggtgataaagcttccgggcatctaaagggcggagcaaaaaaggtaataatatcagccccagctaaaggcgaagacattactatggtgatgggtgtcaacgaaaatcaataccagccggataaacataatgttttatcaaacgcttcctgtacaacaaattgtatcgcccctatggctaaaatccttgacgatgaattcggcataaaccatggcttgatgagtactatacactcttatactaatgatcaaaaagtcttagatcaggttgcttcggatttacgaagggctcgtgctgctgctatgaacattatacctacctcaactggtgctgctaaagctgttgggttggtcctgccacatctgaatggcaaaa

SEQ ID NO: 215099 - DNA, 736 bp, Unknown
  Bacterial polypeptide expressing nucleotide sequence isolated from the Sargasso Sea
tatgaaaattaaagttggtattaatggaatgggaagaattggaagaatgattgttcgatccataatagaaaacaattattctgactttgatattaaacatataaacaatagaactaatactgaaacctgttcaaatcttttaaaatatgactcaatacatggaaaatttgatgcagatattgaatttgatgaaaataatttgattattgataaaaataaaatttcatttactcaggaaacagatattaataaaattaattggaaacaatttgatgttgattatgtttttgagtgtacaggtaaatttaattctaaagataaattaatacctcatttaaacaatggtgcaaaaaaaattatagtatccgcaccgtgtaaaaatgctgataagacagtggtatttggtgtaaatgaaaataagattaaaaaagaagataacataatttcagcagcatcatgcactacaaattgtcttgcacctgtagcaaatgttctcaataaggaatttgaaattgaaaaaggatttatgacaacaattcatgcatttacaagcgatcagaggattttagataattctcataaggatccaagaagagctagggcagctggccaatctatagtgccaacatctacaggggcatcaaaatcaataggtgagattattcctgaattaaaaggtaaattagaaggtgttgcaatgagagtacccacgcccaacgtttctttaattgagctt

SEQ ID NO: 215100 - DNA, 493 bp, Unknown
  Bacterial polypeptide expressing nucleotide sequence isolated from the Sargasso Sea
tggcgttataaatacgattcatgcctacaccaatgatcaaaggctcgcagatgtgcctcactctgattggaggaggagcagagcagctgctgaaaatgtaatcccaaccacaacaggagcagctcgagccgttggaaaagttttacctgaattgaatgggaaacttgacgggattgcgatgcgcgtacctgtacccgatggatcggttgttgatttcaatgtgcgtttagaaaaagatgtaaccgtagatcaaataaatgatgcggtacatagttctgcagagtcaggccctttgaaaaatgttttagaatattctaccatgcctgtagtctctaccgatataattgggaacccacattcttccatttttgatgctccgtttactcgtgtgatagagggcaattttgtaaaaacattaaactggtatgataatgagtggggctattcaaacagggtagcagatttattgggtaaattatacagcttagattaa

SEQ ID NO: 215101 - DNA, 511 bp, Unknown
  Bacterial polypeptide expressing nucleotide sequence isolated from the Sargasso Sea
aataattctattggaatcaattatggttatatgacaacaattcacgcttatactggagaccaaaatgttcaagataccctccattctgatttgcggagatcaagaagtgctgcccaatcaatgattcctacatcaacaggagctgcaaaagctgtagggttagtattacctgaacttaaaggaaaattagatggaacagctattcgagttccaacagctaatgtgtcacttatcgattttaaatttctagcaaaaaaaaatacgtcagtagatgagataaataaattaattaaaaaagaatcaaatagcaaactcaagggtattcttgaaattaatgataaaccacttgtctcttgtgattttaatcataactcagctagttctatctttgaccttacccaaacacaagtaatggaaaaaagattctgcagagttttatcctggtatgataacgagtgggggttttcaaataggatgcttgatacagcagcggctatgggtaaattataat

SEQ ID NO: 215102 - DNA, 666 bp, Unknown
  Bacterial polypeptide expressing nucleotide sequence isolated from the Sargasso Sea
aaaaagtcatacttactgttcctgcaaaggatcaaattgattatacaattgttcttggagttaacgatgaaggactgaaacccgagcatcgtattgtttccaatgctagttgcaccacaaattgtttagctccaatggcaaaagttttgaatgaaagttttggtatagagcttggtgtaattaatacaatccatgcttatacaaatgatcagagattagcagatgttcctcactctgattggagaagaagtagggcagctgctgagaatgtcattcccacgacgacaggtgctgcaagagcagttggagtagtattgcctgagctaaatggtaaacttgatggtattgctatgagagtacctgtgccagacgggtcggttgtagactttaatgtgcgtattaaaacagatgtcacagttgatcaagttaatgatgcagtcaggtcagcctcagagagtggttctttaaaaaatattcttgaatattctacattaccagttgtctcctctgatatcattggtaatagtcattcctcaatctttgacgcaccttttactagagttgttgagggaaattacatcaaaacactcaattggtacgataatgagtggggctactcaaatcgagtagtagatttagtttcgatgcttggccaagttggctaat

SEQ ID NO: 215103 - DNA, 685 bp, Unknown
  Bacterial polypeptide expressing nucleotide sequence isolated from the Sargasso Sea
tatgagaattgcaataaatggatttggaagaataggaaagctggtatttagagctttcttagaaaaaaaaataaaaaatattgaaattgttgctataaatgaattaggtactattgagtcaagtatacatttattaaaatttgacagcattcatgggatagttccactaaatatttctaaaacaaaaaaaggaataaaagtaggaaataaaaatataaatttttatgcagaaaaagatcctaataaccttccttggaaatcattaaaaatagatgttgttttagagtgtagcggtgttttcacttctaaagaaaaagctatggcacatattaatgctggtgcaaaaaaagtattgatttctgctcctgggacaaatgttgataaaactattgtccaaggagtaaataatattcaactaaacaaaaaacataatataatttcaaatggttcatgtactactaattgtctagctcctttggcaatggttcttaacaaaggcataggaatagaaagtggctttatgactacaattcatagttatactggagatcaaagaactgttgaccaagcacatcaagacctcagaagagctagagctgctgctgaatctatgataccaacttctacaggcgctgcaaaagctttaagtttagttttaccagaacttgaaggcaaacttgatgga

SEQ ID NO: 215104 - DNA, 829 bp, Unknown
  Bacterial polypeptide expressing nucleotide sequence isolated from the Sargasso Sea
atggtaaaagttgctattaatggatttggaagaattggtaaattagtttttagggctataattgaaaaaaatttaaaaaatgtacaaatcgtagctatcaatgaattaggttcattagaatctagtcttcatttagttaattttgatagtacgcatggagaattaaaaacaaaattatataaaaataacagaggtataaaatataataataaaaatattattttttactcagaaagagatccagctaaattaccttggaaaaagttaggtgttgatgttgtattggaatgtagcggggtttttacttctaaggaaaaatctcaatcacatattttagctggtgcaaaaaaagttattatttctgctcctgctcaaaatgtagatgcaacaattgtgcaaggagtaaataacaatatcttaaataagaagcacaatattatctccaatggttcttgtacaacaaattgtttggcacctgtagctatggttttggatgaagcagtaggtatagaagctgggtttatgactactgttcatagttttactggagatcaaagaacgttagatcaaactcatagtgatttaagaagagccagaacagcaactagttcaatgataccaacttctacaggagctgctaaagctctaagtttagttttgccaaaattaaaaggaaagcttgatggaacagcaattaggattcctactcccaatgtttctctaattgacttcacattttcaagtaaaaaaaaggtttcagtagatcttataaatcatgcaatgataaaagcttcgaaaacaaaaaatcttaaagggattttaacagtga

SEQ ID NO: 215105 - DNA, 761 bp, Unknown
  Bacterial polypeptide expressing nucleotide sequence isolated from the Sargasso Sea
attaccatggaaaaagttaggtgttgatgtggtattggaatgtagcggggtttttacttctaaggaaaaatctcactcacatattttagctggtgcaaaaaaagttattatttccgctcctgctaagaacgtagatgcaacaattgttcaaggagtaaataacaatatcttaaacaagaaacacaatattatctccaatggttcttgtaccacaaattgtttggcaccagtggccatggttttagataaagtattaggtatagaagctggttttatgactactgttcatagctttactggagatcaaagaactttagatcaaactcatagtgatatgagaagagccagaactgcaactagttcaatgataccaacttctacaggagctgctaaagctctaagtttagttttaccaaaattaaaaggaaaacttgacggtacagcaattaggattcctacccccaatgtttcgctaattgacttcacattttcaagcaaaaaaaaggcatcagtagatcttataaataattctatgattaaagcttcgaaaacaaaagatcttaaagggattttaacagtgaataatctgcctcttgtttcaatagactttaatcataatccaagtagttcaattttcgatttaacccaaacacaagtcgttagagataaattttgtcgagttttatcttggtatgataacgaatggggtttttcaaacagaatgatagatactttaataagtttaaaaaaatttttataag

SEQ ID NO: 215106 - DNA, 362 bp, Unknown
  Bacterial polypeptide expressing nucleotide sequence isolated from the Sargasso Sea
aaaagccgtaggtaaagttatccctgagcttaatggtaagttaactggtatggctttccgtgtacctacaccaaacgtttcagtagtagaccttactgtaaaccttgcgaagcctgctagctacgatgaaatttgtgcagcaatgaaagaagcttcagaaggcgagcttaaaggtatcatgggttacacagaagatgcggttgtgtctaacgacttccttggcgacgctcgcacatcggtatttgacgccactgcaggtatcgcacttactgatacattcgttaaactcgtttcttggtacgacaacgaatggggctactcaaacaaggttctagaccttgtggctcacatttctaagtaat

SEQ ID NO: 215107 - DNA, 223 bp, Unknown
  Bacterial polypeptide expressing nucleotide sequence isolated from the Sargasso Sea
aatggtcaaaattggaataaacggattcggtagaattggtagacttattttaagagctttattagaaaactataaagataaaattcaagttgttgcgataaatgatcttggttctatcgaaactaatgctcatttagtacaatacgacagtactcatggtattttaaagcatgatgtcaaaatatctaaagatggttttgaaatttcaaatcaaaaaataaaa

SEQ ID NO: 215108 - DNA, 697 bp, Unknown
  Bacterial polypeptide expressing nucleotide sequence isolated from the Sargasso Sea
atgacagttcgaatagcaattaatggttttgggcgtattggaagaatggttgtacgtgaggccagtaaaaattctaatgttgagattgttgccataaacgaccttgtaccttccaacaacctagcatatttgcttaaatatgattccacccatggtaggtttaaaggtgatgttgttgcaggtcaaaatagcataggaataaatggtaaaaatattgaatgcctttcagaaaaaaaacctagtgacctgccatggagtgacttaaacattgattatgtgattgaatctaccggattatttacaacaggtgaaaaagcagcagagcatttgaaagctggagcaaaaaaagttattatttcagcccctacaaagtctccagaaataaaaatgtttgttatgggagttaaccacgaaaagtatgatccaggtaaggataacattgtctctaatgcttcttgtacaacaaattgtctcgcacctatagtaaaggtagtcctagacaaatatggaattgaagaaggattgatgacaactgtacatgctgtgactgcaactcagccaactttagacggtccctccaaaaaagactggcgaggcggtcgtggcgccactcaaaatattatacctgcttcgacaggagcggcaaaagcagttgggatatgtatccctgaaatagcaggaaagcttaccggcatgt

SEQ ID NO: 215109 - DNA, 820 bp, Unknown
  Bacterial polypeptide expressing nucleotide sequence isolated from the Sargasso Sea
atgacagttagagtcggaattaatgggttcggcaggattgggcgtcttgtcctgagagcaggttggaacacgcctgaaatcgatttttgtcatattaatgagataaagggcggggctaagtgtgctgctcatctgcttgaatttgattccgttcaaggccgttttgagcatcatatacatgctcataacgataaaattactctcgatggtcatacaattggattttccgaatttgatacccctgaaggctttgattggggatcaaaaaatattgatatcgtcttagaatgctctggtcaatttcgctctaccaaacagctagaaaaatattttcaacgaaaggtaaacaaagtcattgtagctgcccctgttaaaaccgcaggagccttgaacatagtgtacggaatcaaccataaggaatatgacccagatcgggaccacatcttaactgctgcttcatgcactaccaactgcattgccccgattataaaggttgtgcatgagaactttaagataaaacatgggtcaatcacaactatacacaatgtaactaacacacaggtaatggttgatgctccgcacgcagatcttcgtcgagcccgatcgggattaaattctttaatacctacaacgactggctcggctaccgctatcactctaatttatccagagcttgaaggccgcctggatggacatgctgtccgagtacccactctgaccggttctatgacagattgtgtttttgaaatagaacgagcctcatcagcgagagaaatcaactcctatttcgaggctgcttccaaaaagttacttagagggg

SEQ ID NO: 215110 - DNA, 992 bp, Unknown
  Bacterial polypeptide expressing nucleotide sequence isolated from the Sargasso Sea
atttggaagaataggtagatcaatattaagaattattattgagcaagatattgatataaatattgtagctataaatgatttaggtgattacgaaaatttagcctacttatttaaacatgattcaattatgggtattctgaatgctgatatttcaatacaaaatgacatatttaaaattaatgacagagagattaaacttatttctatttccgatccctctaagttgccttgggatgaattaaatgttgatattgttgttgaatcaacaggtatttttacaaacaaagattctttgaataagcatttaaaagcaggagctaaaaaagttttattaacagtacctcctaaggatgaaattgatgcaacaattgttcttggggttaatgatgaaactcttaataatgattctaagttaatatcaaatgcatcttgtactactaactgtttggctcctatagcaaaggtcctaaatgataatttcacaataatatcaggattaatgactactgtacatgcttatacaaatgatcaagcattagctgaaacaacacacagcgattttaggcgtggtagaaatgctactcaaaatataatccctacatctactggtgctgcaaaagctgtaggtatggtaatgcctgaattagatggcaaattagatggtatggcaatgcgcgtacctgttccaaatggaagtgttgttgacttaatagttgaattagaaaaatcagtaacagtaaatgagattaataaagtagttaaaaaagcttctgaaaatgaactgaaaggtatattaagttactctgatattcccttagtatcaacagatatattaggtaatccaaactcaagcatttatgatgcaacgtcaactgagatattagagaataaacatgtaagagttgtttgttggtatgacaatgaatggggttattcaaatagagttgtagatattgttaaaaaacttataatagaaaatgcaaatggataat

SEQ ID NO: 215111 - DNA, 311 bp, Unknown
  Bacterial polypeptide expressing nucleotide sequence isolated from the Sargasso Sea
aatggtaaaaattggaataaacggatttggtagaattggtaggctaatactaagggctttattagaaaattatggagataaaattaaagtagttgctataaatgatcttggttcaatcgaaactaacgcacatttgataaaatacgacagtacacatggcactttaaatcacgatgtaaagacatctaaagatggttttgaaatttcaaatcaaaaaataaaagtttttgctgaaaaagatcctggcaagataccttggggcaaagtcggtgctgatgttgttttagagtgtactggtagatttttagaca

SEQ ID NO: 215112 - DNA, 195 bp, Unknown
  Bacterial polypeptide expressing nucleotide sequence isolated from the Sargasso Sea
ttaaaggtatcatgggttacacagaagatgcggttgtgtctaacgacttccttggcgacgctcgcacatcggtatttgacgccacagcaggtatcgcacttactgatacattcgttaaactcgtttcttggtacgacaacgaatggggctactcaaacaaggttctagaccttgtggctcatatttctaagtaat

SEQ ID NO: 215113 - DNA, 580 bp, Unknown
  Bacterial polypeptide expressing nucleotide sequence isolated from the Sargasso Sea
gaaaaatgatttaataatttcagctgcatcttgtactaccaactgtcttgcacctatagcttatgttttaaataaggaatttaaaattgaaaaaggttttatgacaacaattcactcatatacttctgaccagagattgttagataattctcataaagatttaagaagagcaagatctgccgcacaatcaatggtcccaacttctacaggtgcttcaaaatctcttggagaaattataccagagttaaaaggaaaaatcgaaggtctagcaataagagtaccaactccaaacgtttcattagtagatttggtattcgattccaaagaaaaaatatctattaaaaaaattaatgattgttttaaaaaagcctcaaaaaaagaattgaaagaaatccttgaagtaacagaggaaaaacttgtttcaattgattttaatcacaatcctaactctgccatagtagatttgtctctaactagtgttattggaaataacatgggtaaggtctcagcatggtatgataatgaatggggatttgcatcaagaatgtgtgatttagcagaatatattcataaaaattaa

SEQ ID NO: 215114 - DNA, 625 bp, Unknown
  Bacterial polypeptide expressing nucleotide sequence isolated from the Sargasso Sea
aatgtctataaaagtcggaattaatggttttggtagaattggaagacaagtgctaagaatttctctagatagatctgacattgaggtagtagcaataaatgatattgcagatttaaaaacttgttttcaactcttaaagtatgattctgtgtttggtcaacttaacagagaggttaatattttagacgatggacttcaagttgatgggaaaaatattaagttcttttcagaaatgtctccaagtgaaattgactggacttctatgaagtgtgacattgttatcgagtcaacaggtatttttactactaaagaaaaagcatcaatgcatattggtggaagcgtaaaaaaagttgttatttctgcgccagctagtggccaaatagatttaacaactgttatgggtgccaatgatgaattatatgatccttcaagtcataatgtagtttctaatgcatcatgcacaacaaattgtttagcaatgattgtaaaagttctaagagataattttggacttaagaatggccatatgacaacagttcattcttacacaaatgatcagaggattgttgattcgcctcacaaagatatcagaaggggcagggcaggagcatttatcatgattcct

SEQ ID NO: 215115 - DNA, 756 bp, Unknown
  Bacterial polypeptide expressing nucleotide sequence isolated from the Sargasso Sea
aatgagaatagcaattaacggttttggtagaattggaaaattagtttttagagcttttctagaaaaaaacttaaaaggtgcagaaatagtagcaataaatgaacttggcagtttagattcaagtttgcacttaatgcaatttgatagtattcatggaaaacttccagttgacataaaaaaaactaaagatggcttaaaacacaaaaataaaacaattaaatttttcagtgaaagagatccagttaatcttccctggaaaaaacttaaagttgatatagttttagaatgtagcggagtttttgctagtaaagaaaaatcaaattctcacattattgcaggagcaaaaaaagtgattatctctgcgcctgcttcaaatgttgatgctacaattgttcaaggtgttaataatcaaatattaactaaaaaacataatattatatcaaatggatcatgtactactaattgtctagctccaattgctatgatccttgataacggagttggtattgaaagtggttttatgactacaattcatagttatacgggtgatcaaagaactgttgatcaaaatcatagcgatctaagaagagcaagaggagcggctatatcaatgattcctacatctactggggctgctaaagctctaagtttagtattgcctaaaatgaaagggaagcttgatggaacagcaataagagttccaacgcctaatgtttcactaattgattttacatttacatctaagaaaaaaacaac

SEQ ID NO: 215116 - DNA, 849 bp, Unknown
  Bacterial polypeptide expressing nucleotide sequence isolated from the Sargasso Sea
ttcctgaaaatgtggagctaaatgatgatatattagcggctggagatcaacaagtaaaattaatctctgagagaatacctgaaaacttaccttggaaagatctaggaattgatattgttgtagaatcaactggtatttttcgtcagcgtgaacaactccaaaaacatctagatgctggttgtaaaaaggtaattttaaccgttccaccaaaggatgaaattgattatatggtagttcttggtgttaatcatgatgggctaaaaaaagagcaccaaattatatcaaatgcaagttgtacaacaaattgtttagccccaatggcaaaagtacttaatgacaattttggaattgaattaggtgttataaatacaattcatgcctatactaatgatcaaaggttagcagatgtcccacactctgattggagaaggagtagagcagcagctgaaaatgttattccaacaacaacaggtgctgcccgagctgtaggtaaagttttacctgagttggatggcaaacttgatgggattgctatgcgtgtaccggtacctgatggttcagttgttgatcttaatgttagattaaaacaagatgtcactattaatatgatcaatgatgcagtattagatgcatcaaatcaagattctatgtcagatgtattagaatattcaaatttaccagtagtttcaactgatattattggaaataaacattcatctatatttgacgcaccatttacaagagttatagataaaacctttgttaaaactctaaattggtatgataatgagtggggttattcaaatagagtagtagatttgatgacagttttaggaaaatttttataat

SEQ ID NO: 215117 - DNA, 679 bp, Unknown
  Bacterial polypeptide expressing nucleotide sequence isolated from the Sargasso Sea
atggcgattcaggtaggcatcaacgggtttggtcggatcgggcgactggtgttcagggcggcaatgggccagggcggtatcgatgtggtggccgtgaacgatctgacggacccgggaacgcttgcgcatctgctgaagtacgactctacgcacggtaagtatcctggtgaggtttccgccggtgacggctcgctggtcgtggacggcaaggagatcaaggttctgtcagagcgcgacccagcttcgctgccgtggggtgacctgggtgcgaagatcgtggtcgagtcgaccgggttctttactgacagggatagcgccggcaagcatctcgaaggtggcgccgaatttgtgatcatctccgcccccgcaacgggcgatttgccgacactcgtgatgggtatcaacgacggcgtcctgacggacgacgacagggtcgtgtccaatgcatcctgcacaacgaactgtctggctccgatggtgaaagtcctgaatgacaacttcggtgtcgagcacggcctgatgacaacgatccacgcctacacgggcgaccagaagatgctcgatgcgccgcacagcgaccttcgtcgtgcgaggtcggcagccgtgtcgatgatcccgacgacgacgggcgcggccagcgcagttgggaaggtgattcctgagctgaacgggaagcttg

SEQ ID NO: 215118 - DNA, 789 bp, Unknown
  Bacterial polypeptide expressing nucleotide sequence isolated from the Sargasso Sea
gaagattgatcatgcagtatgctgcacaaaatataattccaattacacttgaattaggtggtaagtctcctaatattttctttgaagacatcatggataaagatgatgatttcttagataagtgtgttgaagggtttgtaatgttcaatttaaaccagggtgaggtttgtacttgtccaagtagagcattagtccaagagtctatttatgataaattcatggaaaaatgtattgctagaacaaaagctgtcatccaagataatccgttaaaaatggagacaatgattggtgcacaagcttcagttgaacaaatggaaaaaatcaaatcatatctagatcttggtaaaaaagagggtgcaaaagttcttgcaggaggagatgttggtaaattaaatagtggcttggaaaaaggaaactatatccaaccaactatttttgaagctgataactcaatgagaatttctcaagaggaaatttttggacctgttgtgtctgtaattaaatttaaagatgaagcagaggcattagaaattgctaatgatacactttatggtttaggtgcaggtgtttggactagaaatggaaacattgcttacagaatgggtagagcaatacaagcaggaatagtatggacaaattgttatcatgcttatccagctcactctccatttggtggttacaaacaatctggagttggaagagaaactcataaaatgatgcttaatcattacagacagaataagaacttacatgtttcttatgctgagcaaaaattaggcttcttttaat

SEQ ID NO: 215119 - DNA, 802 bp, Unknown
  Bacterial polypeptide expressing nucleotide sequence isolated from the Sargasso Sea
tatggttaaagttggaataaatggatttggaagaataggaagattaattttaagagctcttctagaaaactataaaggtaaaattaatgttgttggaattaatgatcttggttcaatcgaagccaatgcacatttaataaaatttgatagtactcatgggactttgacacaagaagtaaaaacttcatctgatggatttcaaatcggagatcagaatataaaagtttttgcagaaagagatcccgctaaattaccttggggaaaaattggcgcagatgtagttttagagtgtacaggttttttcttggataaaacgttagcaggcaaacatattagtgcaggagcaaaaaaagtaattatttcagcaccagcaaaagaagttgattttactgttgttcaaggtgtaaacagcaaagatttaaaaaaggagcacaatattatctctaatggatcttgtactactaattgtttagctccagtggcaatggtcttagagaacgcatttggaattgaatatggatatatgacaacaattcatagttatactggtgaccaaaaattattagatactctccataaagatttaagaagagcaagggcttcgggtgatgcaatgattcctacttcaacaggagctgctaaagctatgagtttagttttaccaagtcttaaaggcaagttagatggtactgctataagagttcctacaccaaatgtatctttaatagatcttactttcgtacctaaaaaggaggttacagctgaaagtattaatgaagctatgagtaaagcagcaattgga

SEQ ID NO: 215120 - DNA, 548 bp, Unknown
  Bacterial polypeptide expressing nucleotide sequence isolated from the Sargasso Sea
tctgtctgagaccctccctcccctccccctctctcctctcaccaggcccgtccctcgcgcccccgcggcttctttccgcgtctccgcggacgcttcggacgacgtttccgacgtccccaagctccgcgtcggcatcaacggcttcggccgcatcggccgcctggtcatgcgcgcgtgcctcgagcgccccgacgtcgaggtcgtcgccgtcaacgaccccttcgtcgccgccgactacatggcgtacatgttcaagtacgacaccgtccacggcaagttcctcggcgaggccaagacctccgccgccgtggactgcgcgagcggcgaggagtgccccctggaattctccgtgaacggcgcgcccgtggcggtgtttgccgagagggatcccgagaacattccctggggcgacctcggcgtggacttcgtggtcgagtccacgggggttttcacctccaaggagaaggcgcagaagcacatcaaggcgggcgctaagaaggtggtcatctccgcgccctccccggacgcgccgatgttcgtcatgggcg

SEQ ID NO: 215121 - DNA, 817 bp, Unknown
  Bacterial polypeptide expressing nucleotide sequence isolated from the Sargasso Sea
gattgtgattaatggcaaagccattccatgtacccaaaacaaagccactcaagataccgattggtcacactgcgatgtggtgattgaagcgtcgggcaaaattaaaaccaaggctttgttgcaagcatacttagatcaaggtgttaagcgtgttgtggtcaccgcacccgtaaaagaagagggcgtgctcaatattgtgatgggcgtgaacgactatctctatgataaagcgattcacccgattgtgactgcagcgtcttgtaccaccaactgtttagcgccagtggtcaaagtgatccacgaaaaaatcggcattaaacatggttcgatgaccacaatccacgacatcactaacactcaaaccattttagatgcaccgcacaaagatttacgccgcgcacgtgcttgcggcattagtttaattcccaccacaacggggtcagctaccgcgattactcatatttttcctgagcttaaaggtaagctaaatggtcatgctattcgtgtaccgttagccaatgcttcaattaccgattgcgtatttgaagtggcttgcggcaccacagtagaagaagtgaatcaactgcttaagcaagccgcagatactgagcttaaaggcattatgggctacgaagagcgcccgctggtgtcggtggattataaaaccgatccgcgttcaagcattattgatgctttgtcgaccatggtggttaacgacacccaggtgaagctatacgtgtggtacgacaatgaatggggatacgctaaccgtaccgcagagcttgcccgcaaagttggcttagcagataaggaataa

SEQ ID NO: 215122 - DNA, 573 bp, Unknown
  Bacterial polypeptide expressing nucleotide sequence isolated from the Sargasso Sea
ttttagtaatttctgcagcttcctgcactactaattgtcttgcaccaattgcatatgttttaaataaagaatttgagataaaaaaaggttttatgacaacaattcattcatacacaaccgaccaaagattactggataattcccataaagacccgagacgagcaagatctgctggtcaatcaatggtcccaacttcaacaggagcttcaaaagctataggagaaatcataccagaattaaaaggaaagcttgaaggtttggctattagggtgccaactccaaatgtttcgttgatagacctcgtgtttaattcaaaaagtaaactaactgtaaaaaaaattaatgattcttttacaaaagcttcaaaaaaggaattgaaaaatatcctttatgcaactgatgagaagcttgtttcgatcgactttaatcacaaccctaattcttctattgttgatctatctttaactaatgttgttggagatgacatgggtaaagtttcggcatggtatgataatgaatggggatttgcttctagaatgtgtgatttagcagaatatattcataaaatttaat

SEQ ID NO: 215123 - DNA, 850 bp, Unknown
  Bacterial polypeptide expressing nucleotide sequence isolated from the Sargasso Sea
ggtgttgatattcatatactgatgaatacttttgtaattaataacaagacaataaaatgtttctctgatagaaacccattaaatctcccttggaaagactggggtgtagatttggttattgaatctaccggagtatttaatactgatgtaggtgcaagtaagcacttagacgttggagcaaaaaaagtcatcttaactgcccctggaaaaggtgatggcgtgggtacttatgtagttggagttaatgctgataaatataaacataacgattatgatattttgagtaatgctagttgtacaacgaactgtttagctccagtagttaaagttttagaccaaacttttggaattaacaaaggtttgatgactacaattcatagttatacaggggatcaaagaattttagataatagtcatagagatctaagaagggctagagccgctgccacaaacatcgttcctacttctacaggagctgcaaaagcagtagctctggtatatccagaaatgaaaggcaaattaacaggaattgcaatgagagttcccactcctaacgtttcagcagtagattttgtttttgaatcttctaaatctgtcacagttgaagaagtcaataatgctttaaaggaagcatctttaagctcaatgaaaggcattattaagtatggagacgaaccattagtatcaagtgattatgcaggtaccaatgaatcgtcaattgtagatagtgaccttactatgtgtatcggagataaccttgtaaaggttcttgcatggtatgacaatgagtggggttatagtcagagagttgtagatttagctgagattgttgcaaaaaattgggaataat

SEQ ID NO: 215124 - DNA, 445 bp, Unknown
  Bacterial polypeptide expressing nucleotide sequence isolated from the Sargasso Sea
atgaaggttgcgattaatggatttggaaggataggaaaattggttttgagagcttttttagaaaaaaaattaaaaggtgttgatgttgttgctataaatgaacttggcagtttagactcaagtttacatttaataaaatatgacagtactcatggaaggcttccagttgaaataaaaaaaacaaaagatggtttaaaatataaaaataaaaaaattaaattttttagtgaaagagatcccataaatctcccttggaacaaacttaaagttgatgttgttttggaatgtagtggagtcttttcttcaaaagaaaaggctagttatcacataagtgctggtgcaaaaaaagtaattatttctgctcctggctcaaatgttgatgctacaatagtacaaggagttaacaatcatattttaagtaaaaaacatcaaatagtttcaaatg

SEQ ID NO: 215125 - DNA, 694 bp, Unknown
  Bacterial polypeptide expressing nucleotide sequence isolated from the Sargasso Sea
cttcaaaaacacttagatgctggttgttctaaagtaatattaacagttcccccaaaagatgaaattgattatatggttgttcttggtgtcaatgataaaggattaactaaagaacatcaaattatttctaatgcaagttgtacaacaaactgtttagctcctatggctaaggttttaaatgataattttggaattgaattaggtgtgattaatacaatccatgcgtataccaatgatcaaaggttagcagatgttccgcactctgattggcgaagaagtagggctgcagcagagaatgtgattccaacaactactggagctgctcgtgctgttggaaaagtcttaccagagttaaatgggaaattagatggaatagctatgcgtgttccagtacctgatggatcagtagttgatttgaatgtaagattaaagcaagatgtaactattaatatgattaatgaagctgtattagaagcatctaatgatggatccatgtcaaatgtattagaatattcaaatttgccagtagtttcaactgatattattgggaataaacattcatctatttttgatgcaccatttaccagagttattgataataactttgtaaaaaccttgaattggtatgataatgaatggggttattctaatagagttgtcgatttgatggctattttaggtaagctactctaat

SEQ ID NO: 215126 - DNA, 233 bp, Unknown
  Bacterial polypeptide expressing nucleotide sequence isolated from the Sargasso Sea
aatgaccgtgcgggttggtattaacggcttcggccgtatcggcagaaacttctttcgtgcaatccagaaacaaggtgccgacgtagaaattgtggcagtaaatgacctaggcgatcaggccacaatggcccaccttcttaaatatgattcggtacttggaaacctatctaacgacatcgccgccgtggacggtggcatatcgatagacgacaaggtgtttgaaggtcctgtct

SEQ ID NO: 215127 - DNA, 370 bp, Unknown
  Bacterial polypeptide expressing nucleotide sequence isolated from the Sargasso Sea
atgataagagtagcaattaatggttttggaagaatcggaagaaatgtttttaaaatagcattagaaaataaaaatatagaaattgttgcaataaacgatttaactgaaccaaaaacattagcgcatttattgaaatatgactctgtacatggaagatttaatggggaaataaatgctagtgaaaacggaataatcgtaaatggtaaagaaataaaaatatactcaataagaaatccaaaagaactgccatggaaagaattaaatgtagatgttgcaattgaagctacaggtatatttgcatcaggaaaaagtgaaaaaggtggatatctagataatattgatgcaggtgctaaaaaagtaatattaactg

SEQ ID NO: 215128 - DNA, 898 bp, Unknown
  Bacterial polypeptide expressing nucleotide sequence isolated from the Sargasso Sea
acaccagcatcaatcatggttatgatggaacttattggagatttattacctccaggtgtagttaacatcgtaagtggtttcggattagaagcaggaaaacctttggcctcatcaaaaagagtagctaaagttgctttcactggagaaacaacgaccggtagattgataatgcaatatgctgcacaaaacataattccaataactttggaattaggcggaaaatctccaaacattttctttgaagacattatggaaaaagatgatgatttcttagataaatgtgttgaaggttttgtaatgttcaacttaaatcagggtgaagtttgtacctgccctagtagagcattagttcaagaatctatctatgataagttcatggaaagatgtattaaaagaactaaagcagttgttcaagacaatcctttaaaaatggaaactatgatcggagcacaagcctcagtagaacaagtggagaagattaaatcttaccttgatctagggaaaaaagagggtgctaaggttcttactggggggtctcaggctaaattgaatagtggattggaaaaaggaaattatattcaaccaactatctttgaagctaaaaataatatgagaatttctcaagaagaaatttttggaccggttgtatctgttattaaatttaaagatgaagcagacgcgttaaggatcgcgaatgatactctttatggtttaggcgcaggcgtttggactcgaaatggtaatatcgcttatagaatgggaagagcgatacaagcaggtatagtgtggacaaattgttaccacgcttatccagcacattcaccatttggtggttataaacagtctggtgtaggtagggagactcacaaaatgatgcttaatcattatagacagaata

SEQ ID NO: 215129 - DNA, 745 bp, Unknown
  Bacterial polypeptide expressing nucleotide sequence isolated from the Sargasso Sea
ggttgctgagataagcaattctcaatactcttataatattcctgagccacttggtgtagttggccaaatagttccttggaactttccgttactgatggcaacttggaaattagctccagcacttgcagcaggtaactgttcagttcttaaaccagcagaacaaacaccagcctctattatggtaatgatggaattaattggtgatttattacctcctggagttgttaatattgtaagtggttttggattagaagcaggtaaaccattagcatcatctaaaagagttgctaaagttgcttttacaggtgaaacaactactggaagattgatcatgcagtatgctgctcaaaatataattcctataactttggaattaggtggaaaatcaccaaacattttctttgaagatatcatggataaagatgatgactttttagataaatgtgttgaaggttttgtaatgtttaatctaaaccaaggtgaagtttgtacttgtcctagtagagcattagttcaagaatctatctacgataaattcatggaaaaatgtattgctagaacaaaggcagttgtgcaagacaatcctttgaaaatggaaacaatgattggtgcacaagcttccatagaacagatggagaaaataaaatcttatctagatcttggaaaaaaagaaggtgctaaagtccttgcaggtggaaatacagctaaattaaatagtggtcttgaaaaaggaaattatattgag

SEQ ID NO: 215130 - DNA, 499 bp, Unknown
  Bacterial polypeptide expressing nucleotide sequence isolated from the Sargasso Sea
atgacagtaaagatagcaatcaatggatacggaagaattggtagaaatgtgatgagagcactttatgaaagtggccgcaccgatgaattacaagttcttgcaatcaatgatttgggtgatgccaacagcaatgcccatttgacaaaatatgacactgctcatggccaatttccatattctgtagaagctcgagatgacgcactcattgtcaatggcgatgagattaaagtttttgctgagagagatcctgaacaattgccttggggcgagcttggtgtcgatgttgtgcttgagtgtactggcttttttgcaaaaaaagagctggcaagcaaacacatcaaagctggagcaaaaaaagttgtgatctctgcgcccgctggcactgacatcgatgcaacgattgtatacggagtcaaccatgacaccctctcaaaagatgatgcagtgatttcgaacgcatcttgcacaaccaattgtctttgctcccactgtcaaaccc

SEQ ID NO: 215131 - DNA, 466 bp, Unknown
  Bacterial polypeptide expressing nucleotide sequence isolated from the Sargasso Sea
actgggtgatcaaaggactgttgatcaaacgcatagtgactttagaagagcaagaggtgcagcaatatcaatgatacctacatctactggggcagcaaaagctttgagcttagttcttccaaagcttaaaggcaaacttgatggaactgcaatcagagttcctactcccaatgtatcattaattgatttaacattcacctccaagaaaaaaacttctgttgaagaaatcaataaattaatgattcaagctagcaaaacaaaaaatctaaaaaatattttaacaactaatgaactcccattagtttcaattgattttaatcataactctagcagttcagtatttgacttgactcaaacgcaagtcctgaatggtaaattttgcagagtattatcttggtatgataatgaatggggtttttcaaacagaatgatagatactatgcttgattttaaaaaactattatag

SEQ ID NO: 215132 - DNA, 601 bp, Unknown
  Bacterial polypeptide expressing nucleotide sequence isolated from the Sargasso Sea
atgaccatcaccgtcggtatcaacggatttggccgcattggccgctgcaccctcgcccatatcgcccaaagcgggcgcaacgacgtgcaagtggtcaaagtgaacgccactggcccgctggaaaccgccgcgcatctgatgcgctacgacagcgtgcatggccggttcggacacgacatcaagatcggcgaaggtacgatggatttgggtcgcggtccgatgcaaatgttttccacctacgacatggacgaattggattggtcggggtgcgacgtggtcatggaatgcaccggcaatttcaacgatggcctgaaagcaaacaaacacttcgaacgcggtgccaaaaaggttctgctctccgcccccgggaaaaacgtcgataaaaccatcgtctacggtgtgaaccaccgcgatttggcggccaatgacaatatggtgtcgaacgggtcttgcaccaccaattgcctcgcgcctctggccaaggtgctcaacgatgcgattggcatcgaaagcggcatcatgaccacgattcacagctataccggcgatcaaccgacgctcgaccgtcgccataacgatctttatcgtgcccgcgccgccg

SEQ ID NO: 215133 - DNA, 687 bp, Unknown
  Bacterial polypeptide expressing nucleotide sequence isolated from the Sargasso Sea
accatatttttagtgctggtgtaaaaaaggtaattatcagcgcaccagtcaaagataaagatgcactgaacctagtttatggaataaatcatgatttgtacgacggatctcaaaatctaattactgctgcctcatgcactacaaattgtctagcacccattgtaaaagttattcatgaaaatttaggtatcaaacatggatcaataacgaccattcatgatgtcactaacacgcaaactatagttgaccgaccgtccaaggacatgagaagagccagatcagcactcaataatttgataccaacgacaaccggatccgcaaaagcaattacaatgatctatccggagttaaagggtaaactaaatgggcatgctgtacgtgtgccactgttaaatgcatcacttactgactgtgtctttgaggtggagcgcgcaacctcagcaaaggaagtgaatgctctttttgaagaagcctccaataagtctcttaaaggtattcttggcttcgaaaaacgtccgcttgtttccagcgactatacgaacgacccacgatcatcgattgtggatgggttatcaacgatggtcgttaacaaaactcaagtaaaagtctatgcttggtatgataacgagtggggatactcatgtagactaggcgacatcacccgcatggtagcaggctcactttgaa

SEQ ID NO: 215134 - DNA, 850 bp, Unknown
  Bacterial polypeptide expressing nucleotide sequence isolated from the Sargasso Sea
aatgaatgttgcaattaatggttttggaaggataggacgctcagtatttagaattcttaattcacaaaaaaacattgacgtggtagctattaacgatattgctgacaatgaagcaatggcttatttgctcaaatatgatacggtaatgggcccctttaaagactctgtagaaataaatggtgacatactaaaaacatcttacaatgaaattaaaatgctagctgaaaaagaacccagtcatttaccttggaatgagatggaagtagatgtagtaatagagtcaactggaatatttcgaaccaaaaaacaactagatgatcatataaaggctggagcgaaaagagtggtgttaaccgttccagcgaaagatgaaattgactatactttagtcattggagttaatgacaaaggacttaacgatagccataaaataatttctaatgcaagctgcacaacaaattgccttgctccaatggcaaaaattttaaatgataactttggaattgaacatggagtaattaatacaatccatgcctacacgaatgatcagcgtcttgccgatgtgccacattcagactggagaagaagtagagcagctgctgaaaatataataccaaccactactggcgctgcgcgcgctgtaggcaaagttctcccagagctaaacgggaaacttgatggaattgctatgagagtgcctgttccagatggatcggttgttgatagtgtttttaaattagaaaaaagcgttacaattgacgaaattaataatgtcgtaaaggctgcagcggatgcagaggatatgaaaagcgtggtagaatattcaaacctcccggtagtatccacagat

SEQ ID NO: 215135 - DNA, 430 bp, Unknown
  Bacterial polypeptide expressing nucleotide sequence isolated from the Sargasso Sea
tgactttagaagggcaagaacagcttctgtttctatgattcctacttctactggagcggcaaaagcgctgggtttggttttgccaaaattaaaaggaaagctcgatggttcagcaataagagttcccactccaaatgtttctctaatagattttaaatttataagcaaaaaaaccacttccattgaaaatattaacaaggaaatgatttctgcttcaaaaaataaaaacttaaaaggaatattaactgtaaataagcagcctcttgtttcaatagattttaatcataattcaagtagttctatatttgacttaacacaaactaaagttctaaataataaattttgccgcatcttgtcttggtatgataatgaatggggtttttctaaccgaatgattgaaactttgttaaatttaaaaaaatttatttaa

SEQ ID NO: 215136 - DNA, 460 bp, Unknown
  Bacterial polypeptide expressing nucleotide sequence isolated from the Sargasso Sea
atgagaatagcaataaatggcttcggcagaattggaaagttagtactaagagcctttttagaaaaaaaatttcaaaatgttaatattgtagctataaatgaattaggtagtttagattccagtattcatttgttgaaatatgatagtgtacatggaaaaataccttcaaaaattttaaaaacaaaaaatggtataaaaattggaggaaataatattaatttttattctgagaaagatcctaataatcttccctggaaatcattaaaggtagatgtagtcttagaatgtagtggtgtttttacttctaaggaaaaggctatggctcacattaatgcaggtgcaaaaaaagtcataatttctgcccctgcgataaacgtcgataaaacaattgtacaaggagtaaataatcagcagttaacaaaaaaacataatattatctcaaatggatcatgtaccacta

SEQ ID NO: 215137 - DNA, 358 bp, Unknown
  Bacterial polypeptide expressing nucleotide sequence isolated from the Sargasso Sea
aatggtcaaagtaggaattaatggatttggtagaatagggcggcttatcttaagggctttattagaaaactataaaggtaaaattcaagtagtcggtattaatgatcttggttctatagaagctaacgctcacttaatcaaatttgacagcacacatggtacattaaatcatgatgtaaagacaactaaagatggttttcaaataggagatcaaaatatcaaagtttttgctgagagagatccgtccaaattaccttggggaaaaattggagctgatgttattttagaatgcactggtttttttttagataaaaaatcagctggtaaacacatagaggctggcgctaaaaaagtaatt

SEQ ID NO: 215138 - DNA, 471 bp, Unknown
  Bacterial polypeptide expressing nucleotide sequence isolated from the Sargasso Sea
tatggttaaagtaggaataaatggttttggtagaataggtcgactaatattaagggctatacttgaaaattataaagataagatacaagtcgttgcaattaatgatttaggttcaatcgagaccaatgctcacttaattaaatatgatagtacccatggtataattaatgatgaaattattacttcaaaagatggatttaaaatttcaaatcaaaatataaaagttttttccgaaagagacccagaaaatattccgtggggaaaagctggagcagatatagttttagaatgcaccggaattttccttgataaaaaaacttcggaaaaacatcttaaaggtggagcaaaaaaagttattatatcagcaccaggaaaagaagttgattttactatcgttcaaggtgtgaatagcaaagaattaaaaaaagaccataatataatttcgaatggttcttgtactacaaattgttt

SEQ ID NO: 215139 - DNA, 593 bp, Unknown
  Bacterial polypeptide expressing nucleotide sequence isolated from the Sargasso Sea
aatgactgtaagaatagcaattaatggttttggacgtattggaagaatggttatacgagaggcaaataaaaaacctaattttgagattgttgcaattaacgacctggtaccatcagaaaatctagcctatttgcttaaatatgactcaacccacggaagatttaatggtgaagttgttacaggacaaaacagcatagtaatcaatggtaaaaaaattgtgtgtctttcagaaaaaaatcctggaaacctcccatggaatgacctagaaattgattatgttattgaatctacaggattatttacagctagtgaaaaagcatccgaacatttaaaagctggagcaaaaaaagttgtcatttcagccccaaccaaatctcctgagataaaaactttggtcatgggagttaatcacaaaatatatgatcccagtatagacaatattgtttcaaatgcttcttgcacaacaaattgcttggctcctgttgttaaggtgatcttggaaaaatatggaattgaagaaggattgatgacaactgtgcatgcagtaaccgcaactcaaccaactttagatggtccctccaaaaaggactggc

SEQ ID NO: 215140 - DNA, 950 bp, Unknown
  Bacterial polypeptide expressing nucleotide sequence isolated from the Sargasso Sea
gggtagaattggtagaatgattgttcgttcaatttttgaaaattataataaaaaaatacaaataaaacatattaataataaatcaaatatagaaatatgtgcaaatttattaaaaaatgattctatacatggtaaattcaatgcagaagtaaagactcacaaaaatattttaaaaataaataaagattttgtatcttattcacaacatgctaatattgaaaatatagattggaaacagtatgatgtagactacgtttttgaatgtactggaagatttaattctaaagatcaattactaccacacataatcaatggtgcaaaaaaagttatagtatcagcaccatgtaaaaaagccgataaaactgtggtatatggtgtaaatcaaaacataataaaaaaaaatgataaaataatatcggctgcttcatgcaccacaaattgcttagcccctgtagctgatgttattaacaaaaattttacaattttgaatggttttatgacaactatccatgcatatacaagcgatcaaagaatcctagataattctcataaagatttaagaagagcaagagcagcaagtcaatcaatagttccgacttctacaggggcatcaaaagctattggagaaataataccttcattaaaaggaaggttagagggaattgcaatgagagtgcctacaccaaatgtatcattagttgaatttgtgtttaatgtaaaaaagaatatctccgttggaaagttgaatgattcattttccaaagcatctaataagtatcttaagaatattttagaaatcacaaaagaagaattggtctcgattgattttaatcataataaagcatcagcaataatagattcatctttaactaacattataggaaataaaatgggtaaaatttctgcttggtatgataatgagtggggtttttcaaacagaatgtgtgata

SEQ ID NO: 215141 - DNA, 473 bp, Unknown
  Bacterial polypeptide expressing nucleotide sequence isolated from the Sargasso Sea
aatgacagtaaagatagcaatcaatggatatggaagaattggtagaaatgtgatgagagcactttatgaaagtggccgcaccgatgaattacaagttcttgcgatcaatgatttgggtgatgccaacagcaatgcccatttaacaaaatatgatactgctcatggccaatttccatattctgtagaagctcgagatgacgcactcattgtcaatggcgatgagattaaagtttttgctgagagagatcctgaacaattgccttggggcgagcttggtgtcgatgttgtgcttgagtgtactggcttttttgcaaaaaaagagctggcaagcaaacacatcaaagctggagcaaaaaaagttgtgatctctgcacccgctggcactgacatcgatgcaacgattgtatacggagtcaaccatgacaccctttcaaaagatgatgcagtgatttcgaacgcatcttgcacaacca

SEQ ID NO: 215142 - DNA, 641 bp, Unknown
  Bacterial polypeptide expressing nucleotide sequence isolated from the Sargasso Sea
tatgacaataaatgtagcgataaatggatttggaagaattggcagaaatgtctttagagctaattatgagagtgggtacaacagtgaaataaatatagtagctattaatgatttaggtgatactaaaattaatgcacatcttctaaagtatgacactgctcatggaccattcggcaaaagtgttgaaattaaagaaaatacaattattattgatggtaaagatgaggtattagtattaagtgaaagagatccatcaaaattaccctggaaagatttaaatatagatgttgttatggagtgtacagggtttttcgcatcaaaagaaaaatcaatgagccatattaatgcaggggctaaaaaagtactcatatcagcgccagctgcagatgtagatgctacaattgtttatggtgtaaatcattctatcctaaatgaaactcataaaattatttcaaatgcatcatgcacaacaaattgtctagcaccattgattaagaatattcatgaagaattgactgtagaaagcggtataatgacgacgatccattcttataccaacgaccaagtcttaaccgatgtttatcattctgacttgagaagagcaagatctgcaactcagtctatgatacctgcaaaaacag

SEQ ID NO: 215143 - DNA, 763 bp, Unknown
  Bacterial polypeptide expressing nucleotide sequence isolated from the Sargasso Sea
cagcaatcatgaaataaaagtttttgcagaaaaggatccagctaacattccttggggaaaagtaggagctgatgtagttttagagtgtactggtatatttttagataagtcatcagcagaaaaacacataaaaggtggagcaaaaaaagtaataatttctgctcctggaaaagaagtagattttacaattgttcaaggtgttaatagcaaagagttaaaaaaagagcacaatattatttctaacgggtcatgtacaacaaactgcttagcgccagttgcaatggttttagaaaaaacttttggaattagttatggttatatgactactatacatagttacacaggtgatcaaaaattgttagatacattgcataaagatttaagaagagctagatctacagaaggagcaatgatacctacttctacaggtgcagctaaagctatgagtttagtcctgccaagcctaaaaggtaaattagatggcacagctatcagagtcccaactccaaatgtttctttgattgacctaacacttgtgactgaaaaagaggcaactcctgaaattattaatgagtcaatgattaaagctgcaaaagatgaattaaaaggtatattggatgttaatcaaaaacctcttgtctcaaaagattttaatcataatcctcatagttcaatttttgatgtaactcaaacacaagtcataaaaggaaagtttagcagagttttatcttggtacgataacgagtggggtttctccaataga

SEQ ID NO: 215144 - DNA, 496 bp, Unknown
  Bacterial polypeptide expressing nucleotide sequence isolated from the Sargasso Sea
atggtgaaaattggaataaacggcttcggaaggatcggaaggctaattttaagggctatactagaaaattacaaagaaaaaattcaagttgtaggaataaacgatctaggttcaatagagacgaatgctcatttaataaagtatgatagtacacacggcatattaaatcaggatgttaaaactacaaaagaaggttttcaaattggggatcaaaatatcaaggtatttggcgagagagacccagctaaattaaattggaaaaaagtaggtgcagatgtagtccttgagtgtactggtttttttttagataaagcttctgcaggcaaacacattgatgctggagctaaaaaagtaataatttctgcaccagcaaaagaagttgattttactctagttcagggagttaatagcaaagagttaaacaaaaatcacagcattatttcaaatgggtcttgcactactaattgtttagcccccagtcgcccatggttttaga

SEQ ID NO: 215145 - DNA, 511 bp, Unknown
  Bacterial polypeptide expressing nucleotide sequence isolated from the Sargasso Sea
aacaatttcggcattgagtatggatacatgactactatacacagctataccggtgaccaaaaattattagacacacttcataaagatttaagaagagcaagatctacagaaggagcgatgataccaacatcaacaggagcggctaaagcattaagcttggtgttacctagtttaaaaggaaagctagacggaactgcgattagagttccaactcccaatgtttcgttaattgattttacagttgtcacaaaaaaagaagtttcagttgatacaattaatgatgccatgacaaaagcatctcaaaatagtttgaaaggtatactcggaataaataaaaaacctcttgtttcaaaagacttcaatcatgatccacatagttcaatttttgacgtgactcaaacacaagtaatcaaaggtaaatttagtagagtattatcttggtatgataacgaatggggtttctctaataggatgtgtgatacttctattcaaatatcgaaactaatttaat

SEQ ID NO: 215146 - DNA, 922 bp, Unknown
  Bacterial polypeptide expressing nucleotide sequence isolated from the Sargasso Sea
attgagtacacaacaaaaatcaagctcaaagttatcttcacaattagatacttctcacttaaaagtgaaatttccgtttaaagcaaaatatggaaattatattaatgggaaatttgtagaaccaaaatctggaaagtattttgataatacaactccaattacaaatgaagtaatctgttcagttccacgttcaaatgagaaagatgtagagtcagcattagatgcagctcacgcagcttttgtcgattggggtaaaactgatatcactacaagatcaaatatcttgatgaaaattgctgatagaattgagcaaaatctaaatatgttagcagtagcggaatgtttggacaatggtaaaccaataagagaatgcatggctgcagacttgccgttggttattgatcattggcgatattttgctggtgtaataagagctgaggaagggtcagttgctgaaataagtaactctcaatactcttacaacatccctgaacctttaggagtagtaggtcaaataattccatggaattttccattactaatggctacatggaaattagcacctgctcttgcagcaggaaactgtgttgtattaaaacctgcggaacaaacacctgcttctatcatggtaatgatggaattaattggtgatttacttcctccaggggttgttaatttagtaagtggttatggtttagaagcaggtaaacctttagcatcttcaaaaagaatagctaaaatggctttcactggtgaaacaactactggaagattaataatgcagtatgcagctcaaaacattattccaattacacttgagttaggtggaaaatcaccaaacattttctttgaagacgttatggcaaaagatgacgattttttagataagtgtgtagagggatttgttatgtttaatcttaat

SEQ ID NO: 215147 - DNA, 385 bp, Unknown
  Bacterial polypeptide expressing nucleotide sequence isolated from the Sargasso Sea
acatcaacaggagctgcaaaagcaatgagtttagttttacctagtcttaaaggaaaacttgatggcacggccataagagttccaactccaaatgtctctttaattgattttacattagttacaaaaaaagatgttactgttgatagtataaatgatgctatgacaaaagctgctaatggtgagttaaaaggtattcttggaattaataaacagccattagtttcaaaagattttaatcacgatgcacacagttcaatatttgacgttacccaaactcaagttgtcaaaaataaatttagcagagtactatcttggtatgataatgaatggggtttttcaaatcgtatgtgtgatacatcaatacaaatatcaaaacttatttaat

SEQ ID NO: 215148 - DNA, 412 bp, Unknown
  Bacterial polypeptide expressing nucleotide sequence isolated from the Sargasso Sea
gatgaaaattggaattaatggttttggaagaattggtagattagttttcagagcattatgggatagagctgatatagaaataactcacattaatgagatagcaggagattcgaatgccgctgcgcatctactagaattcgattcagtccatggtagatgggtgaaagatataaaggttaaagaagaagaaataataattgatggaaagaaattaacctacacatcttttaaaaattaccttgatgttccttgggaaaaatcttctgtagatattattttggaatgtacaggaaagaataaaaagccagacaaactaaatccctattttgatactcttgggatgaaaagagtaatagtagcttgtccagtcaaaggaattgttgcagaagctgaatcactgaatattgtttac

SEQ ID NO: 215149 - DNA, 927 bp, Unknown
  Bacterial polypeptide expressing nucleotide sequence isolated from the Sargasso Sea
ttggcagaattggtcgaaactttatgcgttgttggcttagtagaggggcttacaccaatattgaagtagttggaattaacgttacctcagatcctaagactaatgctcatctattaaagtatgactcagttcttggtcaacttgatggtgttgatattcaatatactgatgatacttttgtaattaataacaagactattaaatgtttctctgatagaaacccattgaatctaccttggaaagactggggtgtcgatttggttattgaatctaccggagtatttaacacagacgtaggtgcaagtaagcatttagatgtaggagcaaaaaaagtcatcttaactgctcctggtaaaggtgatggcgttggtacttatgtcgttggagtaaatgctgataaatataaacataaagattatgatattttgagtaatgctagttgtacaacgaactgtttagctccagtagttaaagttttagatcaaacttttggaattaataaaggtttgatgactacaattcatagttatacaggtgatcaaagaatattagataatagtcatagagatctaagaagggctagagcagctgctacaaatatcgttcctacttctacaggagctgcaaaagcagttgctcttgtctacccagaaatgaaaggcaaattaacaggaatcgcgatgagagttccaactcctaacgtttcagcagtagattttgtttttgaatcttctaaatctgtcacagcggaagaagtcaataatgctctcaaggaatcatctctaagctcaatgaaaggcattattaagtatggagatgaaccattagtgtcaagcgattatgcaggtaccaatgaatcatcaattgttgatagtgatcttactatgtgtatcggagataatcttgtaaaggtgctcgcatggtaga

SEQ ID NO: 215150 - DNA, 607 bp, Unknown
  Bacterial polypeptide expressing nucleotide sequence isolated from the Sargasso Sea
atggctattaaagttgcaattaacggatttggaagaattggaagatgtgtagcaagaatcattgaaaaaagagatgatgtagagcttgttgctattaatgacaccgcaactgacgagatgttagaatatattacaaagtatgatactgttcatggaacttttgatggtgaagtaaaagttgaaaatggttatttaaaaatgggaagtgtgaatgcaaagctttactctacaagagatgctgcgcaattaacttttactaaagagtgcggggctgaagttattttagagtgtacaggagcttatttgactcaagaaaaatgtcaagtacacttggataatggagcaaaaaaagtagtaatgtctgcaccagcaaaagatgataccccaacatttgtaatgggtgtgaatgagtctgaatatgcagggcaagctattatttcaaatgcttcttgtactacgaactgtttgggaccagtagctaaaattattgatgatgcttttggtatagaaaaaggtttaatgaccactattcactcatataccaatgaccaaaatatcttggatgtaaaacaccaaaaagataaaagaagagcacgagctggggcac

SEQ ID NO: 215151 - DNA, 334 bp, Unknown
  Bacterial polypeptide expressing nucleotide sequence isolated from the Sargasso Sea
atgttaaaaattggtataaatggatttggtagaattggaagaatggttttaagggcagccctaaatagaaatgatgtacaagttgttgcaattaatgatcttttagatgttaatcacctagcttatctgctaaaatatgattctgtacatggggtttgtaaagctgaaattaaggtttctaatggaaatttagttgttaacaacaatgaaatatccatttctgctgagagagatccgtctttgataaattgggaaaaccgtggagtcgaaatagctttagaatgtactgggatttttacaagcctagaaaaagcgaatttacatattgaaggtg

SEQ ID NO: 215152 - DNA, 529 bp, Unknown
  Bacterial polypeptide expressing nucleotide sequence isolated from the Sargasso Sea
atggttaaagttggaataaatggttttggaagaatagggcgattaatcctaagagctctattagaaaattataaaggtagaattcaagttgttggcataaatgatcttggctcaatagagaccaacgcacatttaattaaatacgatagtactcacggtattttaaatcacgatgtaaaaacgacaggtgacggttttcaaattggagatcaaaatataaaagtgtttgctgaaagagacccagctaagttaccttggggaaaagttggcgcagatgttgtgttggaatgtactggtttttttttagataaagattcagccggcaaacatattcaagcaggagctaaaaaagtaataatttcagcaccagcaaaagaagttgattttactttagtgcaaggagttaacagcaaagggttaaagaaagatcataatattatttccaatggttcttgtaccacaaattgtttagcccctgttgctatggttttagaaaaaacttttggaattacatatggttatatgacaa

SEQ ID NO: 215153 - DNA, 353 bp, Unknown
  Bacterial polypeptide expressing nucleotide sequence isolated from the Sargasso Sea
ccatggagcaatctaaatgttgatgtagtttatgaatgcacaggaatatttgtatcgaaagaaaaagctggcggacatataaaagcaggggccagcaaagttattatatctgctccaggaaaagaagttgaaaacacggttgtcttcggtgtaaatcatgagacattgaccagtaagcaagaagtcatttcaaatgcctcttgtacgacaaactgtctcgctacagtgattaaaaatattcataagaatctagaaataacaaatggcctaatgacaacgatccattcatatactaacgatcaagtcttaacagatgtctaccattcagatttaaaacgagcacgctcagctac

SEQ ID NO: 215154 - DNA, 557 bp, Unknown
  Bacterial polypeptide expressing nucleotide sequence isolated from the Sargasso Sea
atcatgtactactaattgtcttgccccaatagcaaaagttcttgatgataactttggaattgaagaaggattaatgacaactgtgcatgctgcaactgccacccaatttacagttgatggaccctcaaaaaaggattttagaggaggtagaagcactcttctaaatataataccaagttcaacaggagcagcaaaagctgttacaaaagttattccttctttggaaggtaaacttaccgggatggcctttagaattcctactgctaatgtttcagttgttgatctaacagtcagattagttaagaagacctcatacgaaaaaataaagagggtaatgaaagaatcatctgaaaatgaattaagtggaatacttggttactgtgatgagttagttgtttcgcaagacttcattggtgataaaagaacatcaatatttgatgctaatgcgggaatggaattaaattctaattttttcaagataatctcttggtatgataatgaatgcggatattcaaataaactgcttgatttatctaaacacatacattcaatataaa

SEQ ID NO: 215155 - DNA, 656 bp, Unknown
  Bacterial polypeptide expressing nucleotide sequence isolated from the Sargasso Sea
ggtacttgtttctgctcctgctagtggtatggatcttactgttgtttatggagtaaatcatcaaaaaatatctcaagatcatctgtttatctcaaacgcctcttgtactactaactgtctagcacctgttgcaatggcattaaataacggagtaggtataaatcagggctttatgactacaatccattcttatacaggtgatcaaccaacattggacacaatgcattctgatctttataggtctagagcagctgctggtaatatgataccaacatctactggcgcagctaaagccgttggattggttttaccagaattaaatggaaaattagatggtgtttcggtaagagttcctactcaaaatgtatcagttgttgattttaaatttaatgcttcaagatcgacttcagttgacgaaataaacaacattattaaagaatctgccaatggagagctaaaaaatattcttggttttacagatgaacttcttgtttcaagtgattttaatcatgactcacgttcttctatttttcacatggatcaaacaaaagtgatggacaatacattcgttagagtattaagctggtacgataatgagtggggtttttctaatagaatgtcagataccgctgtagctatcggtaagacaatttaaa

SEQ ID NO: 215156 - DNA, 832 bp, Unknown
  Bacterial polypeptide expressing nucleotide sequence isolated from the Sargasso Sea
atgagtgcagaagcattaaaagtgtcatcagctctagacacatctcatttaaaggtagaatttccatttaaagctaaatatggaaactacattaatgggaaatttgtagagcctaaatcgggtaaatattttgataatccaagtccaatatcaaatgaagttatctgttctgtagctagatcaaatgaaaaagatgttgaagcagcattagatgcagctcacgcagcttttaaagaatggggaaagacagacatcactactagatcaaacataatgatgaaaatagctgatgtattagaaaaaaatctaaacctccttgcaacagctgagtgtttggataatggaaagccaattagagaatgtatggctgcagatcttccattagtaattgatcactggagatattttgcaggtgtcatacgtgctgaagaaggttcagtagctgagattagtaattctcagtactcttacaatataccagaacctttaggtgtagttggtcagatagttccatggaacttcccattattaatggcaacatggaaattggctccagcattagctgcaggtaactgttcagttttaaaaccagcagaacaaacaccagcatctatcatggtgatgatggaacttatcggtgatttattacctccaggggttgtaaacattgttagtggttttggactagaagcaggtaaacctttagcttcatctaaaagagttgcaaaagttgcatttactggtgaaacttcaactggaagattgatcatgcagtatgctgctcaaaacattattccaattacactagaattaggcggtaagtcgcctaaca

SEQ ID NO: 215157 - DNA, 559 bp, Unknown
  Bacterial polypeptide expressing nucleotide sequence isolated from the Sargasso Sea
tcctgcacgaccaactgcctcgcccctgtggtaaaagttttgttagacaactttggaattgaagagggattgatgactacgatccatgcggtcacagcgacacaacccaccgttgacggtccctcgaaaaaagatttccgtggagggcgtggcggatttcaaaacatcattccagcctcaacgggtgctgcaaaagcagtcggtctgtgtatccctgaggtccaggggaaactcaccgggatggcgatgcgggttcccaccgctaatgtgtcggttgtcgacctcacggcaaggctttcaaagtcaacgtcctatgatgcgatcaatcaggcgatgaaatccgcttcagaaggcccgatgaagggtatcctgggatacacggaggaaaatgtcgtttcttccgatttcaacggaagctcattatcatcgatctatgatgccggagctgggattggactcagcgatcaattctttaaggtggtatcatggtatgataacgaaatgggatattcatgcaggctgttggacctgatcgaatacatggattcccgcgggtaaa

SEQ ID NO: 215158 - DNA, 619 bp, Unknown
  Bacterial polypeptide expressing nucleotide sequence isolated from the Sargasso Sea
aaaactgttgtatttggggtaaatcatttaaccctaactagagatgatttgatcgtatccaatgcgtcatgtacaaccaactgcttggctcctatagctaaagtcgttaatgaaaattttggtataaaggttggctatatgacaactatacatagttacactggagatcagcctgtattggataccttgcacaaggattattatcgagctagaggagcggcgttaagtatgataccaacatcaactggagctgcaaaagcggtttctttggttttaccagagttagagggaagattagatggatctgctataagagttccaactcctaacgtatcttgcgttgatttgaaatgtgttttagaaaaatctgccacggcagaagagattaattcatctgtaaagaaggcagctgagggagaattaaggggagtattatcatatgaggatgaaccattggtatcaactgatttaaatcacgtcccatcttcatcgatttttgctgcacctcaaactaaggccctgaaagagggtatggtaagaatactttcttggtatgataatgaatgggggttctccaatagaatggtagatactgcaggctttatggggtcactttagt

SEQ ID NO: 215159 - DNA, 563 bp, Unknown
  Bacterial polypeptide expressing nucleotide sequence isolated from the Sargasso Sea
tgcgtcttgcacgacaaattgtttagctcctgttgcaaaagttttacacgataaatttaaaattgttcatggctatatgacaacgattcatgcctttactggtgaccaaagtgttctagatacatttcactcagacttaagaagagctcgagctgcctcattgtcaatgatacctacatccacaggagctgcaaaagcagtaggactcgtcatgcctgagctttctggtaagttagatggaaccgcaattagagtaccaacacctaatgtttcattaatcgactttaaatttgtttctaaaaaaagaatgacagtcgaaagtattaataaggctatgtcagctgcagcaaaatcaaataagcttaatggaatcctagatgtaaattctaaaccattggtttcatctgactttaatcataatcctgcctcgtcaaattttgatttaactcaaacacaagtaattgatggaaagtttggaagagttttaagttggtatgctaatgaatggggcttttcaaatagaatgtgtgatactgcagttgcgatgaaaagatctagataga

SEQ ID NO: 215160 - DNA, 366 bp, Unknown
  Bacterial polypeptide expressing nucleotide sequence isolated from the Sargasso Sea
gatggcacttaggatagctattaatggatttggaagaataggtagactggcattcagggctatattagagcgaaatgagtctgatatagaggtaatttgtattaatgaccttggaccaacagagtctaacgctcacctacttaaatacgactccgttcatggcattcttccatttgaagttggagttaaagaagatcatttgttggttggtgataggaaaatcacggtgacatccgaaagagagccaaaaaatctgccttggaaagatatggatattgatattgtatttgagtgcacaggtttctttgctagtaaaaaagctgcgtccgaacatctcacagccggagcaaaaaaagttttaatttc

SEQ ID NO: 215161 - DNA, 672 bp, Unknown
  Bacterial polypeptide expressing nucleotide sequence isolated from the Sargasso Sea
atataaaagcaggagctagtaaagttattatatctgccccaggaaaagaagttgataacacggttgtcttcggagtaaatcatgagacattgactggcaagcatgaagtcatttcaaatgcatcctgtacgacaaactgtcttgctacagtgattaagaatatacataagaatttagaaataacacatggcttaatgacaacaatccactcatatactaatgatcaagtcttgaccgatgtctatcatacagatttaaggcgagcacgctcagctacacaatctatgataccaacaaacacgggggccgccgctgcagttggattagttatgccagatttaaatggcaagctagatggttttgcaattcgtgtcccaacgacaaatgtttctgttgtcgatttatgttttaatacaagtaaatctacatctgtagatgaactaaataatcttgtattgcaatcatctgaaggcgacatgaaaaatattgttggctataacaaacttcctttagtttctattgattttaatcattcatcttattcatctgtatttgatgaaagtttaacaagagcatccgacgacaagttatacaaaatttgcgcttggtatgataacgaatggggattttctaatcgaatgttagatgtgacgatgcattgggttagttaag

SEQ ID NO: 215162 - DNA, 775 bp, Unknown
  Bacterial polypeptide expressing nucleotide sequence isolated from the Sargasso Sea
tggtttaaaatacaaaaataaaaaaattaaattttttagtgaaaaagatccaattaatcttccatggaaaaaacttaaagttgatatagttttagaatgtagtggagtttttacgagtaaagaaaaagcaagtgtgcatataaatgcaggtgcaaaaaaagtaattatttctgcgccaggttcaaatgttgatgctacaattgttcaaggtgttaataatcaaacattaacaaaaaaacataacattatatcaaatggatcatgtacaactaattgtttagctccaattgctatggtcctggataaaggtgtcggtattgaaagtggttttatgacaactatacatagttatactggtgatcaaagaactgttgatcaaagtcacagtgacctaagaagagcaagaggggcagctatatcgatgattcctacatctactggcgcagctaaagctttaagtttagtattgccaaaaatgaagggtaaacttgatggaacagcaataagagttccaacacctaatgtttcacttattgattttacatttacatcgaagaaaaaaacaactgtagaaaaaattaataatttagcaattaatgcaagtaaaacaaaaggattaaaaaatattttaactactaacgcattacctttagtttcaatagattttaatcataactcaagtagttccgtgtttgatttaactcaaactcaagttcttaacggaaaattttgtagaattttatcttggtatgataatgaatggggtttctcaaat

SEQ ID NO: 215163 - DNA, 769 bp, Unknown
  Bacterial polypeptide expressing nucleotide sequence isolated from the Sargasso Sea
cgccatcaagtgggctgacgccggcgctgtctacgtcgtggagtccactggcgtcttcactgacatcgccaaggcctcggcgcacatgactggtggcgccaagaaggtcgtcatctcggccccctctgctgacgcccccatgttcgtcatgggcgtcaacaacaaggcttacgacggctcccccaacgtcgtgtccaacgcctcgtgcacgaccaactgccttgccccgctggccaaggtgatcgacaccaactttggcatcgtcgagggtctcatgaccactgtgcacgccaccaccgccacccagaagaccgttgacggcccgtccggcaaggactggcgtggtggccgcggtgcggcccagaacatcatcccctcggccactggcgctgccaaggccgtgggcaaggtgcttccccagttgaacggcaagctcaccggcatggccttccgtgtgcctactcccgacgtgtccgttgtcgatcttacttgcaagctcgccaagcccgcgagctacgacgcgatctgctcggcgatcaaggccgccaccaccgaccccgagtactgcggcgtgatcgactacactgaggacgaggtggtctcgaccgacttcgttggcaactccttctcgtccatcttcgacaagaaggctggtatcgccctgaccgacaccttcgtcaagctcgtgtcgtggtacgacaacgagtggggctactcgaaccgcgttgtcgaccttgtcgcccacatggccaccgtcgacaagttgtaa

SEQ ID NO: 215164 - DNA, 495 bp, Unknown
  Bacterial polypeptide expressing nucleotide sequence isolated from the Sargasso Sea
aagaaggtttgatgactacagttcatgcaacaacagctactcaattcacagttgatggcctttcaaaaaaagattttagaggcggtcgaagttctttgattaatattatccctgcatctactggtgctgctaaagcagtaacaaaagtaattcctgatcttgttggaaaattgacaggaatggcttttcgagtaccaacggctaatgtttcggttgttgatttaacagttcgtttaacaaaagaaacttcttatgaagaaataaaaaacacaatgagaaaacattctgaaacagatttaaaaaatatacttggttatactgaagagccagtagtttctcaagattttattggtgacactcgaacttcaatttttgacgcaaatgctggaatggaattaaattccaagttttttaaaattatttcatggtatgacaatgagtgtggatactcaaataaattaattgatttagcgaaacatataaatcaactttaaa

SEQ ID NO: 215165 - DNA, 880 bp, Unknown
  Bacterial polypeptide expressing nucleotide sequence isolated from the Sargasso Sea
gcacctaacaaaatacgatacagcacacggaccattcccttattccgttgaagccagagacgatgcacttgttgtcaatggagatgaaattaaagtttttgccgagagagatcctgagcaattgccttggggcgatctgggcgttgatgttgtgcttgaatgcactggattttttgcaaaaaaagagttggcaagtaagcacatcaatgcaggcgcaaaaaaagtggtcatctctgccccagcaggaacagacatcgatgcgaccatcgtttacggcgttaaccacgacactctgagcaaagacgatgcagtgatttcaaacgcgtcttgcacaaccaattgccttgcgccactcgtgaagccgattcatgaaagcattggacttgagagcggcatcatgaccaccattcatgcgtatacgaatgatcaggttctaaccgacgtgatgcacagcgacctcaggagagcgagatctgcaacacagtccatgattccaaccaagaccggagctgccgctgctgttggactcgtattgccagaactggatggaaaattggacggtttttctgttcgagtgccaaccatcaatgtgtcgttggttgatctaagctttattgcctctagagagacttctgttgatgaaatcaatgaggttgtgaaagccgcatcagatggagcccttaagggagttctcgattacaacgaaggcccacttgtatcaattgactttaaccacaatcctgcttcatctacctacgatgcaaccatgactaaagttcaagagggaaccttggtgaaggtatgctcttggtatgacaatgaatggggattctcaaatcgaatgctcgatacaacacttgcgttagtcaacgccgattga

SEQ ID NO: 215166 - DNA, 760 bp, Unknown
  Bacterial polypeptide expressing nucleotide sequence isolated from the Sargasso Sea
atgaaaattggaattaatggttttggaagaattggcagattagttttcagagcattatgggatagagctgatatagaaataactcacattaatgagatagcaggagattcgaatgccgctgcgcatttactcgaattcgattcagtccatggtagatgggtgaaagatataaaggttaaagaagaagaaataataattgatggaaagaaattagattacacatcttttaaaaattaccttgatgttccttgggaaaaatcttctgtagatattattttggaatgtacaggaaagaataaaaagccagacaaactaaatccctattttgatactcttgggatgaaaagagtaatagtagcttgtccagtaaagggaattgtagctggagaggaatcacttaatattgtttacggtataaatcaaagtctttatgacccttctaaacataaattactaactgcagcatcttgcactacaaattgtttagctccgatagtaaaggtaatcaatgaaaatttttcaattaagcacggtgctattacaactattcacgatgttacgaacactcaagttcctgtagatttttataaaagtgatttgaggagagcaagaggatgtatgcaaagtttaatacctactactactggatctgctaaagctatcgctgagatcttcccagaattaaaaggaaaattaaatgggcatgcagtaagagttcctctccaaaatggttctttaactgatgcagtttttgaattaa

SEQ ID NO: 215167 - DNA, 898 bp, Unknown
  Bacterial polypeptide expressing nucleotide sequence isolated from the Sargasso Sea
cctgctggagttcgattctgtgcatggtcgctgggatcgaggcatcaccagcagtgctgatggattcagcgtggagggatccgcactcacctggtccagcgagaaggaccccaccgccgtgccttggagcgatcggggggtggagatggtgcttgaagccagcggcaagatcaaaacgccggagacgctcaatccctatttcgatcagctgggcctcaaacgggtggtggtggcctgtcccgtgaagggtgtggttgccggtgaggacgcgctcaacatcgtttacgggatcaatcaccacctctatgaaccggcgcgccacaagttggtgacggccgcctcctgcaccaccaactgcctggcgcctgtggtgaaggtggtgcacgagagcttcggcatcgagcacggcctgatcaccaccattcacgacatcaccaatacccaggtgccgatcgattccttcaaaagcgacctgcgccgggcacgctctgggctcagttcactcattcccaccaccaccggttcggccaaggcgatcgcgatgatctttcctgagctgaagggcaaactcaacggtcatgccgttcgtgttcccctgctgaatggatcgctcaccgatgcggtgttcgagctcaagcagagcgtcacggtggagcaggtgaatgctgcgttccaagcagctgcggaagggcctctgaagggaatcctgggttacgaggaacgcccgttggtgtcgtgcgactacaccaacgacaaccgcagctcgattgtcgatgccctctcgacgatggttgttgatggcaaccagttgaaggtgtttgcctggtacgacaacgaatggggctacagctgccgcatggccgatctcacctgccacgtggttggtctggacggatga

SEQ ID NO: 215168 - DNA, 1012 bp, Unknown
  Bacterial polypeptide expressing nucleotide sequence isolated from the Sargasso Sea
tatgagtataaatgttgcaattaatggattcggaagaattggcaggaatgtttttagagccaattatgagagcgcaaataataatgagattaatatagttgctataaatgacttaggtgatacaaaaattaatgcacatctacttaaatatgatacagctcatggaaaatttgataaaagtattgatattaaagatgataaaattgtaattgacagcaaagatgaagttctagtcttgagcgaaagagatcctgcaaaattaccttggaaagatttgaatatagatgtcgtgatggagtgtacagggttttttgcttctaaagagaaatcaatgagtcacatcgatgctggagcaaaaaaagttcttatatcagcaccagcggcaaacgtcgatgcaacgattgtgtatggagttaatcattctattttaaatgaaactcacaaaattgtttcaaatgcctcttgtacaacaaattgtttagcgcccttaattaaaaatattcatgaggagttgactgtgcaaagcggaattatgacaactattcattcatatacgaacgatcaagtcttaacagatgtttatcaccctgatttacgaagagctaggtctgctacgcagtctatgataccagctaagaccggagctgcatcagctgttggactagtattacctgaactcaatggaaaattggatggttttgctataagagtccctacaataaatgtatcacttgttgatctatgtattaacataaaaaaagaatcatccttggatgatattaactctatattaaaagaagcatctaagaatgatctttcgggaattctaggttataactccgaaccgttggtatcgatagattttaatcattctgcatattcatcagtatatgatgagagtttatctagagtcatggataataagttctttaaaatttgctcttggtatgataacgagtggggcttttctaatagaatgcttgatgttgctaagatactggcgaatacttaa

SEQ ID NO: 215169 - DNA, 1012 bp, Unknown
  Bacterial polypeptide expressing nucleotide sequence isolated from the Sargasso Sea
catgacgattcgcgtcgcaatcaacggctacggccgcatcggccgcaacacgctgcgcgcgttctacgagaacggcaagaagcacgacatcgagatcgtcgcgatcaacgatctgggcgatgcgaagaccaacgcgcacctgacccagtacgacaccgcgcacggcaagttcccgggtgaagtgtcggtggacggcgattacctcgtcgtgaacggcgacaagatccgcgtgctggcaaaccgtaacccggccgaactgccgtggggcgagctgggcgtcgacgtcgtgatggaatgcacgggcttcttcacgacgaaggaaaaggccagcgctcacctgaagggcggcgcgaagaaggtgatcatctcggcaccgggcggcaaggatgtcgacgcgacgatcgtctacggcgtgaaccacgacgtgctgaaggccgagcacaccgtcatctcgaacgcatcgtgcacgacgaactgcctcgcaccgctcgtcaagccgctgaacgacaagatcggcctcgaaaccggcctgatgacgacgatccacgcgtacacgaacgaccaggtgctgacggacgtctatcacgaagacctgcgccgcgcgcgttcggccacgcacagccagatcccgacgaagactggcgctgcctcggccgttggcctcgtgctgccggaactgaacggcaagctcgacggctacgcgatccgcgtcccgacgatcaacgtgtcgatcgtcgacctgtcgttcatcgcaaagcgcgacacgacggtcgaggaagtcaacgcgatcatgaaggaagcttcggaaggcgcgctgaagggcatcctcggctacaacgaagcaccgctggtgtcgatcgacttcaaccacaacccggcttcgtcgacgttcgacgcaacgctgaccaaggtgtcgggccgcctcgtgaaggtgtcgagctggtacgacaacgagtggggtttctcgaaccgcatgctggatacggctgtcgcgttcgcgaacgcgaagtaa

SEQ ID NO: 215170 - DNA, 1012 bp, Unknown
  Bacterial polypeptide expressing nucleotide sequence isolated from the Sargasso Sea
tatgacagctaaaattggaattaatggaatgggcagaattggtcgaatggtatttagatcaattattgaaaacaaaaacaaaaatttaaaaatccaacatataaacaatagatcaaatcctgaggcaacttgtaaattaattaaatatgactctgttcatggaaaatttaactctgacatcgattttggtggagataaacttataataaacaagaacgaggtcactttttctcaagaaacaaaaattgaagatattgattggaaaaaatatgatgttgactatgtatttgaatgcactggaaaatttaattcaaaggaaaatttagtgccacatattaaaaatggtgcaaaaaaagtaattgtttctgcaccttgtaaaaatgcagataaaacaatagtatttggtgtcaatgatgaatttttaactaaagatgatcaaataatttctgctgcttcatgcacaaccaattgtctagcgccagttctacatgtgcttaatgaaaattttaaaatagaaaaaggtttcatgacaactattcatgcttttactagcgatcaaagaattttagataattctcacaaagatccaagaagggcaagatctgcaagccaatcaatagttccaacgtcaacaggagcttcaaaagctataagtgaaataattccgagtttgaaaggcaaaattgagggtatagctatgagagtcccaacgccaaatgtttcgcttatcgagttagttttttgtacaaataaaaatattgataaggaaaaaataaataatgcttttgagttagcctctaaaaaaaggctgaagaaaatattagaaatcaccaatgaaaaattagtttcaattgattttaatcaccatccagcatcagcaatagttgattcgtcattaactagtgtggtaggaaaaaacatgggaaaaatttcagcttggtacgataatgaatggggtttttctaatagaatgtgtgatatagctttgcatttgcacaaaagcttcaattaa

SEQ ID NO: 215171 - DNA, 865 bp, Unknown
  Bacterial polypeptide expressing nucleotide sequence isolated from the Sargasso Sea
catgacagtaaagattggtattaatggtttaggtagaataggaagaatgattatcagatcattgatcgaaaataacaataaaaaagtcgaaattaaacacatcaacagtagatcaaactctgagattgtctcctcattattaaagtatgattctattcatggaaagtttaattgtgaaataaaatatggagataatcacttaaacttaaacggtaaaaaaattacattctcgcagcattcaaatttaaatgaaattaattggaagagatttggtgtagattatgttttagaatgtactggaaaatttaattcaatagagaagctttatactcatataaaaaatggtgcgaaaaaagttattgtttctgcgccttgtaaaaacgccgacaaaactattgtttatggagtgaatcataaatcgattagcaaaaaagatttaataatttctgcagcttcttgcacaaccaattgtcttgcaccaatcgcatacgtgttaaataaggaatttaaaatagaaaaaggttttatgacaactattcattcatacacaactgaccaaagactattggataactctcacaaagatccaaggcgagcaagatctgctgctcaatctatggtgccaacttctacgggtgcttcaaaagctattggagaaattattcctgaattaaaaggaaagcttgaaggtttggctataagggtcccaaccccaaatgtttcattagtagatcttgtatttaattcaaaaaaaaaattaaccataaaaaaaattaatgactcttttaaaaaagcttcaaaaaaagaattgaaaaatgtactatttgcaaccgatgaaaagcttgtatcaatcgattttaatcac

SEQ ID NO: 215172 - DNA, 1006 bp, Unknown
  Bacterial polypeptide expressing nucleotide sequence isolated from the Sargasso Sea
atgatcaaagttggaataaatggatttggaagaataggaagattaattttaagagctcttctggaaaattataaaggtaaaattcaagtcgtaggtattaatgatcttgggtcaatcgaagctaacgctcatttaattaaatttgatagtacacatggtactcttaatcacgatgtgaaaacaacaagtgaaggttttcaaattggtgatcaaaatataaaagtttttgcagaaagagatcccgctaaacttccatggggtaaaattggtgctgatgttgttttagagtgcacaggtttttttttagataaagcttcagcgggtaaacatattgaagctggtgctaagaaagtaattatctctgctcctgctaaagaagtagattttacagtagttcaaggggttaacagtaaagagcttaaaaaagagcacaatataatctcgaatgggtcatgcacaacaaactgtcttgctccagtagctatggttttagaaaatagttttggaattgaatatggatatatgactactattcatagttacactggtgatcaaaaattattagacactcttcataaagaccttagaagagcaagagcttcaggagatgcaatgataccaacatcaactggtgcagcaaaagcaatgagcttagttttaccaagtttaaaaggaaaattagatggtacagctataagagttccaacgccaaatgtatctttaattgatcttacttttgtaccaaataaagaagtaacagctgaaagcatcaatgatgcgatgagtaaagctgcaaacggtcctcttagaggtattttagcaacaaattcagctccgttagtttcaaaagactttaatcataatccacacagctcaatttttgatttaactcaaactcaagttataaaaggaaaattcagtagagttctttcttggtacgataatgagtggggcttttctaatagaatgtgcgatacagcaattcaaatcgctggattaatttaat

SEQ ID NO: 215173 - DNA, 901 bp, Unknown
  Bacterial polypeptide expressing nucleotide sequence isolated from the Sargasso Sea
aatgaccgttagagttgcagtgaatggctttgggcgaattggcagaaatgttgttagagcattatatgaatcctcaaaaagagcagagatggaaattgttgccatcaacggcaggggatcgccagagcaaataacgcaccttttcaaatatgatagtgcgcatggaaagttccctcatgaagtacattgcgatggaaaatcattggtcattgatgataaagataaaattaaatttatctatgatcgagatccgactaagctgccatggaatgatctcgatattgatgttgttttggaatgtacaggtgcatttagagatcatgaaactgcatcaaaacaccttgatgcaggagcacgtaaggtattaatttctgcaccaggcaagaatatggatgccacgatagtttatggagtgaaccataacattcttagtgatgagcataaaattgtgtcaaatgcatcatgtacaacaaattgtcttgctcctcttgtgagcccgcttcacaagactattggtataaaacatggttccatgactacaattcattcatacaccaatgatcaagtgttaaccgatgcttttcacagtgatcctcggcgagcaagatcagccaccatgtcacaggtccccaccaaaacaggagcagcaaagggccttggtcaagttattccagagcttgatggaagactggatggctttgctatgcgtgtgcccactgtgaacgtatctgccgtagatttaagttttgtccctgaaagagaaacttctgaagaggaaataaatcaaattatgctggatgccagtcttggtgagttaaaaggtgtgcttgaatactgcgaggagcctctggtttctattgattttaatcataatccagcatcagcaatttatgattcaaca

SEQ ID NO: 215174 - DNA, 1555 bp, Unknown
  Bacterial polypeptide expressing nucleotide sequence isolated from the Sargasso Sea
atgagcacacaacaagctaaaagctcgaaagtgtcttctgctctagatacctctcatttaaaagtaaaatttccatttaaagctaaatacggcaattatataaatggtaaatttgtagaacctaaatctggtaaatattttgataatgttagcccgattaataatgagaagatctgttcagttgcacgatcgaatgaaaaagacgtagatgctgcattagacgcagctcacgcagctttccctgcgtggggaaagacagacatcactactagatcaaacattttgaataaaaaaggtgatgttattgaaaaaaatctaaacttattagcaacagctgaatgtttagataatggtaaaccaatcagagagtgtatggcagcagacttgccattagtaattgatcactggagatattttgctggagtaataagagcagaagaaggatcaattgctgaaataagtaataatcaatactcttacaacttccatgaaccattaggagttgtaggtcagattattccttggaactttccattattgatggcaacatggaaattagctccagctctagcagcaggaaactgtgttgtattgaaaccagctgaacaaacaccagcatctattaatgttttaatggaacttataggagatttattacctccaggtgttgtaaatattgttagcggttatggattggaagctggtaaacctttagcatcttctaaaagagttgcgaaagttgcatttacaggtgaaacaaccactggaagattgattatgcagtatgctgcgcaaaacataattccaattactttggaattaggtggaaaatctccgaatattttctttgaagacgtcatggaaaaagatgatgacttttttgataaatgtattgaaggttttgtaatgttcaatcttaaccaaggcgaagtctgtacttgtccaagtagagctttaattcaagagtcaatctatgataaattcatggagagggctattgcaagaacaaaagctgtaaaacaagacaatcctttaaaaatggaaacaatgataggagctcaagtttcgttagagcagatggaaaagattaaatcttatcttgacctcggaaaaaaggagggcgctaaagttctagccggaggaagtgttgctaaacttaatagtggattggaaaaaggaaactatatccaaccaactatttttgaagctaaaaataacatgcgtatctctcaagaagagatctttggacctgttgtatctgtaattaaatttaaagatgaagcagaagcattaaaaattgctaatgatactctttatggtttaggagcagctgtatggactagagatggtaatacagctcacagaatgggtagaggaatacaagcaggaatagtgtggacaaattgttatcacgcttatccagctcactcaccttttggtggctataaacagtcaggtgtgggaagagaaactcacaaaatgatgcttaatcattatagacaaaataagaacttacacgtttcttacgctgagaagaaattgggattcttttaac

SEQ ID NO: 215175 - DNA, 1006 bp, Unknown
  Bacterial polypeptide expressing nucleotide sequence isolated from the Sargasso Sea
tatgtcaataaaaattggaattaatgggatgggtagaattggtagaatggtacttagggctattattgaaagtaaaaatagaaatatagaaattaaacatataaataatcgtaccaactctgaaattagctcttcattattaaaatatgactcagttcatgggaaatttaatgcaaatatattattcaataaaaattctttaattattaataaaaataaaatttcgttttctcaaaaaacaaatatagaagatattcaatggaaaaaatatggtgttgattatgtttttgaatgcactggaaagtttaattcaaaagaaaagttacttcaacacataaaaaatggctcaaaaaaagtgattgtttctgctccatgtaaaaatgctgataaaactatagtttatggtgtaaatcataaaagcttaaataaaaatgatttaattatttccgcagcatcatgtacaacaaattgtctggctccagttgcttatgttttaaataaagaatttaaaatacaatcaggttttatgacaacaattcattcatatacaaccgatcaaagattattagataattctcataaagatataaggcgagcaagatctgctggtcagtctatagtaccaacttcaactggagcttcaaaagctcttggggaaattataccagaattaaagggcaaacttgaaggtttggcaatgagagtacctactcctaatgtttcattgatagatttagtatttaattcaaaaaaaaatttgacagtaaaaaaaattaacgactcttttaaaaaagcttcaaacaaagaattaaaaaatgtacttgaaacaactgaagaaaagcttgtttcgattgattttaaccataactccaattccgcaattgtagatttgtctttaactagcgtagtaggagataaaatgggaaaaatatctgcatggtatgataatgaatggggatttgcatcaagaatgtgtgatttagcagaatatattcataaaagttaa

SEQ ID NO: 215176 - DNA, 1027 bp, Unknown
  Bacterial polypeptide expressing nucleotide sequence isolated from the Sargasso Sea
tatgcgcattggtattaatggttttggtcgtataggacgacttgttcttagagcactctgggatagggaaaatatcgagatttcgcatatcaacgatccatttggtgatgcaaagggagctgcgcatttacttgaatatgactcagttcatggtcgttggaacaaagcaataagcaacgaccaaaacaacctgagtattgaaggtcagccaatatctttttctcaagaaagtgattacacaaaagtgccatggaatgaaaaaggtatagagctaattctcgaatgctcaggaaaattcaaaactcctcaaacattaaatccttattttgatactcttgggatgaaaagagttgtcgttgcatgtccagtaaaaggatccatccagggagaggatactctaaatatcgtctacggtattaatcatgatttatatgagcccaataaacatcgcttagtaacagctgcatcctgcacaactaattgcttagctcccgttgtgaaagttgttaatcaagcttttggtataaagcatggaagcatcacaacacttcatgatctaacaaatacacaggtaattgttgattcatttaaatcagatttaagaagagcaaggagcggatcacaaagcttaattccaacaacaacaggatcagcaaaagcgatagggatgatattcccagaattacaaggaaaattaaatggccatgcagttcgagtccctctcctcaatggatctttaactgatgctgtatttgaattagagaaagaggtcacgcaagaagaagttaatcatgtgttcaaagaagcttcagaaggagagctaaaaggaatccttggttacgaagaaaaaccacttgtctcaattgattatgtcaatgactcaaggagttcaatcatagatgcgccatcaaccatggtgatcaataaatctcaattgaaagtctatatttggtatgacaatgaatggggttatagctgtcgaatggcagatctcgtctgccatgtcataaatcttgaaaaggattaa

SEQ ID NO: 215177 - DNA, 1006 bp, Unknown
  Bacterial polypeptide expressing nucleotide sequence isolated from the Sargasso Sea
atgaaagttgcaataaatggatttggaagaattggaaaacttgtttttagagctttattagaaaaaaatcctaaagatattaatattgtagctattaatgaactaggaagtgttgaaagcagtgctcacttacttaaatatgacagtgtacacggtattcttaaagatgagattagttcaatcaaaaatggattaaaaattggtaaacataaaattaatttttattccgaaagagatccaaataaccttccttggaaatcactcaaggtagatgttgttcttgaatgtagtggtgtttttacttcaaaagaaaaggcgatttctcatttaaatgcaggagcaaaaaaagttattatttcagcaccagcttcaaatgtagatgccacaattgttcaaggtgtaaataacgataccattaaaaaaaatcataacgtaatttcaaacggatcttgtactactaactgtcttgctcctttagctatggttcttgatgaaaaattaggaattgaaagtggtttcatgacaacaattcatagttacacaggtgatcaaagaactgttgatcaaacccattctgactttagaagagcaagggctgcagctgagtcaatgattccaacttctacaggagcagcaaaggctttgagtctagtcttaccaaaattaaaaggtaaactagatggaacagctattcgagtacctactcctaatgtctcacttatagatcttacatttgtaagtaagaaaaaaactagcccagaaaaaattaattctatagttcttcaagcttcaaaaactaaaaaattaaatggaatactaacaacaaactcattacctctggtttcaattgattttaatcataattcaagcagttctgtatttgatatgagtcaaacacaagttgtcaaagataaattctgcagagttttatcttggtatgataatgaatggggattctcaaatagaatggtagacactatggttgatcttaaaaaatttatttagt

SEQ ID NO: 215178 - DNA, 1177 bp, Unknown
  Bacterial polypeptide expressing nucleotide sequence isolated from the Sargasso Sea
gcggatttgcctttagtgatagatcattggaggtattttgctggagtaataagagccgaagagggttcagtggctgaaataagcaactctcaatactcatataatataccagaacctctaggagttgttggtcaaatagttccatggaattttccattattaatggcgacatggaaacttgcaccagctttagctgcaggaaactgctcagttcttaaaccagctgaacaaacaccagcatcaatcatggtaatgatggaacttattggagacttattacctccaggagtagtaaacatcgtaagtggttacggtttagaagcaggtaagcctttagcatcatcaaaaagagttgctaaagttgcttttacaggtgaaacaacaactggaagattaataatgcaatatgctgcacaaaacataattccaattaccttggaattaggcggcaaatctccaaacatattttttgaggacattatgaataaagatgatgatttcttagataaatgtgttgaaggttttgtaatgtttaatctaaaccaaggcgaggtatgtacttgcccaagcagagcgttagttcaagagtctatctatgatgaatttatggaaagatgcatcaaaagaactaaagcagtagttcaagacaaccctttaaaaatggaaactatgatcggagcgcaagcttctgtagaacaaatggagaagataaaatcttaccttgatctaggaaaaaaagagggagctaaagttcttacagggggaagcgttggaaaacttaatagtggattggaaaaaggaaattacattcaaccaactatttttgaagctaaaaacgacatgcgtatttctcaagaagaaatttttggcccggttgtttctgtaattaaatttaaagatgaagcagacgcattaagaattgcgaatgacactctttatggtttaggagcaggtgtttggactagaaatgggaatattgcctatagaatgggaagagctatacaagcagggatagtatggacaaattgttatcacgcttatccagctcactcaccattcggtggttataaacagtctggagtgggtagagaaacgcataagatgatgcttaatcactatagacaaaataaaaatcttcatgtttcttacgcagagaagaaattgggattcttttaaa

SEQ ID NO: 215179 - DNA, 1015 bp, Unknown
  Bacterial polypeptide expressing nucleotide sequence isolated from the Sargasso Sea
atgactataaatgtggctataaatgggtttggaagaataggtagaaatattcttcgtgcaaaatatgaaaatgaggaatactccgatataaaaattgtagctataaatgatttgggaaatagtgagactaatgcacacttattacagtacgatacagctcatggaaaatttaaacttgatgttaaatctgaaaaaaataaaattatagtagataattcagatgaaatttctgtgtatagtgagagagatccatctaatttgccatggaaaaaattatctgtggatatagtgctagaatgtactggtttttttgcatcaaagtcactatcatcagcacatatttcagccggtgctaaaaaagtcattatatctgctccagcaaaagaggtagatgctactatagtatatggagtgaatcatgacatattaaacggatctcacaccgtcatctctaacgcttcatgtacaacaaattgtcttgctactctgattaataatattcataaagaatttactattaaatcgggattaatgacaacaatacatgcattcacaaatgatcaagtcttaacagatgtctatcactcagatttaagaagagcaagatcagctacacaatcaatgataccaacaaaaaccggtgctgcatctgctgttggtttagttttgccagatttagagggaaaacttgacggctttgcaattcgagtacctactataaatgtttctatagtagatttatgttttaatacattaaaaaaaacgtcaatagataaaatcaatagttcattattagaagcttcacaaactaatttgaaaggtattctaggttatacatcagagccgttagtctctactgacttcaatcacacttcttattcatcagtttatgatgagagtcttacccgtgaaatggatggtgattttatcaagatatgtgcttggtatgataacgaatggggattctctaatagaatgctagatgtgtcacgaattttaaaccaaaatgcctaat

SEQ ID NO: 215180 - DNA, 1012 bp, Unknown
  Bacterial polypeptide expressing nucleotide sequence isolated from the Sargasso Sea
aatgaccacgaatatcgctattaatggttttggacgaataggcagattagtcctccgggcgatttttgaaagcggaagagaagaccttagggtagttgcagttaatgatttaggcaccgttgctacgaacgcgcatcttctcaaatgggacagtaatcatggacgatttcccggtgaaatttctgtacacgaagatgctatagatatcggtttcggcccgataaagtttacctcagaacgggatcccaaacaacttccccatgaagaactagacgtggatatcgttatggagtgcaccggtatatttacagatagagccagggctgctcggcatatagaaggaggtgcaaaacgcgtgatagtatccgcaccggcaaaaaatgctgacattactgtcgtctttggtgttaatcacgacaaaattggaaaggagcacgaggtgatttcgagtgcttcatgcactactaattgcttagtcccagtagcgtacgtgctaaataataccgttggaatagaaacaggttatatgaccaccgtgcattcctataccggcgaccaaccaacactcgatacgtttcatggtgatcttcgtagggcacgtggtgctgcatcctcaatggttccaacatcgaccggagcagctaaagctgtcggattggtcttacctgagctagcgggcaaactggatggtgctgctattcgcgtcccaacatccaatgtcagcttaattgatttaaaattcatgcctaaacggcctactaatgtagaagaaataaactcagcaatgattgaggctgccaacaatggcccactgaggggcatactcgggataaacgatgagcctctagtgtcagttgattttaaccataattcgaatagttccactttcgacctaaaccaaacacaggtgcttgatggcggcctagttcgagttcttgcttggtacgataatgagtgggggttttccactaggatgtcagacacggcagctttcctagctgatatgttgtaa

SEQ ID NO: 215181 - DNA, 955 bp, Unknown
  Bacterial polypeptide expressing nucleotide sequence isolated from the Sargasso Sea
atgactttgcgtgttgcgattaatgggtttggcagaattgggcgaaactttatgcgttgttggttaagtagaggagcttataccaacatcgaagtagttggtattaatgtaacttcagaccctaaaactaacgctcatcttctcaaatatgattcagtactaggaaaattggatggtgtagacattcaatatactgatgatacttttgtaattaataacaaaactatcaaatgtttctctgatagaaacccaatgaacttaccttggaaagattggggggttgatttggttatagaatcaactggtgttttcaatactgatgttggtgcaagtaagcaccttgaggttggtgctaaaaaagtaattcttactgctcctggtaaaggggcaggtgttgggacttacgtagtaggggtgaatgctgatcaatataaacatagtgattatgatattttgagcaatgctagttgcactactaattgtttagcgccagtagtaaaagttcttgatcaaacgtttggaattaataaaggattgatgacaacaattcatagctatactggtgaccaacgtattttagataatagtcatagggatttaagaagggctagagcagcagctacaaacattgttcctacttcaacaggagctgctaaagcagttgctttggtctaccctgagatgacaggtaaactcactggtatagctatgagagtacctactcctaatgtttcagctgtagatttcgtttttgaatcttcaaaatctgttactagtcaagaagttaataacgcacttaaggaatcttctcttggctcaatgaaaggaattattaaatacggtgatgagccactggtttcaagtgattatgcaggaactaatgaatcatcaatagttgatagtgatcttacaatgtcaattggcgataatcttgtaaaagttcttgcttggtatg

SEQ ID NO: 215182 - DNA, 1003 bp, Unknown
  Bacterial polypeptide expressing nucleotide sequence isolated from the Sargasso Sea
atgcgtataggtattaatggatttggtaggattggaaggtccgtatttcgcgtattaaacaaccgcgatgatattgatgttgttgctataaatgatatatttgacaaggatgccctcacataccttcttaaatatgatacggtaatgggaagatttcccggtgatatctcgttggactctgatattttgagtgctggaaaccaaaaagttaagctaatagctgagcgtgttccagaaaagcttccatggggagagctaggagttgatatcgtaattgaatcaacagggatatttaggatgaaatcacagcttgagtctcacctaagtgccggtgcaaaaaaagttattctcactgtgcccgcaaaggatgaaattgactatacagttgttcttggagttaatgacgaagggctcaaacctgatcatcgtattgtctccaatgctagttgcacaacaaactgcttagctccgatggcaaaagttttaaatgaaagctttggtatagagctcggtgtgattaatacaatacatgcttatacaaatgatcagagactggcagatgtccctcattctgattggagaagaagtagggcagccgctgagaatgttatccccacaactaccggtgctgctagagccgttggcgtcgtgctacctgagctaaatgggaagcttgacggtattgctatgagagtacctgtgccagatgggtctgttgtagactttaatgtgcgtatcaaagtagatgttacagttgatcaggttaatgatgcagttagatcggcctcagaaagtggttctttaaagaatatccttgaatattctacattgccggttgtttcatctgatattattggtaacagtcattcctctatctttgatgcaccttttactagggtcattgagggtaattatatcaaaacactcaattggtacgataacgagtggggctactcaaatcgagtagtagatctagtttcgctgcttggtcaagttggctaat

SEQ ID NO: 215183 - DNA, 763 bp, Unknown
  Bacterial polypeptide expressing nucleotide sequence isolated from the Sargasso Sea
agaaatttcaaaaatcgactggaaaaaatatcaagtagatgttgttttagaatgtacgggtaaatttaataccaaagaaaaatcagctcagcatattaaatctggtgcaaaaaaagttcttgtttcagcaccttgtaaaggagctataaacatcgtttttggcataaatcagaaaaccttaaaaaatagtgatcaaataatttctgcagcttcttgtactacaaactgtttatctccagttgctaaagtaataaatgataatttcgaaattgatacaggttttatgacaacaattcactcttacacatctgatcaaaaattattagataattcacataaagatttgagaagagcaagaagtgcttctaattcaattataccaacaaccacaggagcaacaaagtctctgggtgatgtcattcctgaattaaaaggtaaagtagaaggaatttcaattagagtcccaactccaaatgtttctttggtagagtttgttttttcatctaagaaaaatctttctgtagaaaaaataaataattcattactgaaagcatcaaaatcagaattaaaaaatattttagatacaactagtgagcaacttgtttcatctgattttaaccataattctcattcggctattgtagatctttcattgacaaaagtagtagaaaccaaaatggcaaaagtttcagcttggtatgataatgaatggggttttgcttgtagaatgtgtgacttggcaaattattttggcaagatttaa

SEQ ID NO: 215184 - DNA, 1546 bp, Unknown
  Bacterial polypeptide expressing nucleotide sequence isolated from the Sargasso Sea
aatgagtgcagaagcattaaaagtgtcatcagctctagactcgtctcatttaaaagtagaatttccgtataaagctaaatatggaaactttattaatgggaaatttgtagagcctttatcgggcaagtattttgacaatccgagcccgatatcaaatgaaattatctgttcagttgcaagatcaaatgaaaaagatgttgagtcagcattagatgctgctcatgcagcttttaaagaatggggaaaaacagacattactactagatcaaatataatgatgaaaatagcagatgttcttgagcaaaataaagacatgcttgcagttgctgaatgtttggataatggtaaaccaattagagagtgtatggctgcagacatagctttagtgattgatcactggagatattttgctggagtaattagagctgaagaaggttctgttgctgaaataagtaattcacaatactcttataatataccggagcctttaggtgtggtagctcaaatagttccatggaacttcccattacttatggcaacatggaaattagcgccagctcttgctgcaggtaactgttcagttttaaaaccagcagaacaaacaccggcttctatcatggttatgatggagcttattggtgatttacttcctccaggggttgtaaacattgtaagtggttttggtttagaagcaggtaagcctctagcatcttcaaagagagttgctaaagttgcttttactggtgagactacgactggaagactaattatgcagtatgcagctcaaaacattattccaatcacactagaattaggtggtaaatcacctaacatattttttgaggacatcatggataaagatgatgatttcttagataagtgtgttgaaggttttgtaatgttcaacttaaaccagggtgaagtatgtacttgtccaagtagagcattagtccaagaatctatttatgataaattcatggaaaaatgtatcgctcgaacaaaagccgttatccaagataatccattgaaaatggaaactatgattggagcacaagcttcagttgagcaaatggagaagattaagtcttatctagatcttggtaaaaaagaaggtgctaaagttcttgcaggtggagatgttggtaaacttaatagtggattggaaaaaggaaattacattcaacctactatttttgaaactgataataaatctcggatctcacaagaagaaatctttggacctgtagtatctgtaattaaatttaaagatgaagcagaagcattagaaattgctaatgatactctttatggtttaggtgcaggtgtttggactagaaatggaaatattgcttacagaatgggtagagcaatacaagcaggaatagtatggactaattgttatcatgcttatccagctcactctccatttggtggttacaaacaatcaggtgtaggaagagaaacacataaaatgatgcttggtcattacagacaaaataagaacttacatgtctcgtatgctgagaagaaattaggcttcttttaa

SEQ ID NO: 215185 - DNA, 1306 bp, Unknown
  Bacterial polypeptide expressing nucleotide sequence isolated from the Sargasso Sea
catgaaagcgcatagatttgcaagacaatctgacaacaatgaattgagtgaattagaaactttccctattctcgaatatataagctcattaaatcttgctgattgtgaaattgatattggtgaaattgcagttaaatgtcctttttttgaggatattaaaaaagatccttctaaattgtctgcctatttaaatgaggaattagaatctgtaatagataaaaaatctaataggcctgaggaacctgcaaatatagtactttatggttttggaaggattggaagacttgttgcaagaatgatgatacagacaacaggtccaggtaattattttaaattaagagcaattgtaattcgtaaagctactgatgatgatatatttaaaagggctagcttattaactaaagactctgttcatggtccttttgatggaactgtaagagttgatgaagataattcatgcttagttataaatggtaatccagtaaagattatatatgcatctggtcctaatcaagttagttataaagactacgatattaatgatcccattgttattgataatactggtatttggcgtgatgaaaaagaattatccgtacatattcaatctggcgcatcaaaagtcatattaacagcacctgctaaaggtaaaattaaaaatatagttaacggaatcaatgattctattatcagtgaaagtgataatctcatttcagctgcttcatgtactacaaatgcaatagttccgatactaaaatctataaatgatgagttttcaataaaaggaggccacattgaaactgttcatgcttatactaatgaccaaaatctaatagataactttcataagaaagatagaagaggtagaggagctcctttaaatatggttattacatctactggtgccgttaaagcagttgcaaaagctctacctgaattagaaggtaaattaactggtaatgcaattagagtacctacacctaatgttagtttggcaattttgtctcttgaattaaataaaaatgtcactgtagaggtaattaataattaccttcgttcaattgcatttcattcaaaatatagagaaataattggatacgtaaattcttcagaagttgtttctacagatttttattcatcaccttttgcaacaattgtggattctcaagccactataacgaatgaaaacagaattacactatattgttggtacgataatgaatatggatataccaaacaagttataagtttagcaaaaaaaatagctaaaattgatttaccaagattacctaaaccaattaaataa

SEQ ID NO: 215186 - DNA, 957 bp, Unknown
  Bacterial polypeptide expressing nucleotide sequence isolated from the Sargasso Sea
aatgagtacacaacaatcaaaaaactcgaacgtgtcttcagctttagatacctctcatttaaaagtaaaatttccatttaaagcaaaatacggcaactttattaatggtaaatttgtagagccaaagtcaggcaaatattttgataatgttagcccgataaataatgagaaaatctgttcagttgcaagatcgaatgaaaaagacgtagaggctgcattagacgcagctcatgcggctttcgttgaatggggaaaaacggacatcactactaggtctaatattttgtacaaaatagctgatgtgcttgaaaaaaatctaaatttattagctactgctgagtgtttagataatggtaaaccaattagagaatgtatggcagcagatttgcctttagtgatagatcattggagatattttgctggagtaataagagccgaagagggttcagtggctgaaataagcaactctcaatactcttataatataccagaacctctaggagtggttggtcaaatagttccatggaattttccgttattaatggcgacatggaaacttgcaccagctttggctgcaggaaactgttcagttcttaaaccagctgaacaaacaccagcatcaatcatggtaatgatggaacttattggagacttattacctccaggagtagtaaacatcgtaagtggttacggtttagaagcaggtaagcctttagcatcatcaaaaagggtcgctaaagttgcttttacaggtgaaacaacaactggaagattaataatgcagtatgctgcacaaaacataattccaattaccttggaattaggcggcaaatctccaaacatattttttgaggacattatgaataaagatgatgatttcttagataaatgtgttgaaggttttgtaatgtttaatctaaaccaaggcgaggtatgtacttgcccaagcagagcgtt

SEQ ID NO: 215187 - DNA, 1015 bp, Unknown
  Bacterial polypeptide expressing nucleotide sequence isolated from the Sargasso Sea
catggcaattaaaatcggaattaatggatttgggcgcatggggcgtttggctctgcgtgcggcgtgggaatgggatgatgttgagtttgtgcagatcaacgatcccgctggggatgcggctaccttggcccatttgcttgagttcgattcagttcacggtcgctggcgttatccggtcacggcgaatcaggatggtattcaaatccaagagaaaaccattcgcaccacacgtaataagacgatttctgagaccgattggtcgggatgcgatgtggtgattgaagcctctggggtgatgaaaaccaaagccttactacaagcctatttagatcaaggtgtgaagcgggtagtggtgacggcgccagtcaaagaggaaggtgtgttaaatgtggtgatgggagtgaatcatcagttatacgatccggctattcatccgattgtgaccgcggcttcctgcactaccaactgtcttgcgccagtggtgaaagtgatccatgagcagattggcatcaagcacggctctatgaccactatccatgatattaccaatactcagacgattctggatgcaccgcataaggatctgcgccgcgcccgtgcctgtgggttaagtttaatccccaccaccacgggcagtgcgacggcaattacccatattttcccagagcttaagggcaagttgaatggccatgccgtaagggtgccgctcgccaacgcatctcttacagactgtgtttttgagcttgagcgcagcgtggccgaagcggaagtgaatgcgctgctacaaaccgccgccgaaggcgaactcaagggcattttaggttatgaggagcggccgttagtgtcggttgattataaaaccgatccccgttcgagcattgtcgatgcgctttcgaccatggtggtgaatgggactcagctaaaactttacgtgtggtacgacaatgaatggggatatgccaaccgtacggcagagcttgcccgtttagtcggccagcttgatttgccgcgttag

SEQ ID NO: 215188 - DNA, 1012 bp, Unknown
  Bacterial polypeptide expressing nucleotide sequence isolated from the Sargasso Sea
aatggcagtaaatgttgcaattagtgggtttggaaggattggtagattagttctcagatcaattatagagagtaaacgtaaggatattaatgttattgcaataaatgacttagcacctgttgatacaaacgcattcttacttgcgaatgatacagtacatggacctttaaacgaaaaaatttctgtaaagaaaaacaaaatgaccattggaaggaaaactatatcagtacttaatgaaagagatccacaaaaacttccatggaaaaaaatgaaaattgacgtagctcttgaatgtactggtttatttacctcaaaagaaaaagcatctatgcatatcaatgctggagcaaaaaaagttcttgtctctgccccatgctctgaagcagataaaacaatagtatatggggtaaacgaacaagaaataactcgcaatgatctagttgtttcgaatgcatcttgtactacgaactgtttggcaccagtagttaaagttcttcacgaaaaatttggaattgttcatggatatatgactaccattcatgcatttacaggcgaccaaagtgttttggatacatttcaccctgatttaagaagagctagagctgcgtcaatgtcaatgatacctacatcaacaggtgctgccaaagcggttgggttagtgatgccagaattatcaggaaaactagatggaacggcaatcagagtaccaactcccaatgtatcacttatcgattttaaatttgtatcaaaaaaaacaatgaaagttgatagcgtaaataaagccatgactgctgcgtcacgatccaataagttgagaggcatacttaatgttaattcagaaccactggtttcaacagattttaatcataatcctgcttcatcaaattttgacctaactcaaacacaagtcattgaaggaaagtttggaagagttttaagttggtatgataatgagtggggtttctcaaatagaatgtgtgatactgcagtagcaatgaaaagatcaaaatag

SEQ ID NO: 215189 - DNA, 594 bp, Unknown
  Bacterial polypeptide expressing nucleotide sequence isolated from the Sargasso Sea
aatggtgctcagactatcactaaatagatctgatgttgaagttatagctataaatgatcttttagatataaatcacttagtatacttattgaaatatgattctgtccatggtaaaattaattccagtgtttcagttgagggtaacaacttaattatcgatggtcaaaaaattaaaattacatcagaaaaaaatcccaaacagataggttgggacaatataggcgttgatgttgttttagaatgtacaggtatttttacaactctagatactgctcaacatcatatcgatggtggagcaccaaaagttgttatttctgcaccctcgaaagatgctcctatgtatgtaatgggtgttaatcatgaaacaatagataaaagtgatttaattatatctaatgcaagttgtactacaaattgtctagcaccaccgataaaagttttaaatgataattttggtgtcgaggaagcactaatgactactgttcatgcggtcacagctactcaatttacagttgatggtccatctaaaaaagattttagagcaggtcgaagctcactactaaatataataccagcatctaccggtgctgcgaa

SEQ ID NO: 215190 - DNA, 1006 bp, Unknown
  Bacterial polypeptide expressing nucleotide sequence isolated from the Sargasso Sea
atgaataacgttgcaataaacggttttggaagaatagggaggtctattcttagaataattgttgaacaagatttagatataaacgttgtagctataaatgacttaggtgattacgacaatctagcttatttatttaaacatgattcaataatgggagttctcgatgcagatatttcagttaccaaagacttattgaaaattaataatcgtaatataaatcttatctcaatatctgagccctctgagttgccttggaaagaattaaatgtagaaatagttatagagtcaacaggtatttttacggataatgaatcattaaacaaacatataaatgcaggtgctaatagagtcctcctaacggtacctccaaaagatgaagtagatgcaactattgttcttggagtaaatgatgatactttaactaatgattctaggttaatatctaacgcttcatgcacaactaattgcttagctcctattgcaaaggtattaaatgataatttcactattcaatctggattgatgacaactgtccatgcttatactaatgatcaagctttagccgaaacaacacataaagattttagacgtggtagaaatgctacacaaaatattattcctacatctactggagctgctaaagcagttggtatggtaatgccagaattaaaagggaaattagacggtatggctatgcgtgttcccgtaccaaatggcagtgttgtagatttaatagttgaattagataaatctgtaacagttgatgaaattaataaagcagttaaaaaagcgtctgaaaatgaactaaacgggatattaagctattcagaagttcctttagtttcaacagatatattgggtaatcctaattcaagcatatatgacgcaacttctacagaaatattagaaaataaacacgttagggtggtctgttggtatgacaatgaatggggttattcaaatagagttgttgaccttattagtaagctaatagaagaatattaaa

SEQ ID NO: 215191 - DNA, 973 bp, Unknown
  Bacterial polypeptide expressing nucleotide sequence isolated from the Sargasso Sea
tatgcgttgttggcttagtagaggtgcttacaccaatattgaagtagtcggaattaacgttacatcagatcctaagactaatgctcatttattaaaatacgactcagtccttggtcaacttgatggtgttgatattcaatatactgatgatacttttgtaattaataacaaaacaattaaatgtttctcagatagaaatccaatgaatctcccttggaaagactggggtgtagatttggttattgaatctactggagtatttaatacagacgtaggtgcaagtaagcacttagaagtaggagcaaaaaaagttatcttaactgcgcctggtaaaggggatggcgttggtacttatgtagttggagttaatgctgatacatataagcataaagattacgatattttgagtaatgctagttgtacaacaaactgtttagctccagtagtcaaagttttagatcaaacttttgggattaataaaggtttgatgactacaattcatagttatacaggtgatcaaagaattttagataatagtcatagagatctaagaagggctagagccgctgctacaaacatagttcctacttctacaggagctgcaaaagcagtagctcttgtatacccagaaatgaaaggcaaattaactggaattgcaatgagagttccaactcctaacgtttcagcagtagattttgtttttgaatcttctaaatctgtcactgctgaagaagtcaataatgcccttaaggaagcatctctaagtacaatgaaaggcattattaagtatggagatgaaccattagtgtcaagcgattatgcaggtaccaatgaatcatcaattgtagatagtgatcttactatgtgtatcggagataaccttgtaaaggtgcttgcatggtacgacaatgagtggggttatagtcagagagttgtagatttagcagaaattgttgctaaaaattgggagtaa

SEQ ID NO: 215192 - DNA, 1474 bp, Unknown
  Bacterial polypeptide expressing nucleotide sequence isolated from the Sargasso Sea
ttggttaaaagatttaatcccgacaaaagacgcagaccaaaggtcgatgaccattttggggactggaaatggagagaagctcttgctgaatctatggtccctatgatcggtaaactttatcgcaatgggattagattattgatgtatggccgtcctttaattaattgctcagcaattgagatcatgaaacttcatcgatttgtgcgtgaagtagagggtaatgaattaagtgagcttgagacatatcctgtgatagagcaaatctcaaaaatgaagttaatgccttgtgagattgatgttggggaagttgtagttcatcttctagataacgataagctggatcctgtaaagcacgttaaaaatatgcttaaagagcagatcagaactaaaagatctcaccctttaagacccaaagacatagttttatacggttttggaagaataggaagaattttaaccagaattcttgttagtgaaacagggcctggagtaaattggcgtttaagggctgttgttgtaagagattcagaaaatcctgaagatctaatcaaaagagcaagcttacttagaaatgacagcgttcatgggacatttccaggaacaattagagtaaacagaaaaaataactccttaatagtcaacggtaatgaaattgtgtttatttatgccagtgatccaagaaaagtagattacaaaaaatatgggatcaaaaaggctactataattgataatactggggtttggagagatgaagatgggcttaaaaaacatgtcaaaaacccatcagttgaaagagttgtgcttaccgctccaggaaagggcaaaattaaaaatattgtatatggcataaatgatcataaagtcagcgaagaagataagattttaggtgctgcatcttgtacaacaaacgccattgttccagcactcaaggttgttgatgataattttaaaatcttaagtgggcatattgagaccgtacatgcctatacaaacgatcaaaacttaatagataactatcattcagctgatagaagaggcagaagtgcggccttaaatcttgttattacagacacaggcgcagcaaaagcaatttctggtgtcttgcctgaacttaaaggaaaattaacagctaatgcgatcagagtgccgacaccaaatgtgagcttggctatcatgcaccttaatattaaaaagggcgtatctgttgaagacctaaatcaatgtttcagaaatgcagcctttcactcaagcctaagaactacaattgactactcaaactccttagatgctgtttcttctgatttttatagcaatgaatttgcttgcgtttttgattctcaggcaacaattagcaattttaacaatataactatttactgctggtacgataatgagtatggttattccagacaagttgcaagacttttaaataaagcgcttggtattaatttagttagatacccgaaacagtaga

SEQ ID NO: 215193 - DNA, 1006 bp, Unknown
  Bacterial polypeptide expressing nucleotide sequence isolated from the Sargasso Sea
atgaaagttgcaataaatggatttggaagaattggaaaacttgtttttagagctttattagaaaaaaatcctaaagatattaatattgtagctattaatgaactaggaagtgttgagagcagtgctcacttacttaaatatgacagtgttcatggtattcttaaagatgagattagttcaatcaaaaaaggattaaaaattggtaaacataaaattaatttttattccgaaagagatccaaataatcttccttggaagtcactcaaggtagatgttgttcttgaatgtagtggtgtttttacttcaaaagaaaaggcggtttctcatttaaatgcaggagcaaaaaaagttattatttcagcaccagcttcaaatgtagatgccacaattgttcaaggtgtaaataacgaaaccattaaaaaaaatcataacgtaatttcaaacggatcttgcactactaactgtcttgctcctttagctatggttctggatgaaaagttaggaattgaaagtggtttcatgacaacaattcatagttacacgggtgatcaaagaactgttgatcaaacccattctgactttagaagggcaagggctgcagctgagtcaatgattccgacttctacaggagcggcaaaggctttgagtctagtcttaccaaaattaaaaggtaaactagatggaacagctattcgagtacctactcctaatgtctcacttatagatcttacatttgtaagtaagaaaaaaactagcccagaaaaaattaattctatagttcttcaagcttcaaaaactaaaaaattaaatggaattctaacaacaaactcattacctctagtttcaattgattttaatcataattcaagcagttctgtatttgatatgagtcaaacacaagttgtcaaagataaattctgtagagttttatcttggtatgataatgaatggggattttcaaatagaatggtagatactatggttgatcttaaaaaatttatttagt

SEQ ID NO: 215194 - DNA, 1021 bp, Unknown
  Bacterial polypeptide expressing nucleotide sequence isolated from the Sargasso Sea
atggaagtaaatgtggcaattagtggttttggaagaataggtagattagtacttagatcaatcattgagagtaagagaaaagatataaatgttgtagcgataaatgaccttgctccaattgaaacaaatgcatttcttctatctaatgacactgtacatggccctttaaaagaaaaagtcacagtaaaaaatggaaaaatgattattggtaagaaatcaataaatgtcctgagtgaacgtgatccaaaaaaattaccttggaaaaaaatgaaaattgatgttgctctagaatgtacaggattttttacttctaaagagacagcttcaatgcatataaccgctggagcaaaaaaagttctcgtatctgcgccatgctctaatgctgataagacgattgtatttggcgtaaatgatgatgaaatatcgaaaaaagatacagttatttcaaatgcttcttgtacaactaactgtttagctccagttgcaaaagtaattgatgaaaaatttggtattgttcatggctatatgacaacaattcactcttataccggagaccaaaaagttttagacacctatcattctgatttaagaagagcaagaggagcagcattatcaatgatacctgcatccaccggtgctgctaaagcagttggcttagtcatgccacatctttctggaaaattagatgggactgctataagggttccaactccaaatgtttcattaattgattttaaatttgtgactaacaaaaagatatctaaagagtcaattaataaagctatggctgctgcttcaaaatcaaaaaggctaaaaggtattcttaatgtaaattcagatccgttagtctcatcagattttaatcataattcagcatcatcttcatttgatctaactcaaacacaagttattgatgaatcatttggaagagttttaagttggtatgataatgaatggggattttcaaatcgaatgtgtgatacagctgtaaaaatgaataatacaaaaaagaatgattaat

SEQ ID NO: 215195 - DNA, 1006 bp, Unknown
  Bacterial polypeptide expressing nucleotide sequence isolated from the Sargasso Sea
atgaataatgtagcaataaatggtttcggaagaataggaagatcaattttaagaattattgttgagcaagatttagatataaatgttgtagctataaatgatttaggagattatgaaaatttagcttatttatttaaacacgattcaataatgggagttttggatgctgaaattactattaaaaaagacatgctaaaaattaatgatcgtgatataaaactcatatcaatatctgatccttctgagttgccatggaaagatttaaatgtagagatcgttgttgagtcaactggaatttttacagatagtgattcattaaataaacatataattgcaggtgctaaaaaagtgctactaaccgtgccacctaaagatgaaattgatgcaaccattgttcttggtgtaaatgatgataatttaacaagtgaatctaaattgatatctaatgcttcctgtacaactaattgtttagctcctattgcaaaagtattaaacgataattttactattcaatctgggttgatgacaactgtccatgcttatactaatgatcaagctttagccgaaacaacacataaagattttagacgtggaagaaatgctacccaaaatattattcctacatctacaggagctgcaaaagcagtcggtatggtaatgccagaattaaatgggaaattagacggtatggcaatgcgtgttccggtaccaaatggcagtgttgtagacctaatagttgaattagataaatctgtaacagttgaggaaattaataaagcagttaaaaaagcatctgaaaatgaacttaatgggatattaagctattcagaagttcctctagtttcaacagatatattgggtaatcctaattcaagtatatatgacgctacctctacagaaatattagaaaataaacacgttagggtagtctgttggtatgacaatgaatggggttattcaaatagagttgttgaccttattaataagctaatagaagaatactaaa

SEQ ID NO: 215196 - DNA, 874 bp, Unknown
  Bacterial polypeptide expressing nucleotide sequence isolated from the Sargasso Sea
atggagtttgactctgtgcatggtcgatggggaaaaaatatttcttggcaagatggccttttaattttcaatgggcaaaagataagagtatcccatatgaaaattgtcgaggcaattgctttaaaaaagaataatattgatgtcgtgattgactgtactggtaaatttaaaacatctagtaaaatagcaccatattttagtgctggtgtaaaaaaggtaattatcagcgcaccagtcaaagataaagatgcactaaacttagtttatggaataaatcatgatttgtacgacggatctcaaaatctaattactgctgcttcgtgcactacaaattgtctagcacccatagtaaaagttattcacgaaaatttaggtatcaaacatgggtcaataacgacaatccatgatgttactaacacgcaaactatagttgaccgaccgtccaaggacatgagaagagccagatcagcactcaataatttgataccaacgacaaccggatccgcaaaagcaattacaatgatctatccggagttaaaaggtaaactaaatgggcatgctgtacgtgtacccctgttaaatgcatcacttactgactgtgtctttgaggtagaacgcgcaacctcagaacaggaagtaaactccctttttgaggaagcttcaaataagtctcttaaaggtattcttggcttcgaaaaacgtcctcttgtttccagcgactatacgaacgacccacgatcatcgattgtggatggcctatcaacaatggtcgttaacaaaactcaagtaaaagtctatgcttggtatgataacgagtggggttactcatgtagactaggcgacatcacccgcatggtagcaggctcactttgaa

SEQ ID NO: 215197 - DNA, 1006 bp, Unknown
  Bacterial polypeptide expressing nucleotide sequence isolated from the Sargasso Sea
atgattagagtagctattaatggatttggccgtattggccgttcagtatttagagtattaaaccaacgagatgaaatagagttagttgcaataaatgatatttttgataaggaagcgcttgtttatcttttaaagtatgataccgttatggggcgtttccctggtaatgtggaattaaacgatgatatgttaacggcaggagaacaacatgttaaattagtatctgaaaggattccagaaaatttaccttggaaagatttaggaattgatatcgttgtagaatcaactggtatttttcgacaaaaagaacaacttcaaaaacacttagatgccggttgttctaaagtaatattaacagttcccccaaaagatgaaattgattatatggttgttcttggtgtcaatgataaaggattaagtaaagaacatcaaattgtttctaatgcaagttgtacaacaaactgtttagctcctatggctaaggttttaaatgataattttggaattgaattaggtgtgattaatacaatccatgcgtataccaatgatcaaaggttggcagatgttccacactctgattggcgaagaagtagggctgcagcagagaatgtgattccaacaactactggagctgctcgtgctgttggaaaagtcttacctgagttaaatgggaaattagatggaatagctatgcgtgttccagtgcctgatgggtcagtagttgatttgaatgtaagattaatgcaagatgtaactattgatatgattaatgaagctatattagcagcatctaatgatggatctatgtcaaacgtattagaatattcaaatttgccagtggtttcaactgatattattggtaataaacattcatctatttttgatgcaccatttaccagagttattgataataactttgtaaagaccttgaactggtatgataatgaatggggttattctaatagagttgttgatttgatggctcttttaggtaagctactctaac

SEQ ID NO: 215198 - DNA, 1006 bp, Unknown
  Bacterial polypeptide expressing nucleotide sequence isolated from the Sargasso Sea
aatggtaaaaattggaattaacggttttggaagaataggcaggctaattctcagggctttattagagaattacaaagataaaattcaagttgttggtattaatgatcttggttccatagatactaacgcacatttaataaaatatgatagtacgcatggaactctaccacatgatgtaagtacatcaaaagacggttttaaaattttaaatcaaaatataaaagtttttgctgaaagggatccagcaaatttaccttggggtaaagttggtgctgatattgttttagaatgtacaggcttatttttgaataaagaaactgcaggcaaacatttaaaagctggagcaaaaaaagttattatatcagctcctggaaaagatgtagattttacaattgtgcaaggagtaaatagtaaagatttaaaaaaagagcacaatgttatttctaatggatcttgcacaacaaattgcttagcacctgttgcaatggttttggagaatagttttggtattgagtatggatatatgactactattcatagttacacaggagaccaaaaattattagatactcttcataaagatttaagaagagcaagatctactgagggagcaatgatacctacatcaacaggagctgcaaaagcaatgagtttagttttacctagtcttaaaggaaaacttgatggcacggccataagagttccaacaccaaatgtctctttaattgattttacattagttacaaaaaaagatgttactgctgatagtataaatgatgccatgacaaaagctgctaatggtgagttaaaaggtattcttggaattaataaacagccactagtttcaaaagattttaatcatgatgcacacagttcaatatttgacgttacccaaactcaggttgtcaaaaataaatttagtagagtactatcttggtatgataatgaatggggtttttcaaatcgtatgtgtgatacatcaatacaaatatcaaaacttatttaa

SEQ ID NO: 215199 - DNA, 1474 bp, Unknown
  Bacterial polypeptide expressing nucleotide sequence isolated from the Sargasso Sea
tttggttaaaagatttaatcccgacaaaagacgtaggccaaaggtcgatgaccattttggggactggaaatggcgagaagctcttgctgaatctatggtccctatgatcggcaaactgtatcgaaatgggattagattattgatgtatggtcgtcctctaattaattgttcagcaatagaaataatgaaacttcataggtttgttcgtgaagtagaagggaatgagttaagtgaacttgaaacttatcctgtgattgaacaaatctcgaaaatgaaattaatgccatgtgaaattgatctaggggaggttgttgttcatcttttagataacgataaattggatcccataaagcatgtcaaaagcatgcttaaggaacagattagaaccaaaagatctcacccattaaggcctaaggatatagttttatatggttttgggagaattggaagaatcttaactagaatcctggtaagtgagactggtcctggagtaaattggcgtctaagagccgttgttgtaagagattctggcaatacagaagatttaatcaaaagagcgagtttactgagaaatgatagtgtccatggtacttttcctggaacaatcagagtaaatagaaagaataattctttaattgttaatggtaacgaaattgtgtttatttatggcaatgatccaaaaaaagtggattacaaaaagcacggaatcaagaaagccactgtaattgataatacaggtgtttggagagatgaagatggactaaaaatgcatattaaaaacccatctgttgaacgagtagttcttactgctccaggaaagggaaaaattaaaaatattgtttatggtgtaaatgatcaaaagatcagcaaggacgacaagattctaggagctgcatcttgtactacaaatgccattgtcccagctctcaaagttgttgatgataatttcaaaattttaagtggtcatattgagactgtgcatgcatatacaaacgatcagaatttaattgataactatcatacatcagatagaagaggtagaagtgctgcattaaatcttgtcatcacagacacaggggcagcaaaagcaatttctggagttttgcctgaactcaaaggaaaacttacagctaatgctatcagagtgccaacacctaatgtgagtttggctatcatgcacctaaatgttaaaaagggtgtttctgttgaagatttaaatcaatgctttagaaatgctgcttttcattcaggcttaagaactacaattgattattctaactctttagatgcagtttcttctgatttctatagcaatgaatttgcttgtgttttcgattctcaggcaacaattagcaattttaacaacataactatttactgctggtacgataatgagtatggttattccaggcaagttgcaaggcttttaaataaagcacttggtattaatttagttagatacccaaaacagtaa

SEQ ID NO: 215200 - DNA, 948 bp, Unknown
  Bacterial polypeptide expressing nucleotide sequence isolated from the Sargasso Sea
aatggtaaaaattggaattaacggttttggaagaataggcaggctaattctcagggctttattagagaattataaagataaaatacaagttgttggtattaatgatcttggttctattgatactaacgcacatttaatcaaatacgatagtacacacggaactcttccacacgatgtgagtacatcaaaagacggttttaaaattttaaatcaaaatataaaagtctttgctgaaagagatcctgctaatttaccttgggataaagttggtgcagatattgttttagaatgtacagggttatttttaaacaaagaaactgcaggcaaacatttaaaagctggagctaaaaaagttattatatcggctcctggaaaagatgtagattttacgattgtgcaaggagtaaatagcaaagatttaaaaaaagagcacaatgttatttctaatggatcttgcacaacaaattgtttagcaccagttgcaatggttttggagaatagttttggtattgagtatggatatatgactactattcatagttatacaggagatcaaaaattattagatactcttcataaagatttaagaagggcaagatccactgagggagcaatgatacctacctcaacaggggcagcgaaagcaatgagtttagttttaccaagccttaaaggaaaacttgatggtacggctataagagttccaacaccaaatgtttctttaattgattttacattagtaacaaaaaaagatgttacagctgacactataaatgaagccatgacaaaagctgctaatggtgaattaaaaggtattcttggaattaataaagatccattagtttcaaaagactttaatcatgatagacacagttcaatatttgatgtaacccaaactcaggttgtcaaaaataaatttagcagagtactatcttggtatgataacga

SEQ ID NO: 215201 - DNA, 689 bp, Unknown
  Bacterial polypeptide expressing nucleotide sequence isolated from the Sargasso Sea
catgactatcaaagttggtatcaacggttttggccgcatgggccgtctctcatttcgcgccgccttcgactgggcggatgtggagtttgtgcgcatcaatgacccggctggcgatgccgcctcgctggcacacctcatcaccttcgattccgtccatggccgctggcatcatgaagccagcagcgatggggacgagatggtgatcggtaaccatcgtatcctctgcactcgcaacaaagagatcggtcagactgactggtctgactgtgatgtggtgatcgaggcttccggcaagatgaaaaccaaggccctgctcaatgcttatctggagcaaggggtgaagcgtgttgtggtgacagctccggtcaaggaagagggtgtcctcaacgtagtgatgggggtcaaccaccaactctacgacaaggcgcagcaccctatagtgacggctgcctcctgcaccaccaactgcctggcgccagtggtgaaggtgatccacgagcagctcggcatcaagcacggctccatgaccaccattcacgacatcaccaacacccagaccattctggatgccccccatgccgatctgcgccgcgcccgcgcctgcggcctgagcctgatccccactaccacgggttctgccaccgccatcacccacatcttccccgagctcaagggcaagctgaacggtc

SEQ ID NO: 215202 - DNA, 817 bp, Unknown
  Bacterial polypeptide expressing nucleotide sequence isolated from the Sargasso Sea
atgataaaagtaggaataaatggttttggtagaataggtagattgattttaagagctattttagaaaattataaaaataaaattcaagttgttgcaattaatgatttaggatcaatagaaactaatgcgcacttaattaaatacgatagcactcacggtatcattcatgaagatattcagacttcaaaagacgggtttaaaatcggcaatcaagaaataaaagtttttgcagaaaaggatccagctaatatcccttggggaaaagtaggtgctgatgtagttttagaatgcactggtatatttttagacaaatcatcagcagaaaaacacataaaaggtggagcaaaaaaagtaataatttctgctcctggaaaagaagtagattttacaattgttcaaggtgttaatagcaaggagttaaaaaaagagcataatattatatcaaatggctcgtgcacgacaaattgtttagctcctgttgcaatggttttagaaaaaacttttggaattagctatggttatatgaccacaatccatagttatacaggtgatcaaaaattgctagatacattacataaagatttaagaagagctcgttctacagaaggagcaatgatacctacttcaacaggtgccgccaaagcaatgagtttagttctgccgagtttaaaaggaaagttagatggaacagctataagagttcctacaccaaatgtttcattaattgatctaacattagttactgataaagaagcaacacctaaaagcataaatgaagctatgataaatgctgcaagaggtgaattaaaaggaattt

SEQ ID NO: 215203 - DNA, 1003 bp, Unknown
  Bacterial polypeptide expressing nucleotide sequence isolated from the Sargasso Sea
atgacagtcaacttgggcataaatgggtttgggcgcattggaagaagtactatttctcatataaaagaaagcgcacgaaatgatgtccatgttacgaaaattaatgcaacggggcctattcaaacaaacgcgcaccttttaaaatacgatagtactcatggaagatttgctggtgatatagttgttgaaaaagatacactcgatattggctacggtcctgtgaaagtattttccacatatgaacctgaagagttagattggtcgggatgtgacgtggttttagagtgtacggggatgttcaacgatggattgaaatctaaagtccatattcaacaaggagcaaaatcggtcttgatttctgcccccgctagtaacgttgacaaaacgatagtttacggtgtcaaccacagatcattaacgagcagtgataaaatagtttctaatggctcttgtaccacaaattgcctcgcacctttggcgaaagtattgaatgataatatcggcattgagcgggggataatgacgacaatacatagttacacaggagatcaacccacgttggatagaaggcaccatgatctctaccgagcaagatctgcagctacttccatgatacctacatcaaccggagctgccaaagcattaggagaagttttgcctgaattacatggaaaattagatggcaccgcactaagggtacctacacctaatgtaagcgctgttgatttaacatttgaagcaagcactccagtcactgtggagggtgttaattcagttgtagaacaagcggcaagaaatgaaatggtacaggttttagcttacgatagtgaacctaaagtttccatagattttaatcatacgacacactcgtgtatttttgctccggatcaaactaaagtagttgggaaacatactgtgcgggttttagcttggtacgacaatgagtgggccttttcttgtaggatggcagatgttgcatcaacgatgggccgcctgttataaa

SEQ ID NO: 215204 - DNA, 523 bp, Unknown
  Bacterial polypeptide expressing nucleotide sequence isolated from the Sargasso Sea
ctctattctaatgaatcaataggaattgaaaatggtttcatgacaaccattcactcttatactggtgaccagccaaccttggacaccatgcatagtgatttatataggtctagagctgcagcaggaaatatgattccaacttcaacaggtgctgcaaaagctgttggattggttttacctgaattagatggcaagctagatggtgtagctattagagtcccaatgcaaaatgtttcagttgtggatttaaaaatagtttcaaaaaaagaaacaagtattgaagaaattaatagtgttgttaaagaagctgctgatggtaaattaaaaagaattcttggttacaatgaagagcaattggtttcaagtgattttaatcataatcctatgtcatctatttttcatgcagatcaaacaaaagtcatgaatggtactttagtaagagtgatgagttggtatgataatgaatggggtttttcaaatagaatgtgtgatactgtcgaagaaatatcaaaatatatataat

SEQ ID NO: 215205 - DNA, 997 bp, Unknown
  Bacterial polypeptide expressing nucleotide sequence isolated from the Sargasso Sea
tatgattataggtattaacggttttggtcgaattgggagatgtattgcgagattggcaatatcaaatagtaagattcaaaaaatacatgtcaacgatcttgcgggtcaatctgatctgatgcacctcctaaaatacgatagcattcatggttctctaaaattttcttttgaatataaaaacaatgatattgttttcgaaaatggaactattttatctttttctaaacaagcacagcctaaaaacattccttggaaaaaatctggtgcagaaattattcttgaatgtactggtcgttttttaagtgaacaaactgcaaaagatcattttattggtggggcaaaaaaaataattctttctgcacctgctaaagatgaaacaattccgtcgattgttcttggtattaataatgaaaaaataacaccagataaatctcttttttcaaatgcctcttgtacaaccaattgtgccgcgccattagtttcagttattaataatttaagtaaaattaatgcttgtaatatttcaaccatacacagttttacttctgttcaaaatattcatgatgcaccacataaagacttaagaagagcaagagccgcttccttatcaattattccaacatcaactggagcggttaaagctattgaacaaatttttccagatttaaaaaataaagtttccggaggctgttttcgcgttcctgtcgcaaatggctctatcacagaaattattctttcaacagaaaacaatttatctattgaagaaataaataaggctatgaaaaaggctgctaatgggcacttaaaaggcatcttaggctatactgaagagcctatcgtatcaacagatattattggttctaaatatagttctatttatgatgcccaattaacctcatctgccaataaattaatcaaaatatctggatggtatgataacgaaatggggtattctaatcgaatgttggacttggcatttataattcaccaaaaataa

SEQ ID NO: 215206 - DNA, 1015 bp, Unknown
  Bacterial polypeptide expressing nucleotide sequence isolated from the Sargasso Sea
atgaccattaaagtggcaattaacggctttggccgtataggtcggaatatcctgcgagccctgtacgaatgcggtttaacagaacaggtcaaggtggtcgctattaatgagttggctgatgccaaaggtatagcccacttattaaaatacgatacctcgcatggtcgctttggttttccagttgagctgacagcgcaaggtttgttggtcaatggcgatccaatagcgttgttttgtcaggccgatcccgcccagttgccatggaacgaattagacatcgatgtagtacttgaatgcacaggtgtgtttcatagccgtgcagatgcgcagctgcatttagatgctggtgcgaaaaaagtactgttttcacaccctgcggacgctgatattgatgccacagtgatttatggcattaatcagcatttgctgactgatgagatgacagtggtgtcggcaggttcgtgcactaccaactgtatagttccggtgatccaggtgcttgatcagcattttggtgtcgagagtggcactattactacgattcacgcctcaatgaatgatcagcaggtgatagatgcctatcatactgatttacgccgaacccgggctgccagtcagtctattattccggtcgataccaaattagcccgaggtatcgagcgtatcatgccgcatttagccggtcgttttgaagccattgcggtgcgtgttccgacagtaaacgtgacagctatggatttaagcgtcactttgcaccaggacgtggatgtcactcaaattaatcaggtcttgcagcgtgcaagggcaggggagctggctggtattctggattacaccgaagagccgctggtgtccgtcgattttaatcatgatgcgcattcgtgcattgtcgatggctcacaaacccgggtcagccacaaacgtttagtcaaatgtttaatttggtgtgacaacgaatggggctttgcgaacagaatgatcgacaccacccgcgctatgatgcggtttgtctgaa

SEQ ID NO: 215207 - DNA, 397 bp, Unknown
  Bacterial polypeptide expressing nucleotide sequence isolated from the Sargasso Sea
aatgatacctacatcaacaggtgccgccaaagcagttgggttagtgatgccagaattatcaggaaaactagatggaacggcgattagagtaccaactcccaatgtatcacttatcgattttaaatttgtatcaaaaaaaacaatgaaagttgatagcgtaaataaagccatgaccgctgcgtcacgatccaataaattaaaaggcatacttaacgttaattcagagccactggtttcatcagattttaatcataatcctgcttcatcaaattttgacctgactcaaacacaagtcattgatggaaaatttggaagagttttaagttggtatgataatgagtggggtttctcaaatagaatgtgcgatactgcagtagcaatgaaaagatcaaaatag

SEQ ID NO: 215208 - DNA, 894 bp, Unknown
  Bacterial polypeptide expressing nucleotide sequence isolated from the Sargasso Sea
tatggtaaaaataggaattaacggatttggtagaattggtagattaatcttaagagcgttattagagaactataagggaaaaattcaagtagttggtataaacgatctaggctcaatagaaactaatgcccatttaattaagtatgacagcactcatggcatactaaatcaagaagtaaaaacaacaaaagatggtttccaaatcggagatcaaaatataaaagtatttgctgaaagagatccgtcaaaattaccttggggccaaattggtgcagatgttgttttagaatgcactggcttttttttagacaaagcttcagcaggaaaacatatacaagcaggtgccaagaaagtaataatttccgctccagcgaaagaagttgattttactttagttcaaggtgttaacagcaaagagttaaaaaaagagcataatattatttctaatggctcatgcactacaaattgtttagcgcctgtagccatggttttagaaaaaaattttggaataacttatggctacatgacaactattcatagttatacgggagatcaaaaacttttagacactttgcataaagatttaagaagagcgagagctacagaaggatcaatgataccaacctctactggagccgcaaaagctatgagcttagttttaccaagcttaaagggaaaattggatggtaccgctataagagtaccaactccgaatgtttcactaatagatttgacattagtcactgagaaggaagtgacctcagatagcattaatgatgcaatgagcaaagctgctaaaggtgaattaaaaggtattttagaaatcaatcaaaaagctttagtttctaaagactttaatcataatccacatagttcaatttttgactcaacaca

SEQ ID NO: 215209 - DNA, 488 bp, Unknown
  Bacterial polypeptide expressing nucleotide sequence isolated from the Sargasso Sea
aatggtaaaaattggaattaatggctttggtaggattggaagactaattctaagggctctattagagaactacaaagataaaattcaagttgttggtattaatgatcttggctctattgatactaacgcgcatttaataaaatacgatagtacacatggaactctgccacatgatgtgagtacgtctaaagatggttttaaaatattaaatcagaatattaaagtttttgctgagagagatccagtaaatataccatggggcaaattaggagcagatgttgtcttggagtgtacaggattatttttaaataaggaaactgctggcaagcatttaaaagcaggaggaaaaaaagttataatttctgcaccagccaaagatgtcgattttacaattgttcaaggtgtaaatagtaaagatctaaaaaaagatcacagcattatttcaaacggttcgtgtacaactaattgtctggcacctgttgctatgg

SEQ ID NO: 215210 - DNA, 360 bp, Unknown
  Bacterial polypeptide expressing nucleotide sequence isolated from the Sargasso Sea
aatggtaaaaattggaattaatggttttggcaggataggaagacttatcctcagagctttattagagaactataaagataaaattcaggttattggcattaatgatcttggctcaattgatactaatgcacatttaataaaatatgatagcacacatggaactctaccacatgaagtaagtacatctaaagacggttttaaaattttaaatcaaaatataaaagtttttgcagaaagagacccagcaaatttaccctggggtaaagtcggcgcagatattgttttagagtgcacaggtttatttttaaataaagaaacggcgggtaaacacttaaaagcaggagcaaaaaaagttattat

SEQ ID NO: 215211 - DNA, 1024 bp, Unknown
  Bacterial polypeptide expressing nucleotide sequence isolated from the Sargasso Sea
atgaaaattggaattaatggttttggaagaattggcagattagttttcagagcattatgggataaagctgatatagaaataactcacattaatgagatagcaggagattcgaatgctgctgcacatctactcgaattcgattcagtccatggtagatgggtgagagatataaaggttaaagaagaagaaataataattggggaaaagaaattagcctacacatcttttaaaaattatcttgatgttccttgggaaaaatcttctgtagatattattttggaatgtacaggaaagaataaaaagccagacaaacttaatccatattttgattctcttgggatgaaaagagtaatagtagcttgtccagtaaagggtattgtagctggagaggaatcacttaatattgtttacggtataaatcaaagtctttatgacccttctaaacataaattagtaactgcagcatcttgcactacaaattgtttagctccgatagtaaaggtaatcaatgaaaatttttcaattaagcacggcgctattacaactattcacgatgttaccaacactcaagttcctgtagatttttataaaagtgatttgaggagagcaagaggatgtatgcaaagtttaatacctactactactggatctgctaaagctatcgctgagatcttcccagaattaaaaggaaaattaaatgggcatgcagtaagagttcctctacttaatggttctttaactgatgcagtttttgaattaaataatgaagtgtcaactgaacaagtaaatatggcactaaaggaagcttcagaaacttatttaaaaggaattcttggctacgaagaaagacctttagtttctgcagattatgtaaatgactctagaagttcaatagttgatagtttatcaactatggttgttaattcaaatttattaaagatatacgcttggtatgacaacgagtggggttacagctgcagacttgcagatcttactgaatatgtaatcaaaaaagagatttaat

SEQ ID NO: 215212 - DNA, 1012 bp, Unknown
  Bacterial polypeptide expressing nucleotide sequence isolated from the Sargasso Sea
aatgacaataaaagtagcaataaacggttttggtcgtatcggcagaaatgtcgcgcgcgcaattattagcgatcactctcatgaaattgatttgttagcaatcaatgactcagctccggttgaaacaaatctgcatctactgaaatatgactcaatacacgggacattagcagttaaaatggaaaaaataaactccgatttatttaaaattaataaaaaacaaataaaaaaattttcgtccaaagatccgaaagatataccatggggcgaacttgatattgatttagtgcttgagtgtacgggtaagtttaatgacaaaaaattatctgttaaacatatcaatgctggcgcgaaaaaagtattagtatcggcacctgcaaaaggtgtggatataacagcagtttttggagtaaatcatttagaaatcaaacccgatcataagataatatcaaacgcttcatgtacaacaaatgccctcgcaccactggcaatggtccttaatgatacagtgggaattgatactgcttttatgacaacaatacactcctacactggtgatcaacctacgctggacagaaatcacaaagatttatatcgatcaagatcggctgcacaatcaattattccaacaacaaccggagcggcaatttcagttggtgaggtgattcctcagttgaaaggaaaaatagatggaattgccatgcgggttccaataccaaatgtatctgcgatcgatttaaaatttacaacaaataaagatactagcataaatcagatcaacgaaattctagttcaagcttcaaaaaatcagttccaaaatattctaaatactacaaatgataaacttgtatccgttgatattaatcacgatagccattcagcagttatcgcattagatcaaactcgggttacaaataaaaaattagtaagggttatggcttggtacgataatgaatggggattttcacaaagaatgtgtgatatggccagacatatcagtagccttccatga

SEQ ID NO: 215213 - DNA, 997 bp, Unknown
  Bacterial polypeptide expressing nucleotide sequence isolated from the Sargasso Sea
atgagtgcagaagctataaaagtgtcatctgttctagatacttctcatttaaaggttcaatttccgtttaaagcaaaatatggaaactacataaatggaaaattcgtagaacctaaatcaggtaaatattttgataatgtgagcccgatttctaatgagaaaatctgttcagttgcgcgatcaaatgaaaaagacgtggaagcagcattggatgcagcccacgcagctttccctgagtggggtaagactgacatcacaacaagatcaaatatattatataagattgctgatgtcttagaaaagaatctaaacttattagctacagctgaatgtttagataatggaaaacctataagagaatgtatggcagcagatctaccattggtcatcgatcattggagatattttgctggtgtaattagagcagaagagggatcaattgctgaaatagccaataatcaatactcatataactttcatgaaccattaggagtagttggtcagatagttccatggaatttcccattattaatggcgacatggaaattagcaccagcgcttgctgcaggaaactgttcagttttaaaaccagcagagcaaactccagcatcaattatggtaatgatggaacttattggagatctattacctccaggagttgttaacattgtaagtggttttggattagaggcaggtaaacctttagcatcttcaaaaagagttgcaaaagttgcttttactggagaaactacaactggaagattgattatgcagtacgctgctcaaaatataattcctattactttggaattaggtgggaaatcgccaaacattttctttgaagacatcatggaaaaagatgatgatttctttgataagtgtattgaaggtttcgtaatgttcaatctgaatcaaggtgaagtttgtacttgtccaagtagagctcttatacaagagtctatctatgataaattcatggaaagagctattgctagaa

SEQ ID NO: 215214 - DNA, 1156 bp, Unknown
  Bacterial polypeptide expressing nucleotide sequence isolated from the Sargasso Sea
attagcagttgctgaatgtttagataacggaaaacctatcagagaatgtatggcagcagatttaccattggtcattgatcactggagatactttgctggagttattagagcagaagagggatctattgctgaaatagctaataatcaatactcatacaactttcatgaaccactaggtgtagttggtcaaatagttccatggaatttcccattattgatggctacatggaaattagcaccagcacttgctgcaggaaattgttcggttttaaaaccagctgagcaaacaccagcatcaatcatggtaatgatggaacttattggggacttattacctccaggtgttgtcaatattgtgagtggttttggattagaagcaggtaaacctttggcatcttctaaaagagttgcaaaagttgcatttactggtgaaacaactactggaagattaatcatgcagtatgctgcacaaaacataattcctattactttggaattaggcggaaaatctcctaacattttctttgaagatatcatggaaaaagatgatgacttctttgataagtgtatagaaggttttgtaatgtttaatctaaaccaaggtgaggtttgtacttgtccaagtagagctttagtacaagagtctatctatgataaattcatggaaagagctgtagcaagaacaaaagctgttgttcaagacaatcctttaaaaatggaaactatgattggagctcaagcctcagttgaacagatggagaaaataaaatcttatcttgaactaggtaaaaaagagggcgctaaagttctaactggtggaagtgttggtaaacttaatagtggattggaaaaaggtaattacattcaaccaactatttttgaagctaacaaccaaatgagaatctctcaagaagagatttttggaccagttgtatcagtgatcaaatttaaagatgaagcagaggcattaaaaattgccaatgatactctttatggtttgggagctgctgtatggactagaaatggcaatatagctcacagaatgggtagagcaatacaagcaggaatagtatggacaaattgttatcatgcttatccagcacactcaccatttggtggttacaaacaatcaggagttggaagagaaactcataaa

SEQ ID NO: 215215 - DNA, 472 bp, Unknown
  Bacterial polypeptide expressing nucleotide sequence isolated from the Sargasso Sea
gttttactgggagatcaaagaaccttagatcaaactcatagtgatttgagaagagctagaaccgcaactagttcaatgataccaacttctacaggagctgctaaagccttaagtttagttttgccaaaattaaaaggaaagcttgacggaacagcaattagagttcctacgcccaatgtttcactaattgactttactttttcaagtaaaaaaaaggcatcagtagatcttataaatcgttcaatgattaaagcttctaaaacaaaaaatcttaaaggaattttaacagttaataatctgcctctagtttcaatagattttaatcataatcaaagtagttcaatttttgatttaacccaaacacaagtcgttaaagataaattttgtcgagttttatcttggtatgataacgaatggggtttttcaaatagaatgatagatactttaataagtttaaaaaaatttttataag

SEQ ID NO: 215216 - DNA, 1012 bp, Unknown
  Bacterial polypeptide expressing nucleotide sequence isolated from the Sargasso Sea
atgactatccgtgtagcaataaatggttatggccgtatcggtagaaacgtattacgcgccctgtatgaaagcgaaaaagcttacccaatcaaaattgttgccatcaacgatttaggcgacgcttcaatcaacgctcacctgactaaatacgattcggtacatggtcgtttcaatgccaaagttgagcatgatgcagaagcaatttatgtcaacggcgacaagatcctcaccttccaagagcgcgatcctggtaaattaccttggggcgacttacaagttgacgtcgtgttcgaatgtacaggtatcttcacttctaaagaatctgtacagccacatttagcggcgggcgcgaaaaaagttattatctctgcaccaggcaaaaacgttgatgcaaccgtcgtttacggtgtgaacaacaatgtgttgaccgcggatatgacagttatctctaacgcctcatgtaccactaactgtttagcgcctttcgctaagccgttaaacgatgagattggcatcgaatcgggtctgatgaccaccatccacgcgtacaccaacgatcaacgtttatctgacgtataccacacagatttacgccgtgcgcgcgctgcagcactttcaatgatcccaactaaaacgggcgctgctgcggcagtaggtttagtggtgcctgaattacaaggtaaattcgatggtttagcagtacgtgtacccactgttaacgtgtctttagtggatctatctttcattgcagcacgtgataccactgttgaagaagttaacgccatcatcgaacgtgcagcagctgttgctccactgagcgaagtgttagccgtcaacaaagagccactggtgtctatcgacttcaaccacaatgcgttttcatctaacttcgatgcaacgcaaacccgcgttaacggccgtttagttaaagtcatggcatggtacgataacgaatggggcttcagtaaccgtatgttagataacgcggttgcactgatgaacgcgaagtaat

SEQ ID NO: 215217 - DNA, 1000 bp, Unknown
  Bacterial polypeptide expressing nucleotide sequence isolated from the Sargasso Sea
atgtcaataaaaataggtattaatggttttgggagaattggtagattagtttttaggtctgctattgagaatgatgattttgaagtaatttgtgtaaatgatctcttagaggtagagcacttagcatatttattaaaatatgattctgttcatggcacttttaacggttcagttgagatagtaaacgggaatttaatagtaaacggtaaaacaataactgtttcatctgaaaagaatccagaattaattaaatggggagatatgagtgttgatgttgtggcagagtgtacaggtctttttaccacaaaggaaaaagcaggccttcatataaatggtggatgcaaaaaggttgtaatatcggctccaagttcagatgttccaatgtttgtaatgggagtaaatcataacaatgttaatgggaatgatcttgttgtttcaaatgcttcatgcacaactaattgtttagctccaatagcaaaggtcttaaatgataattttctgattgaagagggtttaatgactactgttcatgctgtaacggcaacacagtttactgttgatggtccttctaaaaaggactatagaggtggaagaagctctcttttaaatattattccaagttctacaggagctgcaaaagcagtaacgaaagtaattccttctttagagggaaagctaacaggtatggcatttagaatcccaactgctaatgtttcagtagttgatctgactgtacgtttgaaaaaagatacatcctatgaagaaattaaaaaagtaatgctccaagcatcaaaaaacgagctaaaaggtatattgggttattgtgatgagcctgttgtttctcaagattttattggagataaaagaacttcaatatttgatgcttctgctggaatggagttaaattcaaatttttttaaaataatatcctggtatgataatgaatgtggttattcaaataaacttcttgatttagcaaaacatattcatacaatataat

SEQ ID NO: 215218 - DNA, 1012 bp, Unknown
  Bacterial polypeptide expressing nucleotide sequence isolated from the Sargasso Sea
atgactacgaatatcgctattaatggttttggacgaataggtaggttggtcctgcgggcgatttttgaaagcggaagaaaagacctaaaggtagtagcagttaatgacttaggaaccgtcgctacaaatgctcacctccttaaatgggatagtaaccacggtcgcttccccggtgaaataactgtgcaggatgattccatcgacataggatttgggccaataaagtttacctctgaaagagatcccaaacagcttcctcataaggaactagatgtagatattgtgatggagtgtactggcatattcactgaccgagacaaggcggcacgacatatagaggggggcgcgaaacgcgtaatcgtctctgcgccgtcaagaaatgccgatataactgtcgtctttggcgttaatcatgacaaaatcacgaaagagcacgaagtgatttcaagcgcctcatgcaccaccaattgtttagtgccggtggcttacgttcttaataatgcaatcggaatagaaacaggttacatgacgactgtgcatgcatacacaggcgatcagccgacacttgacacgtttcatggtgatcttcgcagagcccgtggcgctgcatcctccatggttcccacgtctacaggagcagctaaggcagtaggattagttttacccgaacttgccgggaaactagacggtgcagctattcgcgtcccaacatcaaacgtcagtctaatagatctcaaattcataccaaagcgtcccacaactgttgaggaaattaactcaaccataatcgaggccgccagcaacagcccattaaaagggatactcggaacaaacgacgaaccactggtatcgattgactttaatcataactcgaacagttcaacctttgaccttaaccaaactcaagtgatagaaggtggcttagttcgtgtgttggcgtggtatgataatgaatggggattctccacaaggatgtccgatacggcggcatttctaacggaaatgttgtaaa

SEQ ID NO: 215219 - DNA, 1384 bp, Unknown
  Bacterial polypeptide expressing nucleotide sequence isolated from the Sargasso Sea
atctgttcagttgcacgttcaaatgaaaaagacgtggaagcggcattagatgctgcacacgctgctttcccagaatggggaaagaccgacatcacaactagatcaaatatcttaaataaaattgctgatgtcttagaaaaaaatctaaacttattagcagtagctgaatgtttagataatggaaaacctatcagagaatgtatggcggcggatttgccattagttattgatcattggagatattttgctggagtgattagagcagaagagggctctattgcagagataagcaacaatcaatactcatacaactttcatgagccattaggagtggttggtcagatagttccatggaatttcccattgttgatggcaacatggaaattagcaccagctcttgctgcaggaaactgttcggttttaaaaccagctgaacaaacaccagcatcaattatggtaatgatggaacttattggagacttattacctccaggagttgtaaacattgttagtggttttggattagaggcaggtaaacctttagcttcatctaaaagagttgctaaagttgcatttactggcgaaacaacaactggaagattgattatgcagtatgctgcacaaaatatcattccaataactttggaactaggtggtaaatcacctaacattttctttgaggatgtcatggataaagatgatgatttctttgataaatgcattgaaggttttgtaatgttcaatctaaaccaaggtgaggtatgtacttgtccaagtagagctctaatacaagagtctatctatgataaattcatggaaagagctattgcaagaacaaaggcagttgtacaagataacccactaaaaatggagacaatgattggagctcaagcgtctgtagagcaaatggagaagatcaaatcttatctagagcttggaaaaaaagagggcgcaaaggttcttacaggaggaagtgttggtaaacttaatagtggattggaaaaaggtaactatatccaaccaactatttttgaggctaataatagcatgagaatctctcaagaggagatttttggccctgtagtatctgtgattaaatttaaagatgaagcagaagcattgaaaattgctaatgatactctttatggtttaggagcagctgtgtggacaagaaatggaaatatagctcatagaatgggtagagaaatacaagcgggaatagtatggactaattgttatcatgcttatccagctcactcaccatttggaggatacaaacaatctggagttggaagagaaactcataaaatgatgcttaatcattacagacagaataagaacttacatgtctcttatgctgagaaaaaattaggcttcttttaaa

SEQ ID NO: 215220 - DNA, 608 bp, Unknown
  Bacterial polypeptide expressing nucleotide sequence isolated from the Sargasso Sea
tatggttaaagtaggaattaatggttttggcagaatagggcgacttatcttaagagctatattagaaaattataaaggaaaaattcaagtagtaggcatcaatgatctcggctctatcgaagctaacgctcatctaataaaatttgatagtacacacggcacattaaataatgatgtaaagacttcaaaagagggttttcaaataggagaccaaaatattaaagtttttgctgaaagagatcctgccaaattaccttggggaaaaattggtgctgatgtagttttggaatgcactggtttctttttagataaaaaatcagctggtaaacatttagatgctggagctaagaaagtaatcatttctgcgccagctaaagaagtagattttacagtggttcaaggagtaaacagcaaagatttaaaaaaagaacataatataatatcaaatggttcttgcacaactaattgtctagcaccagtagctatggtcttggaaaatacttttggtattgaatatggatatatgactactattcatagctacacaggagatcaaaaacttctagatactctccacaaagacttaagaagagcaagagcttcgggtg

SEQ ID NO: 215221 - DNA, 223 bp, Unknown
  Bacterial polypeptide expressing nucleotide sequence isolated from the Sargasso Sea
atgacagttcgaataggaattaatggttttggacgtattggaagaatggttgtacgtgaagccgctaaaaactctaatgttgagatagttgcaataaacgacctcgtaccttccaacaacctagcatatttactaaaatatgattccacacatggcagatttaacggagaagtagttgcaggacaaaacagcataggaattaatggtaaaaatattgaatgcc

SEQ ID NO: 215222 - DNA, 532 bp, Unknown
  Bacterial polypeptide expressing nucleotide sequence isolated from the Sargasso Sea
atggcaaaaatattaaatgaatcatttggtatacaaatgggggtcataaatacaatccatgcatacactaatgatcaaagattagccgatgtaccacattctgattggcgtagaagtcgagctgcagctgagaatgttattccaaccacaactggggctgctagagcagtaggtaaggtactaccagaacttgatggtaaacttgatggaatagctatgagggttcctgtccctgacggctctgttgtcgatctaaatgttcgtcttgataaagaggtaacaacagacgaagtcaatgatgtaattagatccgcatctgaatcgggaccattgaaaaatgtattacaatattctaatcttccggttgtttctacagatataattgggaatccccattcctcaatatttgatgctccatttacaagggttattcaagggaactttgtaaaaactcttaactggtatgataacgaatggggctactcaaaccgtgtagtagaccttctggagacattacacgctctagactagg

SEQ ID NO: 215223 - DNA, 1026 bp, Unknown
  Bacterial polypeptide expressing nucleotide sequence isolated from the Sargasso Sea
ttccattattaatggcgacatggaaacttgcaccagctttggctgcaggaaactgctcagttctaaaaccagctgaacaaacaccagcatcaattatggtaatgatggaacttattggagacttattgcctccaggagtagttaacatcgtaagtggttacgggttagaagcaggtaagcctttagcatcatcaaaaagagttgctaaagtcgctttcacaggtgaaacaacaactggaagattaataatgcagtatgctgcacaaaacataattccaattaccttggaattaggcggcaaatctccaaacatattttttgaggacattatgaataaagatgatgatttcttagataaatgtgttgaaggttttgtgatgttcaacctaaaccaaggtgaggtatgtacttgcccaagcagagcgttagttcaagagtctatatatgataaatttatggaaagatgcatcaaaagaactaaagcagttgttcaagacaaccctttaaaaatggaaactatgatcggagcgcaagcttctgtagaacaaatggagaagataaaatcttaccttgatctaggaaaaaaagaaggagctaaagttcttactgggggaagcgttggaaaacttaatagtggattggaaaaaggaaattatattcaaccaactatttttgaagctaaaaacaatatgcgtatttctcaagaagaaatttttggcccggttgtttctgtaattaaatttaaagatgaagcagacgcattgagaattgcgaatgacactctttatggtttaggagcaggtgtttggactagaaatgggaacattgcttatagaatgggaagagctatacaagcaggaatagtatggacaaattgttatcatgcttatccagctcactcgccatttggtggttataaacagtctggagtgggtagagaaacacataagatgatgcttaatcactatagacaaaacaaaaatcttcatgtttcttacgcagaaaagaaattgggattcttttaaa

SEQ ID NO: 215224 - DNA, 781 bp, Unknown
  Bacterial polypeptide expressing nucleotide sequence isolated from the Sargasso Sea
aatgtcaaaaaatgttggaataaatggatttggaagaattggtagacaaattctcagaattatagccgaagaaaatattgatataaatataactgctataaatggaagatctgatcttgaaacatacaaacatcttcttaagtatgattctgcttatggaaaaataaaattaacagtcgattgtgacgataagtttctttatcttggtgatagaaagattagatttttcagtgaaagtatccctgaaaatataccctggcaagaagaagatgtaaaaatagttgttgaatcatcaggaaaattcaactcaaaagaaaaagcatcagggcatatgaaaaatggtgtagaaaaagtactactaactgcaccaggaaaaaatgaagatgcaacaatagtaatgggcgtgaacgaaaatatctatgatcactcgaatcacgagattatttctaactcttcatgtactacaaactgtcttgcaccagtaataaaaatccttgaagataattttcaaataaaaaatggttttatgacaactattcattcttacacaaacgatcaaaacatcttagataactcacataaagatctcagaagagcaagagctggtgcttcaagcataataccaacaacaacaggagctgctaagtcagttggaaaagtaattgagtcagttgagggaaaattagatggaatggcatttcgagtcccaactccaagttgttctgttgtagatttaaacgttgttcttgaaaagaaaacaaatgcaaaagaaataaatatc

SEQ ID NO: 215225 - DNA, 1354 bp, Unknown
  Bacterial polypeptide expressing nucleotide sequence isolated from the Sargasso Sea
atttacggtaagtcattggtaaatgagtcacctgtcgcaatcatgaaagctcataggtttgcaagacaaactgataataatgaattaagcgaacttgagacatatcctattcttcaacatataagcacattagagcttcaggattgtgaaatagatataggagaaattgctgtaagttgtcctttttttggtgatattaaagatgattcttcaaagattcctaattatatcaattcagagctcgaatcagtaataaatatagattctaaaaggcctgaagttcctgcaaatattgttttatatgggtttggaagaattggcagactcgtagcaagaatgatgactcaaacaactggtcctggaaattattttagattaaaagctattgtcattagaaaggcatctgatgatgatatcttcaaaagagctagtttattaacaagagattctgttcatggtccatttgacggaactgtaagggttgatgaagaaaattcaacacttgtaataaatggtaatccagtaaaagtaatatatgcaacaaatccagatgaggttaactatgcagatcatgaaattcataatcctatagttattgacaatactggtgtttggagagataaaaaaggcttatcaaaacatattgaatcaggagcatccaaagtaattctcacagcaccagccaaaggcgatctaaaaaatatagtttatggaataaatgatgacattcttgacgataacgattcaataatatcagcagcatcatgtacaacaaatgcaatagttcctattttaaaagctgttaatgatgaatataaaatcaaaggcggtcatattgaaactgttcatgcatatacaaatgatcaaaatctaatagataattttcataaaggagatagaagaggtcgtggcgctcccttgaatatggttattacaacaacaggagctgtaaaggcagttgcaaaagcattacctgaattagaaggaaagctaacaggaaatgctataagagtcccaaccccaaatgtaagtttggcaatactatcattagcgcttgataatgaagtaacagttgaccaaattaatcaatatttaaagtctattgctttccattcaaaatatagagaaataattggttttgttaactcatctgaaattgtatctactgatttttattctagtccatttgcttcaattattgattctcaagcaactattgctagtaagaatagagtgactttgtattgttggtacgataatgaatatggatactccaaacaagttattggtctgacaaaaaaagtagcaaaaattgaacttccaagattgccaaatccagtcaataaagcctaga

SEQ ID NO: 215226 - DNA, 1210 bp, Unknown
  Bacterial polypeptide expressing nucleotide sequence isolated from the Sargasso Sea
gattgtgagattgatataggagagatagtagtggatttcatgagagaaaataattctttagatgattcacaaattgactctcacattaaatcatatattttagatccattagataaagttgatcagcaaagaccttcaaaaccccaggacatagttttgtatgggtttggtcgaatcggtaggttagtttcacgcattatggctcaaatgacaggcccaggtaattattacaggctcagagcaattgtcgtgagaaaagtatcagatacaaacgatctacttaaacgagcgagtttgttaagacgtgactctgtgcacggttcattccatggaactattagagttgataatgagacggaaactttagtaataaatggaaatcctgtaaagatcatctatgcaaatggaccaaatgactttaattactctgattacgatatagataatccaattgttatagataatacaggtgtctggagagacgagaaagatttatctcttcatttagaatctggtgctagtaaagttgttttaactgcacctggtaagggtcaaataaagaatattgttaacggtatcaataacgacatattaaatgaatctgataatgtaatctcagctgcttcttgcacgactaatgcaattgttccggttttagatattctaaataaagaatattcaataacatcaggacatatagaaactgttcatgcatacacgaatgatcaaaatctaatcgacaattatcataagaaggatagaagaggaagaagtgctgctttaaatatggtcataacatccacaggagcagtaaaagcagtttctaaagcattacctgaactcgatggaaaattaactggcaatgctataagagttccgactccaaatgtaagtttggctgtaatgtcaataacagtcaaaaagaatgatctaaacaaggaagatgttaatgaatttctcagaaagacagcctttaactctaagtatagagaaattgttggatttgttaactccactgagattgtctcctctgatttttactcaagtcctttcgcttccgttattgattcacaagcaactatagtttctgacaataaaattactttatattgttggtatgacaatgagtatggttattcagttcaagttgttaatttagttaaaaatattgctggcataaatctcattagattgcccgtaaaggtttgat

SEQ ID NO: 215227 - DNA, 1015 bp, Unknown
  Bacterial polypeptide expressing nucleotide sequence isolated from the Sargasso Sea
atggcaatcaaaatcggcattaatggcttcggccgtatggggcgtttagccctgcgcgcggcatgggactgggatgaggtggagtttgtgcagattaacgatcccgcgggggatgcggccaccttagcccatttgcttgagtttgattctgtccatggccgctggtgttattccgtgacggcgagtaatgatcagatccacattcaagataaaagcattcgcaccacacgtaataaaacgattgccgagaccgattgggcgggatgcgatgtagtgattgaagcctctggggtgatgaaaaccaaagccttattacaagcctatttagatcaaggtgttaagcgggtggttgtcactgctcccgtaaaagaagagggcgtgttaaatgtggtgatgggcgtgaaccatcagttatatgacccagccatgcacccaatcgtcactgcagcctcttgcaccactaattgtcttgcgcctgtggtgaaagtgatccacgagcagatcggcatcaaacacggttctatgacgactatccacgatattactaacactcaaaccattctcgatgcgccacataaagatttacgtcgcgcccgcgcctgtggtttgagtttaatcccaaccactactggcagcgcgacggcgattacccatattttccctgagcttaagggcaagcttaatggccacgccgtgcgggtgccgcttgccaatgcctctctaaccgattgtgtatttgagcttgaacgcagcgtgaccgaagaagaagtgaatgcgctgctacaaaccgccgctgagggggagcttaaggggattttaggttacgaggaacggccgctggtgtcggtggattacaaaaccgatccccgttcgagcattgtcgatgcgctctcgaccatggtggtgaatggtactcagctaaaactctacgtgtggtacgacaatgaatggggatatgccaaccgtacggcagagcttgcccgcttagtcggccagcttgatgtgccgcgttagg

SEQ ID NO: 215228 - DNA, 667 bp, Unknown
  Bacterial polypeptide expressing nucleotide sequence isolated from the Sargasso Sea
tatgtcaataaaaataggtattaatggttttggtagaattggtagattagtttttaggactgctattgagaatgatgattttgaagtaatgtgtataaatgatctcctagaagtagaacatttagcatatttactaaagtacgattctgtgcatggcatttttaatggatcggttgagacagtgaatggaaatttaatagtcaacggtaaaaccataaccgtttcatctgaaaagaatcctgaactaattaaatggggagatatgagtgttgatgttgttgcagagtgtacaggtcttttcacgacaaaagataaagcaggtcttcatatcagtggcggctgcaaaaaggttgttatatctgctccaagttcagatgttccaatgtttgtaatgggagtaaatcataaagatgttaatggaaatgatcttgttgtttcaaatgcttcatgtacaacaaattgtttagctccgatagcaaaggtattaaatgataattttctgattcaagaggggctaatgactactgttcatgctgtaacagcaacacagtttactgttgatggtccttctaaaaaggactatagaggtggaagaagttctcttttaaatattattccaagttctacaggcgctgcaaaagcagtaacgaaagttataccttctttg

SEQ ID NO: 215229 - DNA, 401 bp, Unknown
  Bacterial polypeptide expressing nucleotide sequence isolated from the Sargasso Sea
aggagctatgataccaacatctacaggtgctgcaaaagctatgagtctagttttacctagtttgaaaggaaaattagacggaacagcaattagagttcccacaccaaatgtctcactaattgatttaacagttgttactgaaaaagaggtaacagttgatgaaattaattcgtcaatgaaaaaagcagccaaaggagatctaaagggaattttagatgtgaatgaaaaaccactagtatccaaagatttcaatcacaatgctcatagttctatttttgatctcactcaaactcaagttataaaaggtaagtttagtagagtgttatcttggtatgataatgagtggggtttttcaaacagaatgtgtgacactactattcaaatagctggtttaatttaaa

SEQ ID NO: 215230 - DNA, 916 bp, Unknown
  Bacterial polypeptide expressing nucleotide sequence isolated from the Sargasso Sea
acttattggagacttattgcctccaggagtagttaatatcgtaagtggttacggattagaagcaggtaagcctttagcatcatcaaaaagagttgctaaagttgcttttacaggtgaaacaacaactggaagattaataatgcagtatgctgcacaaaacataattccaattactctggaattaggtggtaaatctccaaacatattttttgaagacattatgaataaagatgatgatttcttagataaatgtgtagaaggttttgtaatgtttaatctaaaccaaggtgaggtatgtacttgcccaagcagagcattagttcaagagtctatctacgataaatttatggaaagatgtatcaaaagaactaaagcagttgttcaagacaatcctttaaaaatggaaactatgatcggagcacaagcttctgtagaacaaatggagaagataaaatcttaccttgatctaggaaaaaaagaaggtgctaaagttcttacagggggaagcgttggaaaacttaatagtggattggaaaagggaaattatattcaaccaactatttttgaagctaaaaacaatatgcgtatttctcaagaagaaatctttggcccggttgtttctgtaattaaatttaaagatgaagcagacgcattgagaattgcgaatgacactctttatggtttaggagcaggtgtttggactagaaatgggaatattgcttatagaatgggaagagctatacaagcagggatagtatggacaaattgttatcatgcttacccggctcactcgccatttggtggttataaacagtctggagtgggtagagaaacgcataagatgatgcttaatcactatagacaaaataaaaatcttcatgtttcttacgcagagaagaaattgggatttttttaa

SEQ ID NO: 215231 - DNA, 443 bp, Unknown
  Bacterial polypeptide expressing nucleotide sequence isolated from the Sargasso Sea
tcaaaatcatagcgttttgagaagagcaagaggtgcatcaatttctatgattccaacttctactggtgcagcaaaagctctaagtttagttttgcctaaacttaaaggaaaattagatggaacagcaataagagtaccaacacccaatgtgtctctaattgatttgacttttgtatctaagaaaaaaacatcagcagaaaaaataaacaacttaattttaaaagctagtagaacttccagtttaaaaaatatactttctacaaataatttgcctttagtttcaatagactttaaccataatgctagcagctctatatttgatttaactcaaacccaagttttaaataataaattttgcagaatattatcgtggtatgataatgagtggggattctcaaatagaatggtagaaacaatgatggatttaaagaaatttgtatagg

SEQ ID NO: 215232 - DNA, 1018 bp, Unknown
  Bacterial polypeptide expressing nucleotide sequence isolated from the Sargasso Sea
aatgaaaaaaaaagtagcgattaatggttttggtagaataggtaggcttgtttatcgagcatttttggagagattaaatgaatttagtaatcaatatgagataagctatataaacgacttggctgatattgactcaaatattcacttactaaaatatgatagtattcacggacctctcaataaggaggttaataagatttccaatgaacaattttcaataggggaaaatacagtaactgttacatctgagaaaaaccccattgatttgaaatggaaagataagaaagtcgatattattttagagtgcacgggtgtttttgcatctaaagaaaaggcaatgtctcatatcgaaagcggagcaagtaaagttatagtttctgctccatgttctggagctgatataacggttgttcaaggagttaataacaaaaatattaacatagatcatcaagtcatctctaatgcctcttgtacaactaactgtctggctcctgtagcttttgtaatagatcaagagtttggaattgaaaatggatatatgacaactattcactcttatactggagatcaaaatacagtagacacatttcataaagatcttagaagagcaagagcagcatcaagtaacataataccaacaagcacaggtgcagcaaaagctgtcggcctcgtccttcctcatttaaatggaaaattagatggtacagctataagagttccaacgccaaatgtatctctagtagattttaaatttaatacaaaaaaaaatatcacaattgaaaatttaaataacaaattccaagaatatgcaaatagctctcttaaagatattttaggagtggatacagaccctaaagtatcaagtgattataatcatgacgcaaggagttctattttagatttaagtgaaacaacaacagtgtcagataattttggtagagtattgacttggtatgataacgagtggggattttcaaatagaatgcttgagacaactgctcaagtgtgtaatttatag

SEQ ID NO: 215233 - DNA, 787 bp, Unknown
  Bacterial polypeptide expressing nucleotide sequence isolated from the Sargasso Sea
tatgacaattcgcatcggtatcaatggttttggccgtattggacgtctagtaatgcgcgcagctgcagagcgcaacgacatcgaagttgttgcaataaacgacttgctagacacggactacattgcttatctattgaaatacgactcgactcacggtttgttcgacggtgaagttacagtagataacaatagcctagttgtaaacggcaaaactatccgtattacttctgaaagagatccagcagcacttaagtgggatgaagtaggcgttgacgtagttgttgaatctacaggcctattccttactaaagagacggcgactaagcatatcgaagcaggtgcgaaaaaagttgtgatgtctgcgccttctaaagatgacacaccaatgtttgtaatgggtgttaaccaggacagttacgctggtgaaaacattgtttcaaacgcatcttgtacaactaactgtcttgctccacttgcaaaagttcttaacgacaagttcggtattgtagatggactaatgacgactgtgcacgcgacgactgctactcagaaaacggttgacggcccttctatgaaagattggcgtggtggccgcggtgctggtcagaacatcattccatcatcaacgggtgcagctaaggcggtaggtaaagttattcctgagcttaacggcaaacttaccggtatggctttccgtgtacctacgccaaacgtttcagtagtagaccttactgtaaacctagcgaagcctgctagctacgcagaaatctgtgcagcaagaaagaag

SEQ ID NO: 215234 - DNA, 1012 bp, Unknown
  Bacterial polypeptide expressing nucleotide sequence isolated from the Sargasso Sea
tatggctgtaaatgtagcaataagtgggtttggaagaattggaagattggttttgagatcaattatagagagcaaaagaaaagatatcaatgtcgtggctataaacgatttagctccaatagaaacaaacgcatttttacttgcaaatgatacagttcatggccctcttaatgaaaaagtgtcgtttaaacgaaataaaatgatcattggcagaaaaaatattacagtattgagtcagagagatcctaaaaaacttccctggaaaagaatgaaaattgacgtcgctcttgaatgtactggattgtttacttcaaaagataaggcggcaatgcatattaaggctggtgcaaaaaaggttttagtctcagcgccatgtacaaatgctgataaaaccattgtatatggagtaaatgaagatgagattacaaaagaagacctagttgtatccaatgcgtcttgcacaacaaattgtctagctcctgttgcaaaagttttacacgataaattcaaaattgttcatggctatatgacaacgatacatgcttttactggggaccaaagtgttctagatacatttcactcagacctaagaagagctcgagctgcttccttgtcaatgatacctacatccacaggagctgcaaaggcagtaggactcgttatgcctgagctttctggtaagttagatggaactgcaattagagtaccaacacctaacgtttcattaatcgactttaaatttgtttctaaaaaaagaatgacagtcgatagtattaataaggctatgtcggctgcagcaaaatcaaataagctaaatggaatcctagatgtaaattctaaaccattggtttcatctgattttaatcataatcctgcctcgtctaattttgatttaactcaaacacaagtaattgatggaaagtttggaagagttttaagttggtatgataatgagtggggcttttcaaatcgaatgtgtgatactgctgttgcgatgaaaagatctagatag

SEQ ID NO: 215235 - DNA, 1027 bp, Unknown
  Bacterial polypeptide expressing nucleotide sequence isolated from the Sargasso Sea
atgaccctgcgcgttgcgatcaatggattcggccgaattggtcgcaatgtgatgcggggttggatcagccgtggtgctgatacgggcctggagatcgtgggtatgaactccacgtccgatcccaagaccagcgctcacctgctgacctacgactcgatcctgggcaagctcgatcccagcgtcaagatcgaaaccaccgacgacaccatgctggtcaacggcaaggagatcaagttcttcgctgaccgcaaccccctgaactgcccttggaaggactggggtgtcgatctggtgatcgaatccaccggtgtgttcaacaccgacgaaaaagccagcatgcacctcgaggcaggcgccagcaaggtgatcctgactgcccctggcaaaggtgatggcgtcggcactttcgtggtgggcgtcaatgacgaccagtaccgccatgaggactggaacatcctctccaacgccagctgcaccaccaactgcctggcccccatcgtcaaggttctggatcagaacttcggcctcgactggggtctgatgaccaccatccacagctacaccggcgaccagcggatcctggacaacagccaccgcgacctgcgtcgcgcccgtgctgctgctctgaacatggtccccaccaccaccggtgcggccaaggctgtggccctggtataccccgaggtgaagggcaagctcaccggtttcgccatgcgcgttcccacccccaacgtctctgccgttgacctcaccttcggaccgtcccgtgccaccagcgttgatgaggtgaaggctgtgatcaaggccgcttctgagaacggcatgaagggcatcatcaagtacagcgacctgcccctggtctccaccgattacgccggcaccaacgaatccacaatctttgatgccgacctcacttacgccatgggcgacaaggctgtgaagatcctggcctggtacgacaacgagtggggctacagccagcgcgtcgttgatctggctgaagtggtggcccgcaactggaagtgat

SEQ ID NO: 215236 - DNA, 307 bp, Unknown
  Bacterial polypeptide expressing nucleotide sequence isolated from the Sargasso Sea
aatggtaaaaattggaattaacggttttggaagaataggcaggctaattctcagagctttattagaaaattacaaagataaaattcaagttgttggtattaacgatcttggttctattgataccaatgcacatttaataaaatatgatagtacccacggaactttgccacatgatgtgagcacatcaaaagacggttttaaaattttaaatcaaaatataaaagtttatgctgaaagagatccagcgaatttaccctggggtaaagtcggtgctgatattgttttagaatgcacaggattattttga

SEQ ID NO: 215237 - DNA, 1024 bp, Unknown
  Bacterial polypeptide expressing nucleotide sequence isolated from the Sargasso Sea
atgaaaattggaattaatggttttggaagaattggcagattagttttcagagcattatgggatagagctgatatagaaataactcatataaatgagatagcaggagattcgaatgccgctgcgcatttactcgaattcgattcagtccatggcagatgggggaaagatataaaggttaaagaagaagaaataataattgagggaaagaaattagactacacatcttttaaaaattatcttgatgttccttgggaaaaatcttctgtagatattattttggaatgtacaggaaagaataaaaagccagacaaactaaatccctattttgattctctagggatgaaaagagtaatagtagcttgtccagttaaaggagttgttgcagaagccgaatcacttaatattgtttacggtataaatcaaagtctttacgacccttccaaacataaattagtaactgctgcatcttgcactacaaattgtttagctccaatagtaaaggtaatcaatgaaaatttttctattaagcacggcgctattacaactattcacgatgttaccaacactcaagttcctgtagatttttataaaagtgatttgaggagagcaagaggatgtatgcaaagtttaatccctactaccactggatctgctaaagctattgctgagatctttccagaattaaaaggaaaattaaatgggcatgcagtaagagttcctctacttaatggctctttaactgatgcagtttttgaattaaataaagaagtgacaactgaacaagtaaatttggcactaaaggaagcttcagaaacttatttaaaaggaattcttggctacgaggaaagacctttagtttctgcagattatgtaaatgactctagaagttcaatagttgatagtttatcaacgatggttgttaattcaaatttattaaagatatacgcttggtatgacaacgagtggggttacagctgcagacttgcagatcttactgaatatgtaatcaaaaaagagatttaat

SEQ ID NO: 215238 - DNA, 1024 bp, Unknown
  Bacterial polypeptide expressing nucleotide sequence isolated from the Sargasso Sea
tatgactttgcgtgttgcaattaacggctttggcagaattggtcgaaactttatgcgttgttggcttagtagaggggcttacaccaatattgaagttgtcggaattaacgttacatcagatcctaagactaatgctcatttattaaaatatgactcagtccttggtcaacttgatggtgttgatattcaatatactgatgatacttttgtaattaataacaagacaattaaatgtttctcagatagaaacccactgaatctcccttggaaagactggggtgtagatttggttattgaatctactggagtatttaatacagacgtaggtgcaagtaagcacttagaagtaggagcaaaaaaagttatcttaactgcgcctggtaaaggggatggcgttggtacttatgtagttggagttaatgctgataaatataaacacaaagattacgatattttgagtaatgctagttgtacaacgaactgtttagctccagtagttaaagttttagatcaaacttttgggattaataaaggtttgatgactacaattcatagttatacaggtgatcaaagaattttagataatagtcatagagatctaagaagggctagagccgctgcaacaaacatagttcctacttctacaggagctgcaaaagcagtcgctcttgtatacccagaaatgaaaggcaaattaacaggaattgcaatgagagttccaactcctaacgtttcagcagtagattttgtttttgaatcttctaaatctgtcactgctgaagaagtcaataatgctctcaaggaagcatctctaagtacaatgaaaggcattattaagtatggagatgaaccattagtgtcaagcgattatgcaggtaccaatgaatcatcaattgtagatagtgatcttactatgtgtatcggagataaccttgtaaaggtgcttgcatggtatgacaatgagtggggttatagtcagagagttgtagatctagcagaaattgttgctaaaaattgggagtaa

SEQ ID NO: 215239 - DNA, 787 bp, Unknown
  Bacterial polypeptide expressing nucleotide sequence isolated from the Sargasso Sea
tatctgcagagcgagaatcctggttccattccatggtcttcggaagatgttcaaatcgttgttgaaagcactggcttcttcactgatgcaacaaaagctgtcgcacataaacgtgacagtgtgaagaaagtcgtcatatccgctccagcaaaaaatgaagacctcacaatggttctgggtgttaatgattctgcatatgacccctcgaaacatcatgtgatttcgaatgcttcatgtactaccaatggtttagcaccagtcgcaaaagtactgcatgagacatacggaattgatcgtggtcttctcacaaccgtacatgcgtatacaaattcacaacggactgttgatacggcagcaaaagatcttcgtgatgcgcgtgctgctgctctcaatatcgttccaagtggcacaggagctgcaaaggcagtcggccttgtgatccctgaactacagggcaagtttactggcatggccttccgtgttccgacaccaacggtcagtgtcgtagattttacggccatactgaataaagatgctcctccagaggacatcaatgctgctatgaaaaaagctgcagacggtcccttgaagggcatcctccggtacacagataagccacttgtttcaacagatatgcgtggtgatcctcatagctccattttctctgctgtggatactatcggtctcggaaactttgtgaaggttgtaagttggtatgacaacgaatggggttattcaaaccgcgtcgcagaccttctcaattttttagagaacaaggggctttaat

SEQ ID NO: 215240 - DNA, 871 bp, Unknown
  Bacterial polypeptide expressing nucleotide sequence isolated from the Sargasso Sea
ttgttaagatatgattcagtccatggaccatttccaggaactatcactgtatctgactcaagtattgatttggggaatggctcaatagctgttcttaatgaaagatatccatcaaaactgccttgggatgatctccaagtagacgtagctctagagtgcacaggtctatttacctcaagagatgctgcgggccaacatatctcagctggtgccaaaaaggttttaatatcagcaccaagtaatgatgcggattttactgtggtttatggagtaaaccatgatcaaatctctccagatcataagataatctccaatgcaagttgtacaactaattgtcttgccccagttgttgacgttctaaacaaatctattggtattgagcgtgcttttatgacaacagtgcatgcttatacacttgatcagaatattttagactcgctacattcagacttacgccgtgcaaggagtgctggtagctcaatgatacctacttcaacaggagcagcaaaagcggttgggatagtattacccgaacttaaaggcaaaattgatggtacggcgataagagtcccgacagctaatgtatcaatggtagatctaaagtttgtttcatcaaaacaaactaatatagaggaaattaatttagcgatttccaaagcatcagaaacacatctcaaaaatgtccttggttataatgaagaacccctcgtctcagtagactttaatcataacccatgcagttctagttttgatgctacacaaactaatgtagttgataaaactctttgcagagtgctgacatggtatgacaatgaatgggggttttctaatagaatgggagatgttgcagctttgttgggcgccctataag

SEQ ID NO: 215241 - DNA, 790 bp, Unknown
  Bacterial polypeptide expressing nucleotide sequence isolated from the Sargasso Sea
atgacagtaaaaattggtattaatggtttgggtagaataggaagaatgataatcagatcattgattgaaaataataataaaaaagtagaaattaaacacatcaatagtagatcaaattccaaagttgtttcctcattattaaaatatgattctattcatggaaaatttaattgtgaaattaaatatggagatagccacttaaacataaatggtaaaaaaatcacatgctcacaacattcaaatttaaatgaaattaattggaagaaatatggtgtggattatgttttagaatgtacaggaaaatttaattcaaaagaaaagctcaatactcacataaaaaatggtgcaaaaaaagttattgtttccgcaccttgtaaaaatgctgacaaaactatagtttatggagtaaatcacaaatcgattagcaaaaaagatttagtaatttctgcagcttcttgcactactaattgccttgcgccaatcgcatacgtgttaaataaggaatttaaaatagaaaaaggttttatgacaacaattcattcatacacaactgaccaaagactattggataactctcataaagatccaagacgagcgagatctgcaactcagtctatggtgccaacttctacaggtgcttcgaaagctatcggagaaattatacctgaactaaaaggcaaactcgaaggtctggctataagagtgccaactccaaatgtttcgctagtagatctggtatttaattcaaaaaacaaactaactgtaaaaaaaattaatgaatcatttagaa

SEQ ID NO: 215242 - DNA, 356 bp, Unknown
  Bacterial polypeptide expressing nucleotide sequence isolated from the Sargasso Sea
gatgacaaaaatcggaataaatggctttggtaggattggcagacttgttttaagagctttattggaaaattataaggataaaattcaagttgttgctataaacgatctaggctcaattgaaaccaacgctcacttaattaaatatgatagtacacatggtactttaaatcatgatgttaaaacatcaaaagatggtttcgaaatttcaaatcaaaagataaaggtttttgctgaaaaggaccctggaaaaatttcttggggtaaagttggtgctgatgttgttttagagtgtaccggtatttttttagacaaatcatctgcgcaaaaccatattaagggtggggcaaaaaaagtaa

SEQ ID NO: 215243 - DNA, 1555 bp, Unknown
  Bacterial polypeptide expressing nucleotide sequence isolated from the Sargasso Sea
aatgagcacacaacaagcaaaaagctcgaaagtgtcttctgctctagatacctctcatttaaaagtaaaatttccatttaaagctaaatacggcaattatataaatggtaaatttgtagaacctaaatctggtaaatattttgataatgttagcccgataaataatgagaagatctgttcagttgcacgatcgaatgaaaaagatgtagatgctgcattagacgcagctcacgcagctttccttgaatggggaaagacagacatcactactagatcaaatattttgaataaaatagctgatgttattgaaaaaaatctaaacttattggcaacagctgaatgtttagataatggaaagccaatcagggagtgtatggcagcagacttgccattggtagttgatcattggagatactttgctggagtaataagagcagaagaaggatcaattgcagagataagcaataatcaatactcttacaactttcacgaacctttaggagttgtaggtcagattattccatggaactttccattattaatggcaacatggaaattagctccagctcttgcagcaggaaactgtgttgtattaaaaccagctgaacaaacaccagcatccattaatgttttaatggaacttattggagatttattacctccaggtgttgttaacattgttagtggttatggattggaagcaggtaaacctttagcatcttctaaaagagttgcaaaagttgcatttactggcgaaacaactactggaagattgattatgcagtacgctgcacaaaacataattccaattactttggaattaggtggaaaatctccaaacattttctttgaagatgtcatggaaaaagatgatgacttctttgataaatgtattgaaggttttgttatgttcaatcttaaccaaggtgaagtttgtacttgtccaagcagagctttaattcaagagtcaatctatgataaattcatggagagagctatcgcaagaactaaagcagtaaaacaagacaatcctttaaaaatggaaacaatgatcggagcacaagcgtctgtagagcagatggaaaagattaaatcttatcttgaactcggtaaaaaagagggcgctaaagttctaaccggaggaagtgttgctaaacttaatagtggattggaaaaaggaaactatattcaaccaactatttttgaagctaaaaataacatgcgtatctctcaagaagagatcttcggacctgttgtatctgtgattaaatttaaagatgaagcagaggcattaaaaattgctaatgatactctttatggtttaggagcagcagtatggactagagatggtaatacagctcacagaatgggtagagcaatacaagccggaatagtgtggacaaattgttatcacgcttatccagctcactcaccatttggaggttataaacagtctggtgtgggaagagaaactcataaaatgatgcttaatcattacagacaaaacaagaacttacacgtttcttacgctgagaagaaattgggattcttttaa

SEQ ID NO: 215244 - DNA, 1327 bp, Unknown
  Bacterial polypeptide expressing nucleotide sequence isolated from the Sargasso Sea
tcacgcagctttccctgagtggggaaagacagacatcactacaagatcaaacatcttgtataaaattgctgatgttttagaaaaaaatctaaacttattagctgtagccgaatgtttagataatggaaaacctatcagagaatgtatggcggcagatttacctttggttattgatcattggagatattttgctggggtaattagagcggaagaaggatctatcgctgaaattgctaataaccaatactcatacaattttcatgaaccattaggagtagttggtcagatagttccgtggaatttcccattattaatggcaacatggaagttagcaccagcacttgctgcaggaaactgttcagttttaaaaccagctgagcaaactccagcatcaattatggtaatgatggaactaattggagatttattgcctccaggagtagttaacattgttagtggttttggattagaagcaggtaaacctttagcgtcctctaaaagagttgctaaagttgcatttactggtgaaacaacaactggaagattgattatgcagtatgctgcacaaaacatcattccaattactttggaattagggggaaaatctccgaatattttctttgaagatgttatggaaaaagatgatgacttctttgataaatgtatcgaaggtttcgtcatgttcaatcttaaccaaggtgaagtttgtacttgtccaagcagagctttaatacaagagtcgatctatgacaaattcatggaaagagctattgctagaactaaagctgttgttcaagataatcctttaaaaatggaaacaatgattggagctcaagcatcagtagagcaaatggagaagataaaatcttatctagagcttggtaaaaaagagggcgctaaagttctgaccggtggtagcgttgctaaattaaatagtggattggaaaaaggaaactatatccaacctactgtttttgaagctaaaaacgacatgcgtatatcacaagaggaaatctttggacctgttgtatctgtgattaaatttaaagatgaagcagaagcattaaaaattgctaatgatactctttatggtttaggcgcagctgtatggaccagaaatggaaacatagctcatagaatgggaagagcgatacaagcagggatagtatggactaattgttatcatgcttatcctgctcactctccatttggtggctacaaacaatctggtgttggaagagaaactcacaaaatgatgcttaatcattacagacagaataagaacttacacgtttcttatgctgagaaaaaattaggtttcttttaa

SEQ ID NO: 215245 - DNA, 484 bp, Unknown
  Bacterial polypeptide expressing nucleotide sequence isolated from the Sargasso Sea
aatgacagtaaagatagcaatcaatggatacggaagaattggtagaaatgtgatgagagcactttatgaaagtggccgcaccgatgaattacaagttcttgcgatcaatgatttgggggatgccaacagcaatgctcatttgacaaaatatgatacggctcatgggcaatttccatattctgtagaagctcgagatgacgcactcattgtcaatggcgatgagattaaagtttttgctgagagagatcctgaacaattgccttggggcgagcttggtgtcgatgttgtgcttgagtgtactggcttttttgcaaaaaaagagctggcaagcaaacacatcaaagctggagcaaaaaaagttgtgatctctgcacccgctggcactgacatcgatgcaacgattgtatacggagtcaatcatgacaccctctcaaaagatgatgaagtgatttcgaacgcatcttgcacaacacaattgtcttgc

SEQ ID NO: 215246 - DNA, 1006 bp, Unknown
  Bacterial polypeptide expressing nucleotide sequence isolated from the Sargasso Sea
atgacagtaaagatcggaataaatggcttgggcaggattggaagaatggtagttagatctatattagaaagtaataataaaaatatagaaattaaacacataaataatagaactgaatcaaaaaatactagtcagttgcttaaatatgactcagtgcatggaaaatttaatactgaaattaaatttaatgataataatttaataattaataataaaaaaatatattattccagagaaacagatataaacaaaataaattggaaaaaaaataacgttgacattgttttagaatgtactggcaaaaataattctaaagaaaaagctattcaacatataaaaaatggcgctagaaaagtaatcgtatcagcgccttgtaaaaatgctgataaaactattgtttatggagtaaaccataaaataataaataaaaaagatttggtaatttctgcagcttcgtgcactacaaattgtttggcacctgttgctcagattttaaatgatgaatttaaaatagaaaaaggttttatgacgactattcattcttatactagcgaccagagacttttagataattctcacaaagatccaagaagagcaagatctgcagcacaatctattattcctacttctactggtgcctcaaaagctcttagtgaaattataccagaactggaaggaaaaattgaaggaatggcattaagagttcctacacctaatgtttcattggtagatttagtttttaattctaaaaaaaatttatcaattaataaaattaacgatgtatttaaaaaagcttcaaaaaaaaatttgaaagatattttatatgctacagaagaaaaattagtttctattgactttaatcataatccaaattctgcaatcgtagatttgtctctaacaaatgtagttggtgaaaaaatgggtaaagtttcagcatggtacgataatgaatggggattcgcatctagaatgtgtgatttagcagaatatattcataaaatttaaa

SEQ ID NO: 215247 - DNA, 939 bp, Unknown
  Bacterial polypeptide expressing nucleotide sequence isolated from the Sargasso Sea
gagaaaatgttgatgtagttgcaattaatgatatctttgataagggtgcactcacatacctattaaagtatgatactgtaatggggcgattcccaggagaagtgacacttgatggtgacattataaaaactgagaaccagtctgtaaagttattagctgaacgtgatcctgcctctctaccatggaatgaactcggtgttgatattgtaattgaatcaacagggatatttcgtcagcgaaaccagcttcagaatcatataactgccggtgcaaaacgtgttgtcttaaccgtgccatcaaaggatgaaattgattatacggttgtgcttggcgtgaatgatgatggtttaagacctgagcataagatcgtttcaaacgcatcatgtacaacaaactgtcttgccccgatggcaaagatattaaatgactcatttggtattcaaatgggcgtcatcaatacgatacatgcatatacgaatgatcagcgtttagcagatgttcctcattcagattggagaagaagtagagcagcagctgaaaatgttattcctaccacaacaggtgctgctagagcagtagggaaggttcttcctgagcttgatggtaaactagatggtatcgccatgagagttccagtgccagatggttccgttgtagatttaaatgttcgccttagtgaagatgtgaaagtagaagatgtaaatgatgctgttatgtctgcagctgattcaggctctctaaaaaatgtattagaatattcaactcttccagttgtttcatcagatattattggtaatcctcattcatcaatatttgatgctccatttactagggttattgaaggtaactttgtaaaaacactcaactggtatgataatgagtggggatattcaaatcgagtagcagacctacttgatacactttatgctctagattaat

SEQ ID NO: 215248 - DNA, 1183 bp, Unknown
  Bacterial polypeptide expressing nucleotide sequence isolated from the Sargasso Sea
atggcagcggatctgcctttagttgttgatcactggagatattttgctggagtaatcagagcagaagagggatcaattgctgaaattgcgaacaaccaatactcatacaattttcatgaaccgttaggagttgtaggacaaataattccatggaacttcccattgttaatggcaacttggaaattagctccggcacttgcagcaggaaattgtgttgtattgaagccagctgaacaaacgccagcatcaataaatgttttaatggaacttattggagatttattacctccaggagtagttaacattgtaagtggctttggattagaagcgggtaaaccattagcatcatctaaaagagttgctaaagttgcatttactggtgaaacaacaactggaagattgattatgcaatatgctgcacaaaacataattcctataactctggaattaggtggaaaatctccaaacattttctttgaagacgtattagataaagatgatgatttctttgataaatgtattgaaggttttgtgatgttcaatctaaaccaaggtgaagtttgtacttgtccaagtagagctttaatacaagagtctatctatgataaattcatggaaagagctatagctagaacaaaagcggttgtacaagataatcctttaaaaatggaaacaatgattggagctcaagtatcattagaacaaatggaaaagataaaatcttatctagatcttggtaaaaaagagggtgctaaagttctatcagggggaaatgttgctaagcttaatagtggtttggaaaaaggtaatttcattgaaccgactatttttgaagcaaaaaataacatgcgaatctctcaagaagagattttcggacccgttgtatctgtgattaaatttaaagatgaagcagaggcgctaaaaatcgctaatgatactctttatggtttaggagcagctgtatggactagagatggtaatagagctcacagaatgggaagaggtattcaagcaggaatagtatggactaattgttatcatgcttatccagctcactctccatttggtggatacaaacaatcaggtgttggaagagaaactcacaaaatgatgcttaatcactatagacagaataagaacttacatgtctcttatgctgaaaaaaaattaggcttcttttaaa

SEQ ID NO: 215249 - DNA, 997 bp, Unknown
  Bacterial polypeptide expressing nucleotide sequence isolated from the Sargasso Sea
ttgaaaattggcattaacggttttggtcggataggccgtctggcttttcgttgcgcatgggaacacccgacctgggacattgttcaaataaatgatcccgccggtgatgccttgacttggtctcacttagtcaatttcgattctgtacaaggcaagtggcaacacagcgcggagtcggcgagagaagaaataatcgtcggcgaaaagcgcatcaactgcacccgaaacctccagctaaaacaaacagactggtcaaactgcgacctagttattgaggcatcaggccagatgaaaacctctgagctattaagcgaatacctaaaccaaggcgtcaagcaggttgttgtcaccgctcctatcaaggaaccagaaattcttaatttggtgtttggggtaaatcatgagctattcgaccaagaaaagccctcgataattaccgcctcttcctgcaccacaaattgcattgctccagcaatcaaggtaatccacgaacaattcgggatcgtccacggatcgataacaaccgttcacgacataaccaacacccaagtggtactcgatcagggccacaaagaccttagaagagcaaggtctagcggcaacaatctaatccctacaaccaccggatctgctaaggctatcgctcaaatatttcctgaattagagggcaagctcaatgggcacgccataagagtgcctttggccaacgcctcgctgactgattgcgtattcgaattaaacaagaaaactaatgctgatgaagtaaacagggctcttgaacaagctgctgccggtagcctgaagggaatactcggatttgaagaaaaaccgctagtctctactgactatgttggggattcccgttcgagcgtagtggatgccttatcaaccatggtaataaacgatacccagctcaagctctacctctggtatgacaatgagtggggttattcgaatcgggttatcgatctggtggagtatatctccaacgcataag

SEQ ID NO: 215250 - DNA, 753 bp, Unknown
  Bacterial polypeptide expressing nucleotide sequence isolated from the Sargasso Sea
attggagaccttattacctccaggagttgtcaacattgttagtggttttggtttagaagcaggtaaacctttggcatcatcaaaaagagtagctaaagtagcatttacgggtgaaacaaccactggaagattgattatgcagtatgctgcacaaaacataattccaattactttggaattaggtggaaaatctcctaacattttctttgaagatatcatggaaaaagatgatgacttctttgataaatgtatagaaggttttgttatgtttaatcttaaccaaggtgaggtttgtacttgtccaagcagagctttggttcaagagtctatctatgataaattcatggaaagagctgtagcaagaacaaaagctgttgttcaagacaatcctttaaaaatggaaactatgattggagctcaagcctcagttgaacagatggaaaaaataaaatcttatcttgaactaggtaaaaaagagggcgctaaagttctaactggtggaagtgttggtaaacttaatagtggattggaaaaaggtaattacattcaaccaactatttttgaagctaacaaccaaatgagaatctctcaagaagagatttttggaccagttgtatcagtcatcaaatttaaagatgaagcagaagcattaaaaattgctaatgatactctttatggtttgggagctgctgtatggactagaaatggtaatatagctcacagaatgggtagggcaatacaagcgggaatagt

SEQ ID NO: 215251 - DNA, 827 bp, Unknown
  Bacterial polypeptide expressing nucleotide sequence isolated from the Sargasso Sea
ttgcaaaagtttgcgtttactgggtgaaacttctactggaaggctaattatgcaatacgcagcacagaacattattccaattacactggaactaggtggaaaatctccaaacatattttttgaagatatcatggaaaaagatgatgactttttagacaagtgtgttgaaggttttgtaatgtttaatctaaaccagggtgaggtatgtacttgtccaagtagagcattagttcaggagtcaatctatgataaattcatggaaaaatgtattgctagaaccaaagctgttgtccaagataatccattaaaaatggaaactatgattggagcacaagcttcagtagaacagatggagaagattaaatcttatcttgatcttggtaaaaaagaaggtgcaaaagttcttacaggaggagctgttggtaaacttaatagtggattggaaaaaggtaactatatacaacctacaatttttgagaccaacaataaatctcgtatttctcaagaagaaatatttggccctgtagtgtctgtaattaaattcaaagatgaagcagaagcattagaaattgctaatgatactctttatggtttaggtgcaggtgtttggactagaaatggaaacattgcttatagaatgggaagagcaattcaagcaggaattgtgtggactaattgttaccacgcttatccagctcattcaccatttggtggttataaacaatcaggtgttggaagagaaactcacaagatgatgcttagccattatagacagaataagaacttacatgtttcttatgctgaaaagaaattaggtttcttttaaa

SEQ ID NO: 215252 - DNA, 1015 bp, Unknown
  Bacterial polypeptide expressing nucleotide sequence isolated from the Sargasso Sea
aatgaccgttagagttgcagtgaatggctttggacgaattggcagaaatgttgttagagcattgtatgaatcctcaaaaagagcagagatggaaattgttgccatcaatggtcggggatcgccagagcaaataacacaccttttcaaatatgatagtgcgcatggaaagtttcctcataaagtacattgcgatggaaaatcattggtcatcgatgataaagataaaattaaatttatctatgatcgagatccaactaagctgccatggaatgatctcgatgttgatgttgttttggaatgtacaggtgcatttagagatcatgaaactgcatcaaaacaccttgatgcaggagcacgtaaagtattaatttctgcaccgggcaagaatatggatgccacaatagtctatggcgtgaaccacaacattcttaatgatgagcataaaatcgtgtcaaatgcttcatgtacaacaaattgccttgctcctcttgtgaaaccgcttcacaaagctattggtataaaacatggctccatgactacaattcactcatacaccaatgatcaagtattaaccgatgctttccataatgatcctcggcgagcaagatcagccaccatgtcacaggtccccaccaaaacaggagcagcaaagggccttggtcaagttattccggagcttgatggaaaactggatggctttgccatgcgtgtgcccactgtgaacgtatctgccgtagatttaagttttgtccctgaaagagaaacttctgaagaagaaataaatcaaattatgctggatgcaagtcttggtgagctaaaaggtgtgcttgaatactgcgaggagcctctggtttcaattgattttaatcataatccagcatcagcaatttatgattcaacactcacaaaagttatgcaaggctcatttgttaaggttattgcttggtatgacaatgagtggggattttctcaacggatgttagacactgctctggcaatgaccagcaagagataa

SEQ ID NO: 215253 - DNA, 619 bp, Unknown
  Bacterial polypeptide expressing nucleotide sequence isolated from the Sargasso Sea
atgtttgtaatgggagtaaaccacagggaagcaaaatcatctgatacaattgtctcaaatgcttcttgtactactaattgtttagctcctattgctaaggtattaaatgataactttggaatagaggaaggtctaatgactacagttcatgctgctactgctacacaatttactgttgatggtccttcaaaaaaagattttagaggaggaaggagctcacttttaaatattattccaagttctactggtgcagcaaaagctgttacaaaagtaatcccatctctaaatggtaaactaactggaatggcatttagaattccaactgcaaacgtttccgttgttgaccttacagttaggttaaataagaaaacaagctatgaagaaattaaaaattcaatgttagatgcatctaaaaaggatcttaatggaatacttggttattgtgatgacccagttgtttctcaagactttattggagataaaaggacctcaatttttgatgctaatgcaggtatggagctaaactctaatttctttaaaataatctcatggtatgataatgagtgtggctattcaaataagttacttgatttatctaaacacatcttctcaatataaa

SEQ ID NO: 215254 - DNA, 1012 bp, Unknown
  Bacterial polypeptide expressing nucleotide sequence isolated from the Sargasso Sea
tatggctgtaaatgttgcaataagtggatttggaagaattggaaggttggttttaagatcaatcattgagagtaaaagaaaagatattaatgtcgtggctataaacgatttagccccaatagaaacaaacgcatttttacttgcaaatgatactgttcacggccctcttaatgaaaaagtatcgttcaaacgcaataaaatgatcgttggcagaaaaaatattacagtattgaatcagagagatcctcaaaaacttccttggaaaagaatgaaaattgacgtcgctcttgaatgcactggattatttacttcaaaagataaggcggcaatgcatattaaggccggcgcaaaaaaggttttagtctcagcgccatgtacaaatgctgataaaaccattgtatatggagtgaatgaagatgagataacaaaagaagacctagttgtatctaatgcgtcttgcacgacaaattgtttagctcctgttgcaaaagttttacacgataaattcaaaattgtgcatggatatatgacaactatacatgcctttactggtgaccaaagtgttctggatacatttcactcagacttaagaagagctcgagctgcgtcattgtcaatgatacctacatctacaggagctgcaaaagcagtaggactcgttatgcctgagctttctggtaagttagatggaactgcaattagagtaccaacacctaatgtttcattaatcgactttaaatttgtttctaaaaaaagaatgacagtcgatagtattaataaggctatgtcagctgcagcaaaatcaaataagctaaatggagtcctagatgtaaattctaaaccattggtttcatctgattttaatcataatcctgcctcgtcaaattttgatttaactcaaacacaagtaattgatggaaagtttggaagagttttaagttggtatgataatgaatggggcttttcaaatagaatgtgtgatactgcagttgcgatgaaaagatctagatag

SEQ ID NO: 215255 - DNA, 1003 bp, Unknown
  Bacterial polypeptide expressing nucleotide sequence isolated from the Sargasso Sea
gatgcgagttgcaatcaatggttttggacgtattggacgttcagtttttagaattctaaattttagagaaaattttgacgtagttgcaatcaatgacattgcagataatgaagctatggcctatttgctcaagtatgacacggtaatggggccatttaatgatttagtagaaatcaaaggggatgtgcttaatacttctcacaacgctgttaaaatgctagctgaaaaagatccaaatcaattaccatggggggaaatgggtgttgacgttgtcattgaatctaccggaatatttagaacaaaaaatgagctagagcagcatttgcgctctggtgctaaaaaagtaatattaactgttccctctaaagatgaaattgactataccttggtaattggtgtaaacgatggcgggttaaccgatgagcataaaatcatttcaaatgcgagctgcacaactaattgccttgcgccgatcgctaaaatcttaaacgataattatggaattgagtatggggtgattaatacgatccatgcatatacaaacgatcaacgccttgcagatgtaccccattcagactggagaagaagtcgcgctgctgctgaaaatattattcccaccactactggggcagctcgagcagttggcaaagtgcttccagagctagacgggaaacttgatggaatcgcaatgcgcgttccggttcctgacggctctgttgtagatagtgtatttcgtttagaaaaacgtgttactaccgatgagataaatcaaatggttaaacatgccgcagatgaacctagcatgagatctgtaatggaatattctaccctacccgttgtttcaacagatattattggtaatccgcattcctcgatctttgatgcacctttcaccaaggttattgatgggactttagttaaaaccgttaattggtatgataatgaatggggatactcaaatcgtgttgtagatttagtcagtattttaaaaaagtttaattaa

SEQ ID NO: 215256 - DNA, 1003 bp, Unknown
  Bacterial polypeptide expressing nucleotide sequence isolated from the Sargasso Sea
gatgaaaacacgtatcggtattaatggttttggccgtataggaagatctgtttttagggttttaaactctagagatgatattgaaattgtagcaattaatgatatctttgataaagaggctcttacttatttattaaagtatgataccgtcatgggtcgtttcccttcagaagttaccttggatggtgatatgttacatgcgggaaaacaaaaggtaaaactcattgcagagagaaacccatcagatttaccatggggagaacttggcattgatattgtaattgaatctactggtattttcagaactcgtgaacagttagagcagcatttgactgctgggtgcaagaaggttgttttaacagttcctgcaaaagatgaaatagattatacagtagttttaggtgtaaatgataaaggtctaaagaccgagcataaaatagtttctaatgctagttgtactacaaattgtttagctccaatggctaaggtattaaatgaaaacttcggtattgaacttggtgtaattaacactatacacgcatacacaaatgatcaaagattggctgatgttcctcattctgactggagaagaagtagggcggcagcagaaaacgtcattccgacaaccaccggcgccgctagagcggttggtgtagttttaccagagttaaatggtaaattagatggaattgcaatgcgtgttcctgttcctgatggttctgttgttgattttaatgttcagcttaataaagatgttacaattgatcaaataaatgaggctgttcgtgaggcctctataaatggttccttaaaaggaattcttgagtattctaccttgcctgtagtttcatctgatattattggtaatagtcattcatcaatatttgatgctccatttactagagttattggtggaaattatgtcaaaacacttaattggtatgataatgaatggggatattcaaatagagttgttgaccttgtatccctacttggtagtatt

SEQ ID NO: 215257 - DNA, 664 bp, Unknown
  Bacterial polypeptide expressing nucleotide sequence isolated from the Sargasso Sea
aatggtcaaagtaggaattaatggatttggtagaatagggcggcttatcttaagggctttattagaaaactataaaggtaaaattcaagtagttggtattaatgatcttggttcaatagaggccaacgctcatctaatcaaatttgacagcacacatggtacattaaatcatgatgtaaagataacaaaagatggttttcaaataggagatcaaaatatcaaagtttttgctgagagagatccgtccaaattaccttggggaaaaattggagctgatgttgttttagaatgcactggcttttttttagataaaaaatcagctggcaaacatatagaggctggtgctaaaaaagtaattatttctgccccagcaaaggaagtagattttactgtagttcaaggagtaaacagcaaagatttgaaaaaagaacataatgtaatttctaatggctcttgtactacaaactgcttagcacctgtcgccatggttttagaaaatacttttggtattgaatatggatatatgacaactattcatagttacacaggagatcaaaaacttttggatacacttcataaagacttaagaagagcaagagcgtccggagatgccatgataccaacttctactggagcagctaaagctatgagtttggtattacca

SEQ ID NO: 215258 - DNA, 831 bp, Unknown
  Bacterial polypeptide expressing nucleotide sequence isolated from the Sargasso Sea
aaagagttgcaaaagtagcttttacaggtgaaactacaactggaagactgattatgcagtatgccgcacaaaatataattccaattactttggaattaggcggaaaatctccaaacattttctttgaagacgttctagataaagacgatgacttctttgataaatgtattgaaggttttgtaatgttcaatctaaatcagggagaagtttgtacttgtccaagtagagctttgatacaagaatctatctacgataaattcatggagagagctattaaaagaaccaaagcagtagttcaagataatccattaaaaatggagactatgattggggcacaagcttcagttgaacagatggagaaaatcaaatcctatcttgaccttggaaaaaaggaaggtgctaaagttctttgtggtggaaaagtagctaaactaaatagtggcttagaaaaaggcaattacattgagccaactatttttgaggctaagaataatatgcgtatatcccaagaggagatatttggacctgttgtgtctgtgattaaatttaaagatgaagcagaagcattaaaaattgctaatgatactctttacggtttaggcgcagctgtctggactagaaatggtaacatagcccacagaatgggaagagcaattcaagcagggatagtatggactaattgctatcacgcttatccggctcattcaccatttggtggttataagcaatcaggtgtaggaagagaaacacataaaatgatgcttaatcattatagacagaataagaaccttcatgtttcttatgcagagaaaaaattaggcttcttttaac

SEQ ID NO: 215259 - DNA, 520 bp, Unknown
  Bacterial polypeptide expressing nucleotide sequence isolated from the Sargasso Sea
atgacggtcaaaatagcaatcaatggatacggtagaatcggcagaaatgttctaagagcactctacgaaagtggacgaaccgatgagctacaagtacttgcaatcaatgatttaggcgatgcaaacagcaatgcgcacctaacaaaatacgatacagcacacggaccattcccttattccgttgaagccagagacgatgcacttgttgtcaatggagatgaaattaaagttttcgctgagagagatcctgagcaattgccttggggcgatctcggcgtcgatgttgtgcttgaatgcactggattttttgcaaaaaaagagttggcaagtaagcacatcaatgcaggcgcaaaaaaggtggtcatatctgcaccagcgggtacagacatcgatgcgaccattgtttacggcgttaaccacgacactctgagcaaagacgatgccgtgatttcaaatgcgtcttgcacaaccaattgccttgcgccactcgtgaagccgattcatgaaagcatggactgag

SEQ ID NO: 215260 - DNA, 1015 bp, Unknown
  Bacterial polypeptide expressing nucleotide sequence isolated from the Sargasso Sea
atggctacaaaagttgcaattaacggatttggaagaattggaagattagctttgagggcaataattgagtctggaagaagagacttggatgtagttgcaattaatgatcttggatcagcaaaatttaatgctcaccttctgcaatatgattctgttcatggaactctatcaaaaaaagtaactggaagaaaatcttcaattggtattggcaataaatctattaaaattttttctgaaagaaatccagaagatttaccttggggtgatttaggtgttgatgttgttatggagtgcactggtatttttacttcaaaagaaaaagcaaaacttcatttaaatgcgggagctaaaagagttttaatcagcgctcctgctacaaacgcggatataactgttgtatatggtgtaaaccataaaaaaataagaaaaagtcataagataatatctaatgcatcttgtactacaaattgccttgctcctgttgcaaaagtcctaaataaaatatgtggtataaatcaaggttacatgactacagttcatgctttcactggcgatcaaagtatattagatactctgcactcagatgaaagaagggcaagagcatcttcagtatctatgataccttcatcaacaggcgccgcaaaagctgtaggattagttttacctgaattacaaggtagattagacgggacagctgtaagagttccaactccaaatgtctcgatgattgaccttgtatttaattctaagaaaaaaatagacgctgaaacaataaataacgctatgattaaagcttctaaaggagaattaaaaggagtccttggagttgaagataagccattagtttcaattgattataatcacaatccattaagttcaatttttgatcttacacaaacacaagttattaagggaagattgggtagagtattaagttggtatgacaatgaatggggatttgcgaatcgaatgggtgatacagcatctcttattggaaaacttatcaaatcataat

SEQ ID NO: 215261 - DNA, 778 bp, Unknown
  Bacterial polypeptide expressing nucleotide sequence isolated from the Sargasso Sea
gctgaaagagatccgtccaaaattaccttggggaaaaattggagctgatgttgttttagaatgcactggcttttttttagataaaaaatcagctggtaaacatatagaggctggcgctaaaaaagtaattatttctgccccagcaaaggaagtagattttactgtagttcaaggagtaaacagcaaagatttgaaaaaagaacataatgtaatctctaatggctcttgtactacaaactgcttagcacctgttgccatggttttagagaatacttttggtattgaatatggatatatgacaactattcatagttacacaggagatcaaaaacttttagatacgtttcataaagacttgagaagagcaagagcgtccggagatgccatgataccaacttctactggagcagctaaagccatgagtttagtattaccaagtttaaagggaaaacttgatggcactgctataagagtaccaacacctaatgtttctttaattgatcttacatttgtacctaataaagaagttacatctgaaagtataaatgatgctatgagtaaagcagctagtggacctttaaaaggaatattagcaaccaattcagctccgttagtttcgaaagattttaatcataaccctcatagttcaatttttgatttaacacaaactcaagttataaaaggaaaatttagtagagttctctcttggtatgataacgaatggggattttctaataggatgtgtgatacagctattcagatatctggtttaatttaa

SEQ ID NO: 215262 - DNA, 523 bp, Unknown
  Bacterial polypeptide expressing nucleotide sequence isolated from the Sargasso Sea
aatggttttagaaaaaacttttggaattagctatggttatatgactacaatccatagttatacaggcgatcaaaaattgctagatacattacataaagatttaagaagagctcgttcaacagaaggagcaatgatacctacttcaacaggagccgccaaagcaatgagtttagttctgccgagtttaaaaggaaagttagatggaacagctataagagttccgacaccaaatgtttcattaattgatctaacattagttactgataaagaagcaacacctgaaagtattaatgaagctatgacaaaagcagcgagaggtgaattaaaaggaattttagatgtaaaccaaaaacctcttgtatcaaaagattttaatcataatcctcatagttcgatttttgatgtgacccaaactcaagtaataaaaggaaaatttagtcgagtgctttcatggtacgataatgaatggggtttctctaacagaatgtgtgatacttcaatacaaatagccggtttaatttag

SEQ ID NO: 215263 - DNA, 1024 bp, Unknown
  Bacterial polypeptide expressing nucleotide sequence isolated from the Sargasso Sea
tatgactttgcgtgttgcaattaacggctttggcagaattggtcgaaactttatgcgttgttggcttagtagaggggcttacaccaatattgaagtagttggaattaacgttacctctgatcctaagactaatgctcatctattaaaatatgactcagttcttggtcaacttgatggtgttgatattcaatatactgatgatacttttgtaattaataacaagacaattaaatgtttctctgatagaaacccaatgaatctcccctggaaagactggggtgtagatttggttattgaatctactggagtatttaatacagatgtaggtgcaagtaagcacttagaggtaggagctaaaaaagtcatcttgactgctccaggtaaaggtgatggagttggtacttatgtagttggagtcaatgctaatacatataaacataaagattatgatattttaagtaatgctagttgtacaacgaactgtttagctccagtagttaaagttttagaccaaacttttgggattaataaaggattgatgactacaattcatagttatacaggggatcaaagaattttagacaatagtcatagagatttaagaagggctagagccgctgctacaaacatcgttcctacttctacaggagctgcaaaggcagtagctttggtgtacccagaaatgaaaggcaaattaacaggaattgctatgagagttccaacccctaacgtttcagcagtagattttgtttttgaatcttctaaatctgtgacagctgaagaagtcaataatgctctcaaggaatcatctctaagctcaatgaaaggcattattaagtatggagatgaaccattagtatcaagcgattatgcaggtaccaatgaatcatcaattgtagatagtgacctcactatgtgtatcggagataatcttgtaaaggtgcttgcatggtatgacaatgaatggggttatagtcagagagttgtagatttagcagagattgttgcaaaaaattgggaataa

SEQ ID NO: 215264 - DNA, 1006 bp, Unknown
  Bacterial polypeptide expressing nucleotide sequence isolated from the Sargasso Sea
tatggctattaaaattggaataaatggaatgggaagaattgggagaatggtgcttaggtctattattgagaacaaaaataaaaaaattataatcaagcatataaataatcgtagtgatccaggtgtaactttctcacttctaaaatatgattcaattcatggcaagttcaatgcaaatttaaactttaataaaaaaaatttttttgtaaataaaaaaaaaatttcattttcacaagaaaccaatattgaaaatattaattggaaaaaatttggagtcgattatgtttttgaatgtactggaaaatttaattcgaaggaaaaattattaccccatttaaaaaatggagcaaaaaaagtgattgtttctgcaccatgtaaaaactcagataaaacaattgtttttggagttaatgaaaagactcttttaaaaagtgataaaattatttctgccgcttcttgtacaaccaactgccttgctcccacattaaaagtattaaatgacaattttaaaattgaaaaagcattcatgacaacaattcatgcttatacaactgaccaaagaatattggataattctcataaagatccaagaagagcaagatctgcctcacaatcaattgtacctacttcaacgggagcttcaaaagctattggagaaatcattccatcattaagaggaaagattgaaggtgtggcgatgagggtcccaacgccaaatgtatcacttattgaactaatattttgtacaaaaaaacaaataaatacggatcaaatcaataaagcattttctgatgcatctaaaaaaaaattaaaaaatattttggaagttacttttgaaaaacttgtgtcaattgacttcaatcataatcctgcttcagcaatagtcgatttatccttaacaaatgttgttggtaaaaatatgggtaaaatttctgcatggtatgataatgagtggggtttctcaaacagaatgtgcaatatagtagaacatcttcacaaaatctaa

SEQ ID NO: 215265 - DNA, 1360 bp, Unknown
  Bacterial polypeptide expressing nucleotide sequence isolated from the Sargasso Sea
atgaaagtgtcatctgtattagatacttctcatttaaaggttaaatttccgttcaaagcaaaatacggaaactacattaatggaaaatttgtagaaccaaaatcaggcaagtattttgataatgtaagcccgatctcaaatgagaaaatctgttcagttgcgcgatcagacgaaaaagacgtagaagcagcattagatgcggctcacgcagccttcccggagtggggaaaaacagacatcacaacaagatcaaacatattatataagatcgctgatgttttagaaaaaaacctaaacttactcgcaacagctgaatgtttagataatggaaagccaataagagaatgtatggcagcagatttgcctttggttgttgatcattggagatattttgctggtgtaataagagcagaagagggatcaattgcagaaattagcaattctcaatactcttacaacatacctgaacctttaggagtagttggtcaaatagttccttggaacttcccattacttatggctacatggaaactagctccagctcttgcagcgggtaactgttcagttttaaaaccagctgaacaaacgccagcatccataatggtgatgatggaacttattggagatttattacctccaggagttgtcaacattgttagtggttttggattagaggcaggtaagcccttagcatcatcaaaaagagttgctaaagttgcatttactggtgaaactacaacaggaagattgattatgcagtatgctgcacaaaacataattccgattactttggagttaggtggaaaatctccaaacattttctttgaggacatcatggataaagatgatgatttcttcgataaatgtattgaaggtttcgttatgtttaatcttaaccaaggtgaggtttgtacttgtccgagtagagctttagttcaagagtcaatctatgataaattcatggaaagagctatagctagaacaaaagctgttgttcaagacaatcctttgaaaatggaaactatgattggggcgcaagcgtcagtagagcaaatggaaaagataaaatcttatcttgagcttggaaaaaaagagggcgctaaagttctaacaggtggaagtgttgctaaacttaacagcgggttggaaaaaggtaattacattcaaccaactgtttttgaggcaaaaaatgacatgcgaatttctcaagaggagatcttcggaccagttgtatctgtgattaaatttaaagatgaagcagaggcattaaaaattgctaatgatactctttatggtttaggagcagctgtatggactagaaatggtaatatagctcacagaatgggtagagcgatacaag

SEQ ID NO: 215266 - DNA, 1003 bp, Unknown
  Bacterial polypeptide expressing nucleotide sequence isolated from the Sargasso Sea
ctaaaggttaaatttccgtttaaggcaaaatacggaaactacattaatggaaaatttgtagaacctaaatcaggcaaatattttgataatgttagcccgatatctaatgagaagatctgttcagttgcacgatctaacgaaaaagacgttgaagcagcattagatgcagctcacgcagctttccctgaatgggggaagacggacatcacaacaagatcaaatatcttgtataaaattgctgatgttttagaaaaaaacctaaacttattagctgttgctgagtgtttagacaatggaaaaccaataagagaatgtatggcagcagatctacctttggtaattgaccactggagatattttgctggagtaatcagagctgaggaaggttctattgctgagattagcaataatcaatattcatacaattttcatgaaccattaggagtagttggtcagatagttccatggaatttcccattattaatggctacatggaaattagcaccagctcttgcagctggaaactgttctgttttaaaaccagcagagcaaacacctgcatcaattatggtaatgatggaacttattggtgatttattacctccaggagttgtgaatattgtaagtggctttggattagaagcaggtaaacctttagcttcatctaaaagagttgctaaagttgcatttactggtgaaacaacaacaggaagattgattatgcagtatgctgcacaaaacataattccaattacactggaattaggtggaaaatctcctaacattttctttgaagatatcatggaaaaagatgatgacttttttgataaatgtatagaaggttttgtaatgttcaatcttaaccagggtgaagtttgtacttgtccaagtagggctttaattcaagagtcgatctatgataaattcatggaaagagctattgcaagaacaaaagctgttgtgcaagacaatcctttaaaaatggaaaccatgattggagctc

SEQ ID NO: 215267 - DNA, 1036 bp, Unknown
  Bacterial polypeptide expressing nucleotide sequence isolated from the Sargasso Sea
atgaacattggcattaatgggctaggtcgaataggaagacttgtcataagagatttttttggtggtaccaatagaaaatttaatacctctaaccttagtattttccatttgaatgaccctcattgcaatgctgataatctttgtcaccttttaaagtatgatagtgttcacggtatttgggatgctttaattaagactttaggtcatgatagaatttcaattaatggaagtgaaataaagctgacaaattttatcaacccatctgatgtaaattggagtgacagtaattgcaatgtagttttagattgtactggtaaatttttatctaaggaaaaacttcaaggttattttaatagcgacataaagaaagttatagtttcagcaccaataaatgatccagaaattttaaatatagtttttggtgttaatgaccatctttatgatccatcaaaatataatattataacagctgcttcctgcacaactaactgtctggcgcctatagttagcgtagttcataaaaacttggaaatcttaaaaggtcaaataacaactatacataatccaacaaatacaaatgttcttttagataagccccacaaggatcttagaagagcaagatctacaatgctttctatgcaccctacatcgacagggagtgctaaagctattggcctaattttcccagaattaaaaggaaaactagatggccacgcagtcagggtaccagtgataaattcaagtttaactgactgtgtctttcaacttaagaaaaaaactaccattaatgaagttaatgagctttttgaacaggcatctaaaagtgatctaaaaggtattttaggaatagagtttaacctcctagtttcaatcgactttttaaatgatacaagaagttcaattgtcgatgccaatagtactttaatcacagataacaatttactaaaagtttattcttggtatgacaatgaaacaggttacgcgtgtagaatgaatgatttagctgaaatggtctgtaaatcactaaatgtttaat

SEQ ID NO: 215268 - DNA, 1024 bp, Unknown
  Bacterial polypeptide expressing nucleotide sequence isolated from the Sargasso Sea
catgcgcattggtatcaacggcttcgggcgaatcggtcgcctcgtatttagggcgctctggggtcggcccggcatcgagctggtgcatgtgaatgaccccgcgggcgacgctgcgaccgccgctcacctcctggagttcgactcagtgcatggacgctgggatcgcaacatcaccagcgatgcaaacggtttctccgtggagggatcaccactgacctggtcgagcgagaaagaccccacagcagtgccctggacagcgcgcggggtggagatggtgctcgaggccagcggcaagatcaagaccccggagaccctgaacccctacttcgatcaggtggggctgaaacgggtggtggtggcctgtccggtgaagggtcaggtggccggcgaggaggcactcaacatcgtttacggcatcaatcacgacctctatgagccagagcgacacaagttggtgacggccgcttcgtgcaccaccaactgcctcgctcccgtggtgaaggtggtgcacgagagcttcggcatcgagcacggaatgatcaccaccattcacgacatcaccaacacccaggtgccgatcgatgccttcaagagcgatctgcgccgggcccgctccggcctcacatccctgatccccaccaccacgggctccgccaaggcgatcgccatgatcttccccgagctcaagggcaagctcaacggccatgccgtgcgggtgccattgctgaatggatcgctcaccgatgcggtgttcgagctcaagcagaacgtttcggttgaacaggtgaatgctgcgttcaaggccgcctcagagggcgccttgaagggaatcttgggttacgaggagcgccccttggtgtcgtgcgattacaccaacgacaaccgcagttcgatcatcgatgccctctcgacgatggtggtcgacgacaaccagttgaaggtgttcgcctggtacgacaacgaatggggctacagctgccggatggcagacctcacctgtcaagtggtggggctggacgcgtga

SEQ ID NO: 215269 - DNA, 1450 bp, Unknown
  Bacterial polypeptide expressing nucleotide sequence isolated from the Sargasso Sea
ttgccacaggattcttttggtgattggaaatggagagaagcacttgcagaattaatggttccattaattggttctttatatagaaatggaattaatattatgatttatggcaaatcattagtaaatgaatcacctgttgctattatgaaagctcatagatttgcaagacaaactgataataatgaattaagtgaacttgagacatatcctattcttcaacatataagctcattaaaactgcaagattgtgaaattgatatcggtgagatagctgtaaaatgtcctttttttaatgatattaaagatgatacttcaaaaattcctgattatattaatggcgaacttaaatctgtaattaataaaaagtctaataggccaaacaatcccaaaaacatagttttatatggttttggaagaataggaagactggtagcaagaatgatgacgcaaacaactggtcctggtaattacttcagactaaaagctatcgttataagaaaagctgcagatgatgatatttttaaaagagcaagcttattaacaagagactctgtgcatggagcatttgatggtactgttagagttgatgaagagaattcaactcttgtaattaatggcaatccagtaaaaataatatatgcatcgagtccagatgaaattaaatataaagatttcgatataattgatccaatagtaattgataatacaggcgtttggagagatgaagacagtctttcaaaacatcttaaatctggagcttctaaggttattcttactgctccagcaaaaggtgatttaaaaaatatagtgtatggaataaatgacaatattctaaaagataacgactcaataatatcagctgcttcatgtactacaaatgcaatagttccagttttaaaagcagttaatgatgaatataaaattaaaggtggtcatatagaaactgttcatgcatatacaaatgaccaaaatttaattgataattttcacaaaggtgacagaagaggtcgtggggcaccgttaaatatggtcattactactacaggagcagtaaaggcagttgcaaaagcacttccagagctagagggaaaacttactggtaatgctataagagttccaacaccaaatgtaagtcttgcaatattatccttagctcttgaacaagaagttaccgatacacaaattaatgattaccttaagtcaatagcatttcattcaaaatatagagaaataattggttttgttaattcaccagaaattgtatcaaccgatttctattcaagtccatttgcctcaataattgactctcaagcgacaattgcaagtaaaaatagagttacgctttattgttggtatgacaacgaatatggttattctaaacaagttattggacttactaagaaagtagctaaaattaatctaccaagattgccaaatccagttaactaaa

SEQ ID NO: 215270 - DNA, 1432 bp, Unknown
  Bacterial polypeptide expressing nucleotide sequence isolated from the Sargasso Sea
aatgacccacgagcactatctgcaggcgtggcaggagagccaggagctcgccgaagccatgcaacccttgatcggtcgactctaccgccagcaggggatcgagatcaccatcttcggccgcccgctgcaaaacgcctccaccatcgatatcctcaaggcccaccgggtcgttcgccgccaccagggagcccccctcccgatccaacagagctttcccctgctgcaagccatccaggccctgaacccgagcgctgccgagatcgatctgggcaagctggccgtgggttactggcaggatcaccaggatgaagccggcatcgacgactacctgcgtgccaggctggcaccggccctggggcgcggcgtgcctgctcccaccgacgtggtgttgtacggctttggccgcatcggccgcctgctggcccggttgctgatagagcgcaccggcgccgccaactccctgcggctgcgcgccatcgtggtgcgcggtggtcgcgagggagatctggagaagcgtgccagcctgctgcgccgcgactcggtgcacggccccttcaacggctccatcgaagtggatgtggaacgcagcgccatcatcgccaatggcaccttcatccaggtgatctatgcaaacagcccggccgacatcgactacaccgcctacggcattcactatgcgctgatcgtcgacaacactggggtttggcgcgacgaggccggtttgtctgaacacctcaaggcacgcggcgccgcccgggtgctgctgaccgctcccggcaagggggagatgaagaacgtggtgttcggggtcaaccacgaggtgatcgggcccgatgacaagatcatctctgccgcctcctgcaccaccaacgccatcaccccggtgctcaaggtgatgcaggacaagtacggcatccgccacggccacgtggagacggtgcactcctacaccaacgaccagaacctcatcgacaactatcacaagggcgagcgccgcggtcgcagcgcggccctcaacatggtgatgaccagcaccggcgccgccaaggcggtggccaaggcgctgcccgagctcaagggtaagctgaccggcaacgccatccgggtgccgactcccaacgtgtcgctggccatcatcaacctgtcgctggaacagaccaccgatcgggagagcctcaacgcctatctgcagcagatggcgctgagctcggccctgcatcgccagatcgacttcagcgccagcaccgagctggtctcctccgacatggtgggctcccgttttgcgggcatcgtcgactcccaggcgaccatcgccgagggggatcactgcgtgctctacgtatggtatgacaacgagttcgggtacagttgtcaggtagtgcgggtgatggagcagatggctggcgcagttcgccaggatctgccggtctga

SEQ ID NO: 215271 - DNA, 466 bp, Unknown
  Bacterial polypeptide expressing nucleotide sequence isolated from the Sargasso Sea
aatggcggtaagagtagcgattaacggttttggtcggattgggcgtttggtgctacgggctatccttgaaagccgccgaaacgacttggaagtggtgggcataaacgacttgggctcgccagaaacgaacggccacctgctaaagtacgactcagtacatggaaatctagatatggcgatctcggtcgacggagacaatatggatgccgggaccggccccatcaaggtgaccgctgaacgtgacccagctcggcttccgtggcgagaattgaacgtcgacgtagcgatggaatgtaccggtcttttcaccaagcgcgacgatgccgcaaaacacctcgcggccggcgcgagaaaggttctaatttccgcgccaggaaccgacgtcgataaaactatcgtctttggcgtcaatcaccaatcacttagcggcgatgacagcatcgtttccaaatgcgtcgtgcactaa

SEQ ID NO: 215272 - DNA, 808 bp, Unknown
  Bacterial polypeptide expressing nucleotide sequence isolated from the Sargasso Sea
acaaaacccattcgcaccacacgtattaagacgatgcccgagaccgattggtcgggatgcgatgtggtgattgaagcctctggggtgatgaaaaccaaagccttactgcaagcctatttagatcaaggtgtgaagcgggtagtagtgacggcgccagtcaaagaggaaggtgtgttaaatgtggtgatgggagtgaatcatcagttatacgatccggctattcatccgattgtgaccgcggcttcctgcactaccaactgtcttgcgcctgtggtgaaagtgatccatgagcagattggcatcaagcacggttctatgaccactattcatgatatcaccaatacccagacgattctggatgcaccgcataaggatctgcgccgcgcccgcgcctgtgggttaagtttaatccccaccaccacgggcagtgcgacggcaattacccatatattccctgagcttaagggcaagttgaatggtcatgccgtaagggtgccgctcgccaacgcatccctcaccgactgtgtttttgagcttgagcgcagcgtgaccgaagcggaagtgaatgcgctgctacaaagcgccgccgaaggcgaactcaagggcattttaggttatgaggagcggccgttagtgtcggttgattataaaaccgatccccgttcgagcattgtcgatgcactttcgaccatggtggtgaatgggactcagctaaaactttacgtgtggtacgacaatgagtggggatatgccaaccgtacggcagagcttgcccgtttagtcggccagcttgatttgccgcgttagg

SEQ ID NO: 215273 - DNA, 1012 bp, Unknown
  Bacterial polypeptide expressing nucleotide sequence isolated from the Sargasso Sea
tatgaaaataaaagttggtataaatggaatgggaagaattggaagaatggttcttagatcaatatttgagaataatttaaaagatatagaaattaaacatattaataataaatcaaatttagaaatttttgcaaacttgattaaatatgactcagttcatggaaaatttagtgctgatgtgagttttgataaaaaacatttatttataaataaaaataaaatttcatacagtcaacattcaaatttagaggatatccaatggaaaaatttagatgttgattatgtttttgaatgtactggtaactttaattcaaaagaaaaactacaggctcatttaaaaaacggagctaaaaaagttattgtttcagcgccatgtaaaaatgctgataaatctattgtttatggtgtaaaccaaaatgtcttaaatgataatgatcaaataatttctgcagcttcttgcacaactaattgtctggctcctgttgcaaatgtaatacatgaaaattttgaaattgaaaaaggtttcatgactacaatccattcttttactagtgatcaaagagtattagataattcacataaagatcctagaagagcaagatcagcaagtcaatcaattgtgcctacttctactggagcgtcaaaagcattatcagaaatcattccttctctcaaaggaaaactagaaggtattgctatgagggtgcccactccaaatgtttcattaattgagcttgtttttttaagcaaaaaaaatttatctataaaagctattaatgatgcttttataaatgcatctgaaaataaactgaaaggtattattgagattacaaatgaaaaacttgtttctattgattttaatcataataaagcttcttcagttatagatgggtctttaacaaatgtagttggggacaatatgggtaaaatttctgcctggtatgataatgaatggggtttctcaaatagaatgtgtgatattgcaaggtatttgcataaaaaatttaattaa

SEQ ID NO: 215274 - DNA, 1006 bp, Unknown
  Bacterial polypeptide expressing nucleotide sequence isolated from the Sargasso Sea
ttgaataatataggaataaatggattcggaagaatcggaaggtcaattttaagaataattgtcgaatcaaattcagatttgaatgtaatagctataaacgaccttggagatcgagagaatctcgtatatttattcaaacatgattcaataatgggtgttcttgatttacatgttgaactaaaaggtgatgatttgatagttggagacagaaccataaaattaatctcacacgatgatccagcgaacattccttggagtgatttaggtgttgatttagtagttgaatcaactggtttttttcgtgataaatcatctttagaaaagcacataagttcaggagcgaaaaaagtagtccttactgtgcctcctaaagatgaaatagatgcaacagtagttcttggtgtgaatgatgattctcttactgagaacgataatcttatctctaacgcatcatgtactactaattgcctagctcccattgcaaaagtacttaacgataatttcaaaattaagtctggactcatgactactgttcatgcttataccaatgaccaggcacttgctgaaacaacccatagtgactttagaagaggacgaagtgcaacacaaaatattattcccacatcaactggtgcagcaaaagcagtcggaatggttctacctgaacttaatggaaaacttgatggaatggccatgagagtacctgtccccaatggaagcgtagtagatctagttgtagaagttgaggagaatgttaccgttaacgacgttaataatgccgttaaaaaagcagctgaaaatgaacttaaaggaattcttgagtattctgaaatacctttggtctcaacagacatattacaaaattcacattcaagcatttacgatgcctcttcgacacaaatagttaacaagaatcatatcaaagttgtttgttggtatgacaatgaatggggatattcaaacagggttgttgatctactagaaaaattatctactcgtgaataaa

SEQ ID NO: 215275 - DNA, 505 bp, Unknown
  Bacterial polypeptide expressing nucleotide sequence isolated from the Sargasso Sea
atggctataaatgttgcaattaatgggttcggaagaattggaagaagtattttaagagccttatatgagtctaacaataaagaaataaaaattgttgctattaatgatgtaggagatattaaggtcagcgctcttttaataaaatacgattctgtacatggtttttttgataaatctgtagagtccaatgaaaacgaattaattatagagggagacaaaatccctatttattctgacagagatccaactcatcttgattgggctaaacataatgttgatgttgtttacgaatgcactggaaaatttactaaaaaagaagatgctaaagtacatattgaagtgggtggggcaaaaaaagttatcatttctgcgccaggacaaaatgctgactctacaattgtttatggtgtaaatgaagattcaataggttcagatgaccaaataatctcaaatgcatcatgtacaactaatttgtattgctccagttttaaaagttctaaatgaa

SEQ ID NO: 215276 - DNA, 1012 bp, Unknown
  Bacterial polypeptide expressing nucleotide sequence isolated from the Sargasso Sea
gatgactatccgtgttgcaataaatggttacggccgtatcggtagaaacgtattacgcgccctgtacgaaagcgaaaaagcttacccaatcaaaattgttgccatcaacgatttaggcgacgcttcaatcaacgctcacctgacaaaatacgattctgtacatggtcgtttcaatgccaaagttgagcatgatgctgaagcaatttatgttaacggtgacaagatcctcactttccaagagcgcgatccaggcaaattaccttggggcgacctacaagtagacgtggtatttgaatgtaccggtatcttcacttctaaagattctgttcaaccgcatttagccgctggcgcaaagaaagtgattatctctgcaccaggcaaaaacgttgatgcaaccgtcgtttacggtgtgaacaacaatgtgttgaccgcggatatgaccgttatctctaacgcgtcatgtaccactaactgcttagcgccttttgctaagccgttaaatgacgaaattggtatcgaatcaggtctgatgaccaccatccacgcgtataccaacgaccaacgtttatctgacgtataccacacagatttacgccgtgcccgcgctgcggcactgtcgatgatccctactaaaacgggcgctgcggctgctgtaggtttagttgtgcctgaattacaaggtaaattcgatggtttagcggtacgtgtaccgactgttaacgtgtctttagtggatttatctttcattgcatcacgtgacacaaccgttgaagaagttaacgccatcatcgagcgtgcagcaagcgtagcaccactgagcgaagtgttggccgtcaacaaagagccattggtatctatcgactttaaccacaatgcgttttcatctaacttcgatgcgacgcaaacccgtgttaacggccgtttagtcaaagtaatggcttggtacgataacgaatggggcttcagtaaccgtatgttagacaacgcggttgcgttaatgaacgctaaataa

SEQ ID NO: 215277 - DNA, 1074 bp, Unknown
  Bacterial polypeptide expressing nucleotide sequence isolated from the Sargasso Sea
tttataaaatagccgatgttttagaaaaaaatctaaacttattagctgtggctgaatgtttagataacggtaaaccaatcagagaatgtatggctgctgacttacctttagtgattgatcactggagatatttcgcgggagtaattagagcagaagaaggttctattgctgagattgctaacaatcaatactcgtacaattttcatgaaccacttggagtagttggtcagattgttccatggaacttcccattattaatggcaacatggaaattagcaccagctcttgctgcaggaaactgttcagttttaaaaccagctgaacaaacgccagcatcaattatggtaatgatggaacttataggagacttattgcctaaaggtgttgttaacatagttagtggttttggattagaagcaggtaaacctttagcatcatctaaaagagttgctaaagttgcatttactggcgaaacaacgactggaagattgattatgcagtatgctgcacaaaatataattccaattacattagaattaggtggaaaatctcctaatatcttctttgaagacgtcatggataaagacgatgatttcttcgataaatgtattgaaggttttgtaatgtttaatctaaaccaaggtgaagtttgtacttgcccaagcagagctttaatacaagaatctatctatgataagttcatggaaagagctattgctagaacaaaagcagttgtgcaagataatcctttaaaaatggagacaatgattggagctcaggcgtcagtagagcaaatggagaagattaaatcttatctagagctaggtaaaaaagaaggtgccaaagttcttaccggtggaagtgttgctaatcttaatagtggtttggaaaaaggtaattatatccaaccaactgtttttgaggctaaaaataacatgagaatatcccaagaagagatcttcggaccagttgtatctgtgattaaatttaaagatgaagcagatgcattaaaaattgctaatgatactctttatggtttaggagcagctgtatggacaagaatggaaatatagc

SEQ ID NO: 215278 - DNA, 1419 bp, Unknown
  Bacterial polypeptide expressing nucleotide sequence isolated from the Sargasso Sea
ggagagaaggtcttgcagagcttatggtaccaattattggttctctatatcgaaatggcactaatatccttgtttatggaaaatctctggtaaatgaatctccagttgcaataatgaaagcacatcgctttgcaaggcagtctgataataacgaacttagtgaattagaaacctatccaattctgaaatatatagaaactttagatttagctgactgcgaaattgatgtaggtgaaatagctgttaaatgtccattttttgaagatattaaaaatgacgactctaaaataggggagtttattgatgctgaacttgaatctgtaataaataagcaatcaaacagaccttctgaacctgcaaatatagtcttgtatggttttggaaggattggaagacttgttgcaagaatgatgacacaaactacaggaccaggtaattattttaaactaagagctattgtcattagaaaagctacagatgatgatatatttaaaagagccagcttgttaacgaaagattctgttcatgggccttttgatggaacagtaagagttgatgaagaaaactcaagtttagtaatcaatggaaatcctgttaaggttatttacgcttcaggtcctgataaagttaaatattcagattatggcattaatgatccagttgtaattgataatactggtatttggagagatgaagaagcattatctgttcatattaaatcaggagcctcaaaggtgatcttaactgctcctgcaaaaggagatatcaaaaatattgtgtacggaataaatgattcaattcttgaagaaaatgatcagcttatatctgctgcatcatgtacaacaaatgcgattgttcctgtgctaaaaacgattaatgatgagtttaaaattaatggaggccatattgaaactgttcacgcatatacaaatgatcaaaatctaatcgataactttcataagaaagacagacgaggaagaggtgctccacttaacatggttataacatcaactggagctgtaaatgcagtagcaaaagctttaccagaacttaaagggaaactcactggtaatgctattcgtgtgccgactcctaatgttagtcttgcaatattatctttggaattagataaaaaagttagtgttgaaatagttaatgattatcttagatcgatggcttttcactctgaatatagagaaataattggatttgttaactcatctgaggtcgtttctactgatttttattcgtcaccatttgctactgtaattgactctcaggctactataactaatgacaaaagagtaactctttattgttggtacgataatgaatatggctatactaaacaagttataaacttagcaaagaaagtagctaaaattaatctacctagattacctaaaccaattagctaaa

SEQ ID NO: 215279 - DNA, 982 bp, Unknown
  Bacterial polypeptide expressing nucleotide sequence isolated from the Sargasso Sea
aatggatttggaagaataggtagactagttttaagagctataatcgaatctaaacgaaatgatatcaaagttttagcaataaatgatttaggttcggttgaagctaatgcccatttattaagttatgatagtgttcatggaaagctcaacagtacagttaatgtaacttctgaaggtattaatactgatcatggggatataaaagtattttctgaaagaaatcctgaagatcttccatggggggatttagatatagatatagctttagaatgcacaggactatttactaagaaagaagatgcaaataaacatataatagctggagcaaagaaagttttaatatcagctcctggaaatggtgttgattatacagtagtatatggtgtcaatgaaaaaggtataacaaatgatcataagattatttcaaatgcaagttgtactactaattgcttagctcccgtagcaaaaatattaaatgaacttgtcggtattgaaagcggttttatgaccactgttcacgcttttacaggagatcaacctgttttagataccttgcattctgatttaagaagggcaagggcagcttcgtcttcaatgatacctacttcgactggtgctgcaaaagctgttggattagtattaccagagttatcaggtaaattagatggaactgctgttagagtaccgacagtaaatgtgtcaatggtagatttaactttctatgcacaaaaagctacctctatagaagaaataaacaaatcaataaatgaagcagctttaggaagtttatcgggtgttcttacatataataatgcgcctttagtatcaattgattttaatcataaccctgcttcatcaaattttgatgccactcagacacaagtagttaaagaaaaattagttagagttttatcttggtacgataatgaatggggcttttcaaatagaatggctgatgtggcagttctaatggggaaataaa

SEQ ID NO: 215280 - DNA, 1260 bp, Unknown
  Bacterial polypeptide expressing nucleotide sequence isolated from the Sargasso Sea
aatggttaagaagactaaaaaaagaaagaaatctaaaaagtcggttaaatctaaatcaaaaaaaaaagcgacaaagaaaatttctaaatctttaaagaaaaaaagtcttaagaccaaatcaaaaaatgtgcgaaacaaaaacaatggaggaaaaatgagtgcagaagcaatgaaagtgtcttcagttctagatacctctcatttaaaggttaaatttccatttaaagcaaaatatggaaactacataaatggtaaatttgtagagcctaaatctggtaagtattttgataatacttctcctatttcaaatgagaaaatctgttctgtagcacgatcaaatgaaaaagacgtagatgcagcactagatgcagctcacgcagctttccctgaatggggaaagactgacatcacaacaagatcaaacatcttgtataagattgctgatgttttagaaaaaaatctaaacttattagctgtagctgaatgtttagataatggtaaaccaatcagagaatgtatggctgctgatttacctttggtgattgatcactggagatattttgcaggagtaattagagctgaagaaggctctattgctgaaatagctaataaccaatactcatacaattttcatgaaccacttggagtagttggtcagatagttccatggaatttcccattactaatggcaacatggaaattagctccagctcttgctgcaggtaactgctcagttttaaagccagctgaacaaacaccagcatcaattatggtaatgatggaacttattggagatttattacctccaggagttgttaacattgttagtggttttggattagaagctggtaaacctttagcatcctctaaaagagttgcaaaggttgcatttactggtgaaacaactactggaagattgattatgcagtatgctgcacaaaacatcattccaatcacattagaattaggtggaaaatctcctaatatcttctttgaagacgtaatggataaagatgatgatttcttcgataaatgtattgaagggtttgtaatgttcaatctaaaccaaggtgaagtttgtacttgcccaagtagagctttaattcaagagtcgatctatgataaattcatggaaagagctattgccagaacaaaagcagttgtgcaagataatcctttaaaaatggaaacaatgattggagcccaagcgtcagtagagcaaatggagaagattaaatcttatctagagctaggtaaaaa

SEQ ID NO: 215281 - DNA, 1546 bp, Unknown
  Bacterial polypeptide expressing nucleotide sequence isolated from the Sargasso Sea
atgagtgcagaagcaatgaaagtgtcatctgtattagatacttctcatttaaaggttaaatttccgttcaaagcaaaatatggaaactacattaatggaaaatttgtagaaccaaaatcaggcaagtattttgataatgttagcccgatctcaaatgagaaaatctgttcagttgcacgttcagacgaaaaagacgtagaagcagcattagatgcggctcacgcagctttccctgagtggggaaaaacagatatcactacgcgatcaaatatattgtacaaaatcgccgatgtgttggaaaaaaatctaaatttattggctacagctgaatgtttagataatggaaaaccaataagagagtgtatggcagcagatttacctttggttattgatcattggagatattttgctggtgtgattagagcagaagaaggttcaatcgctgaaatagcaaataatcaatactcatacaattttcatgaaccattaggtgtagttggtcagatagttccgtggaatttcccattattaatggcaacatggaaattagctccagctcttgcagcaggaaactgttcagtattaaaaccagctgagcaaacaccagcttctattatggtgatgatggaacttattggagatttattacctccaggagtggtaaacattgtcagcggttttggattagaagcaggtaaaccattagcatcatctaaaagagttgctaaagttgcttttactggtgaaacaacaactggaagattgattatgcagtatgctgcacaaaacattattccaattactctagagttaggtggaaaatctcctaacattttctttgaagacatcatggaaaaagatgatgatttctttgataagtgtattgaaggttttgtaatgtttaatcttaaccaaggagaggtttgtacttgtccgagtagagctttaatacaagagtctatctatgataaattcatggaaagagctattgctagaacaaaagctgttgttcaagataatcctttaaaaatggaaaccatgattggagctcaagcatctgtagaacaaatggagaagatcaaatcttatcttgagttaggtaaaaaagaaggtgcaaaagtcctaacaggtggaagtgcagctaaacttaatagtggattggaaaaaggtaattatattcaaccaactgtttttgaagcaaataacagtatgcgaatttctcaagaagagattttcggacctgttgtatctgtaattaaatttaaagacgaagcagaggcattaaaaattgctaatgatactctttatggtttaggagcagctgtatggactagaaatggtaatattgcacacagaatgggtagagcgatacaagcaggaatagtatggactaattgttatcatgcttacccagcgcactcgccatttggtggatacaaacaatctggagttggtagagaaactcacaaaatgatgcttaatcattacagacagaataagaatcttcatgtttcttatgctgagaaaaaattaggcttcttttaat

SEQ ID NO: 215282 - DNA, 889 bp, Unknown
  Bacterial polypeptide expressing nucleotide sequence isolated from the Sargasso Sea
gaagaccataaagatcttgttttgattaaaaatggtgccaatgaagcagcttcagatcttgctgaggatgaaggaataagtctattttctgcaactggtagttgtgaaatgggtagagctttagctcctatagttgccaaacgattaggcagaagtcttttagagctaggtggtaataatgctgctatagtttgtccttcagctgatcttgaattaactatcaaagcaataactttctctgcagctggtacaacaggacaacgttgtaccacattacgtagactttttgtgcataaagatatttataaggaagtggtggataaattaaaaacctcttttgatggattaaaaattggagatccgatggatagagaagtacaagttggaccattaatatcagaagatagttttcagcagatgcaaaagaagttagattcatgtcgcaacaaatcattagaagttagcgggggcgataggctagatattgatggcggagtttatgttaagccagcactggtagaagtcacagaacatattaaagaaatgaatgaagagacttttgcaccaattctgtatgtaatgccttttgagaatttaaaagaagcgatagatttacaaaattcagttaagcaaggacttagtagttcaatttttactaacgatgttagagaatctgaactcttcttaagtgccgagggttctgattgtggaatagctaatgtgaatattggtaccagtggagcagaaattggtggcgcatttggtggcgaaaaagatacaggtggaggaagagagtctggctctgattcatggaaagcctatatgagaagaactacagcaacagtaaactatggagacgatctacctcttgctcaaggcgtagaattcg

SEQ ID NO: 215283 - DNA, 358 bp, Unknown
  Bacterial polypeptide expressing nucleotide sequence isolated from the Sargasso Sea
gatgaatgaagagacttttgcaccaattctatatgcaatgcctttcgataatttaaaagaagcaatagatttacaaaattcagttaaacaaggacttagtagttcaatctttactaatgatgttagagagtctgaactcttcttaagtgctgagggttctgattgtggaatagccaatgtgaatattggtactagcggagcagaaattggtggcgcatttggtggcgaaaaagatacaggtggaggaagagagtctggttctgattcatggaaagcctatatgagaagaactacggcaacagtcaactatggagatgatctacctcttgcccaaggagtagagttcgaggaaaaatag

SEQ ID NO: 215284 - DNA, 775 bp, Unknown
  Bacterial polypeptide expressing nucleotide sequence isolated from the Sargasso Sea
gggtggcaatcaccagcaatcattgggcgacagtgcggacttaaagaaggcatcagacaggatttggaatggtaagttaatgaatgcaggacaaacatgcattgcgcctgactatgtttatgtcaaagaggagatgcttggagattggatagaagcaaccaaagattcaatctcgtcaatgtatccgtctgtttttgataatgaagattacacctcggttgttaatgatggacattatcaaaggcttcatggatatatagaggatgcaagagagaagggggctgacgtctttgagatcaatccagcgaatgaatcagagtcagagaaaactcataacaagatgatgcccacagtgattttgaatgcaacagaagaaatgttggtgatgcaagaagaaatatttggcccaatcatgccaataaagacttataaccaaatcgatgaagttgttgattatgtcaatatgcatgaaagaccacttggactttattattttggaaataagaagagcgaagaagattttgttatgtcaaatacagtctcaggcggggcagcactcaatgacgttatttttcagttcattcaagaagatcttccttttggcgggattggcccaagcggaatgggacattaccatgggattgagggtttcagaactttctctcatgcgagaggtatttacaaacaaacaccattagagggtcttttgaaactcatgcgaccaccttttggtaaattgatagaccaagttatttcaaccaaaataaagaagtag

SEQ ID NO: 215285 - DNA, 809 bp, Unknown
  Bacterial polypeptide expressing nucleotide sequence isolated from the Sargasso Sea
aattggagatccttttgatagaaatattcaggtgggacctttaatttctgagcaaagttacaatgctatgaaaaaaacattagatgcttgttcgagtaaagcaaagaaaatacatggtggtcaaaaattagatatcgagggcggcacatatgtgcagccggcaattgttgaagttgacagccatatcgatgaaatgaaagatgagacctttgcgccaattctttttgtaatgccatttaataaattaactgatgctattgaattgcaaaactctgttaagcaaggtttaagcagctctatctttactaatgattttcgagagtcagaacttttccttggtcctgagggatcagattgtggtattgcaaatgtgaatattggcacaagcggcgcagaaattggtggtgcttttggaggagaaaaagaaactggaggcggccgtgaatcaggttcagatgcatggaaagcttatatgagaagaacaactgcaactcttaactacggaacagaattgccccttgctcaaggagtagagtttggagataaagggaaaatcatgtatgaaggcatgacatttgtaaggacagaaaatgaattaatcccacaagtagcaattcataatcgtcaaagaattgaatggatcgcagaggctggtgaagatggtagaacttatgaggaaataaatgcaccaaattcttactacagaaaatgtattaaaaggcgaacttaccatggcaatcattcaagtattcttcaggacctaaggtatgatgtagcaagaggttacataagattaaaacatgaataac

SEQ ID NO: 215286 - DNA, 871 bp, Unknown
  Bacterial polypeptide expressing nucleotide sequence isolated from the Sargasso Sea
aaggggtcaattattggcgagcaaatgatcaaagaccctaggctacctcttgtatcatttactggatcaacctcaatgggtcgacatgtaaataaaacagtttcagagaggtttggtaaaactatattagaattaggcggaaataacgcaattatcattgatgaaaccgctgaaatggaacttgctatacctgcagttgtttttggagctgtagggacagctggtcaaagatgtacatccactaggcgaataatcgttcatgagtcgatacacgattcatttataagtaaactaataaatgcatataagcaggtagttattggaaaccccctagatagtaagacattaatgggtccacttataaatcaacaagccgttgatgattatttaaaagccatagaaatggttaccgcttcaggaggtaagttgctttttggtgggaacgtactttctttagacgggcattttgttactccagcaatagttagcgctcaaaatagctgggaaattgttcaaaaagaaacttttgcacctattctttatgtaataaaatacagtacaattgaagaggctatgaatttgcataacaatgttccccagggattgtcttcgtcaatatttacaacaagcataagaaatgcagaaacattcttatcaaatcgaggtagtgattgcggtattgctaacgttaacatagggacctctggggctgaaattggcggtgcatttggaggagaaaaggaaactggtggaggtagagagtctggctctgactcatggaagcaatacatgagaaggcaaacaaatactattaattggagtaaggatctacctttggcacaaggtatagaattcaatttagataaataat

SEQ ID NO: 215287 - DNA, 925 bp, Unknown
  Bacterial polypeptide expressing nucleotide sequence isolated from the Sargasso Sea
caattatatgttttaacaatgccaagcgagcgacctaaccatagattgcaagaactatggcatcctcttggagttattggctgtataactgctttcaattttcctatggccgtttttgcatggaatttttgtttagcagcagtatgcggtaatagcattatttggaaaccaagccctcactcaaatctctgcgctaaagggattaaagatgcttgggataaagtaagcgatgagtttgcagatttgatattgatcttagaaggagaaaaagaagaagcagtagcaatgtgtgaagatcctgcaatttctttaatctcagctactggaagcactcaaatgggtaaagagttagcgcctcttgtatcaaagagattgggtaaacttttattagaacttggtggaaataatgctgcaatagtttgtccatctgcggacttagacttaacgataaaagggatagcattttcagcatgtggaacaacaggacaaagatgcacttcattgagaagactttttgttcatgaagatatatatgatgattgtgttttaagacttaaaacttgttttgaagaattaataattggttgtccagcaaaagaatcttcacaaatcggaccattgatatctgaagcaagttatcaatctatgcaagcaacactcacatccttgaaagataaaaaaattgaagtcattggtggtgaaaggttagagattgaggatccaaatgaatattatgttaaaccagctctagtcttggttgataaagtagaagatgagatgcttcaagaaacatttgcaccaattttgtatataaaaacatataaagaaattaatgaagcaattcaaatgcaaaatgatgtatcacagggcctaagtagctcaatatttactaatgatataagagaatcagaattatttttaagcg

SEQ ID NO: 215288 - DNA, 181 bp, Unknown
  Bacterial polypeptide expressing nucleotide sequence isolated from the Sargasso Sea
atggaatggtatgataacagatgggtcaactgctaccactcctaccctgcacacgctgcattcggtggatataagaattctgggatcggaagagaaactaacaaaatgatgctaaaccattatcaacaaacgaaaaatgtgcttgtatcatacgctgaaagtccagatggtttcttttaaa

SEQ ID NO: 215289 - DNA, 483 bp, Unknown
  Bacterial polypeptide expressing nucleotide sequence isolated from the Sargasso Sea
attaaaaagattgcctttactggctgtactgaagttggcaaacaaataatatcttcaacttcaaacacaaataaaaaactgactatggaacttggtggtaaatctccatttatagtttttgaagacgcagatttagatagtgctgtagaaggtgtagttgatgctatctggtttaatcaaggacaggtatgttgtgctggatccaggttattaattcaagagagtattgaaaaaaagtttattaaaaaactaaaaaatagaatggaaagattaagagttggaaatccattagataaatcaattgatataggagcaatagtagctccaattcaacttaaaaaaattaattctttagttcaaagaggagttaaagagggtgctaaattatggcaaccttcctggtcctgtcctcgagaaggattattttaccctccaactttgtttactaatgtaactccagcgtctttcatatctcaaattgaa

SEQ ID NO: 215290 - DNA, 949 bp, Unknown
  Bacterial polypeptide expressing nucleotide sequence isolated from the Sargasso Sea
tttgaagatgctgatttggatagtgcaatagaaggtgttgttgatgcgatttggttaaaccaaggccaagtatgctgtgcgggctcaagactattagtacaagaaagtattgagaaaaaatttatccaaaaacttaagaaaagaatggaaaaacttcgtgttggtgatccattagataagtctattgatattggagctatagttgcgcctttccaacttaaaaaaattaattctttagtaaataaagcacaaaaggatggaaataaattatggcaaccttcatggtcatgtccaactaatggtttattttatcctccatctttatttacaaatgtaacaccgtcatcttttattgctcaagtagaaatatttggaccagttttgacaacaatgacatttcgaacacctagtgaagcagtatccattgctaataatacaccatatggacttgctgcaagtatttggtctgaaaatattaacttagctttagatattgctccaaaagtaaaagccggagtcatatggataaattctacaaacttatttgatgctgcgtgtggttttggtggttacaaagaaagtggttttggaagagaaggtggttcagagggtattagagcatattcaaaattagcacttcctctttctaagtcaaaaagaggaaataaattatctaaagttacaccatctaactcaattgatagaacaccaaaattatatattggaggaaaacaaaaaagacctgatagcggttattccttttcttcttatgatgctcaaaataatttcatttgtgatgttccaaatgcaaatcgtaaagatgtaagagataccgttgaggttgcatctaaagcagttagcaaatcttcaactaacttcaatagagctcaaattctttactacttagctgaaaatttacaagatcgaaaaaataccttttctaacttat

SEQ ID NO: 215291 - DNA, 667 bp, Unknown
  Bacterial polypeptide expressing nucleotide sequence isolated from the Sargasso Sea
gacttaaagaaggcatcagacaggatttggaatggtaagttaatgaatgcagggcaaacatgtattgcgcctgactatgtctatgtcaaagaggagatgcttggagattggatagaagcaaccaaagattctatctcttcaatgtatccgtctgtttttgataatgaagattatacctcggttgttaatgatggacattatcaaaggcttcatggatacatagaagatgcaagagagaagggggctgacgtcattgagatcaatccagcgaatgaatcagagtcagagaaaactcataacaagatgatgcccacagtgattttgaatgcaacagaagaaatgttggtgatgcaagaagaaatatttggcccaatcatgccaataaagacttataaccaaatcgatgaagttgttgattatgtcaatatgcatgaaagaccacttggactttattattttggaaataagaagagcgaagaagattttgttatgtcaaatactgtctcaggtggggcagcactcaatgacgttatttttcagtttattcaagaagacctaccttttggcgggattggtccaagcggaatgggacattaccatgggattgagggtttcagaactttctctcatgggagaggtatttacaaacaaacaccattagagggtc

SEQ ID NO: 215292 - DNA, 763 bp, Unknown
  Bacterial polypeptide expressing nucleotide sequence isolated from the Sargasso Sea
tgcggtaattctattatatggaagccaagtccacactcaaatgactgcgctaaaggcatcaaagaggtttgggataaagtaagtggtgagtttgctgacctagtcttagttcttgaaggtggaaatgaagaagctgtggcgctatgtgaagataaaagaatagatttaatttctgccacaggaagcacacaaatgggcaaagagttagcaccaattgtttcagcaaggcttggaaaacttctgctagaattaggaggtaataatgctgcaattgtttgtccgtctgcagatttagatttaacaataaaaggaatagctttctctgcatgtggaacgacaggacaaagatgtacatctttgagaagactttttgtgcatgaggatatatatgaagactgtacaaaaagacttcaaaagtgctttgatgaattgataataggctgtccaacaaaagaatcatcacaaataggaccactgatttctgaagcaagtttcaattctatgcaagatactattaattccttgaaggataagggtattactgtgtttggaggagatcgtattgaaatcgaagatccaaaggaattttatgtaaagccagctttagttcttgtaaatgaaatagaggaagaaatgttatcagaaacttttgcaccaatactttatgtcaaaagttataaaaacattgaggaagcaattcaaatgcaaaacaatgtatctcaaggtttaagcagttcaatttttactaataatattagagaat

SEQ ID NO: 215293 - DNA, 358 bp, Unknown
  Bacterial polypeptide expressing nucleotide sequence isolated from the Sargasso Sea
aatgttatcagaaacttttgcaccaatactttatgtcaaaagttataaaaacattgaggaagcaattcaaatgcaaaacaatgtatctcaaggtttaagcagttcaatttttactaataatattagagaatcagagctttttcttagcgaagcaggtagtgattgtggaatcgcgaatgtaaatattggtacaagtggggctgaaattggaggagcttttggcggtgaaaaagatactggcggtggtagagagtctggatcagatgcctggaaaaattatatgagaagaatgacagcaaccgttaactatggtgaagagttaccacttgcacaaggagttgagtttgatgaaaactaa

SEQ ID NO: 215294 - DNA, 514 bp, Unknown
  Bacterial polypeptide expressing nucleotide sequence isolated from the Sargasso Sea
ccattaatatcagaagatagttttcagcagatgcaacagaagttagattcatgtcgcaataaatcattagaagttattggaggcaacagactagatattgatggtggagtttatgttaagccagcactggtagaagtcacagaacatattgaagaaatgaatgaagaaacttttgcgccgattttgtatgtaatgcctttcaacaatttaaaagaagcgatagatttacaaaattcagttaaacaagggcttagtagttcaattttcactaacgatgttagagagtctgaacttttcttaagcgctgagggttctgattgtggaatagcaaatgtaaatattggcactagcggtgcagaaattggtggcgcttttggtggtgaaaaggatacaggtggaggaagagagtctggttctgattcatggaaagcttacatgagaagaactacagcaacagttaactatggagacgatctaccgcttgctcaaggtgtagagttcgacgaaaattaag

SEQ ID NO: 215295 - DNA, 939 bp, Unknown
  Bacterial polypeptide expressing nucleotide sequence isolated from the Sargasso Sea
aagggattaaagatgcttgggaaaaagtaagtgatgattttgcagatttgatattgatcttagaaggagaaaaagaagaagcagtagcaatgtgtgaagatcctacaatttctttgatctctgctactggaagcactcaaatgggtaaagagttagcgcctcttgtatcaaagaggttgggtaaacttttattagaacttggtggaaataatgctgcaatagtttgtccatctgcggatttagatttaacgataaaagggatagcattttcagcatgtggaacaacgggacaaagatgcacttcactaagaagactttttgttcatgaagatatatatgatgattgtgtagcaagacttaaaacttgttttgaagaattaataattggttgtccaacaaaagaatcttcacaaatcggaccattgatatctgaagcaagttatcaatctatgcaagcaatacttacttccttgaaagataaaaaaattgaagtcattggtggtgaaagattagagattgaaaatccaaatgaatattatgttacaccagctctagtcttggttgatgaagtagaagatgagatgcttcaagaaacatttgcaccaattttgtatataaaaacatataaagaaattaatgaagcaattcaaatgcaaaatgatgtatcacaaggtctaagtagctcaatatttactaatgacatgagagaatcagaattatttttaagcgaatgcggaagtgactgtggcattgcaaatgtaaatattggaactagtggtgcagaaattggtggagcttttggtggtgaaaaagacactggtggtggtagagaatccggctctgatgcatggaaaaattatatgagaagagtaacagcaacggtaaattacggagatgagcttccattagcacaaggagtggagtttgatgaaagctaag

SEQ ID NO: 215296 - DNA, 1375 bp, Unknown
  Bacterial polypeptide expressing nucleotide sequence isolated from the Sargasso Sea
atgaacagagataactataatcaattagtcaataaatctcatgaaatttcaataaagtggaggtctctaccagctccccaaagaggtgagtacattagaaagtttggtgaagagctcagaaaacaaaaagttaatcttgcagcgttaattactgaagaggcaaggaaaatcaaaacagagtctttgggcgaagtccaagaggcaattgatatgtgtgactttgctgttggcttaagcagacaactttatggactaacaatgccaagtgaaagagctaatcatagacttcaagaaatatggcatccattaggaatagttggatgtatcacggctttcaactttccaatggctgttttcgcttggaacttctgtttagcagcagtttgtggcaatagcattatttggaaaccaagtcctcgctcaaatgaatgtgcaagaggaattaaaaatgcctgggataagataagtgacgatttttctgatcttattttgattttagagggtggaaatgaggaatcagttgcactttgtgaagataataaaatttccttaatatcagcaactggaagtacccaaatgggaaaagaattagcaccaattgtttcagctagacttggaaaattactgttagagcttggtggcaataatgctgcaatcatatgtccaagcgcggacttagatcttaccgttaaaggcgttgttttctcagcatgcggtactactggtcaaagatgtacatcgttaagaaggttatttgttcatgaagaaatatatgatgaatgtgtttcaagactcaaagattatgtcaataatcttatcattggttgtccttcaaaagactcatctcaagttggacctttgatatctgaagagagctttaataacatgcaagttattttagattcgcttaggtcaaaagatgttgagattttgggaggcgagaggttggaaattgaagatcctaaagaattttatgttaggccagctcttgttttggtagatcaaattgaagatgagatgcttaaagaaacctttgcaccaattttatatataaagaaatttagtgacttaaaagatgcaatttcaatgcaaaacaatgtcaaacaagggttaagtagttcaatcttcacgaatgacatgcgtgagtcagaattatttttaagtgaatctggaagtgattgtggcatagcaaatgtgaatataggaacaagtggagccgaaattggtggagcttttggtggtgaaaaagaaactggtggtggaagagaatcaggatcagatgcttggaagaactatatgaggcgtgttacagccacgataaattatggtgaagagttgccactagctcaaggtgtagagtttgatgaaacctaag

SEQ ID NO: 215297 - DNA, 1528 bp, Unknown
  Bacterial polypeptide expressing nucleotide sequence isolated from the Sargasso Sea
atggattcaatattaaataagctaggtataaatgaatttaattatggagcatgttctggcaaggataaatggtcagaaaattctaatgcaaaaattttagaatcatttaatccagctaatggaaaactacttgcttctgtatatatggctgaggaaagtgattacaataatatattgaatcaatctattgaatctttcaaagaattcagaaaagtacctgcgcctgttcgtggagaacttgtaaggcaaatgggcgatgctttacgtgataaaaaagatgcactaggaagtttagtttctcttgaaatgggaaagattaaacaggaaggtgatggtgaagttcaggagatgattgatatagcagattttgcagtaggtcaatctcgtatgctctatggaaaaacaatgcattcagaacgcccagatcataggatgtacgagcagtggcatcctctaggaccagttggcgtaatatcggcttttaattttccagttgcggtttgggcgtggaacgcatttattgctgcaatatgtggaaatacaactatttggaaaccttcttccagtaccccattaactgcaatagctgttcaaaaaatttgtaatgacgtaatgcaaaaaaatggatattcgggtattttttcattaatggttggttccggctctgtagtgggtgaaaagttgattaccgataaaagagtacctttaatttcatttacaggttcaaccaatatgggtcgtcatgtaagcgaggtcgtaggttcaagatttggtaaatgtatattagagcttggcggaaataatgctatgattatcgatgatacagcaacattgtctttagctattcctgcaatagcttttggtgctgtcggtaccgctggacagcgctgcacatcaacaagaagagtgattgctcatgaaaagatttatgatgaattaaaagatcaattaattaatgcatacaatcaagtaagcattggtgatccattagatcccaataccttgatgggtccattaattaatgaaaatgctattacttcatacgaaaaagccctagagcgagtagttgaatcagggggaaatattttatgtggtggtgaaaggattgatcaaaatggaaattttgtaacacctgcgatagcagaggttcaaaatgaatgggatatcgttcaagaggagacttttgcaccgatattatatttaatcaaatacaaaactatcgatgaagcgctaaatctgcataatgatgtacctcaaggtttgtcgtcttctatatttactaacaatattcaaaatgctgaatatttcttatctcatagaggtagcgactgtggtatagctaatgtaaatattggcacatctggcgctgaaattgggggagcatttggaggtgaaaaagaaacaggtggcggtagagaatctggctcagattcatggaaacaatatatgagaagacaaacaaacaccatcaactggagctccgatttacccctggctcagggaatagaatttaatttagataaataat

SEQ ID NO: 215298 - DNA, 1354 bp, Unknown
  Bacterial polypeptide expressing nucleotide sequence isolated from the Sargasso Sea
atgagtaaattaacagaacagtctaagaaagcatttttacaatggcgcacattgcctgctccacagagaggtgaatatattagaaagtttggcgaagcattgcgtgaacgcaaaacagaagttgctgaacaaattactacagaagcaaaaaaaataatttctgaaggtgaaggtgaagtccaagaagttattgatatgtgcgattttgctaccggtttaagtcgtcaactttatggattaacaatgccaagtgaaagacctaatcatagattacaagaaatctggcaaccattaggcgtcgtaggttgtgtaacagcatttaattttccagtagcagtttttggttggaatttttgtctagcggcagtgtgtggtaatagcataatctggaaaccgagccctcatagtgaagggtgcgctaaattagttaaagaaatatgggatagtgttgctgaagaccataaagatcttgttttgattaaaaatggtgccaatgaagcagcttcagatcttgctgaggatgaaggaataagtcttttctctgcaactggtagttgtgaaatgggtagagctttagctcctatagttgctaaacgattaggcagaagtcttttagagttaggtggcaataatgctgctatagtttgtccttccgctgatcttgatttaactattaaagcaataactttctctgcagcaggaacaacaggacaacgttgcactaccttacgtagactttttgtgcataaagatatttataaagaagtagtagacaaattaaaaacttcttttgatggattaaaaattggagacccaatggatagaaacgtgcaagttggaccattaatatcagaagatagtttgcagcagatgcaacagaaattagattcatgtcgtaataaatcattaaaagttaccggaggtgacaaactagatattgatggcggagtttatgttaaacctgcactagtagaggttacagaacatatagaagagatgaatgaagagacttttgcaccaattctatatgcaatgcctttcgataatttaaaagaagcaatagatttacaaaattcagttaaacaaggacttagtagttcaatctttactaatgatgttagagagtctgaactcttcttaagtgctgagggttctgattgtggaatagcaaatgtaaacattggtactagcggagcagaaattggtggtgcatttggtggcgaaaaagatacaggtggaggaagagagtctggctctgattcatggaaagcctatatgagaaggactacagcaacagtcaactatggagacgatctacctcttgcccaaggagtagagttcgacgaaaaataag

SEQ ID NO: 215299 - DNA, 1375 bp, Unknown
  Bacterial polypeptide expressing nucleotide sequence isolated from the Sargasso Sea
tatggcgaataatgaatttgaaacaatcgttaataagtctaaagaaatttctttaaaatggagagctttaccagctcctcaaagaggagagtttataagaaaatttggtgaagagcttaggcagcaaaaagaatctttagcgcatatcattactaaagaagccaggaaaataggaactgaatcactgggtgaagttcaagaggctatagatatgtgtgattttgctgttggattaagcaggcagctatatggactaaccatgcccagcgaaagacctaaccatagattgcaagaattatggcaccctcttggaatagttggatgtataaccgcttttaattttcctatggcagtttttgcatggaacttttgtttagctgctgtttgcggtaatagcataatttggaagcccagccctcattcaaatgaatgtgctagaggaattaaagaagcttgggataaagtaagtggagatttttctgatttaattctcatcctcgagggaggcaatgaggaggcagtttctatctgtgaagataatcgaattgcgcttgtatctgctacaggtagtacacaaatgggaaaagagcttgctccaattgtttcagcgaggctaggcaaacttttgctagagcttggtggcaataatgcagcaattgtttgtccttcagcagacttagacttaactataaaaggaatagctttttctgcttgtggaacttctggtcaaagatgcacatctcttagaagactatttgttcatcaagatatctatgatgattgtgttgagaggcttaaaaaatgttttgatgacctaataattggctgtccaacaaaagaagattcacagataggaccattaatatctgaaagaagttataactcaatgcaacaaactctagattcactaaagaacaagaatgttaaagttcttggtggcgagagattacatatagaagatcctaaagaatattatgtaaagccagccttagttcttgttgaaaatattgaagatgaaatgttgtcagaaacctttgctcccatcttatatgttaagaaatataaagatcttaaagatgcaatatctatgcaaaataatgtatctcaaggattaagtagctcaatttttactaatgaaatgagagaatctgaattatttttaagcgagtctggaagtgattgtggaattgcaaatgtaaatattggtacaagtggagctgaaattggaggtgcttttggaggcgagaaagatactggaggaggtagagagtctggttctgatgcatggaaaaattatatgaggagaatgactgcaactataaattatggtgatgagttacctcttgctcagggggtagagtttgatgaaagctaa

SEQ ID NO: 215300 - DNA, 379 bp, Unknown
  Bacterial polypeptide expressing nucleotide sequence isolated from the Sargasso Sea
tatgaataaagatatacgtgaaatgaattatggtccctctttggagtcctccgagttagcttttaaatggctatcgaaaaataataataaatttggacatttcataaatggaaagatgacaactccaaaaaatacttttgaaacaataaatcctgctaactcagatatactggctagtatatcgaaaggatctctttcagatgttaataatgctgtaaaatctgcaaaagttgcttttaagaattggaaaaatttaaaaccatttgaaagatcaaaatatttatatgctttagcacgattaattcaaaaaaatagtaggattttagcagtattagaaactttagataatggtaaacctatcagagaaactagagattta

SEQ ID NO: 215301 - DNA, 440 bp, Unknown
  Bacterial polypeptide expressing nucleotide sequence isolated from the Sargasso Sea
tggccaaagattagatattgaagattctaatgaatattatgtaaaaccagcattagttcttgtaaaagaaatagaagatgagatgctttctgaaacatttgcacctattttatatgttaagagttatgaaaaaattgaagaagctattcatatgcaaaacgatgttagtcaaggccttagcagttcaatttttacaaatgatattagggaatcagaattatttttaagcgaatctggaagtgattgtgggattgctaacgttaatattggtacaagcggagctgaaattggtggcgcttttggtggtgaaaaagatacgggaggtggtcgtgagtcaggttcagatgcttggaaaaattatatgagaagagtaaccgcaactgtaaattacggagaagatttaccacttgctcagggggtagaatttgatgaaagctaaa

SEQ ID NO: 215302 - DNA, 699 bp, Unknown
  Bacterial polypeptide expressing nucleotide sequence isolated from the Sargasso Sea
aggttgctaaaagaatcgtttctggaaagtttgttaattgtggtcaaacatgtattgctccagattacattgttgtaaatcaacatgttaaatctgatcttatttcagccattaaagagaatattataaagacatttggtaataaacctatagaatctgaaagctatggaagaattattaataaaaacaacctaataagacttgaaaatattattaaagatcaagttattgagtttggagggaaaatcaatatagataaactatatattgaaccaacaataattgttgatccagagattaactctgaaataatgaatgaagaaatttttggaccaattttgcctattttgtcttacgagaatgaaagcgaaattaaaaatattctcgacataaacccaacacctcttgcattctatattttttctaaaaatcaaatgtttattgacaacctaatagaaaacaataaatttggtggctgtgttattaacgatactttaattcattatattaatccaaatcttccatttggaggtataggtgatagtggaatgggagcctatagaggtaaatttagttttgatactttctcacatcaaaagccagttttgaggaaaaaaaatatgatagacataccttttagatatggtccttatccaaaatctttcaattttataagaaaaattcttgaaaaaatctaag

SEQ ID NO: 215303 - DNA, 1052 bp, Unknown
  Bacterial polypeptide expressing nucleotide sequence isolated from the Sargasso Sea
tataacagctttcaatttcccaatggctgtatttgcatggaatttctgtctttctgctgtttgtggaaacagcataatatggaaacctagcccacattcaaatgagtgcgcaaaaggaataaaaaaagcgtgggatgagataagcggtgagttttctgacttaattcaaattatagaaggtggtaacgaagaagcagttttaatttgtgaagataagagaatatctttggtatccgcaacaggaagcacacaaatgggtaaggagttggcgccaattgtttcagccaggctcggtaagcttttgcttgaacttggaggtaataacgctgcaattgtgtgtccctcagcagatttagatctaacaataaaaggtatcgccttttccgcttgcggaacaactggtcaaagatgcacctcgctaagaagactatttgttcataaagacatatatgatgactgtgttgagcgtttagaaaaatgctttgaggaattagtaataggttgtccctcaaaggattcctctcaaataggtcccttaatttctgaagatagctttaattctatgcaaaaaacacttgagtcattaaaggctaagaatgtatctgtaattggtggtgaaagattagatattgaagattctaatgaatattatgtaaaaccagcattagttcttgtaaaggaaatagaagatgagatgctttctgaaacatttgcacctattttatatgttaagagttatgaaaaaattgaagatgctattcgtatgcaaaacgatgttagtcaaggtcttagcagttcaatttttacaaatgatatgagggaatcagaattatttttaagtgaatctggaagtgattgtgggattgctaacgttaatattggtacaagcggagctgaaattggtggtgcttttggtggtgaaaaagatacgggaggcggtcgtgagtcaggttcggatgcttggaaaaattatatgagaagagtaaccgcaactgtaaattacggagaagatttaccacttgctcaaggagtagaatttgatgaaagctaaa

SEQ ID NO: 215304 - DNA, 1375 bp, Unknown
  Bacterial polypeptide expressing nucleotide sequence isolated from the Sargasso Sea
atggataaaaataagtattctgaattagttaaaaagtcaaaagaaacatcaaacagatggaggtcactacctgcacctcaaaggggagagtacgtaagattatttggtgaagaattgcgtgctaaaaaaaacgagcttgcagcaacaatcactaaagaagctagaaaaataaaaactgaatcacttggagaagttcaagaagctattgatatgtgcgaattcgctgttggcttaagcaggcagctttacggtttaacaatgccaagtgaaaggccaaatcataggcttcaagaattgtggcatcctttaggaatagtagggtgtattacagcatttaattttcctatggctgtttttgcctggaatttttgtttagcagccgtttgtgggaattcagtaatatggaagcctagtcctcattcaaatgaatgcgcaaaaggcatcaaagacgcttgggataatgttagtggtgagtatgctgatttgattctagtgcttgagggtggaaatgaagaggctgtagcactttgtgaagataaaagaataaatttagtatcagctactggaagcacgcaaatgggtaaagagcttgcacccattgtttctgcaagactaggcaagcttcttcttgagttgggtggaaacaatgctgcaattgtttgtccatctgcaaatttggatttaacaataaaagggatagctttttctgcatgcggaactacaggtcaaagatgtacttcgttacgaaggctttttgttcatgaagatatttatgatgactgtgttaaaaggcttgaaaattgttttgctgatttggtaattggatgtcctacaaaagaatcatctcaaattggaccacttatttctgaacaaagttttaattctatgcaagataccattaattctttgaagcaaaaaggcgtgaatgtgctgggtggggaacgaattgaaattgaagatccaaatgagttctacgtaaaaccagctctggttttggttgatcaaatagaagatgaaatgttgtcagagacctttgcaccaatactttatgtgaaaagctataaaagcatcgaagaggcaattaaaatgcaaaatgatgtctcccaaggattaagtagctcgatttttactaacgatataagagaatcagaactttttcttagtgaagcaggaagtgattgcggtattgcaaatgtaaatattggaacaagcggtgccgaaattggaggtgcttttgggggtgagaaagatacaggcggaggaagagagtcaggatccgatgcttggaagaattatatgagaagaatgacagcaacagttaactatggtgaagagttaccactcgcacagggggttgagtttgatgaaagctaaa

SEQ ID NO: 215305 - DNA, 1624 bp, Unknown
  Bacterial polypeptide expressing nucleotide sequence isolated from the Sargasso Sea
atgggggaaaaacacagcgatttaataaataaatctagagctgcttttttaaaatggagagctttaccagctcctgagcgtggcaattacatcaggttgtttggagaagctcttcgagagcaaaaaaaagaagttgcaaatcaaataacatttgaagcaaaaaaaattatttcagaatctgaaggtgaggttcaagaagtcattgatatgtgtgactttgctactggtttaagtaggcagctctatggtctcaccatgccaagtgaaagacctaatcatcgattgcaggagatttggcaacctttaggtattgttggttgtattacagctttcaattttcctgtagctgtgttcggttggaatttttgtttagctgctgtttgcggaaatagtattatttggaaaccatcacctcatagtgagggatgtgcagacttaacaaaaaaaatatgggattccgtcgcaggtgaatataaggatttggttttaatcaaaaaaggagcaaatgaggcttcggtagaattagccaaagatgaaaatattgccctactttctgctactggaagttgtgctatgggtaaggctattgcgcctttagtttcagcccgattaggaagaagcttactcgaacttggtgggaataacgcagctattatttgtccaactgcagatcttaatttgacaatcaaaggtgtgactttttctgcagcaggcacaactggtcaaagatgtacgacattaagaagactcttcgtgcatgaagacatttatgaggaggcaataaacaaacttataccttcatttgaaagtttaaaaattggagatccttttgacagaaatattcaggtaggaccattaatttcagaacaaagttatgaggctatgaaaaaaacattagatgattgtttgagtaaagcaaagaaaatacatggtggtcaaaaattagatatagagggcggcacatatgtgcagccggcgattgtagaagttgatagccatatcgatgaaatgaaagatgagacctttgcgccaattctttttgtaatgccatttaataaattaactgatgctattgaattacaaaactctgttaagcaaggtttaagcagctctatctttactaatgattttcgagagtcagaacttttccttggtcctgagggatcagattgtggtattgcaaatgtgaatattggcacaagcggcgcagaaattggtggtgcttttggaggagaaaaagaaactggaggcggccgtgaatcaggttcagatgcatggaaagcttatatgagaagaacaactgcaactcttaactacggaacagaattgccccttgctcaaggagtagagtttggagataaagggaaaatcatgtatgaaggcatgacatttgtaaggacagaaaatgaaataatgccacaagtagcaattcaaaatcgtcaaagaattgaatggatcgcagaggctggtgaagatggtagaacttatgaggaaataaatgcaccaaattcttactacagaaaatgtattaaaaggcgaacttaccatggcaatcattcaagtattcttcaggacctaaggtatgatgtagcaagaggttggataagattaaaacatgaataac

SEQ ID NO: 215306 - DNA, 1354 bp, Unknown
  Bacterial polypeptide expressing nucleotide sequence isolated from the Sargasso Sea
atgagtaaattaacagaacagtctaagaaagcatttttacattggcgcatattacctgctccacagagaggtgaatatattagaaagtttggcgaagcattgcgtgaacgcaaaacagaagttgctgaacaaattactacagaagcaaaaaaaataatttctgaaggtgaaggtgaagttcaagaagttattgatatgtgcgattttgctaccggtttaagtcgtcaactttatggactgacgatgccaagtgaaagacttaatcatagattgcaagaaatctggcaaccattaggcgtcgtaggttgtgtaacagcatttaattttccagtagcagtttttggttggaatttttgtctagcggcagtgtgtggtaatagcataatctggaaaccgagccctcatagtgaagggtgcgctaaattagttaaagaaatatgggatagtgttgctgaagactataaagatcttgttttgatcaaaaatggtgccaatgaagcagcttcagaccttgctaaagacgaaggaataggtctattttctgcaactggtagttgtgaaatgggtagagctttagctcctatagttgcgaaacgattaggcagaagtcttttagagctaggtggcaataatgctgctatagtttgcccttcagctgatcttaaactaactgtcaaagcaataactttctctgcagctggtacaacaggacaacgttgcaccacattacgtagactttttgtgcataaagatatttataaggaagtggtggataaattaaaaacctcttttgatggattaaaaattggagatccgatggatagagaagtacaagttggaccattaatatcagaagatagttttcagcagatgcaacagaagttagattcctgtcgcaataaatcattagaagttagcgggggagaaaggctagatattgatggtggagtttatgttaagccagcactagtagaagttatagaacatatagaagagatgaatgaagagactttcgcaccgattctatatgtaatgcctttcgataatttaaaagaagcaatagatttacaaaattcagttaaacaaggacttagtagctcaatctttactaatgatgttagagaatctgaactctttttaagtgctgaaggctctgattgtggaatagcaaatgtaaacattggtactagcggagcagaaattggtggtgcatttggtggtgaaaaggatacaggtggaggaagagagtctggttctgattcatggaaagcctatatgagaagaactacggcaacagtcaactatggagatgatctgcctcttgctcaaggagtagagttcgatgaaaattagg

SEQ ID NO: 215307 - DNA, 619 bp, Unknown
  Bacterial polypeptide expressing nucleotide sequence isolated from the Sargasso Sea
tgttctaaagacatatatgatgactgtgttgagcgtttagaaaaatgctttgaggaattagtaataggttgtccctcaaaggattcctctcaaataggtcccttaatttctgaagatagctttaattctatgcaaaaaacacttgagtcattaaaggctaagaatgtatctgtaattggtggcgaaagattagatattgaagattctaatgaatattatgtaaaaccagcattagttcttgtaaaggaaatagaagatgagatgctttctgaaacattcgcacctattttatatgtaaagagttatgaaaaaattgaagaagctattcgtatgcaaaacgatgttagtcaaggccttagcagttcaatttttacaaatgatatgagggaatcagaattatttttaagcgaatctggaagtgattgtgggattgctaacattaatattggtacaagcggagctgaaattggtggcgcttttggtggtgaaaaagatacgggaggcggtcgtgagtcaggttcggatgcttggaaaaactatatgagaagagtaaccgcaactgtaaattatggagaagatttaccacttgctcagggggtagaatttgatgaaagctaaa

SEQ ID NO: 215308 - DNA, 1529 bp, Unknown
  Bacterial polypeptide expressing nucleotide sequence isolated from the Sargasso Sea
tgatttagatagtgctgtagaaggtgttgttgatgcgatttggtttaatcaaggccaggtatgttgtgctggatcaagactcttagtacaagaaagtattgagaaaaaatttatccaaaaacttaagaaaagaatggaaaaacttcgtgttggtgatccattagataagtctattgatattggcgctatagttgcactagtccaacttaaaaaaattaattctttagtaaataaggcacaaaaggatggaaataaattatggcaaccttcatggtcatgtccaacaaatggtttattttatcctccatctttatttacaaatgtaacaccgtcatcttttattgctcaagtagaaatatttggaccagttttaacaacaatgacatttagaacacctagtgaagctgtatccattgcaaataatactccatacggacttgcggcaagtatttggtctgaaaatattaatttagctttagatattgctccaaaagtaaaagctggagtcatctggataaattctacaaacttatttgatgctgcgtgtggttttggaggatacaaagaaagtggttttggaagagaaggcggatcagaaggtattagagcatattcaaaattaccacttcctctttctaagtcaaaaagaggaaaaaaatcatctaaaggtcaatcatctaattctatcgatagaactccaaaattatatattggaggtaaacaaaaaagacctgatagtggttattccttttcttcttatgatgctcataataattttatttgtgatgttccaaacgcaaatcgcaaagatgtaagagatacagtagaggttgcatctaaagcagttagcaaatcttccactaattttaatagagctcaaattctttattacctagctgaaaatttacaagatcgaaaaaataccttttctagtttgctgtcttctttaattagtatttcgcaaaaagatgctgaaaaagaatttgatcaatcaatagaaagattattttattatggtgctatggctgataagtttgaaggctctatacataatcctcctataagaggtttaacactagctgttaaagaaccgataggcgttgttgcaaatattttaaatgatgattatccactattaagtctaataactactctaggagcaaattttgctgcaggaaatgctagtataataattccaggtcaaaatacgtctcttttagcaactgaattatatcaactacttgaaacttctgatgttccagctgggtatattaatatccttacaactaaacaaaatagtttgaataaaatcttatctgaacatgaaaatattgatggtatttggttttttagtgaaaataataatgagcgtctgaaggttattcaaagcacaacatcaaatttgaaaagaacttggtgcccacaatcaaaaaatcttgattggtcttcgaaagaagaagatttcttagaagagtttttatatcaaagtacacaagtaaaaaatatttggatcccatacggagagtgat

SEQ ID NO: 215309 - DNA, 1289 bp, Unknown
  Bacterial polypeptide expressing nucleotide sequence isolated from the Sargasso Sea
gaaaaaattcctgctcctaaacgcggtgagctcgtaaggcaatttggtgaaaaattgagagagaataaagaagaattagggactcttgtatcatacgaaatggagaagtcataccaagaaggtcttggggaagttcaagaaatgattgatatctgtgattttgcagttgggttatctaggcaactgcatggacttacaatgcattctgaaagacctgagcacagaatgtatgaacaataccatccccttgggatagttggcattatatctgcatttaattttcctgtggcagtttggagctggaatgttgctcttgcttgggtatgcggtaatgttactgtttggaaacctagtgaaaaaacccctctatgtagtataatatgccaaagattgatatcaagtgtatttaaagaaaataatattccagagggagtttcgtctcttataaatggtgactataaaataggtgagctattatcttctgatattagaatgcctttagtttcagcaactggttcaactagaatgggtaagaaagtagcagaaaaggttggctctagattaggaaaaacgttactagagttaggagggaataatgccattattgttacaccagatgcagatcttaaaatgatgttaatgggaactgtttttggagctgttgggacttgtggacaaagatgtacatctacaagaagattgattgttcatgaaacagtttatgataaggttaagagttcacttaaagaagcatataatcagattaaaataggtaatccacttaattctgaaaaccatgttgggcctttaattgataaagatgctgttaaaaattatttagatgcattaaatatgatagaagaacagggaggtagttttcttgttcctggtggagttttaaatggtcaagaatttgaaagtggatgctatgttaagccggtaattgctgaaattaatcattcaaaaaaaattgtccaagaagaaacattcgctccaattttatatttaattaaatattctggtagtgttgaatctgcaattgaaatacaaaatgaggttaaacaaggattatcttcagcaattatgacaaataacctccaagatgctgaacgttttttgtctcattgggggagtgactgtggaattgcaaatgtaaatattggaacatctggggcagaaattggaggagcatttggaggagagaaagaaacaggaggtggaagagaaagtggatctgatgcatggaaagtatatatgcgaagacaaactaatactataaacttctcacc

SEQ ID NO: 215310 - DNA, 1170 bp, Unknown
  Bacterial polypeptide expressing nucleotide sequence isolated from the Sargasso Sea
ttgctgactttgctgtaggccaatcaagaatgttgtatggaaaaactatgcattcagaaagaccagatcataggatgtatgagcaatggcatcctcttggcccgattggtgtaatatctgcttttaattttccagttgcagtttgggcttggaatgctttcatagctgctatatgtggaaatacaactatatggaaaccttcttcatcaacaccgctatgtgcaattgctgttcaaaatatttgcaataaagtcatggaagaaaatggttattctggtattttttcagttataataggaaaaggctctattgttggcgaagaaatgattaaagatcctagattacccttgatttcctttactggatcaacatctatggggcgtcacgttaataaaacagtttcagaaagatttggtaaaaccatactagaattgggaggtaataacgctatagtaattgatgaatcagctgaaatggagctagctattcctgccgttgtctttggagctgtcgggacagctggccagcgatgtacctcaactagaagattgattattcatgaatcaatatatgattcttttttagaaaagttaattaatgcctataagcaggtaaaaattggcgatcctttggacaattctactttaatgggtccattagtaaatgaacagtctgtagacaattatttaaatgccatagagacagctaccgactctggcggcaaggtgatattcggtgcgaagattttgacctcagatggatattatgtaaaaccgactattatcagtgctcaaaatcactgggaaatagtacaagaagagacatttgcgcctatactttatgttatgaaatatagttcaatagatgaagcaattagccttcacaatgacgtcccacaaggtttatcgtcgtctatatttacaacaaatataagaaatgcggagaggtttttatcaaatcgaggtagtgattgtggaatcgcaaatgttaacataggtacatctggcgctgaaatcggtggtgcttttggaggtgaaaaggagacaggaggaggtagagagtcaggttctgattcatggaagcaatacatgagaagacaaacaaatactattaattggagcaaggatcttcctttagcccaaggaatagaatttaatttagacaattaat

SEQ ID NO: 215311 - DNA, 890 bp, Unknown
  Bacterial polypeptide expressing nucleotide sequence isolated from the Sargasso Sea
tgcggtaattctattatattggaagccaagcccacactcaaatgactgtgctaaaggcatcaaagaggtttgggataaagtaagtggtgagtttgctgatctagtcttagttcttgaaggtggaaatgaagaagctgtggccctatgtgaagataaaagaataaatttaatttctgctacaggaagcacacaaatgggcaaagagttagcaccaattgtttcagcaaggcttggaaaacttctactagaattaggcggtaataatgctgcaatagtttgtccgtctgctgatttagatttaacaataaaaggaatagctttctctgcatgtggaacgacaggacaaagatgtacatctttgagaagactttttgtgcatgaggatatatatgaagactgtacgaaaagacttcaaaagtgctttgatgaattgataataggctgtccaacaaaagaatcatcacaaataggaccgctgatttctgaaggaagttttaattctatgcaagataccattaattctttgaagaataagggtattactatatttggaggagatcgtattgaaatcgaagatccaaaggaattttatgtaaaaccagcattagttcttgtaaatgaaatagaggaagaaatgttatcagaaacttttgcaccgatactttatgtaaaaagctataaaaatattgaggaggcaattcaaatgcaaaacaatgtatctcaaggtttaagcagttcaatttttactaatgatattagagaatcagagctttttcttagcgaagcaggtagtgattgtggaatcgcgaatgtaaatattggtacaagtggggctgaaattggaggagcttttggcggtgaaaaagatactggcggtggtagagagtctg

SEQ ID NO: 215312 - DNA, 669 bp, Unknown
  Bacterial polypeptide expressing nucleotide sequence isolated from the Sargasso Sea
taggaggtaaagcggcaaatattgtatataacgatgctgccttagatcaagcagtcgaaggcgttgtaaatggtatattcttcaatcaaggacatgtatgttgcgctggaagtagattgctactgcaagaggatattcatgatgagtttattaataagctagaaaaaagaatgcaaactttaagggttggcaatcctttagataaaaatactgatattggagcaataaattcaaaagaacaactagataaaattacatcattagtcaatgaaggcgtgaatgatggaggagaattatttcaaattgaatgtgagcttccttcagaaggatattggtatagacctagtttgtttactaatgttcagccatcatacaatatcgcaagagaagaaatttttggtcctgtattaactactttaacttttagaacccctgaagaagcagttgatatagcaaataatacagagtacggattatcagctggcgtctggacagaaaaaggatctaaaattttatggactgccgatcgtttagatgctggtgttatctgggctaatacatttaacaaatttgacccatcctcaccttttggtggctataaggaatcaggttttggtagagaaggtggtaggcatggattactttcatatttgaaggttcgatcatgac

SEQ ID NO: 215313 - DNA, 232 bp, Unknown
  Bacterial polypeptide expressing nucleotide sequence isolated from the Sargasso Sea
gggtgctggtgtttggactagaaatggaaatatcgcgtacagaatgggtagagaaatacaagcaggtagagtttggacaaactgttaccatgcttatccagctcatgcggcatttggcggatacaaacaatctggtattggaagagaaactcacaaaatgatgctaaatcattacagacaagtgaaaaacttacacgtgtcttacagtgagaaaaaattaggcttcttttaa

SEQ ID NO: 215314 - DNA, 678 bp, Unknown
  Bacterial polypeptide expressing nucleotide sequence isolated from the Sargasso Sea
ctgaaccatatggaaatgttttgattataactccatggaattatccatttcaactatccctgacacctttaattggtgctattgctgcaggaaatgctgtgataataaaaccatctgaattagccccagcaacatcaagggttctaaaagaattgattgattctgtatttccccaaaatatggcgactgtgattgagggagatgcaggtattgctaaatatttgttagataaaaaatgggattatatattttttactggcagcacaagaataggaaaaattatagctgaaaaagctgcaaaaaatttaactccaattactttagaacttggaggaaaaagcccatgtatagtagattcaggagtagatatagacaaagttgctaaaagaatcgtttctggaaagtttgtgaattgtggtcaaacatgtattgctccagattacattgttgtcaatcaacacgttaaatctgatcttatttcagccattaaagagaatattattaagacatttggtaatagacctttagaatctgaaagctatggaagaattattaatacagagaacctaattagacttgaaaatataattaaagatcaagttattgagtttggcgggaaaatcaatatggataaactatatattgaaccaacaataattgttgatcctcagaattgat

SEQ ID NO: 215315 - DNA, 752 bp, Unknown
  Bacterial polypeptide expressing nucleotide sequence isolated from the Sargasso Sea
agaacttggaggaaaaagcccatgtatagtagattcaggagtagatatagacaaggttgctaaaagaatcgtttctggaaagtttgttaattgtggtcaaacatgtattgctccagattacattgttgtcaaccaacatgttaaatctgaccttatttcagctattaaagagaatattataaagacatttggtaataaacctatagaatctgaaagctatggtagaattattaataaaaacaacctaataagacttaaaaatattactaaagatcaagttattgagtttggcgggaaaatcaatatagataaactatatattgaaccaacaataattgttgatcctcaaattgattctgaaataatgaaagaagaaatttttggaccaattttgcctattttgtcttacgagaatgaaagcgaaattaaaaatattctcgatacaaacccaacacctcttgcattctatattttttctaaaaatcaaatgtttattgacaatctaatagaaaacaataaatttggcggctgtgttattaacgatactttaattcattatattaatccaaatcttccatttggaggtattggtgatagtggaatgggagcctatagaggtaaatttagttttgatactttctcacatcaaaagccagttttaagtaaaaaaaatatgatagacataccttttagatatggtccttatccaaaatctttcaattttataagaaaaattcttgaaaaaatataag

SEQ ID NO: 215316 - DNA, 967 bp, Unknown
  Bacterial polypeptide expressing nucleotide sequence isolated from the Sargasso Sea
aaacctttctgaatcttcaataaaaacaagtttaattgtgtctgaaattattaattctgtttttgagtcatcacatgttagtgttattcaaggggatgcatccgttgcctcaatactcttaaaaaaaagatgggactatatcttttacactggaagtactcaagttgggaaaattgttgccaaagcagctgcagaaaacttaacccctaccacattagaattaggaggaaaaagcccatgcattattgacgaaagtgtgccaattaaaaaaactgctaaaagaattatttggagtaaatacataaactgtggtcaaacttgtattgctcctgattatctggttgtccaaaaaagcattaaatctatcttagttaacaatttgattaatgagataaaatctgcctttggagataatccaatcaattcatcagattatggaagaattattcacaaaaaacattttgataaattaagttcgtcactaaatggtcaaaaaattctttatggaggagtcacagatgtaaaacaactatattttagtcctaccattgtcgatgaaccaacaaatgaaagtgatttgatgcaacaagaaatttttggacctatacttccaattgtttcatttggatctgaagatgagatgcatcaaattcttaagggaaaagaaaagccattagctttttatattttttcaaataaaaaaagatttgtaaataatattttttcaaaatattcatttggaggaggagtagcaaacgatgcaatagttcacttcgcaaatgacaatcttccttttggaggagttggaaatagtggaatgggagaatatcatgggaaatatagttttaaaattttttctcattataaaccaattgtaaaacgttcatttttatttgacctacctcaaagatatgctccatatccaaaatcactttcattcttgaaatttttaattaatcgactatga

SEQ ID NO: 215317 - DNA, 147 bp, Unknown
  Bacterial polypeptide expressing nucleotide sequence isolated from the Sargasso Sea
accatgcatacccagctcacgctgcgtttggtggatacaaacaatctggtatcggaagagaaactcacaaaatgatgctaaatcattacagacaagtgaagaacttacacgtgtcttatagtgagaaaaaattaggcttcttttaac

SEQ ID NO: 215318 - DNA, 961 bp, Unknown
  Bacterial polypeptide expressing nucleotide sequence isolated from the Sargasso Sea
actaatttctgctgtagcagctggcaacacagtgtgtttaaagccaagtgaaattgcctctaatacaagcagtgttatgtcagctatccttaataaggaattaaatgacccttgtgtttcggtagttgaaggaggcgtgaatgaaaccacggtattattggatcaaaaatttgataaaatattttttacaggaagtacaaaggttggaaaaatagtatatgaaaaagctgcaaaaaatttgacgcctgtaattttagaattagggggtaaaagccctgcaattttcacaccatcttgtaatttagagatgggtgttaaaagaatgatttgggcaaagtttttaaatgctggacaaacttgtattgctccagactattgtgtagttcactcatctataaagactcaatttttaaaattggttaaagaagaaataattcgtgcaaaatactcgattagtaatgataattacgtcagtataattaataaatctaacacagagagaattttaaatttactagaaaatgccgatatatattatggtggaaatcacaatattgatgagcgttatatttcacccacaatagtaaataatgtcaattttgatcaagaaataatggattcagaaatatttggcccaatacttccagtaattgaatatgaaaatttagacattgcttttaaagaaatcaataaaaaacctaaaccattagcggcatatctttttacctctcaaaaaacggataaaaataagtttattaaagagttgccgtttggaggaggaggtataaatgaagtcattatgcaattttcaaatcctaaattgccatttggtggtgtgggagaaagtggttttggttcatatcatggtaaaaatggatttatagctttttcacattataaaagtataatggataaaccaaccttttttgagctgccattgaaatatgctccttattcactc

SEQ ID NO: 215319 - DNA, 846 bp, Unknown
  Bacterial polypeptide expressing nucleotide sequence isolated from the Sargasso Sea
gcagaattatgtattaaagcaaatatacccagtgggtgtgataaatattattacaggagatggatctacaggtgaacttatcacttcgcatccagagatacaaaaggtagcatttactggctcaactgaaattggaaaaaaaattattcaatcaacatccactacaaacaaaaaattaacaatggaattaggaggaaaatccccttttattgtttttgaagatgctgatcttgatagtgctgttgaaggagtagttgatgcaatatggtttaatcaaggacaggtttgctgtgcaggatcaagattgttaatacaagagagtatagagaaaaaatttattaaaaagcttaaacaaagaatggaaaaattaagaattggcaatccattagataaatcaatagatataggagccatagttgcacctgtgcaattacaaaaaataaattcacttgttaaaaaaggcattaaagatggagctaaattgtggcaaccttcttggtcatgtccaacagaaggtttattttaccccccttcattatttacaaatgttacacctgcatcatttatagcccaagtagaaatttttggtccagtactcactagtttaactttcagaaaaccaagtgaggctgttgcaattgcaaataatactccatatggattagcagcaagtatttggtcagaaaatattaacttagctttagatattgctcctaaaattaaagcgggagtaatatggattaattcaacaaatttatttgatgcttcatgtggttttggtggttttaaagaaagtggttttggaagagaaggaggaagtgaagggattagagcctatactaaaaa

SEQ ID NO: 215320 - DNA, 822 bp, Unknown
  Bacterial polypeptide expressing nucleotide sequence isolated from the Sargasso Sea
tatggattataaagatattgataaagtaattgaatctcaagtaaaatttgttaaagacaactctaactctgtcaataataggattcaaatcttaaactcattattaatatcaataaaaaataatgagtcaagaatttatgaggcactaaaacaggatctaaacaaacatgagtttgagtcttttttatctgaaatacttcttgttaaaaaagagattaaattatttgtaagaaaacttagaagttggtcaaaaaaaaagagagttagtggttctatactaaattttccttcagggaattatttgatacctgagccatatggaaatgttttgattataactccatggaattatccatttcaactatccctaacacccttaattggagctattgctgcaggaaatgctgtaataataaaaccatctgaactagctccagcaacatcaagggttctaaaagaattgattgattctgtattcccccaaaatatggcaactgtgattgagggagatgcaggtattgctaaatatttgttagataagaaatgggattatatattttttactggtagcacaagaataggaaaaattatagctgaaaaagctgcaaaaaatttaactccaattactttagaacttggaggaaaaagcccatgtatagtagattcaggagtagatatagacaaggttgctaaaagaatcgtttccggaaagtttgttaattgtggtcaaacatgtattgctccagattatattgttgtcaatcaacatgttaaatctgatcttatttcagctattaaagagaatattataaaaacatttgg

SEQ ID NO: 215321 - DNA, 874 bp, Unknown
  Bacterial polypeptide expressing nucleotide sequence isolated from the Sargasso Sea
gaagttggaaagaaaataattcaaacaaatactaatccagataaaaaaatgacaatggaacttggaggtaaatcaccttttattgtttttgaagatgctgatttagatagtgcagtcgaaggtgttgttgatgcgatttggtttaaccaaggtcaagtatgttgtgctggatcaagactcttagtacaagaaagtattgagaaaaaatttatccaaaaacttaagaaaagaatggaaaaacttcgtgttggtgatccattagataagtctatagacattggagctatagtagcaccggtccaacttaaaaaaattaactctttagtaaataaagcacaaaaggatggaaataaattatggcaaccttcatggtcatgtccaacaaatggtttattttatcctccttcattatttacaaatgtaacaccgtcttcttttattgctcaagtagaaatatttgggccagttttaacaacaatgacatttagaacacctagtgaagctgtatccattgctaataatacgccttacggacttgctgcaagtatttggtctgaaaatattaacttagctttagatattgctccaaaagtaaaagctggagtcatctggataaattctacaaacttatttgatgcttcgtgtggttttgggggatacaaagaaagtggttttggaagagaaggcggttcagagggtattagagcatattcaaaattaccacttcctatttctaagtcaaaaagaggaaagaaattatctaaaggttcatcatttaactccatcgatagaacaccaaaattatatattggaggtaaacaaaaaagacctgatagtggttattccttttcttcatatgatgctcgaaaataat

SEQ ID NO: 215322 - DNA, 283 bp, Unknown
  Bacterial polypeptide expressing nucleotide sequence isolated from the Sargasso Sea
aaagatgagaaggaagcattagaaattgctaatgatactctttatggtttaggtgcaggagtatggactagaaatggaaatcttgcatacagaatgggtagagagatacaagctggcagagtttggacaaactgttatcatgcttatcctgctcacgctgctttcggcggatataaacaatctggtatcggaagagaaactcataaaatgatgcttaaccactacagacaagtgaagaacttacacgtgtcttacagtgaaaagaaattaggcttcttttaaa

SEQ ID NO: 215323 - DNA, 816 bp, Unknown
  Bacterial polypeptide expressing nucleotide sequence isolated from the Sargasso Sea
tcaactgaagttggaaaaaaaataattcaatcaactgctagttcagaaaaaaaacttactatggagttaggcggcaaatcaccatttattgtttttgaagatgcagatttagatagtgcagtagaaggaatagtagatgctatatggtttaatcaaggccaggtatgctgtgctggatcacgtttgctaattcaagaaagcattgaaaaaaaatttgtaacaaaactaaaaaacagaatggaaaaattaagagtaggtaaccctctagataaatcaattgatattggagctatagttgctcctgtgcaattgaagaagattaaacagattgtaaaaaaaggtgaaaaagaaggatcttcattatggcaacctaaatgggcctgcccaaaagaaggattattttatccaccatcaatatttaccaatgtttcaccttcttcatttatagcgcaggttgaaatttttggaccagtattaactgtattgaattttcgcaaaccaagtgaagctgttagcatagctaataatacaccttatggtcttgcagcaagcatttggtctgaaaatattaatttagctttagatatagcgccaaaaattaaagcaggtgtaatttggattaattccactaatctattcgatgcttcagttggatttggtggatataaagaaagcggttttggaagagagggtggaatagagggaattagatcatatagagaaattaatttgcctgaaattactccaaaaaaaataaaaaaaaataatattaaattaaaacttccaaaaatagatacaacgccaaaactttatatt

SEQ ID NO: 215324 - DNA, 795 bp, Unknown
  Bacterial polypeptide expressing nucleotide sequence isolated from the Sargasso Sea
gggcaggaccaacaggtgctgcaattgtaaatcattctgatgtgataaaaattgcatttactgggtcaactggagtaggaaaggtcattatgaaagcaattgctggtacagaaaaaaaatctaccatggagcttggaggaaaagcagcaaacatcatttttgaagatgctcctctagatcaagctgttgagggagtcatcaatggaatatactttaaccaaggtcatgtttgttgtgctgggtctagattgtttattcaggagtctgtttatgatattgtattaagaaagctaaaggataggattcaagctcttgttttgggtgatccgttggataaaaacactgatattggcgctattaattcaaaggagcagttagcaacaataaacaagtatttaaaaatcggtcaaaaagaaggagcagatatgtttcaattgagttgcgatattccaaaaaaaggtttctggtgtccaccaactttatttactaatgtatctcaatcgcacgctattgctaaggaagagatttttggacccgttttagctgttcaaacatttagaacaattgatgaggttattacaaaagctaacaatacaccattcggcttatctgccggtgtatggacagataaaggctctaagatttttaaccttacttctcaaatgagagctggtgttgtttgggcaaatacttataataaatttgatcctacatctccatttggtggctacaaagaaagtggtcatggtagagaaggaggattacatggtttattaccatatttaaatatatgat

SEQ ID NO: 215325 - DNA, 892 bp, Unknown
  Bacterial polypeptide expressing nucleotide sequence isolated from the Sargasso Sea
tcctttattaatgatggcatggaaaattgcacctgctatagccgttggcaatactgtagttttaaagccagctgaatttacttccttaactgctctatactttgctgaattatgtcaaaaggctagaatacctaaaggagtcattaatattattacaggagacggtagcacaggagagcttattacctctcatggagatataaaaaagattgcttttactggatcaactgaagttggaaaaaaaataattcaatcctcttctcagcaagaaaaaaaattaactatggaactaggaggtaagtctccttttattgtttttgaagatgctgatctagatagcgctgttgagggtgtagttgatgcaatttggtttaatcaaggtcaagtatgttgtgctggctcacgattgttagttcaagaaagtgtagaaaaattatttataaaaaaattaaaagcacgaatggaaaaattacgtgttggaaatccgttagataaatcgattgatataggtgctatcgtagcaccagtacaattaaaaaaaatacaatcaattgtaaaaaaaggagagaaggaaggctctaaactatggcaaccaagctgggcgtgtccgactgatggtttattttatccaccttctatttttaccaatgtttctccatcttcttttattgcgcaagttgaaatttttggacctgttttatctatacttagtttcagaacacctagtgaagcagtaagtattgctaataatactccctatggtttagcggctagtatttggtcagaaaatattaatcttgcattagatattgctcctaaaatcaaagcaggtgtaatatggatcaattcaacaaatttattcgatgctgcatgtggatttggcgggttataa

SEQ ID NO: 215326 - DNA, 856 bp, Unknown
  Bacterial polypeptide expressing nucleotide sequence isolated from the Sargasso Sea
tatggattataaagatattgataaagtaattgaatctcaagtaaaatttgttaaagacaactctaactctgtcaataataggattcaaatcttaaactcattattaatatcaataaaacataatgagtcaagaatttataaggcactaaaacaggatctaaacaaacatgagtttgagtcttttttatctgaaatacttcttgttaaaaaagagattaaattatttgtaagaaaacttagaagttggtcaaaaaaaaagagagttagtggttctatactaaattttccttcagggaattatttgatacctgagccatatggaaatgttttgattataactccatggaattatccatttcaactatccctaacacccttagttggagctattgctgcaggaaatgctgtaataataaaaccatctgaactagctccagcaacatcaagggttttaaaagaattgattgattctgtattcccccagaatatggcaactgtgattgagggagatgcaagtattgctgaatatttgttagataagaaatgggattatatattttttactggtagcacaagaataggaaaaattatagctgagaaagctgcaaaaaatttaactccaattactttagaacttggaggaaaaagcccatgtatagtagattcaggagtagatatagacaaggttgctaaaagaatcgtttctggaaagtttgttaattgtggtcaaacatgtattgctccagattacattgttgtgaatcaacatgttaaatctgatcttatttctgctattaaagagaatattataaggacatttggtaataaacctatagaatctgaaagctatggaaga

SEQ ID NO: 215327 - DNA, 1592 bp, Unknown
  Bacterial polypeptide expressing nucleotide sequence isolated from the Sargasso Sea
tccagataaaaaaatgacaatggaacttggtggtaaatcaccttttattgtttttgaagatgcagatttagatagtgcagtagaaggtgttgttgatgcgatttggtttaaccaaggccaagtatgttgtgcaggatcgagactcttagtacaagaaagtattgagaaaaaatttatccaaaaacttaagaaaagaatggaaaaacttcgtgttggtgatccattagataagtctattgatattggcgctatagttgcaccagtccaacttaaaaaaattaattctttagtaaataaagcacaaaaggatggaaataaattatggcaaccttcatggtcatgtccaacaaatggtttattttatcccccatctttatttacaaatgtaacgccgtcttcttttattgctcaagtagaaatatttgggccagttttaacaacaatgacatttagaacacctagtgaagctgtatccattgcaaataatactccatacggacttgcggcaagtatttggtctgaaaatattaacttagctttagatattgctccaaaagtaaaagctggagtcatctggataaattctacaaatttatttgatgctgcgtgtggttttggaggatacaaagaaagtggttttggaagagaaggtggttcagaaggtattagagcatattcaaaattaccactacctctttctaagtcaaaaagaggaaagaaattatctaaaggtcaatcatctaattctatagatagaactccaaaattatatattggaggtaaacaaaaaagacctgatagtggttattccttttcttcttatgatgctcataataattttatttgtgatgttccaaacgcaaatcgtaaagatgtaagagatacagttgaggttgcttcaaaagcagttggcaaatcttctactaactttaatagagctcaaattctttattacttagcagaaaatttgcaagacaggaaaaataccttttctagtttattgtcttctctcattggtatttcacaaatagatgccgaaaaagaatttgatcaatcaatagaaagattattttattatggtgctatggctgataagtttgaaggatctattcataatcctcctataagaggtttaacactagctgttaaagaacctataggcgtagttgcaaatattttaaatgatgattatccattattaagtttaataactacattaggatcaaattttgcagcaggaaatgctagcattattgttccaggacaaaagacgtctcttttagcaacagaattgtatcaactacttgaaacctctgatgtcccagctgggtatattaatatccttacaactaaacaaaatagtttgaataaaatcttatctgaacatgaaaatattgatggtatttggttttttagtgaaaataataatgagcgtctaaaggttattcaaagcacaacatcaaatttgaaaagaacttggtgtccacaatcaaaaaatcttgattggtcttcgaaagaagaagattttttagaagagtttttatatcaaagtacacaagtaaaaaatatttggatcccatacggagagtgat

SEQ ID NO: 215328 - DNA, 715 bp, Unknown
  Bacterial polypeptide expressing nucleotide sequence isolated from the Sargasso Sea
ctgctcttatattttgctgaattgtgccaaaaagctagaatacctaaaggtgtaatcaatattattacaggagacggcagtacaggagaattaattacatcacatgttgatacaaaaaaaattgctttcacgggatcaacagaagttggaaagaaaataattcaatcgactgcaacacaagaaaaaaaattaacaatggagttaggcggtaagtcacctttcattgtttttgaagatgctgatcttgatagtgctgttgagggtgtagtcgatgctatttggtttaatcaagggcaagtgtgttgtgctggctctcgtttactagtccaagaaagtgttgaaaaaatatttattaaaaaattaaaagctcgtatggaaaaattacgtgtaggtaatccacttgataaatcaattgatattggcgctatcgttgctccggttcaattaaaaaaaattcaatcaattgtaaaaaagggagagaaggaaggatctaaattatggcaacctagttgggcttgtccaaccgatggattattttatccaccttcaatttttactaatgtttctccatcttcatttattgcacaagttgagatttttggacctgtcttatcggttttaagtttcagaacaccaagtgaggcagtatctattgctaacaatactccgtatggtttagcagcccagtatttggtcagaaaaatattaatcttgc

SEQ ID NO: 215329 - DNA, 1375 bp, Unknown
  Bacterial polypeptide expressing nucleotide sequence isolated from the Sargasso Sea
atggataaaaataaattttctgaattagttacaaaatcaaaagcaatttcaaataaatggagatcattgccagctcctcagaggggagaatatattaggctttttggtgaagagcttcgtactaagaaagaagctcttgcttcaaccataactaaagaggctagaaaaataaaaacagaatcacttggagaagtacaagaagctattgatatgtgtgactttgctgtaggtttaagtagacaactttatggattaacaatgccatcagagcgtcctaatcataggcttcaagaattatggcatccattaggagtggttggttgcataacagcttttaactttccaatggcagtttttgcatggaatttttgcttagcagcagtttgtggtaattctattatatggaagccaagtcctcactcaaatggctgtgcaagaggcatcaaagaggtttgggataaagtaagtggtgagtttgctgatctagtcttagttcttgagggtggaaatgaagaggctgtggcgctatgtgaagataaaagaatagatttaatttctgccacaggaagcacacaaatgggcaaagagttagcaccaattgtttcagcaaggcttggaaaacttttactagaattaggcggtaataatgctgcaattgtttgtccatctgctgatttagatttaacaataaaaggaatagctttctctgcatgtggaacgacaggacaaagatgtacatctttgagaagactttttgtgcatgaggatatatatgaagattgtacgaaaagacttcaaaagtgctttgatgagttggtaataggctgtccaacaaaagaatcatcacaaataggaccgctaatttctgaagcaagttttaattcaatgcaagacaccattaattccttgaaggataagggtattactgtgtttggaggagatcgtattgaaatcgaagatccaaaggaattttatgtaaagccagctttagttcttgtaaatgaaatagaggaagaaatgttatcagaaacttttgcaccaatactttatgtcaaaagttataaaaacattgaggaagcaattcaaatgcaaaacaatgtatctcaaggtttaagcagttcaatttttactaataatattagagaatcagagctttttcttagcgaagcaggtagtgattgtggaatcgcgaatgtaaatattggtacaagtggggctgaaattggaggagcttttggcggtgaaaaagatactggcggtggtagagagtctggatcagatgcctggaaaaattatatgagaagaatgacagcaaccgttaactatggtgaagagttaccacttgcacaaggagttgagtttgatgaaaactaaa

SEQ ID NO: 215330 - DNA, 1237 bp, Unknown
  Bacterial polypeptide expressing nucleotide sequence isolated from the Sargasso Sea
atgactatggaacttggaggtaaatctccttttattgtttttgaagatgccgacttagatagtgctgttgaaggcgttgttgatgcaatttggtttaatcaaggccaagtttgttgtgccggatcaagattgcttgtgcaagaaagtattgagaaaaaatttattcaaaaattaaagaaaagaatggaaaaattaagagttggagacccattagacaaatctatagatatcggtgccatagttgctccagttcagcttaaaaaaattaattctatagtaaataaagcacaaaaagatggcaataaattatggcagccttcatggtcttgtccaacaaatggtttattttatcctccttcattgtttactaatgtaactccatcttcttttattgctcaagtagaaatatttggaccagttttaacaacaatgacatttagaacaccaagtgaagctgtttcaattgctaataatactccatacggacttgccgcaagtatttggtctgaaaatattaacttagcgttagatattgctcccaaagtaaaagctggagtgatttggataaattctacaaatttatttgatgcttcatgtggctttggaggttacaaagaaagtggttttggaagagaaggtggtgcggaaggcataagagcatattcaaagttaccattgcctagatataaatcaaacagagtaaagaaattatctaaagttcaatcatctaattctatagataggacaccaaaattatatattggcggcaaacagaaaagacctgatagtggttattctttttcttcttatgactctaaaaataattttatttgtgatgttccaaatgccaatcgtaaagatgtaagagatactgttgaggctgcatctaaggcagttagcaaatcttcttctaactttaatagagctcaaattctttattacttagctgagaatctacaagacagaaaaaataccttttccaacttactatcatctttaataggaatttctcaaaaagatgctgataaagaatttgatcaatcaattgagcgattattttattacgcttcaatgactgacaagtttgaaggatccattcataatcctcctataagaggtttaacattagcggttaaagaaccaattggtgtagtggcaaatattttaaatgatgattttccacttttaagcttaataacgactttaggagcaaattttgcagctggtaatgctaata

SEQ ID NO: 215331 - DNA, 889 bp, Unknown
  Bacterial polypeptide expressing nucleotide sequence isolated from the Sargasso Sea
tttggcaccctcaattgaagcaattaatcatatttcattaaaaaagaaatatggattatttattaacggaaaatttaaagatcctatttcaaaaaaatatttttcaactattaatccctcaactgaaaacaaaattgcaatgattgctgaagcaagagcctctgatgttgatttcgcagtaaaatctgcaagaaaggcttacgatggagtttggtctaaaatgccattaaaagaacgttctaaatatatttttagaattgctagaatgattcaagaaaaatctaaagaattagctataatagagacaatagatggaggaaaaccaattagagaatcaagagatatagatgttcctctagctgctgcccattttttttattatgctggttgggttgataagttaaattatgcttttccaaaccgtaatccaaaacctttaggagtagctggtcaaataattccctggaattttcctttaatgatggctgcctggaaaattgcacctgctttagcaactgggaatactgtagttttaaagccttcagaatcaacttctctaactgcattaaaattagctgaaataattcaagaagctgacttacctcctggggttgttaatataataactggtcctggatccacaggggaattaattgtaaatcatggtgatatagataaaattgcatttactggttctacatctgtagggaaattaatcatgaaaagtattgttgggactaaaaagaaatcaactatggaacttggtgggaaagcagctaatattatttttgaagacgccccaattgatcaagctgttgaaggcgtaattaatggtatttactttaatcaaggacatgtatgttgtgctggttctcgattattcgttcaa

SEQ ID NO: 215332 - DNA, 508 bp, Unknown
  Bacterial polypeptide expressing nucleotide sequence isolated from the Sargasso Sea
atgataggagcaatggcttctgctgagcaatatgaaaaagtaaaatcatatttagatcttggaaaaaaagagggagctgaagttcttgttggtggtgatgtcgctcaaatgagtggtgaccttgcaaatggatattatatacaacccacaatatttaaaggtcataataagatgagaatattccaagaagaaatttttggaccagttgtttctgtatgtactttcaaaacagatgaagaggcattagaaatagctaatgatactctttatggtttaggtgctggtatatggacaagagatctcaatacatcttatagatttggacgcgccattaaagctggaagggtttggacaaattgttatcatgactatccagctcatgctgcctttggtggttataagcaatctggtattggtcgtgaaaaccatttaatgatgttaaatcattatcagcaaactaagaatttactagtaagctatagcccaaaaaagctaggtttcttttaat

SEQ ID NO: 215333 - DNA, 823 bp, Unknown
  Bacterial polypeptide expressing nucleotide sequence isolated from the Sargasso Sea
ggcggtggcgccagttggccgcaaggtgctcgagggggctgcggcacatctcaccccggtgacactggaactcggcggtaagagtcctgccctggtgctggagggggcggatctgacggtgagcgcacggcggctgatctggggcaagggcctcaatgcaggccagacctgcatcgcgccggatcacctgatcgtgcagcccgggctgaaggcagaactgctgaaggccatggcttcagcccgcaccgagatgtacggaaccgaccccctggcgtcggaacaattggcctgcatcgtcaacaaccgacaatttcaacgtcttgaagctctgctggacaaggcccaacaggagggtcgcgtcctgatcggcggagaggtcaaccgtgatcaacggcgcatcgctcccacggtgattcgtgtcgacgaccgtcaggaccccctgatggcctatgaactgttcggtcccctgctgccggtgctggagctggcggacctcccccagaccctggccgagatccgccagggtccgaagcccttggcgctgtacctctttggaggcaatgaggcgcagcagcagcaggtgctggagaccaccagctccggtggggtctgtctcaacgatgtggtgatgcaggcaggcgtgccggacctgcccttcgggggcgtgggcggcagcggcatgggcagttatcacggccaggctggctttgacaccttcagccatgccaaggctgtgctgcgccgccccttccgcttggatttcaagctgcgctatcccccttacggcattgatctcaacctgctgaggcgactggccggataa

SEQ ID NO: 215334 - DNA, 728 bp, Unknown
  Bacterial polypeptide expressing nucleotide sequence isolated from the Sargasso Sea
taaatctcctaatatcttttttaaagatattgcagaagctgatgatgatttcttcgataaatgtatcgaaggtttcgttatgtttgctctaaatcaaggtgaagtctgtacatgtccaagtagagctttaattcatgaagatatatatgataaatttattgcccgttgtatcgaaagaactaaagctattgttcaaggagatccattagattctaatactatgattggagctatggcctctgctgaacagtatgaaaaagtaaagtcatacttagatcttggaaagaaagagggtgcggaagtgcttataggtggtgatgttgctcaaatgagtggtgaaatggcaaatggatattatatccaaccgaccatctttaaaggtcataataaaatgagaatatttcaggaggaaatctttgggccagttgtgtctgtatgtacatttaaaacagacgaagaggccctagagattgctaatgacactctttatggtctaggtgctggaatttggactagagacctcaatacttcttatagatttggccgtgcaataaaagcaggtagagtatggacaaattgttatcatgattatccagctcatgctgcttttggtggttataaacaatcaggtattggtcgtgaaaaccacttaatgatgttaaatcactatcaacaaacaaagaatcttttagttagttacagtccaaaaaaacttgggttcttttaga

SEQ ID NO: 215335 - DNA, 940 bp, Unknown
  Bacterial polypeptide expressing nucleotide sequence isolated from the Sargasso Sea
gatttgaaaaaaattgccttcactggttctacagaggtgggcagaattataagaaatcaaactgcagattcagaaaaaaagctgacgctcgaacttggaggtaagtcaccttttatagtttttgaagacgctgaccttgacagtgctattgaagggcttgtggatgcaatatggtttaaccagggtcaagtctgctgtgctggttcacgacttctggtacaggaaagtgttgctgaaaaggtcacaaaccgtctcaaagctcgcatgaccaaactaagagttggagatccacttgacaaaagcatggacatgggtgctgtgatagcacctattcaaaaaaagagaattcaaaaactagttaatcaaggtaaaaaagagggagctaaaatctggcaatggcagggcacattgcctaagaatgggtgcttttttcctcccacacttttaacaaacgttgctccagcatcaactgttgcacaaacagagatcttcggacctgttttaagttcaatgacatttcgtactcccgaagaagcagtaatgctagcaaacaacagtgcttacggtcttgcagcaagtgtatggagcgagaatatcaaccagtctcttcatttagccccaaagcttaaagtgggggttgtttggataaactgcacaaatcaatttgatgcatcagtcggatttggaggatatcgtgaaagcggatacggtcgagaaggtggacaagagggaatgtttgggtatctcaaattaaagaaaggagcatacggttccgttcaacgtatcaaagttaaaaaaatagccaaaacttataaactgattcagaataagattgaccgtactgccaaactttatatagggggaaaacagactcgtcccgattccggatactcgatacctgtatttaattcagacggctcactggcaggcgaaataggcc

SEQ ID NO: 215336 - DNA, 473 bp, Unknown
  Bacterial polypeptide expressing nucleotide sequence isolated from the Sargasso Sea
aaaaatcaaatcttacttagatttaggtaagaaagaaggtgccaaagttctatgtggtggaaatgttgctaaagttaatagtggtttagaaaaaggaaactatatcgaaccaactatttttgaaggtaataattcaatgagaatcttccaagaagaaatttttggaccagtagtatcggtaactaaatttaaagatgaagcagaggcattaaaaattgctaatgatactctttatggtttaggtgctggtgtttggactagaaacggaaatatcgcatatagaatgggtagagaaatacaagctggtagagtttggacaaactgttaccatgcttatccagctcatgcggcatttggtggatacaaacaatctggtatcggaagagaaactcacaaaatgatgctaaatcattatagacaagtgaaaaacttacacgtgtcttacagtgagaaaaaattaggcttcttttaat

SEQ ID NO: 215337 - DNA, 987 bp, Unknown
  Bacterial polypeptide expressing nucleotide sequence isolated from the Sargasso Sea
aatgaataaaataattaaaaattttaaaaatattaaatatggtccagcgccagaggatgacactgaagtaattaattggattaataaaatttcttctccaaataaaaattatattaatggaaaatggaatacttctaaaggatcaaaaaagattaaggtaattaatccttcaactaataaaaaattatttaatttaacaataagcacaaaaaaagatgttgatcttgctgttaattctgcaaaaaaggctcaaaaaaaatggtcatctataagtccttttcaaagatcaaaatatttatatgctctcgcaagattaatacaaaagcattctcgtttcttagctgtattagaatcaattgataacggaaaaccaattagagaaactagagatattgatattcctttagtagcaaggcatttttattatcatgcaggttgggcagaaaaattagataagaatttaaaaccaattggtgttgtaggacaaattataccttggaattttcctttattaatgcttgcttggaaaatagcacctgcaattgcttgtggaaatactgtagttttaaaaccagctgaatatacttctcttacagctttatattttgcagaactatgtactaaagctaatttacccaatggtgttatcaatattattacaggagatggatctacaggtgaacttatcacatcacatccagagatacaaaagatagcatttacaggctcaactgaaattggaaaaaaaattattcaatcaacatcctctacaaataaaaaattaacaatggaattaggaggaaaatctccttttattgtttttgaagatgctgatcttgatagcgctgttgaaggagtagttgatgcaatatggtttaatcaaggacaggtttgctgtgcaggatcaagattgttaatacaagagagtatagaaaaaaaatttattaaaaaacttaaacaaagaatggaaaaattaagaattggcaa

SEQ ID NO: 215338 - DNA, 697 bp, Unknown
  Bacterial polypeptide expressing nucleotide sequence isolated from the Sargasso Sea
tatggataaagatgacgacttctttgataaatgtcttgaaggttttgctatgttcacacttaaccagggagaagtatgcacttgtccgagtagagtgttaattcaagagtctatttatgataagttcatgaaaaaggcgattgctagaacaaaagcagttaaacaagacaatcctttgaaaatggaaactatgattggggcacaagcttcattagaacaaatggaaaaaatcaaatcttatctagatctaggtaagaaagaaggagccaaagttctaaccggaggaagtgtagctaaattgaatagtggattggagaaaggaaattatatccaaccaactatttttgaaggaaataacaaaatgcgaatattccaagaagaaatctttggaccagtagtttctgttactaagtttaaagatgaatcggaagcattagaaattgctaatgatactctttatggtttaggagcaggtgtttggactagaaatggtaatcttgcttatagaatgggaagagagatacaagcaggtagagtttggacaaactgttaccatgcttatccagcacatgctgcatttggtggatataaacaatctggtataggaagagaaactcataaaatgatgttaaatcattacagacaagttaaaaatttacatgtgtcttacagtgagaaaaaattgggcttcttttaa

SEQ ID NO: 215339 - DNA, 643 bp, Unknown
  Bacterial polypeptide expressing nucleotide sequence isolated from the Sargasso Sea
acacttaaccaagggagaagtatgcacttgtccgagtagagttttagttcaggagtctatttatgataaattcatgaaaaaggcgattgctagaacaaaagctgtaaaacaagataatcctttaaaaatggaaactatgattggagcacaagcttcattagaacaaatggaaaaaattaaatcttacctggacttaggtaagaaagaaggtgccaaagttctaacaggaggaagtgtagctaaattaaatagcggtttggaaaaaggaaattatatccaaccaactatttttgaaggaaacaacaaaatgcgaatattccaagaagaaatttttggaccagtagtttcagtcactaagtttaaagatgaagcagaggcattagaaattgccaatgatactctttatggtttaggcgcaggtgtttggactagaaatggtaatcttgcatacagaatgggaagagaaatacaagcaggtagagtttggacaaactgttaccatgcttatccagctcatgctgcatttggtggatacaaacaatctggtatcggaagagaaactcacaaaatgatgttaaatcattatagacaagtgaaaaatttacacgtgtcttacagtgagaaaaaattgggcttcttttaa

SEQ ID NO: 215340 - DNA, 883 bp, Unknown
  Bacterial polypeptide expressing nucleotide sequence isolated from the Sargasso Sea
gagtttgcagttttagaatcactagatggcggaaagcctattaaagaatctagagattttgacctcccacaggttgctgctaactttttctattttgcaggatgggctgataaactcgatttatcttggtcaactaaaaccttgaagccatatggagtagtaggacagattattccctggaatttccccctacttatgctggcatggaaaatcgctccagcattagctactggaaacactgttgttttaaaacctgcagaaactacacctttaactgcattgttatttgctgagatttgtgaacaagctggtcttcctgcaggtgtagtgaatatagttactggcgatggaagcacaggttcgcaaatagttaatcacaaagatattaataaaattgcttttacaggatctactcaagtaggtaagttaatacaaaagtctttagcaggaagggatgtaggtttaaccctagaacttggtggaaaagcagcaaatatcgtttatgaagatgcagctatagaccaagcagttgagggtgttgtaaatggaatatttttcaatcaggggcacgtatgttgcgcaggcagtagattgctacttcaagaatcgatccatgatcaatttatatccaaacttgaaaaaagaatgcaatctttaagagttggaaatccactagataaaaatacagacattggggccataaactccaaagagcaattagataaaattacaaatttagtaaatgaaggtttagaagatgggggagaattattccaaacagagtgcgagttgcctggcaatggtttctggtttagaccatcactatttacaaatgttcagccatcatattcaattgctagagaagaaatatttggacctgtac

SEQ ID NO: 215341 - DNA, 420 bp, Unknown
  Bacterial polypeptide expressing nucleotide sequence isolated from the Sargasso Sea
gtggtggaaatgttgctaaagtaaatagtggtttagaaaaaggaaactttattgaaccaactatttttgaaggtaacaattcaatgcgtatcttccaagaagaaatttttggaccagtagtatctgtaactacttttaaagacgaggctgacgcagtaaaaattgctaacgatactctttatggtttaggtgcaggagtttggactagaaacggaaatatcgcatacagaatgggtagagctattgaagcaggtagggtttggacaaattgctaccacgcatatccagctcatgcagcattcggtggatataaacaatctggtattggaagagaaactcacaaaatgatgcttaaccattatagacaagtgaaaaatttacacgtgtcttacagtgagaaaaaattaggcttcttttaaa

SEQ ID NO: 215342 - DNA, 720 bp, Unknown
  Bacterial polypeptide expressing nucleotide sequence isolated from the Sargasso Sea
cgcctaacattttcttccctgatatcatgaaccacgagcctgagttcattgataaatgtgctgaaggtttggtgttgggttacttcaaccaaggtgaagtttgtacttgtccttcgcgtgccatcatccatgaagatatttacgatgcgttcatggaaaaggttatcgagaaaattcagaagattaaacgtggtaacccacttgatactgacaccatggtaggtgcgcaagcgtctaacgagcagtttgagaagatcttgaagtatatcgatatcggcagagctgaaggtgcagaagtggttaccggtggtgagaaagagcaacttgaagggtttgatggcggttattatattcagcctacaatcttgaaaggtcaaaaccacatgcgtgtattccaagaagaaatttttggccctgttatcgcggttcaaacctttaaaacggaagaagaggccattgaaattgcgaacaacacaagctttggtctaggtgccggtgtgtggagtcgtgatgcgaacactgcgttcagagtaggtcgtgctattgaagccggtcgtgtgtggactaactgctaccacttatatccagcgcacgcagcgtttggtggatataagaaatctggtatcggtcgtgaaacacacaagatgatgcttgatcactaccagcaaactaaaaacctgttagttagctatgacatcaacccactaggtttcttctagt

SEQ ID NO: 215343 - DNA, 790 bp, Unknown
  Bacterial polypeptide expressing nucleotide sequence isolated from the Sargasso Sea
atggttgccacagtttctaccctgcattcgcccgctcaggaaattgagcgccttcatgccctgcaccaccagcaactggaggcatttcgcgcagaccctatgccggacgccgctgcgcgaatcgaaaagttacggaaactgaaaacagccctggtgcaacagcaggactctctcgtcaaagcagtaaacgaagacttcagctgccgcgccgagggagacaccctgattgcagaaattatgacgaccgtgcaggcactcaactacatggttaagaacgtccgcaagtggatgcgcccatcaggtcgtcacgtcaatatgctgttcgctccggcatcgaatgaagttgtttatcagcctctcggtgtcattggcatcatggtgccctggaactatccgattcagctggcactggtaccgattgcaacggcactcgctgccggcaatcgtgccatggtcaaaatgtccgaatttacgcccgcaaccaaccgcgcgctaaaagacatgctggcttcggtattcgacgaagatgaagtggctatcatcgagggtgaagttgatgtttccagcgctttttcagaggtaccctggaaccacctgatcttcactggctccaccgctgtcggcaaacacgtcatggccgccgccgctaaaaacctgaccccagtgacgcttgaactgggcggaaaatcaccggctctgattgccccggatgccaaccttgagcacgctgctgagcgcatctgcttcggtaagtcactgaacgctggtcagacctgtatcgcaccggatt

SEQ ID NO: 215344 - DNA, 954 bp, Unknown
  Bacterial polypeptide expressing nucleotide sequence isolated from the Sargasso Sea
gacagtttcttcgaaaaaagatgttgatcaggctgttaaagctgcaaaaaaagcatttcctaagtggtcaaagttatcatcatttgaacgttcaaaatatttatacgctttagcgagaatgatccaaaaaaattctagatttttatctgttttagagactattgataatggaaagcctataagagagacaagagatattgatattcctctagtagcaagacatttttattatcatgctggctggtcagcaaaagatacacgatctaaaaataaacccataggtgttgttggacaaattattccatggaattttcctttattaatgttagcatggaaaattgcaccagccttggcaactggaaatactgttgttttaaaaccagctgaatatacttctctaactgctttattttttgcggagctatgtcaaaaagcaaatttaccagatggtgttgtaaacatagttacgggagatgggtctacaggtaaatatatcacaaatcataaagacataaaaaaaatagcttttactggttcaactgaagttggaaaacatattattaaacaaaatccagatccagatagaaaattgacaatggagttaggaggaaagtctccttttattgtttttgaagatgcagatttggatagtgcagttgaaggtattgtggatgctatttggtttaatcaaggacaagtttgttgcgctggatcgagactattaattcaagaaagtattgaaaagttatttattaaaaaacttaagaaaagaatggaaaaacttagagttggaaatcctctagataaatctattgatattggtgcaattgtagcaccaacacaacttcaacaaattaaccaattagtaaaaaaagccgaaaaggaaggtaataaattatggcaaccatcatggtctttgtcaaaagatggattattttatccaccttctttatt

SEQ ID NO: 215345 - DNA, 943 bp, Unknown
  Bacterial polypeptide expressing nucleotide sequence isolated from the Sargasso Sea
atgagtaaaattataaaaaattttaaaaatatttcttatggtcctgctccagaggatagtaaggatgttatgtcttggattaattcactgaacaaaccaaatcatttatttataaatggtgcatgggtaaaatctagatcgtctaaaaaattaaaagttatcaatccggcaacaaataaaaaattaacatctcttgctatatctaataaggctgatgttaatgctgctgttggagcagcaaaaaaagcatttaattcatggtctataatatcttcagatgaaagagcaaaatatctttatgctttagcgagattaattcaaaagcactctcgatttttatctgtattagaaactatcgataatggcaaaccaattagagaaactagagatatagatattccattagtagcaagacatttttactatcatgccggatgggctaaaaaaattgatacaacaaaaaataaaccaataggtgtaattggtcagattattccatggaattttcctttattgatgatggcatggaaaattgctccggctatagcagcaggcaatactgttgttttaaagccagctgaatttacttctttaacagctctttattttgctgaattatgtcaaaaggcaagaattccaaaaggtgtaataaatattattacaggagatggtagtactggagagattataacctctcacttagatacaaaaaaaattgcttttacagggtctacagaagttggaaaaaaaataatacaatctacctcaaaacaagaaaaaaagttaactatggagttggggggtaaatcaccttttatagtttttgaagatgcagatcttgatagtgctgttgaaggggtagttgatgctatttggtttaatcaaggccaggtatgttgtgcgggctcacgtttattggttcaagaaagtatagaaaaatcat

SEQ ID NO: 215346 - DNA, 673 bp, Unknown
  Bacterial polypeptide expressing nucleotide sequence isolated from the Sargasso Sea
atcccgatgtgttgagggctttttgcacgcgtactttaatcagggcgaggtttgcacatgcccatctcgagccgttattcatgaagatatttacgaaccgtttatggctatggttgaagagcgagtaaatatgttgaattgcggcactccctttgatctcaatacacaagttggtgctcaagcctcaaatgaacagttcgaaaaaattatgtcctatatggatgttggcgttcaagaaggtgcaaaagttctttttggcggcggaaagcgtcagatggaagggtcgcttagtggtggttactatgtcgctccaacggccttcaagggagataattctatgagaatcttccaagaagaaatatttggaccggttgtatcagtcaccacgtttaaagatgaggcagaggcgttatcgatagccaacgatactctttatggcttaggggccggtgtttggtctagagatgcaaatacatgttataggatgggccgtggcatccaggctggtagagtttgggtgaacaactatcactcataccctgcacatgctgcttttggaggctataagaactctggaattggccgtgaaacccataagatgatgctgaaccattaccagcaaacaaaaaatgttttagtgtcatacgcagaagaaccagatggatttttctag

SEQ ID NO: 215347 - DNA, 484 bp, Unknown
  Bacterial polypeptide expressing nucleotide sequence isolated from the Sargasso Sea
gctcagtttgataaaatcttaagttatattgaaatcggtaaaaaagaaggcgcacaagtgctgatcggcggtcacgttgaagaactaaacgacgacttaaacggtggctattatattcagccgactatcttaaaaggcactaacgatatgcgggtgttccaagaagagatttttggtccagtgatttccatgtctacctttaaagatgaagctgaagcattgcgactggccaacagttcggaatttggcttaggtgcgggtgtgtggacgcgaaatatgaatcgcgcttatcattttggccgcaaaatcgaagccggtcgggtgtggactaactgctaccatatgtatccggcgcacgctgcttttggtggctataaaaaatcgggtattggccgtgaaacgcacaaattggccttgaatcattatcagcaaaccaagaacctgttagtgagctacagcgaggatccattaggtttcttctaag

SEQ ID NO: 215348 - DNA, 837 bp, Unknown
  Bacterial polypeptide expressing nucleotide sequence isolated from the Sargasso Sea
ctgacgctgcggcccttgatcagtgccctggctgctggcaacacggccgtgctcaagccttcagaacacgccagtgccatcaccgatctgattgcacggctgatccctcagcacttcgagcctgatgtggtgcaggtggtccagggagatggtgccgtcgcagccaacctggtggccatgcccttcgaccacatctttttcaccggtggcggcagcatcggccgaaaggtgctggagggggccgctgcccacctcacaccggtgaccctggaactggggggcaagagccccgccatcgttcttgagggggccgacctcacggtgggagcgcgtcgtttgatctggggcaaggggatcaatgccggccagacctgcatcgctccagaccatctgctggtgccacccgccctgcgttctccgctgctgaaggcgatggaggaggcccgaacggagatgtatggctccgatcccctcaactcgaatcagctggggcagatcatcaatgaacgccagttcaatcggctggagcagctgctggagtccgccagagcggatgggcgcatcctgatcggaggtgaaatcagccgggagcagcggcgcatcgcccccaccgtgattcgtgtggatgaccgcaatgatccgctgatggccgaggaactgttcggacctctcctgcctgtgctggtgctggacgacctcaccacagcccttcaggagatccgccagggccccaaaccgctggcgctgtacctgttcggcggtagtgaggcccagcaacagcaggtgctcaccaccaccagctcaggcggggtctgcctgaacgatgttgtgatgcag

SEQ ID NO: 215349 - DNA, 873 bp, Unknown
  Bacterial polypeptide expressing nucleotide sequence isolated from the Sargasso Sea
cacactaaaaaacatctgcgccatggatgaaagcccgcaaggttgtacaccgttggtggcacaaccggcccgcagctctctgcaaccggagccacttggcactgtgttaatcatcggtgcctggaattatccggtacagctcacgctggcaccctatgtagcagcactggccgccggtaactgtgcgcttctcaaaccctctgagctggcgccggccagttctgcattaatggccagccttattcctaagtatctggatagcgacgccgtagcggtggtcgagggcgataaggacgtggccagtgaattactctcattgcccttcgatcatattttttataccggcggtgaagctgtaggtaaaattgttatgactgcagcggctcaaaacctgacgccagttactcttgagctgggaggtaaaagcccatgtgtggtagacgccaatactgatatcgccaccaccgcgcgccgaatcgtatggggaaagtggaccaacgccggccaaacctgtattgcgcctgattatgtgttggtcgagcgcagctgtgccgacgcgcttatcgacaggattgataaggaaatcacccgtcagtttagcaatcaaccattgcaaagcaaggattacgggcgcattgttaatgagcgtcatctaacgcgtttaaagcaatacatcgaagggcatgagatagtaatcggtggccagctcgatgaagcacaaatgaaactggcacccacggtgattttaaatccggatatcgacacaccggttatgcaggaagaaattttcggggcggttttgccggttattgaagtcagcagcgtcaatgaagctatcgattttattaagcgtcgccacagccgctggcggcg

SEQ ID NO: 215350 - DNA, 817 bp, Unknown
  Bacterial polypeptide expressing nucleotide sequence isolated from the Sargasso Sea
ggggtcgctttagcagcaggttattgcgtagtattaaaaccagctgaacaaacgccactttcggcgcttcacctcgctgacctgtttgccgaagctggttttcccgatggagtcgtcaacattgttactggttttggtgatgcaggttcttatttggcagatcatatggatgttgacaaggtggccttcactggaagtacagaagtggggcacgaaattgttaaagcctcagctgccaatttgaagcgtgtgtcactcgagttgggtggaaagtctcctagcatagtttttcctgatgctgatcttgacatcgcagcacagggagttgcaggcgccattttctttaatcagggccaatgctgttgcgcaggctcacgtctccttttgcataaggatatttattctgatgttatagaacgtgtcgctgatcaggctaaaaatatcaaggtaggtccgggaatgtgcgctgataccaatatgggtcctctggtttcacgtgaacaacaggaaaaggttttgaactacatccgttccggtgaaaccgctggtgccagaacattaaccggtggtaaagccattggagggaatctggaaaaaggctgttacgtggaacctactgtctttgaaaatgtggaccatgaaatgaaaattgtaaaagaagaaatttttggcccagtagtcgtcgctgctccttttgaagacattgatagcgttatcgcaaaaggtaatgatactgagtatggccttgctgcaagtgtatggacaaaagatatcaataaggctcacaaagtggcaaaaggactgaaagcaggaacag

SEQ ID NO: 215351 - DNA, 922 bp, Unknown
  Bacterial polypeptide expressing nucleotide sequence isolated from the Sargasso Sea
gccctggcagcggatctgggcaaaccgcccaccgaggcctttttcgaaatcgttgcgctgcgccaggaactcaagctggcccagcgccaactgcgccgatggatgcgcccgaggcgcttcacggtgcccctggcccagcgccctggccgagcggatgtgatcccagagcccctgggctgcgtcctgatcatcggtccctggaactatcccttctcgttgacccttcagcccctgatcagcgcccttgcggccggaaacacggcggtgctgaagccatccgaacacgcaccagccgtcgcggccttgatcagccgcctgattgcggagcactttgagcctgaggtggttcgggtggaccagggggatggagccgtcgcagcggcgctggtggccctgccgttcgatcacatctttttcacaggcggtggcgccatcggccgcaaggtgctcgagggggccgctgcccatctcaccccggtgacactggaactcggcggcaagagtcctgccctggtgctggagggggcggatctgacggtgagcgcacgacggctgatctggggcaagggcctcaatgccggccagacctgcatcgcgccggatcacctgatcgtgcagcccgggctgaaggcagaactcctgaaggccatggactcagcccgcaccgagatgtacggaaccgaccccctggcgtcggagcaactggcctgcatcgtcaatgaccgccaatttcaacgtctggaggctctgctggaccaggcgcaacaggcgggtcgcgtcctgatcggcggagagatcaaccgtgatcagcggcgcatcgctcccacagtgattcgtgttgacgaccgtcaggatcccctgatggccgatgaactgttcggtcccttgctgccggtgctggagctggcggacctccctcaga

SEQ ID NO: 215352 - DNA, 895 bp, Unknown
  Bacterial polypeptide expressing nucleotide sequence isolated from the Sargasso Sea
tcagatacgcgagcaaaatatatgtacgcattggcaagattaattcaaaaacattctcgttttttgtctgttttagagactattgataatggaaaaccaataagagagacaagagacattgatattccattagttgcaagacatttttactatcatgctggttgggcaaaaaaaattgatacaaagatacataaaccaataggtgttattggtcagatcattccttggaactttcctttattaatgatggcatggaaaattgctcctgctattgcagctggtaacactgttgtcttaaaacctgctgaattcacttcattaaccgcactatttttttccgaattatgtcaaaaggcaagaatacctaaaggtgttattaatattattacaggagacggtagtacaggagaattaattactagtcatgtagatacaaaaaaaattgcttttacaggatcaacagaagttggaaaaaaaataattcaatcgaccgcaatacaagaaaaaaaattaacaatggagttaggaggcaagtcaccatttattgtttttgaagatgctgatcttgatagtgctgttgagggagtagttgatgcaatttggtttaatcaaggtcaagtgtgttgtgcaggctcacgcttattagtgcaagaaagtgtagaaaaattatttattaaaaaactaaaagcacgcatggaaaaattacgtgttggtaatccacttgacaaatcaattgatattggagctattgtagcgccagttcaattaaaaaaaattcaatcaattgtaaaaaaaggagagaaggaaggctccaaattatggcaacctagttgggcctgtccaactgatggattattctatcctccttctatatttactaatgtttccccctctt

SEQ ID NO: 215353 - DNA, 787 bp, Unknown
  Bacterial polypeptide expressing nucleotide sequence isolated from the Sargasso Sea
gagcagcacgaacaggaggtgctggcagccctggcagcggatctgggcaaaccgcccaccgaggccttcttcgaaatcgttgcgctgcgccaggaactcaagctggcccagcgccaactgcgccgatggatgcgcccgaggcgcgtcacggtgcccctggcccagcgccctggccgagcggatgtcatcccagaacccctgggctgcgtcctgatcatcggtccgtggaactatcctttttccttaacccttcagcccctgatcagcgcccttgcagccggaaacacggcggtgctgaagccatccgaacacgcaccagccgtcgcggccttgatcagccgcctgatttcagaacacttcgatcctgaggtggttcgagtggaccagggggatggagccgtcgcggcggcgctggtggcccttccgttcgatcacatctttttcaccggcggtggcgccattggccgcaaggtgctcgagggggctgcggcacatctcaccccggtgacactggaactcggcggtaagagtcctgccctggtgctggagggggcggatctgacggtgagcgcacggcggctgatctggggcaagggcctcaatgcaggccagacctgcatcgcgccggatcacctgatcgtgcagcccgggctgaaggcagaactgctgaaggccatggcttcagcccgcaccgagatgtacggaaccgaccccctggcgtcggaacaattggcctgcatcgtcaacaaccgacaatttcaacgtcttgaagctctgctggacaagg

SEQ ID NO: 215354 - DNA, 721 bp, Unknown
  Bacterial polypeptide expressing nucleotide sequence isolated from the Sargasso Sea
aagtctgtccggacgttcttctccttcgattaacccggctacaggcgccgtgttgaccaacataccgatggccaacaaagaagatgttgatgctgcagtgaaatcagcgcgtaaagcgctggctgtttggggtcaaacatctccccaggagcgtcaacaggcgttgcttgcaattgcgagcagactcgaagcgcgagcagaagagtttgcaatccttgagacgcttgacaatggcaagccggtccgagaaaccagacagattgacgtccccctggcgattgatcattttcggtattttgccggtgtgattcgttctcacagcgatgaagctgtgcagctcgataacaacacattgagcctggtgttaaatgaacctgttggtgtggttggccaaatcattccctggaactttccgctattgatggcagcctggaaattagcgcccgcgcttgcagctggcaatactgttgtcatcaagccatccgagatgacgtctataacccttcttacattgggtgaaattctcaatgatgtactgccaccaggagtcgtaaatattgttaccggtcagggtgcagaagcgggacaagctcttcttgatcacccagacgtggataaacttgcttttacgggatcgacggcggttgggtaccgcgtggcgaaggccgcggcagaaaagctgatcccggccactcttgagttgggctgcgtaaaccgctga

SEQ ID NO: 215355 - DNA, 793 bp, Unknown
  Bacterial polypeptide expressing nucleotide sequence isolated from the Sargasso Sea
actgggtcgtttgattatgcaatatgcatctcaaaacttaattccgataactttagaacttggaggaaaatctccaaatattttctttgaagacgtcatggataaagatgacgacttctttgataagtgtatggaaggttttgctatgtttacgcttaaccaaggagaggtttgtacttgcccaagcagagtactagttcaagagtccatctatgataaatttatggagaaggctgttgctagaacaaaagctgttaaacaaggtaatccacttcaaatggaaactatgattggtgctcaagcatcagtagaacaaatggaaaaaatcaaatcttacttagatttaggtaagaaagaaggtgccaaagttctatgtggaggaaatgttgctaaagtgaatagtggtttagaaaaaggaaactttatcgaaccaactatttttgaaggtaacaattcaatgcgtatcttccaagaagaaatttttggaccagtagtatctgtaactaaatttaaagatgaagctgatgcagtaaaaattgctaatgatactctttatggtttaggtgcaggagtttggactagaaatggaaatatcgcatacagaatgggaagagctattgaggcaggtagagtttggacaaactgctaccatgcatatccagctcatgcggcattcggtggatataaacaatctggtattggaagagaaactcacaaaatgatgcttaaccactatagacaggtgaaaaatttacacgtgtcttacagtgagaaaaaattaggcttcttttaa

SEQ ID NO: 215356 - DNA, 717 bp, Unknown
  Bacterial polypeptide expressing nucleotide sequence isolated from the Sargasso Sea
gtggagtgcactatcaggacaccaacgtgcacgctacctttacgcgattgcaaggcaaattcagaaacactctagactcttcgccgtaatggaatctatggataacggcaaaacgatcagggaaacacgtgacatagatgtcccgctggttataagacatttctatcaccatgctggctgggcacaaactctggaaagtgaatttccagatcacacctccattgggccagtaggccaaattattccatggaactttccattgatgctactctcatggaaaattgcacccgcattggccgcaggaaataccgtagtactaaaacctgctgagtttaccccactgaccgcacttcttttcgcagaaatatgcagtcagacaggcttaccccccggggttttaaacgtaataacaggtcctgggagtacaggatcaatgatggtgaaacatcccgatttgaaaaaaattgccttcactggatctacagaggtgggtagaattataagagagcaaactgcaaattcagacaagaggcttaccctcgaactcggagggaaatctccttttatagttttcgaagacgctgacattgacagcgctattgaagggctagttgacgcaatctggttcaaccaaggtcaggtctgttgtgctggttcaagactgcttgttcaagaaagcattgctgataaagtcactgaacgtctcaaagctcgcat

SEQ ID NO: 215357 - DNA, 894 bp, Unknown
  Bacterial polypeptide expressing nucleotide sequence isolated from the Sargasso Sea
gccaataggtgttattggtcagattattccttggaattttcctttactaatgttggcgtggaaaattgctcctgctattgcagctggcaatactgttgttttaaaaccagctgagtttacttccttaacagctttatactttgcagaattatgtcaaaaggctagaataccgaaaggagtgattaatattattacaggagatggtagcacaggtgagcttattacatctcatgtagatacaaaaaaaattgcttttactggatcgactgaagttggaaaaaaaataattcagtcttcttcacaacaagaaaaaaaattaacaatggaattaggaggcaagtctccttttgttgtttttgaagatgctgatcttgatagtgctgtcgaaggtgtagttgatgcaatctggtttaatcaaggacaagtatgttgtgcgggctcacgcttgttagttcaagaaagtgtagaaaaattatttataaaaaaattaaaagcgcgcatggaaaaattacgtgttggaaaccctttagataagtcaattgatataggagcaattgttgccccagtacaattaaaaaaaatacaatcaattgtaaaaaagggagagaaggaaggttctaaattatggcaacctagctgggcgtgtccaaccgatggtttattttatccaccttctatttttaccaatgtttccccatcttcttttatagctcaagtagaaatttttggacctgttttatctatacttagttttagaacacctagtgaagcagtaagtattgctaataatactccttatggtttagcagcgagtatttggtcagaaaatattaaccttgcgctagatgttgctcctaaaattaaagcaggtgtaatatggattaattcaacaaa

SEQ ID NO: 215358 - DNA, 769 bp, Unknown
  Bacterial polypeptide expressing nucleotide sequence isolated from the Sargasso Sea
gctgagacaactcctttaacagctttattatttgcagagctttgtgaagaagttgggcttcctaaaggagtctttaacttagtcaccggagatggaactacaggttcagaattagtgaaccacgagggtatttcaaaaattgcatttacaggatcaacttctgttggaaaatatattcagaatgcggttggtgaaagagatattggattaactcttgagctaggcggtaaagcagcaaatattgtatacaatgatgctgctttagatcaagcagtagagggtgttgtaaatggaatattctttaatcaaggacatgtatgttgtgctggaagcagattgttactccaagaagatattcatgatgagtttattaataaattagaaaaaagaatgcaaacattaagagttggtaatcctttagataaaaatactgatataggtgcaattaattctaaagagcaacttgaaaagattacttcattagtgaacgaaggtgtaaacgatggaggagagttatttcaaattgaatgcgatcttccttcatctggatattggttcagacctagcttgtttacaaatgttcagccttcatacaatattgcaagagaagaaatttttggtcctgtattaactacattgacttttagaactcctgaagaagcagtagagattgcaaataatacagagtatggtttatcagccggtgtctggacggagaaaggatctaaaattctttggacggcagatcgtttagatgctggtgttattt

SEQ ID NO: 215359 - DNA, 952 bp, Unknown
  Bacterial polypeptide expressing nucleotide sequence isolated from the Sargasso Sea
aagagaaccagttggtgtttgtggtcagatcattccatggaatttcccattactaatggcagcatggaaaattgctcctgcgttgactgctggatgcacaattgtgcttaaaccagcagaacaaacccctttatctgcacttagactaacagaaattattcatgatgcaggcattttaccggaaggtgttttgaatgttgtaacaggttttggtgaagaagctggtgcaccacttgctgaacatccaatggttgataaagttgcatttactgggtcaactgaagtaggtaaaataatcacaaaagctgcctctggtaacttaaaaaaagtatcgttagaacttggaggaaagtctcctacaattatctttccagatgctgatattgatgcagctattgcaggcgcagcttcagctatattttttaatcacggtcagtgttgctgtgcaggttctagattatttgctcatgaaaaagtttttgacaaagtttcagaaggtatagctaaaattgctgaaaacattaaggttggtcctggtatggaagcttcaacagaaatggggccacttgtttcagatgaacaataccaaaaagtagcaggttacattgaatctgggaaaacagaaggtggtgaagttattgccggaggcaattatgataattcctcaggtggtcactttgttcatccaacggtctttgcaaaaacaaacgctgacatgactctagtaaaagaagaaatttttggtccggttgtttgtgcacaaccattctctgacgaaagtctagagaaaattgcaaacgaagctaataatactaactttggtttagctgcaagtgtctggactaaagatattagcgtcgctcataaaatggctgcaaaaattcgtgcaggaaccgtttgggtcaactgtcataacatttttgatgcatctcttccatttggtgggatataa

SEQ ID NO: 215360 - DNA, 858 bp, Unknown
  Bacterial polypeptide expressing nucleotide sequence isolated from the Sargasso Sea
ccgtgggccggcgcgtggcccaggcggccgcagcgcacctgacgccgaccacgctggagctgggcggcaagtcgccctgcatcgtctccaccgactgcgacctgaaggaggcggcgctcaagatcgcacatggcaagctcgtcaacgcaggccagacctgcattgcccccgactacgtgctgctgccgcgtggacaggaggccgaattcgccgaggcctttcgcgccgccgcgcagcggctgttcccgcgctttgccggcaacccggactatgccgccatcctcaccaagcgccacctggcccgcctgcggcagatgctgcgccaggcccagggcatgggcgcccatgtcgaatggatggaggacggcggcgccagccaggagggggcggacatggcctggggtgatgccgtggagcgccagatggcaccggccctggtcttcaatgccaccagccagatgcagctcatgcaggaggagatcttcggccccatcctgcccgtgatcagctacgacaggctggacgacgtggtctcggccatcaatgccgggcccaggccgctggcgctgtactggttcggccgcgacgagaaggtgcgtgatgcggtgctgtcacgcaccatcagcggcggggtgacggtcaatgacaccctgctgcacttcgcgcacgagaacctgcccttcggtggcgtgggcgacagcggttggggtgcctatcattcggagcagggctttgcgcggctgagccatcagaaggcggtgttcgtgcagtcgcgctggtcaggggccgccatgctgtatccgccctatggtgcgaagttcgatcgcatcatggaactgatgcgccgctggctgtgag

SEQ ID NO: 215361 - DNA, 814 bp, Unknown
  Bacterial polypeptide expressing nucleotide sequence isolated from the Sargasso Sea
ggagttttcaacctgcttaccggctccggcactactggtgcgatgttggcgtcccatcctggtatttcgaaaatcgcgtttaccggttctacggaagtcggccgtcaaatccgggaaaatactgcttctagtgataaaaagctgactttggaacttgggggcaagtctccatttctggtttttgctgatgccgatttagacagcacggtggaaggaattgtggatgcaatctggttcaaccaggggcaggtctgttgcgccgggtcacgaatgctggtccaggaaaggattgccaaccgactcctagaaaaactccgggaccggatgaaaaaactaagagtcggagatccgctggacaagggtatggatatgggcgcaatcatcgctcccgtccagttgaaacgcatcaaaaatcttcttgagcaaggtcttgaggaaggaggggatgtctggcaatgggaagggtctcttccaaaatccggatgtttctttcctccaaccctgatcagcaatgtggatccggcttcgatgctggctcagacagaaatcttcggaccggttttagtgtcatcgacatttcggacccacaatgaagcgctggccttggcaaacaacaccgcctacggacttgctgccagtgtatggagtgaaaacatcaatttggcgctcgatgttgcacctcggctcaaagctggagtggtctggatcaattgtacgaaccaattcgatgcatcttccggattcggaggttatcgggaaagcggcttcggcagggaaggggggcacgaagggatgttcgaatacctgaaaccgc

SEQ ID NO: 215362 - DNA, 958 bp, Unknown
  Bacterial polypeptide expressing nucleotide sequence isolated from the Sargasso Sea
aaaccagctgaacaaacaccagcatcaattatgcttttaatgaaccttattggagatctattacctgcaggtgttgtaaatgttgttagtggttatggtcttgaagcaggaaaacctctagcttcttcaaaaagaatcaagaagatagcttttacaggtgaaaccactactggacgtttaattatgcagtacgcatcgcaaaacttaattccaataactttggaattaggcggaaaatctccaaatatattcttcgaagatgttatgtcaaaaaatgacgacttctttgataaatgtttggaaggctttgctatgttcacgctaaaccaaggagaagtttgtacttgtcctagtagagcgctagttcaagagtctatttatgataaattcatggaaaaggctatagctagaacaaaagctgttaaacaagataacccacttaaaatggaaaccatgattggagcacaagcttctttagaacaaatggaaaaaatcaaatcttatctagatttaggtaagaaagaaggtgctaaagttctaaccggaggaagtgttgctaaattgaatagtggactggagaaaggaaactatattcagccaactatttttgagggtaaaaacaatatgcgaatattccaagaggaaatatttggtccagttgtatctgtgaccaagtttaaagatgagaaagaagcattagaaattgctaatgatactctttatggattaggagcaggtgtttggactagagatggtaacattgcttacagaatgggaaggggaatacaagctggtagagtttggactaattgttatcacgcttatcctgcccacgctgcttttggtggttacaagcaatctggtataggaagagaaactcacaaaatgatgttaaatcattatagacaagataaaaatttacacgtgtcttacagtgagaaaaaattgggcttcttta

SEQ ID NO: 215363 - DNA, 859 bp, Unknown
  Bacterial polypeptide expressing nucleotide sequence isolated from the Sargasso Sea
aattctgataattctattggtgttgttggacaaattataccatggaactttcccttattaatgttagcttggaaaattgctcctgcaattgctcttggaaatacagtagtcttaaagcctgcagaatatacttctttaacagcgctttattttgctgaactttgtgaaaaagctaaaattccaaaaggtgtaattaatattattacgggagatggttctactggtgaatatataacatcacataaagatattaaaaaaattgcctttactggatcaactgaagttggaaagaaaataattcaaacaaatactaatgcagataaaaaaatgacaatggaacttggaggcaaatcaccttttattgtttttgaagatgcagatttagatagtgcagtagagggtgttgttgacgcaatttggtttaaccaaggccaagtatgttgtgcaggatcaagactcttagtacaagaaagtattgagaaaaaatttatacaaaaacttaagaaaagaatggaaaaacttcgagttggtgatccattagataagtctattgatattggcgctatagttgcgccagttcaacttaaaaaaattaattcattagtaaataaagcacaaaaggatggaaataaattatggcaaccttcatggtcatgtccaacaaatggtttattttatcctccttctttatttacaaacgtaacaccttcatcttttattgctcaagtagaaatatttggaccagttttaacaacaatgacatttagaacacccagtgaagctgtatccattgcaaataatactccatacggacttgctgcaagtatttggtctgaaaatattaatttagcattagata

SEQ ID NO: 215364 - DNA, 491 bp, Unknown
  Bacterial polypeptide expressing nucleotide sequence isolated from the Sargasso Sea
ttcattagaacaaatggaaaagataaaatcttatcttgatctaggcaagaaagaaggcgccaaagttctaacaggaggaagtgtagctcaattaaatagtggtttggaaaaaggaaattatatccaaccaactatttttgaaggaaacaataaaatgcgaatattccaagaggaaatttttggaccagtagtttcggttactaagtttaaagatgaagcggaagcactagaaattgctaacgacactctttacggtttaggcgcaggtgtttggactagaaatggtaaccttgcatacagaatgggaagagaaatacaagctggtagagtttggacaaactgttaccacgcttatccagctcacgctgcatttggtggttataaacagtctggtatcggaagagaaactcataaaatgatgttaaatcattacagacaggttaaaaatttacacgtgtcttacagtgagaaaaaattgggcttcttttaac

SEQ ID NO: 215365 - DNA, 859 bp, Unknown
  Bacterial polypeptide expressing nucleotide sequence isolated from the Sargasso Sea
gaagctgggaaaccactagcatcatcaaaaagaatcaaaaagattgctttcactggtgagacaacgactggtcgtttaattatgcaatatgcatcacaaaacttgataccaataacgttagagctaggtggaaaatctcctaacattttctttgaagacgtcatggataaagatgatgacttctttgataaatgtttagaaggttttgcaatgttcacattaaaccagggtgaagtttgtacttgtccaagcagagtactagttcaagagtctatctatgataagtttatggaaaaggctattgctagaacaaaagctgttaagcaagacaatcctttaaaaatggaaacaatgattggagcacaagcatcattagaacaaatggaaaaaatcaaatcttatctagatttaggtaagaaagaaggcgctaaagttctatgtggtggaaatgttgccaaaatcaatagtggcttagaaaaaggaaactatattgagccaactatttttgaaggtaataactcaatgcgtatcttccaggaagaaatttttggaccagttgtatcagtaactaaatttaaagatgaggcagaagcattagaaattgctaatgatactctttatggtttaggtgctggtgtttggactagaaatggaaatatcgcctacagaatgggtagagaaatacaagctggtagagtttggactaactgttaccacgcttatcctgcacatgctgcgtttggcggatataaacaatctggtatcggaagagaaactcataaaatgatgcttaaccactacagacaagtaaaaaatcttcacgtgtcttatagtgaaaagaaattaggcttcttttaaa

SEQ ID NO: 215366 - DNA, 859 bp, Unknown
  Bacterial polypeptide expressing nucleotide sequence isolated from the Sargasso Sea
ttgattgatgagcatacagaagaacttgctcaactagaatcccttgataatggtaagcctgttgcaatagctgcgggtgctgacgttgctttatcatctgatatttttagatatatggcgggctgggcaacaaagatagagggtgaaactatcccaatatctgtaccctacactcctggtgctcaatatcatagttatacgcttcgtgagccagtaggtgtggttgctcaaattattccatggaatttcccactattaatggctgcttggaaattatctgttgctttaacagctggttgtacaattgttttaaaaccagcagaacaaacaccgttgtctgctttaaggttaactgagataattaatgatgcaggtatccttcctgaaggtgttttaaatttagttactggatttggtgaggaggctggtgcaccactcgctgctcaccctcatgtagacaaagtagcatttacaggatcaactgaagttggaaaattgattacaaaggcatctgcaggaaatcttaaaaaagtttcactagaacttggtggtaagtctccaacaataatttttccagatgctgatattgacgcagcaattgccggagcagctagtgcaatattctttaatcatggtcaatgttgttgtgctggatcaaggttaatggcgcacgaaaaagtatttgataaggtaactgaaggaatttcaaaaatagcttctaacataaaagttggtcctggcatggattcagcttccgagatgggacctttggtatcagatgaacagtttaaaaaagtttcaggttatatcgaagcaggaaaatctgatggaggtgagatagttgcaggaggtaaatacg

SEQ ID NO: 215367 - DNA, 779 bp, Unknown
  Bacterial polypeptide expressing nucleotide sequence isolated from the Sargasso Sea
tctcaaaccagcagagcaaacgcctttatcttctctaaggttaacagagatcattcacgacgctggcatactgcctgaaggtgttttgaatgtcgtaacaggatttggtgaagacgctggtgcgccacttgctgaacacccaatggttgataaagttgctttcactggatcaactgaggttggcaaaataattacaaaagcggcgtctggtaacttaaaaaaagtatcattagaacttggaggtaaatctcctacgattatttttccagatgctgatattgatgcagctatagcaggtgcagcatcagctatattttttaaccatggtcaatgttgttgtgctggttcaagattatttgctcatgaaaaagtttttgacaaagtttctgaaggcatagcaaaaatagctgaaaatattaaagttggtcctggaatggaagcttcaacagagatgggaccacttgtttctgatgaacagtatcaaaaagtagcaggatatattgaatctggtaaatcagaaggtggaaaggtaatcgctggaggaaattatgataattcatctggtggtcattttgtccatccaacagtttttgcaaaaacaaatgctgacatgactcttgtgaaagaagaaatttttggtccagttgtttgtgcacaaccattttctgacgaaagtctagaaaaaattgctgcagaagctaataatactaattttggtttagcagcaagcgtctggactaaagatattagtgtagctcataaaatggcagcaaaaattc

SEQ ID NO: 215368 - DNA, 880 bp, Unknown
  Bacterial polypeptide expressing nucleotide sequence isolated from the Sargasso Sea
tgccagaaagctcacattaaatgggtctaaattatcatcttttgatcgatcaaaatatttatatgccctagctcgtctaatacaaaaaaattcaagatttatttctgttttagagactatagataatggtaagccaatacgagaaacaagagatatagatattccacttgttgcaagacatttttattatcatgctggttgggctgcaaggaatacaaacaactctgatgactctattggtgttgttggacaaattattccgtggaactttccattattaatgctagcgtggaaaattgctccagcaattgctcttggaaatactgtagttttaaagcctgcagaatatacttcgctaagcgctctctattttgctgaactttgtgaaaaagctaaaattccacaaggtgtaattaatattattactggagatggttctactggtgaacatataacatcgcataaagatattaaaaaaattgcctttactggatcaactgaagttggaaagaaaataattcaaacaaatactaatccagataaaaaaatgacaatggaacttggtggtaaatcaccttttattgtttttgaagatgcagatttagatagcgctgtagaaggtgttgttgatgcgatttggtttaatcaaggtcaagtatgttgtgctggatcaagactcttagtacaagaaagtattgagaaaaaatttattcaaaaacttaagaaaagaatggaaaaacttcgtgttggtgatccattagataagtctattgatattggcgctatagttgcaccagtccaacttaaaaaaattaattctttagtaaataaagcacaaaaggatggaaataaattatggcaaccttcatggtcatgtcca

SEQ ID NO: 215369 - DNA, 753 bp, Unknown
  Bacterial polypeptide expressing nucleotide sequence isolated from the Sargasso Sea
tgatacaaaaataaataaaccaattggtgttgttggtcagataattccttggaattttcctttgttaatgctggcatggaaaattgctccagcaattgccgcaggaaacactgttgttttaaagcctgcagaatttacatctttaacggcgctttattttgctgaattatgtgaaaaggcaagaattccaaaaggtgtaattaatattattactggtgatggtagcacgggagaacttcttactgcacatccggatataaaaaagattgcttttacaggatcaacagaagttggaaaaaaaataattcaatctactgctaaacatgaaaaaaaactaacaatggagttaggaggcaaatcaccttttatagtatttgaagatgctgatcttgatagtgctgttgaaggagtagttgatgccatatggtttaaccaaggtcaggtttgttgtgcaggttctcgcttgttgattcaagaaagtgtagaaaaattatttattaaaaaattaaaagcacgtatggaaaaattacgtgtaggaaatccactcgataaatctattgatattggtgctattgttgcaccggtgcaattaaaaaaaatacaatcaatagtaaaaaaaggagaaaaagaaggctctaaattatggcaacctagttgggcctgtccgactgagggcctattttatcctccttctatttttaccaatgtttcgccgtcttcatttattgcgcaagtagagatttttggacctgt

SEQ ID NO: 215370 - DNA, 866 bp, Unknown
  Bacterial polypeptide expressing nucleotide sequence isolated from the Sargasso Sea
tccaaataaaaattatattaatggaaaatggaatacttctaaaggatcaaaaaagattaaagttattaatccctcaactaataaaaaattatttaatctagcaataagcacaaaaaaagatgttaatcttgctgtaaatgccgcaagtaaggctcaaaaaaactggtcatctattagtccttttaaaagatcaaaatatttatatgctcttgcaagattaatccaaaaacattctcgtttcttagcagtgttggagtcaatcgataatggaaaaccaattagagaaaccagagatattgatattcctttagtagcaaggcatttttattatcatgctgggtgggcagaaaaattagataagaatttaaaaccaattggagttgtaggacaaattataccgtggaattttcctttattaatgcttgcttggaaaatagcacctgcaattgcatgtggaaatactgtagttttaaaaccagctgaatatacttcgctgactgctttatattttgcagaactatgtattaaagcaaatttacccaatggtgttattaatattattacaggagatggatctacgggtgaactcatcacatcacaccctgatatacaaaagatagcatttacaggctcaactgaaattggaaaaaaaattatccaatcaacatcatcttctaacaaaaaattaacgatggaattaggtggaaagtcgccttttattgtttttgaagatgctgatcttgatagtgctgttgaaggagtagttgatgcaatatggtttaatcaaggacaggtttgctgcgcaggatcaagattattaatacaagagagtatagaaaaaaaatttattaaaaaacttaaacaaa

SEQ ID NO: 215371 - DNA, 877 bp, Unknown
  Bacterial polypeptide expressing nucleotide sequence isolated from the Sargasso Sea
aagaatttaaataaaccaaataaaatttttattaataataaatttgttaagtcttctggaacaaaaaaattagatataattaatcccagcaataaaaaaattttaggaaaattatctgtatcatcaaaaaaagatgtagataatgcagtaagagccgctaaaaaggcatttccaaaatggtctaaacttactggttttcaaagatcaaagtacctctatgctttagctagaatgatacaaaaaaattctagatttatttccgttcttgaaaccattgacaatggcaaacctataagagaaacaagagatattgacattcctttagtagcaagacacttttactatcatgcaggttggtcatctaaagacactagctctaataataagcccattggggtgatcggacaaataataccctggaactttccattattaatgcttgcatggaaaattgcacctgcaatagctacgggaaatacagttgtacttaaacctgcagaatacacatctctgactgctctttattttgcagaactttgtaagaaagctaatttgcctgaaggtgtaattaatatcattacaggtgatggatctacaggtgaatacataacttctcataaagaaattaaaaaaattgcatttacaggctctactgaggttggaaaaaaaataatcaaaaataattctaatccaaacataaaacttactatggaattaggaggtaaatctccatttatagtttttgaagatgcagatatagatagtgcagttgaaggagtagtagatgctatttggttcaatcaaggtcaagtttgttgtgctggatcaagattattagaacaagagagtatgaaaaaaaatttattaataaattaaa

SEQ ID NO: 215372 - DNA, 902 bp, Unknown
  Bacterial polypeptide expressing nucleotide sequence isolated from the Sargasso Sea
tttttattatcatgcaggttgggcaaaaattttggaagataaatttccaaaaaaaaatcccattggagttataggtcaaataattccttggaattttccacttttaatgttgtcatggaaaattgcccctgctctggctacaggaaatacggttgttctaaaacctgctgaaactacgccattaacggcgatgttttttgctgaactttgcatagaggcaaaaataccacctggggttgtaaatattgtaaatggggacggagaaacaggttcacttattgtaaataatgataaaatctcaaaaattgctttcactggttcaactgatgttggcagatttattagaaaagagacagcaggaaaaaataaaaaattaactttagaacttggtggaaagtcagcatttatagtttttgatgatgctgacttagatagtgctgttgaaggtgttgttgactctatttggtttaatcagggtgaagtttgttgtgcaggttcaagattacttgtccaagaaggaataaaagatagatttataactaaattgaaaagaagaatgtctaaattaaggctgggcaatcctcttgataaatctacagatattggagcgatcaattcacttcaacaactaaaaagaattaagtctctggtaatcagtggaactaaggaaggtgcaaatatttatcaacctaaaattgaggttccaaaaagtggctattattatccacctacccttttagaaaatacaaaccaatcaatgaatgtatgtcaaaccgaaatttttggaccagtgttaagtgttataccttttagaacgcccaatgaggctgtatcaattgccaataattcaaaatatggattatcttcaagtgttggactgaaaatatcaatctgggattaga

SEQ ID NO: 215373 - DNA, 355 bp, Unknown
  Bacterial polypeptide expressing nucleotide sequence isolated from the Sargasso Sea
tttcgaaggaaaaaacaacatgcgaatattccaagaggagatctttggaccagttgtatcagttacaacgtttaaagatgagaaagaagcattagagatagctaatgatactctttacggattaggagcaggtgtttggactagagatggtaacattgcgtatagaatgggaagaggtattgaagcgggtagagtttggacaaactgttaccatgcatacccagctcatgctgcatttggtggatataaacaatctggtattggaagagaaactcacaaaatgatgttaaatcattacagacaagtaaaaaatttacacgtgtcttacagtgagaaaaaattaggcttcttttaa

SEQ ID NO: 215374 - DNA, 724 bp, Unknown
  Bacterial polypeptide expressing nucleotide sequence isolated from the Sargasso Sea
aagcacaccattaactgcgctaaagcttgcagaaattattcaagagtccgatttgcccccaggtgtggtaaatataattactggtgatggtgctacaggtgaattattagtaaacaatcctaacgtagataaaattgcatttactggatcaactgaagtaggtaaaatgataatcaaatctattgctaattcaaaaaagaaatattctctagagttaggaggaaaggccgcaaatataatttgtgaagacgcatcaattgatcaagcggtagaaggaataattaatagtatattctttaatcagggccatgtgtgctgtgcaggttctagattgtatgttcaagaaagtgtctcaagtcaaataatatcaaaattaaaggatcggatggatcacttgatattaggtgatccattagataaaaatactgatataggtgctattaattccaatgaacaactaaaaaaaattaatatgtatttggatattggaaaaaaagagggtgggggtttttatcaatcaaaacatactataccaaaaaagggttactggtgtgctccaactctttttacagataccagtcaatcacatagaattgtccaagaagaaatttttggcccagttttagcaattcaaacatttcggacaatagatgaggtgattgataaagctaacaatacaccatatggattatctggaggtatatggacggataaaggttcaaaa

SEQ ID NO: 215375 - DNA, 622 bp, Unknown
  Bacterial polypeptide expressing nucleotide sequence isolated from the Sargasso Sea
ttgcacttgtccgagtagagctttaattcaaaaatctatctatgataagttcatggaaaaagcgatagcaagaactaaagctgtaaaacaagataatcctttaaaaatggaaactatgattggagctcaagcttcattagaacaaatggaaaaaattaagtcttacttagacttaggtaagaaagaaggtgccaaagttctatgtggtggaagcgaagccaagatcaatagcggattggaaaaaggaaactatattcaacctacaattttcgaaggtaaaaacaatatgcgaattttccaagaggagatctttggaccggttgtatcagtgacaacgtttaaagatgagaaagaagcattagaaatagctaatgatactctttatggattaggagcaggtgtttggactagagatggaaacattgcatacagaatgggcagaggtatagaggcaggaagagtttggacaaactgctatcatgcttatccagctcatgctgcatttggtggatataaacaatctggtatcggaagagaaactcataaaatgatgttgaatcattataggcaagtgaagaacttacacgtgtcttacagtgagaaaaaattaggcttcttttaa

SEQ ID NO: 215376 - DNA, 772 bp, Unknown
  Bacterial polypeptide expressing nucleotide sequence isolated from the Sargasso Sea
aatgtcattagagaacttcttagttaatcaattaaaaaatctagttttatccggcgaaacaagatatgagaaatggagaagggaacaactcaacgccttatctaatttattagagaatcatcaggaagaaatcttaaatgcattaaatcaagatttaggaaagccaactacagaagctttctttgagattattgctgtcaaacaagaaataaaagtggctcagaaaaatttatccaaatggatgaagactaagcaaataaatgtccctgtctctcttaggcctgctaaagcattgatgcagccagatccattgggctgcattttgataattggcccatggaattatcctttttcgcttactcttcaaccacttgtaggagctttagcagctggcaatactgcagttttaaagccatcagagcatgcaccaaatgtatcaactctaataaaaaaacttatagaaaaatatttcccgccagagatagtccaagtttttgaaggagatggaactattgcttctgatttaatgaccaaacaatttgatcacgtcttttttacaggtggagaaagtatagggaagaaagtaatggaagccgcctctaaaaatcttacccccgtaactttagaacttggagggaaaagcccagctattgttatcgatggtgcaaatttagaagtaactgcgaagagaattatatgggggaagaatctaaacgtaggccaaacttgtattgctccagatcatttacttattgagcataaactttttgat

SEQ ID NO: 215377 - DNA, 778 bp, Unknown
  Bacterial polypeptide expressing nucleotide sequence isolated from the Sargasso Sea
caaaaagcgaagataccaaatggagtaattaatattattaccggtgatggaaagacaggtgaacaattaacaaatcataatttaataaacaaaatagcttttacaggttcaacggaagttggaaaaaaaattatatcatcaactgctaattctaataaaaaattaacaatggagcttggaggcaaatctccttttatcgtttttgatgatgctgatttagatagcgctgttgaaggagttgtcgatgcaatttggtttaatcaaggtcaagtatgttgtgctggatctcgtttattagttcaagaaagcgtcgagaaaaagtttatcaaaaaactaaaacaacgtatggaaaaattacgtgtaggtaatcccctggataagtctattgatattggggcaatagttgctcctgttcaattaaaaaaaatagatagtttagtgaaaaaaggtgtcaaagaaggtgcaaaactttggcaaccaacttggtcatgtcctaaagatggtcttttttatccgccatcgttatttacgaacgtaacacccgcatcattgattgctcaggttgaaatttttggaccggtattgacatctctaacttttcgtactccaagtgaagctgtagctattgccaataacacaccttatggattagctgccagtatatggtcagaaaatattaatctagcaatggatattgctcctaaaattaaagctggcgtagtatggattaattccaccaatttatttgatgctgcttgtggatttggtggttttaaag

SEQ ID NO: 215378 - DNA, 890 bp, Unknown
  Bacterial polypeptide expressing nucleotide sequence isolated from the Sargasso Sea
gtttaaatcagtaaacccctctaatggcgagaccatagccaatttaagccaggcgtccaataaagatgtaaataacgcagttaaaacggcaaaaaatgcatttagaagttggtctgaaactaatccacacgaaagagctaaagtactgtactcgattgcacggattttgcaaaaaaactctcggcttttttctgtgcttgaaacaattgataatggaaaaccaataagagaatcccgcgatattgatatacctttagcccaacgtcatttttactatcacgctggcctcgcccaaatatataaaaccaagatccgagatatggagccaattggggtgtgtggccagataataccctggaactttcctctattaatgttggcttggaaaatcgcacccgctctagcagcgggtaatactgttgttctaaaaccagccgaatacacttccttgaccgcgctattatttgctgaaatttgtattgaagctggggtgccagaaggtgttgtaaatattattactggcgatggtagcgttggggaaatgcttgttgatcaccccgacattaaaaaaattgcgtttacggggtccacagaggttggcagaataataagaaaaagaactgccggcactggaaaacttttaacgttagaattaggtggaaaatcaccctttattgttttcgacgatgctgatctagatagtgctgtagagggtttggtggatgctatatggttcaaccaaggtcaagtctgttgcgctggatctaggcttttaattcatgaaagtatagaagaaaagtttcaccagaaaatccggaacagaatgaataaacttcgagttgggccacctctcgacaaatctatagatatgggtgcgattgttgataagt

SEQ ID NO: 215379 - DNA, 885 bp, Unknown
  Bacterial polypeptide expressing nucleotide sequence isolated from the Sargasso Sea
acatactttcaattaaaaaaaaatatacaaactttgttggtggtaaatttgtagaaccaaaaagtaaaaaatatataaatagcatttcaccttccactgaagaagtgttgtcaaaagttccattatcaaacgaacaagatataaatagtgcagtaaagtctgcaagaaaaggattagaagtttggtctaaactgacaccaaatcaacgctcaagatatctatttaagatagccaggctaattcaagaaagatcaagagaattcgcagtgttggaatctcttgatggtggaaagcctattagggagtcaagagattttgatctaccacaggttgctgctaattttttctattttgcaggatgggcagataaattagatctgtcttgggcaacaaaaagcttaaaaccttatggagtagttggtcaaataataccttggaactttcctttattaatgcttgcgtggaaaattgcacccgctttagctactggaaatactgttgtattaaagcctgcagaaacaactccattgacagctttactatttgctgaaatatgtgaacaagcaggccttccttacggagttgtcaatatagtcacaggagatgggtcgaccggttcacttatagtaaatcataaagacataaataaaattgctttcacaggatctactcaagttggaaaacttatacaaaaatcactagctggtagagacgtcgggctaactcttgaattaggaggtaaagctgcaaatattgtgtacgaagatgctgcaattgatcaagctgttgaaggagtagtaaacggtatatttttcaatcaaggacatgtctgttgtgctggtagtagactgcttcttcaagagtcaatacatgatcaattttaaa

SEQ ID NO: 215380 - DNA, 835 bp, Unknown
  Bacterial polypeptide expressing nucleotide sequence isolated from the Sargasso Sea
aaaaaattaacaacactatctatttcaaataaacctgatgtaaatgcagcagtgggtgcagctaaaaaagcatatatttcttggtcaaaaacatcatcagatacgcgtgcaaaatacctatatgcgttagcaagattaatccaaaagcactctcgttttctatcggtattggagaccattgataatggtaaaccaatcagagaaacaagagatattgatattccattagtagcacgtcacttttattatcatgctggttgggctaaaaaaattgataccacaaaatataaatcaataggtgttattggacagattattccttggaattttcctttattaatgatgtcatggaaaattgcacctgcaattgcagctggcaatactgttgttttaaaacctgctgagtttacttccctaactgctctatattttgctgagttatgtcagaaggcaagaatacctaaaggagttataaatattattactggtgacgggagcacaggtgagcttattacatctcatgtagatacaaaaaaaattgcttttactggctcaactgaggttgggaaaaaaataattcaatcaactgcaaaacaagaaaaaaaattaacaatggaattaggaggaaaatcaccttttattgtttttgaagatgctgatcttgatagtgctgttgaaggagtagtagatgcgatttggtttaatcaaggacaagtatgttgtgcaggttcacgcttattggttcaagaaagtgtagaaaaattatttataaaaaaattaaaaacacgaatggaaaaacttcgcgttggtaatccactcgataaatcaattgata

SEQ ID NO: 215381 - DNA, 898 bp, Unknown
  Bacterial polypeptide expressing nucleotide sequence isolated from the Sargasso Sea
cttaaaaacgacttggggcaaatgtaagaccgaagctatggtggctgaacaaggtttcctgctttctgatattaagcatacgcttaagcacttgggcaaatgggccaagcctcgcaaggtgtctacacccatggtggcatggccgggtaagagctttcgaaagcctgagccccttggtactgtgcttattataggggcgtggaactatccactacagctattacttgccccttatatcgccgctattgctgcgggtaactgtgcggtattaaaaccttccgaactggctgaagaaacctcgtcgctggtggctaaacttattcctcaatatatggatacttcatgtgtagcggttattgaaggcggtaaagacgaagccacggcgctgcttgcgtgtaaatgggatcatattttctacaccggtggcgaagccgtaggaaaaatagtgatgaatgctgcagctaggcacctcactcccgttacattagagcttggcggtaaaagcccatgtttcgtggataaagacactaaccttacggttacggcgcgtcgtttagtgtggggtaaatggatgaatgcggggcaaacctgtattgcccctgactatgtcattgtagaaaaaggctttgagcaaaagtttattgaagcggttaaaaaagagcttaaaaagcaatatggcaaaaagccgctattgtcacgagattacggcaatataataaatcatcgtcacttaaagcgcctagagagctatcttgaaaacgtaaacgtggtgtatggcggcgagctagatgaagcgcgccctgcgatggcgcccacccttgtactagagccatcgcttgatagcccgttgatgaaagaagaatctttggccaattctgcctatcatcacggtagataa

SEQ ID NO: 215382 - DNA, 940 bp, Unknown
  Bacterial polypeptide expressing nucleotide sequence isolated from the Sargasso Sea
aaagaaccattaggtgtaataggtcaaataattccatggaatttcccattgctaatgttgtcttggaagatagcacccgcattggctgctggaaatacagttgtattaaaaccagctgaaacaacacctctaaccgcaatgttttttgcagaactttgcattgaagcacaaattccacctggtgtggtgaatatagtaaatggagacggagaaacaggttcatttattgtaaataataagcaaatttcaaaaattgcatttactggttcaactaaagttggaagattaatcaggaaagaaactgcaggaaaagataagaaaataagtttagaacttggtggaaagtcagcttttatagtttttgaagatgcagacttggatagcgctatagagggtgttgtagattcaatttggtttaatcaaggagaagtttgttgtgcaggttctagattacttgttcaagaaggaattcaaaataaattcatcattaagctcaaacgaagaatgtccaaattaaggttaggtaatcctcttgataaatctactgacattggagcaattaattcacttcaacaattaaaaaagatcaaatcacttgtagccagtggctcaaaagaaggtgccaatatttatcaaccaaaaattgaaataccaaaaaaaggcttcttttatccaccaacattattagagaatactcatcaatctatgaatatatgccaaacagaaatttttggtccagtacttagtgttatacctttcagaactccaaaagaagcagtttcaattgccaataattctagatatggtttgtcatcaagtatttggactgaaaatatcaaccttggattagatatagcaccaaaaataaaggcaggagtagtgtggattaattcaacaaatctatttgatgcttcagccaggttttggtggatatcgagag

SEQ ID NO: 215383 - DNA, 397 bp, Unknown
  Bacterial polypeptide expressing nucleotide sequence isolated from the Sargasso Sea
aatagtggtttagaaaaaggaaactatatcgaaccaactatttttgaaggtaataattcaatgagaatcttccaagaagaaatttttggaccagtagtgtcagtaactaaatttaaagatgaagcagaggcattaaaaattgctaatgatactctttatggcttaggtgctggtgtttggactagaaatggaaatatagcatatagaatgggtagagaaatacaagctggtagagtttggacaaactgttaccatgcttatccagctcatgcggcatttggcggatacaaacaatctggtatcggaagagaaactcacaaaatgatgctaaatcattacagacaagtgaaaaacttacacgtgtcttatagtgagaaaaaattaggcttcttttaat

SEQ ID NO: 215384 - DNA, 337 bp, Unknown
  Bacterial polypeptide expressing nucleotide sequence isolated from the Sargasso Sea
catgcgggttttccaggaggagatcttcgggccggtgctggctgtcacaacgtttaaaaccatggaagaggcgctggaaatcgctaatgacacccaatatgggcttggcgctggtgtctggagtcgtaatggaaatctggcgtacaaaatgggacgtgggattcaggcggggcgagtttggaccaactgttaccatgcgtatccggcacatgcggcgtttggtggctataagcagtcgggcatcgggcgcgagacgcataagatgatgcttgaacattatcagcaaaccaagtgcctgttggtgagctactctgataaaccactggggctgttttaa

SEQ ID NO: 215385 - DNA, 874 bp, Unknown
  Bacterial polypeptide expressing nucleotide sequence isolated from the Sargasso Sea
aaaaattcaaggtttatttccgttttagagactatcgataatggtaagccaataagagaaacaagagatatagatattccacttgttgcaagacatttttattatcatgctgggtgggctgcgaggaatacaaataactccgataactctattggtgttgttggacaaattataccgtggaactttccattattaatgttagcctggaaaattgctcctgcaattgctcttggaaatacagtagtgttaaagcctgcagagtatacttctctcagcgcgctctattttgcagaactttgtgaaaaagctaaaattccacaaggtgtaattaatattattactggagatggctctactggtgaacatataacattgcataaagatattaaaaaaattgcctttactggatcaacagaagttggaaaaaaaataattcaaacaaacactaatccagataaaaaaatgacaatggaactaggtggcaaatcgccttttattgtttttgaagatgctgatttagatagtgcagtagaaggtgtagttgatgcgatttggtttaaccaaggtcaagtatgttgtgcgggatcaagactcttagtgcaagaaagtattgagaaaaaatttatccaaaaacttaagaaaagaatggaaaaacttagagtaggtgatccattagataagtctattgatattggagccatagttgcaccagtgcaacttaaaaaaattaattctttagtaaataaagcgcaaaaggatggaaataaattatggcaaccctcatggtcatgtccaacaaatggtttattttatccacctatctttgtttacaaatgtaacgccttcctcttttattgctcaagtagaaatattt

SEQ ID NO: 215386 - DNA, 655 bp, Unknown
  Bacterial polypeptide expressing nucleotide sequence isolated from the Sargasso Sea
tttgctatgtttacacttaaccaaggagaagtttgtacttgtccgagcagagctttaattcaaaaatctatctatgataaattcatggagaaagcgatagcgagaactaaggctgtaaaacaagacaaccctttaaaaatggaaactatgattggagctcaagcttcattagaacaaatggaaaaaattaagtcttacttagacttaggtaaaaaagaaggtgccaaagttctatgtggtggaagtgccgcaaaaattaatagtggtcttgaaaaaggaaactacatccaacctactattttcgaaggtaaaaacaatatgcgaatattccaggaggagatttttggaccagttgtatcagttacaacattcaaagatgagaaggaagcattagagatagctaatgacacactttatggactaggagcaggtgtttggactagagatggaaatattgcatacagaatgggtagaggtattgaagcaggaagagtttggacaaactgttaccatgcatacccagctcacgcagcttttggtggatacaaacaatctggtatcggaagagaaactcacaaaatgatgttaaatcattatagacaggtgaagaacttacacgtgtcatacagtgagaaaaaattaggcttcttttaac

SEQ ID NO: 215387 - DNA, 1559 bp, Unknown
  Bacterial polypeptide expressing nucleotide sequence isolated from the Sargasso Sea
ccctgcgcgcgcgtggctcgcgcagcatgaagcgggcttcgggcatttcatcggcggtgcgtggcatgcgcccgctgccggcgagcgtttcgtctcgcacgcgcctgccacgggcgagcggctcgcggatatcgcgcaaggcgacgcggccgatgtcgacgcggccgtggccgccgcgcgtgccgcgcaaccgggctggctcgcgttgggcggcgccggccgggcacgccatctatatgcgctggcgcgcatggtgcagcggcatagccgcctctttgccgtgctcgaagcactcgacaacggcaagccgatccgtgaaacacgcgatatcgacgtaccgctcgtcgcgcggcacttcctgcatcacgcggggtgggcgcaattgcaggagagcgaattcgccgattacgcgccgctcggtgtgatcggccagatcgtgccgtggaattttccgctgctgatgctcgcgtggaagatcgcaccggcgattgcaatgggcaactgcgtcgtgttgaagccggccgaatacacgccgctcacggcgctgctgtttgccgaactcgcgcatcgggccggtttgccggccggcgtgctgaatgtcgtgacaggcgacggccgcaccggcgctgcgctcgtcgagcatccgcaagtggacaagatcgcgttcacggggtcgaccgaagttgggcgtctgatacgcgcggccacggccggctcgggcaaatcgctgacgctcgaactcggcggcaagtcgccgttcatcgtattcgacgacgcggatctcgacggcgccgtcgaaggagttgtcgacgcgatctggttcaaccaggggcaggtttgctgcgcgggctcgcgcctgctggtgcaggagggcatcgaagcgcgtttcatcgcgaagctgaagcgccgcatggaaacgctgcgcgtgggcacctcactcgacaagagtatcgacatcggcgcgatcgtcgatccggtgcagctcgaacgtattcagtcgctggtggaaaccggccggcgtgaaggctgcgcggtgtggcagtcgcccgatacggcgatgcctgccggcggctgtttttatccgcctacactcgtcaccggcgtggcgccggcttccattctggcgcaggaagaaatcttcggaccggtgctggtcgccatgagttttcgcacaccggacgaagcaattgcgcttgccaataactcgcgctacggactcgctgcgagcgtgtggagcgaaaccatcggccgcgcgctcgatatcgcgccgcgccttctctgccagagtggtgtggatcaacgcgaccaatctgttcgacgcggccgttggtttcggggggtatcgcgagtcgggctatggccgggaaggcggtcgcgagggtatctacgaatatctgaagccgcgcgcctggctcaagctggccgcccgtcgggacgcgcgcaccgaacgcgctggacaggcagccgccccaggcgagcccgggtcgttgtcgaacgtcacgctgatcgaccgtactgcgaagcttttcatcggtggcaagcaggtgcgtccggatagc

SEQ ID NO: 215388 - DNA, 1480 bp, Unknown
  Bacterial polypeptide expressing nucleotide sequence isolated from the Sargasso Sea
gttcaaggccaaatacggcaactacatcggcggcgaattcgtggcgccggtcgatggcaactacttctccaacacctcgccggtcaacggcaagcccatcgccgacttcccgcgctctaccgccaaagacatcgacaaagcactggacgccgcccacgcagccgcggacgcctggggcaaaaccagcgcccaggaccgctcgctggtactgctgaaaatcgccgaccgcatcgagcaaaacctcgaactgctggccatcaccgaaacctgggacaacggcaaggccgtgcgcgaaaccctcaacgccgacattcctctggccgccgaccacttccgctacttcgctggctgcatccgcgcccaggaaggcagcagcgcggaaatcaacgaactcaccgccgcctaccacttccacgaaccgctgggtgtggttggtcagatcatcccgtggaacttcccactgctgatggccgcgtggaaactcgcaccggccctggccgccggtaactgcgtggtgctcaagccagccgagcaaacgccgctgggcatcagcgtgctgatggagctgatcggcgacttgctgccaccgggcgtgctgaacgtggtgcacggtttcggcaaggaagctggcgaagcccttgccaccagcaagcgcatcgccaagatcgcctttaccggttcaacgcctgtgggctcgcacatcatgcatgccgcggccgagaacatcattccgtccacggtcgagctgggcggcaagtcgccgaacatcttcttcgccgacatcatgaaagcggaacctgcatttatcgaaaaagccgccgaaggcctggtgctggcgttcttcaaccagggcgaagtgtgcacctgcccttcccgcgctctggtggaagagtcgatctacgacgacttcatgaaagtggtgatgaagaaggtcgagtcgatcaagcgtggtgacccgctggacaccgacaccatggtcggcgcccaagcgtccgagcagcagttcgacaagatcctgtcctacctggaaatcgccaagggcgaaggcgcgcaattgctcaccggcggcaaggtcgagaagctcacgggcgacctggccaccggctattacatccagccgaccctgctcaagggcaccaacgacatgcgcgtgttccaggaagaaatcttcggcccggtggtgagcatcaccactttcaaggatgaagccgaagccctggcgattgccaacgacaccgagttcggcctgggcgccggcctgtggacccgcgacatcaaccgcgcctaccgcatgggccgggcgatcaaagccggccgcgtgtggaccaactgctaccacctgtacccggcgcatgccgcgtttggtggttacaagaagtctggcgtgggccgtgaaacccacaagatgatgttggatcactaccagcagaccaagaacttgctggtgagctacgacattaatccgttgggctttttctaa

SEQ ID NO: 215389 - DNA, 1273 bp, Unknown
  Bacterial polypeptide expressing nucleotide sequence isolated from the Sargasso Sea
acaatgggaaaaccaattagagaatctcgtgatatgatatttcctcttgctcaaagacacttctattatcatgctggaatggctcaattaatgcagactgagcttccaaagcgatctccgataggagtttgtggtcaaattattccctggaactttccactcctaatgctttcatggaaaatagctcctgccatcgccatgggtaatgctgtggtgctaaagcctgcagaatacacgtctttaacagcccttttattcgctgaaatatgtacatctgctggagttccaaatggcctcataaatattgtaactggcgacggaaaagtcggcgaaatgattgtcggacataaagatataaataaaattgcatttactggttcaacagaagttggaaaattaattagagaacgaacagctggctccggcaagtccttgacactagaattaggtggaaaatcgccttttgttgtttttgatgatgcagacctggatagtgccgttgaaggggtcgttgatgcaatttggtttaaccaagggcaagtttgttgtgctgggtctcgcctattagttcatgaagcgatttcagaaaaattttataataaactcagaaatagaatgaaaaatctacgcttgggaagtcccctcgacaagtcaatagacatgggggcaattatagataagaaacagcacaaaaaaattagtggaatggtttctcagacacagggaaaagtctttcaagctggttcaccattaccccaagaaggatgtttctttcctccaaccctaataacagacttgcatactgcagatccactcatgcacgaagaaatctttggtccagtgttggtgagtacaacatttagaaccccttcggaagccatagaactatcaaacaacactacgtttgggctggcagcctctgtatggagtgaaaatataaatctatgcctagagctcgcaccaaaaattaaggcaggcgtaatatggataaacggaacaaatatgttcgatgctgctgctgggtttggtggggtaaaacaaagtgggtttggccgagaaggtggatgggaaggcctattagcttacagtaaaccaaagaaccagttctcacctaagatcaaaagcacgccagttaaaaaccaaattagcaaggccgactatattgacagaacggcaaagctttacatcgggggaaaacaatgtcgcccagacagtggctactctcagtcaatttttgatcataacggaaaacctgtaacccaagtgcctttat

SEQ ID NO: 215390 - DNA, 756 bp, Unknown
  Bacterial polypeptide expressing nucleotide sequence isolated from the Sargasso Sea
tacctattactttagagtggggtggaaaatctcctaatattttctttgaagatatcatgcttgaggatgatgcttatctttcaaaatgttttgaaggttttgcaatgtttgctttcaaccagggcgaggtatgtacttgtcctagtagagctcttgttcaagagtccatttatgaaaaatttatggaaaaagccttggaaagagtaaaaaatataaagcaagataatccacttattagtgatacagctcttggagctcaagcatcagttgaacaaatggagaagattaaatcttatcttgatttgggtaaaaaagaaggtgcagaggttttagctggaggtgatattgctaatttaaatagtggtcttgaaaaaggaaactatatccaacctactgtttttaaaggacataacaaaatgcgaattttccaagaagaaatttttggaccagtcgtttctgttactacttttaaagataaagctgaagcattagaaattgctaatgatactctttacggattaggtgctggtgtttggacaagaaacataaatacagcctataagtttggaagatcaattgaagcaggaagggtatggactaactgtttccatgcttatccagctcatgcggcttttggtggatacaaacaatcaggtataggaagagaaactcataaaatgatgttaaatcattacaggcaaactaagaatttgttagtttcttacaaagaagaacctgatggattttatctataat

SEQ ID NO: 215391 - DNA, 1522 bp, Unknown
  Bacterial polypeptide expressing nucleotide sequence isolated from the Sargasso Sea
tatgatctatgctcaacccggaaccgctggtgccatcgttaactttaaggaaaaatacgccaactttatcggtggtaaatgggtcgccccagtcaacggcgaatacttcgataatcgctcccccgtcaatggtcaaaacttctgtaaaattccccgctccgactaccgcgatattgaactggcactcgatgctgcccacgccgctaaggatgcttggggaaaaacctcggtcaccgagcgtgcgaatttactactgcgtatcgccgatcgcgttgagcaaaatctcgaatacttagccgttgccgaaacttgggaaaacggcaaagcggtacgcgaaaccctcaacgccgacttgcctctgtttgtcgaccatttccgttacttcgccggctgtattcgagcacaggaaggcagcgccgccgatatcgatggcaacaccgtcagctaccacttccccgagcctttaggtgtcgtcgggcaaattattccgtggaacttcccgctgttgatggcggcatggaaaatcgcccccgcgctcgccgcaggtaactgtgtggtactcaaacccgccgagcaaacgcccgtatctatccttgtgctgctcgaactgattgaagatctgctgccgcccggcatccttaacgtcgtcaacggttttggcgccgaagcgggccaagccctcgccaccagcaaacgcatcgctaaactggcctttactggctccaccgaagttggttatcacatcttaaaatgtgccgccgaatcgctgatcccatcaaccgtcgaactcggtggtaagtcgcctaacctgtatttcgccgatgtgatggaccacgaagacgagtatttagataaggccgtcgaaggtatgttactggccttcttcaaccaaggtgaagtctgtacttgcccatcaagggtattaatccaagagtcgatttacgatcgctttatcgaaaaagttctcgcccgtgcgcaaaccatcaagcagggcaacccgctggataccgccacccaagtgggcgctcaggcctcccaagaacagttcgataagatcttaagctatctcgcgattggtaaagatgaaggcgcgcaggtgcttttaggaggctcgctctgccaactcgaaagcgatcaaagcaaaggctattacatcagcccaacgatcatgaaaggccataataagatgcggattttccaagaggaaatcttcggtccggtaatttcggttaccaccttcaaggatgaagccgaagccttggcaatcgccaacgataccgaatacggccttggtgcgggtgtgtggacacgggacatgaaccgtgcccagcgtctaggtcgaggcattcaggcgggtcgcgtttggattaactgctaccacgcctatcctgctcacgcggcctttggcggttataagaagtcgggcatcggccgtgaaacccacaaaatgatgctcaatcactatcaaaacaccaaaaacctattggtgagctacgatatcaatccgctcggcttcttctaa

SEQ ID NO: 215392 - DNA, 1486 bp, Unknown
  Bacterial polypeptide expressing nucleotide sequence isolated from the Sargasso Sea
tatggctaaaaatagcaaagtaaaaaagagtgattcaattgattgggattatagtgttgcacttgagagcacagatcatatttcaatttcccaggaatataagttatttataggggggaagtttgtcaaaccattatctaaaaaatattttaattctattaacccctcaaatgagaaaatattatcaaaaattgcatcagctggtaaagctgatattaataaagctgtattagctgcgaagtcagcatatgatactatttggagtaaaatggataatgcagaaagaggaaaatatttatatcgtattgcaagattaattcaggaaaaatcaagagaattagcagtaattgaatctcttgatggtgggaagcctattagagaatcaagagatattgatatcccattagctgccgcgcattttttttactatgcaggttgggcggataaacttgactatgcctttccaggaagtaaagtttcatcaattggggttgctggacaaattataccatggaattttccattattaatggctgcatggaagatagcaccagctcttgctactggtaatactgttgtattaaaaccagcggaaagcacaccattaactgcgctaaagcttgcagaaattattcaagagtccgatttgcccccaggtgtggtaaatataattactggtgatggtgctacaggtgaattattagtaaacaatcctaacgtagataaaattgcatttactggatcaactgaagtaggtaaaatgataatcaaatctattgctaattcaaaaaagaaatattctctagagttaggaggaaaggccgcaaatataatttgtgaagacgcatcaattgatcaagcggtagaaggaataattaatagtatattctttaatcagggtcatgtgtgctgtgcagggtctagattgtatgttcaagaaagtgtctcaagtcaaataatatcaaaattaaaggatcggatggatcacttgatattaggtgacccattagataaaaatactgatataggtgctattaattccaatgaacaactgaaaaaaattaatatgtatttagatattggaaaaaaagagggtgggggtttttatcaatcaaaacatactataccaaaaaagggctactggtgtgctccaactctttttacagacaccagtcaatcacatagaattgtccaagaagaaatttttggcccagttttagcaattcaaacatttcggacaatagatgaagtgattgataaagctaacaatacaccatatggattatctggaggtatatggacggataaaggttcaaaaatatttcaagtatctaaaaaaatgcgagctggagtaatatgggcgaatacttttaataaatttgaccctgcttcaccttttggaggttataaagaaagtggaattcacagagaaggtgggttagaggggctggctccatatgttaattttgataatagaactttatag

SEQ ID NO: 215393 - DNA, 1015 bp, Unknown
  Bacterial polypeptide expressing nucleotide sequence isolated from the Sargasso Sea
tatggctacatggaaattggcaccagcactagctgcaggaaactgcgtagtgttaaagccagcggagcaaacaccagcttctattatgatattaatggaaattattggtgatttgttacccaaaggagttgttaacgtagtaagtggttatggtcttgaagcaggtaaacctttagcttcttctaaaagaattaagaagatagcttttacaggtgaaactactactggacgtttaatcatgcaatatgcatctcaaaacttaattcctataacattagaattaggaggaaaatctcctaacattttctttgaagatgttatggataaagatgatgacttttttgacaaatgtctagaaggttttgctatgtttactcttaaccagggtgaagtatgtacttgtccaagcagagtactagttcaagagtctatttatgacaaattcatgaaaaaggctatagctagaacaaaagctgtcaaacaagacaatcctttaaaaatggaaactatgataggagctcaagcttctttagaacaaatggaaaaaattaaatcttatctagatttaggtaagaaagaaggtgccaaagttctaactggaggaagtgttgctaaactaaatagcggtttggaaaaaggaaactatatccaaccaactatttttgaaggaaataacaaaatgcgaatattccaagaggaaatctttggaccggtagtttcggttactaagtttaaagatgaagctgaagcattagaaattgctaatgatactctttatggtttaggtgcaggtgtttggactagaaatggtaatcttgcctacagaatgggaagagagatacaagcaggtagagtttggacaaactgttatcatgcttatcctgctcatgctgcttttggcggatataagcaatctggtatcggaagagaaactcacaaaatgatgttaaatcattacagacaagttaaaaatttacacgtgtcttatagtgagaaaaaattgggcttcttttaa

SEQ ID NO: 215394 - DNA, 1012 bp, Unknown
  Bacterial polypeptide expressing nucleotide sequence isolated from the Sargasso Sea
atgtcattagaaaatttcgtacttaatgaattacaagatctagttctatctggcaaaacaagaaatgagaaatggagaagagcacagcttaaatccttatcaaatttattagaaaatcatcagcaagaaatattaaaagccttaagtcaagatttagggaagccagctacagaagcgttcttcgagattattgcagtaaagcaagaaataaaactggcgcagaaaagtttatctaattggatgaagacgagacaaatcaatgtgcctgtctctcttaaaccagctcaagcattggtccagccggatccgttgggctgcattttgataattgggccatggaattatcctttttcgcttacccttcaaccactagtaggagcattagccgctggaaacactgctgttttaaagccatcagagcatgctcctaacgtttcaaatctgataaaaaaacttatagaagaatattttccaccagagatcgtgcaagtttttgaaggagatggaagtattgctgctggtttaatgactcgacaatttgatcacgtcttttttacaggtggagaaaatataggaaaaaaagtaatggaagccgcctcaaaaaacctcactccagtaactttagaacttggtggcaaaagcccagctgttgttatcgatggtgcaaatctagaagtaactgcaaagagagttatatggggaaaaagtctaaacgctggtcaaacatgtattgctccagatcatttactggttgaggataaactttttgattcattaatttctaatttaataaattcgatcaatgatttctacggaaatatgcctttagattcaaaacatctgggaagcattattaatgaaaagcaatttaatagacttaataatttactaaaacaagctaaaaagaataaccagataatctatggaggagatagcaatgaaaaagagaaaagaattagccctacattgatcaaaattgacaatagaaatgtcctcttagaaggaagaactt

SEQ ID NO: 215395 - DNA, 1314 bp, Unknown
  Bacterial polypeptide expressing nucleotide sequence isolated from the Sargasso Sea
tatgaataattgggaatacgcagaatcaattgaatcagaaaaaattgtaaaaatagaaaaaaaatatggtcattttataaatggggaatttgtatcaccaaattctaagaaatatctcgatacaatatctccatcaagtgaagaagttttatcctcaatctcaattggtaatgaaaaggatgtagatttcgctgtaaacgcggcaaaagaaggtctcaaacaatggagtaaaacctctccatcagagagatcaaagtatttattcaagcttgcaagattaatccaagagagatctagagagtttgcagttctagaaagcttagatggtggaaagcctataaaagaatctagagattttgaccttccacaagttgcacaaaactttttctactatgccggctgggctgacaagattgatcttgcatggggtagtggaatttcaaaaccttatggagttgtaggtcaaattattccatggaactttccgctattgatgctttcatggaaagttgctcccgcgctagcaacgggaaatactgtagttttaaaacctgctgagacaactccactaaccgctttattatttgcagaactatgtgatgaagtgggtcttcctaaaggtgtttttaatttaattactggtgatggaactacgggttccgaattagtgaatcataaagatataaagaaaattgcttttactggttccacaagtgttggtaagtacatacagaaatcattagctggaagagatgttggtcttacccttgagctaggtggaaaggcggccaatattgtttataacgatgcagctttagatgaagcagtagaaggagttgtaaatggaatcttctttaatcaaggacacgtatgctgtgctggaagcagattattagttcaagaggatatacatgatgtatttatcaataaacttgaaaagagaatgcagactttaagagtgggcaatcctctcgataagaatactgatataggtgcaatcaattcaaaagatcagcttgataaaatcacggatatggtcaatgagggtgtaagcgatggtggagagctctttcaaattgaatgtgaactccctaagaatggtttttggtttaaaccaagtttatttactggggttcaggcaaattataaaattgctacagaagaaatatttggtccagtattaaccaccttaacatttcgaactccagaggaagctgttgaaatagcaaacaatacagagtatggattatctgcagggatttggactgaaaaaggatcaaaaattttatggactgcagacaggcttgatgctgg

SEQ ID NO: 215396 - DNA, 1063 bp, Unknown
  Bacterial polypeptide expressing nucleotide sequence isolated from the Sargasso Sea
tatgagtaaagtaattaaaaattttaaaaatttaaaatatggtccagcacctgaaaatgactccgaagttttggaatggattaaaaaactagataaacctaatcatatttttattaatggaaactgggtaaaatcaaagtcaaaaaaaataataaattgcataaatccatcaaataaaaaaactcttactaaattagttataagttcaaaagaagatgtaaactcagctgtcaaatctgcaaaaaatgcttttcgttcttggtcaagacaaactccttttgaaagatcaaaatatctttatgctttagcaaggttaatacaaaaacattcaaggtttatttctgttttagaatcaatagataatggcaagccaataagagaaactagagatatagatatccctttagttgcaagacatttttattatcatgctggatgggctgaaaaaatggtaaacgaaaaaatcaatccgataggcgttattggacagattattccttggaacttccctctgttgatgctctcatggaaaatagcaccagccattgcctgcggaaatacagtagtattaaaaccagcagaattcacttctttaacagcgctattttttgcagaattatgccaaaaagcaaatcttccaaaaggagttgtaaatattataactggagatggttcaacaggagaattgataactaaacatgataaaatagataaaatagcatttacgggttcaacagagattggaaaaaaaataattacttccacatctggttctggaaaaaaacttacaatggaactaggtggaaaatcaccatttatagtatttgaagatgctgatcttgatagtgcggttgaaggagtagttgacgctatatggttcaatcaaggtcaggtatgctgcgcaggctcacgtttacttgttcaagaaagtatagaaaaaatctttataaaaaaattaaaaaaacgaatggaaaaattaagagttggtaatcctctagataaatcaatagatataggagcaattatagcacctgtgcaattaaagaaaataaacaaactagta

SEQ ID NO: 215397 - DNA, 1441 bp, Unknown
  Bacterial polypeptide expressing nucleotide sequence isolated from the Sargasso Sea
atggataaatgggaatattcagaatcaattgaatcagatagtattgtttctatccaatcaaaatatgggcattttattgatggtaaattctcaacaccaaattctaaaaaatatctcaaaactgtatccccatctactgaagaagtattagcttctatatcaattggaaataagaatgatgtagattcagcagttaattcggcaaaagaaggattgaagatttggtcaaaaaccgcacctagtgaaagggctaaatatctatataaattagcaagattaatacaagagagatcaagagaattcgctgtacttgaaagcatggatggtggaaagcccattaaggaatcaagagattttgacttacctcaagttgctgccaattttttctattttgctggctgggctgacaaattagatatttcatggggtaccaaggaaatgaaaccatatggcgttgtcgggcagattatcccgtggaattttcctttgctcatgcttgcttggaaggtagcaccagctctagctactggaaacacggttgtattaaaacctgctgagacaacacctttaacagctttattatttgcagagctttgtgaagaaatagggcttcccaaaggagtctttaacttagttaccggagatggaactacaggttcagaattagtgaaccacgagggtatttcaaaaattgcatttacaggatcaacatctgttggaaaatatattcagaatgcagttggggaaagggatattggattaactcttgaattaggtggtaaagctgcaaatattgtttacaacgatgccgctttagatcaggcagtagaaggtgttgtaaatggtatattctttaatcaaggacatgtatgttgtgctggaagcagattgttgctccaagaagatattcatgatgagtttattaataaattagaaaaaagaatgcaaacattaagagttggcaatcctttagataaaaatactgatataggtgcaattaactctaaagaacaacttgaaaagattacttcattagtgaacgagggtgtaaatgatggaggagagttattccaaattgaatgcgatcttccttcatctggatattggttcagacctagtttgtttacaaatgttcagccttcatacaatattgcaagagaagaaatttttggtcctgtattaactacattgacttttagaactcctgaagaagcagtagagattgcaaataatacagagtatggtttatcagctggtgtctggacagagaaaggatctaaaattctttggactgccgatcgcttagatgctggtgttatttgggctaatacttttaataaatttgatccatcttctccttttggtggttataaggaatcaggatttggaagagagggaggtaggcatggactactttcatatttaaaggttcaatcatgac

SEQ ID NO: 215398 - DNA, 2359 bp, Unknown
  Bacterial polypeptide expressing nucleotide sequence isolated from the Sargasso Sea
aatgaataaaataattaaaaattttaaaaatattaaatatggtccagcgccagaggatgacactgaagtaattaattggattaaaaaaatttcttcttcaaataaaaattatattaatggaaaatggaatacttctaaaggatcaaaaaagattaaggttattaatccttcaactaataaaaaattatttgatttaacaataagcacaaaaaaagatgttgatcttgctgttaattctgcaagaaaggctcaaaaaaaatggtcttctattagttcttttcaaagatcaaaatatttatatgctattgcaagattaatacaaaagcattctcgtttcttagctgtattagaatcaattgataacggaaaaccaattagagaaactagagacattgatattcctttagtagcaaggcatttttattatcatgcaggttgggcagaaaaattagataagaatttgaaaccaattggtgttgtaggacaaattataccttggaattttccattattaatgcttgcttggaaaatagcacctgcaattgcttgtggaaatactgtagttttaaaaccagctgaatatacttctcttacagctttatattttgccgaactatgtactaaagctaatttacccaatggtgttataaatattattacaggagatggatctacaggtgaactgatcacatcacatccagagatacaaaagatagcatttacaggctcaactgaaattggaaagaaaattatccaatttacatcctctacaaataaaaaattaacaatggaattaggaggaaagtcaccttttattgtttttgaagatgctgatcttgatagcgctgttgaaggagtagttgatgcaatatggtttaatcaaggacaggtttgctgtgcaggatcaagattgttaatacaagagagtatagaaaaaaaatttattaaaaagcttaaacaaagaatggaaaaattaagaattggcaatccattagataaatcaatagatataggagccatagttgcacctgtgcaattacaaaaaataaattcacttgttaaaaaaggcattaaagatggagctaaattgtggcaaccttcttggtcatgtccaacagaaggtttattttaccctccttcattatttacaaatgttacacctgcatcatttatagctcaagtagaaatttttggtccagtactaactagtttaactttcaggaaaccaagtgaggctgttgcaattgcaaataatactccatatggattagcagcaagtatttggtcagaaaatattaacttagctttagatattgctcctaaaattaaagcgggagtaatatggataaattcaacaaatttatttgatgcttcatgtggttttggtggttttaaagaaagtggttttggaagagaaggaggaagtgaagggattagagcctatactaaaaataaacttcctgagaaaaaaattaataataaggtaaataaaaaaacaaaatacaatttaccgataattgatcgtacaccaaaattatatattggtggaaaacaaaaaagaccagatggaggttattcatttggattaaattcaacaaatggtacttttatttgtgatatagctcaatctaatagaaaagatgtaagagattgtgttgaaatagcagctaagacttttttaaaacaacttaataattttaatagatcacaactcttattttatttggcagaaaatttgcagatacgtaaaaatacatttattgaacttatagttgctttatcaggttctactttatcaaatgccaataaagaattcgacgcttcttgtgagaggttattttattatgcttcaatggcagataagttcgaaggaaatattcataaccctccaatgagaggattaactttagctgtaaaagaacctctaggagttataacttcgttacttaatgatgatttgcctttattaaatttaattactgtattaggttctatattttctactggtaatacaaatattattgtaccaggtgaaaaaacatctcttatagcaactgagctttatcaagttttagatacttctgatattcctggtggatacattaatattttgacagccaagcaaaatgacttaactgaaactctttcgcttcatgaaaatattgatggaatttggtattttggacacgaacattcacaaaaaagtattgttaagaagaattctatctcaaatcttaaaagattttggtgtccagatgaaaaaaatattgattggttttctaataataatcattttcttaatgaatttttatgtcaaagtactcaaattaaaaacatttggattccttatggagaataa

SEQ ID NO: 215399 - DNA, 1441 bp, Unknown
  Bacterial polypeptide expressing nucleotide sequence isolated from the Sargasso Sea
atgaataattgggaatacgcagaatcaatagagtcagaaaaaattgtaaatatagaaaaaaagtatggccacttcattcagggagaatttgtgtcaccaaattctaaaaaatatctagacacaatctctccatcaactgaagaagttttatcatcaatatccattggtgatgaaaaggatgtagattttgctgtaaatgcagcaaaagaagggcttaaacaatggagtaaaacctcaccatcagagagatcaaagtatctatttaagcttgcaagattaatccaagaaagatccagagagtttgcagtgctagaaagtctagatggtggaaagcctataaaagaatctagagattttgaccttccacaagttgcacagaattttttctactacgccgggtgggctgacaaaattgatcttgcatggggtaatggtatttcaaaaccttacggagttgtaggtcaaattattccatggaactttccattattaatgctttcttggaaagttgctcccgcgctagcaacgggtaatactgtagttttaaaacctgcagagaccactccacttactgctttattatttgcagaactttgtgatgaaataggtcttcccaaaggtgtttttaatttagttactggagatggaactacaggctcccatttagtgaatcataaagatattaaaaaaattgcatttactggatcaacaagtgttggtaaatacatacagaaatctttatctggaagggatgttggccttactcttgagttaggtggaaaggctgcaaacatcgtttataacgatgcagccttagatgaagcagtagagggagtggtaaatggaatcttttttaatcaaggacacgtatgctgcgctggaagtagattattagttcaagaggatatccatgatgtatttatcgacaaacttgaaaaaaggatgcaaaccttaagagttggcaatccactcgataagaacactgatattggtgcgattaattcaaaagatcagcttgataaaatcaatgaactggtcaatgaaggtgtaaacgatggtggggagctctttcaaattgaatgtgaactacctaagaatggtttttggtttaaaccaagtctatttactggagttcaggcaaattataaaattgcgacagaagaaatatttggtccagttctgactaccttaacatttcgaactccagatgaagctgttgaaatagctaacaatacagaatatggattatctgcaggaatttggactgaaaaaggatccaaaatactatggactgcagacaggcttgatgctggtgttgtttgggctaatacgtttaataaattcgacccggcttctccatttggagggtataaagaatctggttttggaagagaaggtggcaggcatggtctcctttcatatttaaaggcatcatcatgac

SEQ ID NO: 215400 - DNA, 1036 bp, Unknown
  Bacterial polypeptide expressing nucleotide sequence isolated from the Sargasso Sea
gattatgcctttccaggaagtagactttcatcaattggggttgctggacaaattataccatggaattttccattattaatggctgcatggaagatagcaccagctcttgctactggtaatactgttgtattaaaaccagcggaaagcacaccattaactgcgctaaagcttgcagaaattattcaagagtccgatttgcccccaggtgttgtaaatataattactggtgatggtgctacaggtgaattattagtaaacaatcctaacgtagataaaattgcatttaccggatcaactgaagtaggtaaaatgataatcaaatctattgctaattcaaaaaagaaatattctctagagttaggaggaaaggctgcaaatataatttgtgaagacgcatcaattgatcaagcggtagaaggaataattaatagtatattctttaatcagggccatgtgtgctgtgcagggtctaggttgtatgttcaagaaagtgtctcaagtcaaataatatcaaaattaaagaatcggatggatcgcttgatattaggtgatccattagataaaaatactgatataggtgctattaattccaatgaacaactaaaaaaaattaatatgtatttagatattggaaaaaaagaaggtgggggtttttatcaatcaaaacatactataccaaaaaagggttactggtgtgctccaactctttttacagatatcagtcaatcacatagaattgtccaagaagaaatttttggcccagttttagcaattcaaacatttcggacaatagatgaggtgattgataaagctaacaatacaccatatggattatctggaggtatatggacggataaaggttcaaaaatatttcaagtatctaaaaaattgcgagctggagtaatatgggcgaatacttttaataaatttgaccctgcttcaccttttggaggttataaagaaagtggaattcacagagaaggtgggttagagggcctggctccatatgttaattttgataatagaactttatagt

SEQ ID NO: 215401 - DNA, 931 bp, Unknown
  Bacterial polypeptide expressing nucleotide sequence isolated from the Sargasso Sea
ttggaatattcagagtcaattgaatcacaagatattgtaagtataaaagacaaatatcaaaactttgtaaatggaaaatttcaacaaccaaatagcaaaaaatacattgatacaatttctccgtctagtgaagagtttctttcaaaaattgtcatatctaatgaaaaagatgtagataaagctgtcgaatctgcacaaatgggatttgaaaaatggacaaatacaacaccatatgaaaggtcaaaatatctgtttaagttagcaagattgattcaagaaagatcaagagagtttgcagtcctagagtcattagatggaggaaaaccaataaaagaatcgagggattttgacttaccgcaagtcgctgcaaatttcttttattttgctggctgggctgacaagattgatttatcttggggagcaaaaagtttaaaaccatatggagttgttggtcaaattattccgtggaattttccattactaatgttggcatggaaagttgcaccagcattagctacaggcaatactgtagttttaaagccagcagaaacaacatcattaacagctttattatttgcagagctctgtgagcaagctggtattccagatggtgttgtaaacataattacaggcgatggcacaacaggctctttaattgtgaaccacaaagatattaacaaaattgcattcacaggctcaactcaagttggaaaattaatccagaaatctttagctggacgagatgttggtcttacattggagcttggtggaaaagctgcaaatatcgtttatgaagatgcagcaatagatcaagccgtagagggtgttgttaatggcatattcttcaaccagggacatgtctgttgcgcaggaagtagattattgcttcaagaatcgattcatgatgagtttattactaaattggaaaaaa

SEQ ID NO: 215402 - DNA, 787 bp, Unknown
  Bacterial polypeptide expressing nucleotide sequence isolated from the Sargasso Sea
ggccgctgcccatctcaccccggtgacactggaactcggcggcaagagtcctgccctggtgctggagggggcggatctgacggtgagcgcacggcggctgatctggggcaagggtctcaatgccggccagacctgcatcgcaccggatcacctgatcgtccagcccgggctgaaggcagaactgctgaaggccatggcctcagcccgcaccgagatgtacggaaccgaccccctggcgtcggaacaactggcctgcatcgtcaacgagcgtcaatttcatcgcttggaggccctgctggaccaggcgcaacaggagggtcgcgtcctgatcggcggagagatcaaccgtgatcaacgacgcatcgctcccacggtgattcgtgtcgacaaccgtcaggatcccctgatggccgatgaactgttcggtcccctgctgccggtgctggagctggcggacctcccccagaccctggccgagatccgtcagggtccgaagcccttggcgctgtacctctttggaggcaatgaggcgcagcagcagcaggtgctggagaccaccagctccggtggggtctgtctcaacgatgtggtgatgcaggcaggcgtgccggacctgcccttcgggggcgtgggcggcagcggcatgggcagctatcacggccaggctggcttcgacaccttcagccatgccaaggctgtgctgcgccgccccttccgcttggatttcaagctgcgctatcccccttacggcatcaatctcaacctgttgaggcggctggccggatga

SEQ ID NO: 215403 - DNA, 1133 bp, Unknown
  Bacterial polypeptide expressing nucleotide sequence isolated from the Sargasso Sea
ctgggccagaccacgtcgggtcggcacaggacttcgtactttcccttctatggcatatgtacagcctgaaccttatgggtcagtgcttattatcagcgcctggaattatccactgcaactggccttagcgcctttagttgctgtgttatctgccggtaactgtgctgtggtaaaaccctcagaattagcgcctgctacatcagccataatggctcgcctgttgcctttgtatctggataaagaagctgtagtagtaatcgaaggcggcgtagcagagaccacagaattattgaagttgccttttgaccatattatgtacacaggcaacggtcaggtcggcaaaattgtattgcgtgctgccgctgaacatttaacgccagtgactttagaactgggtggcaaaagcccggtttatgtcgacagcagtgcagatttaaaactgacagcacagcgtatcgcctggggtaaatggctcaatgcaggccaaacctgtatagcaccggattatattctggcgcataaagatattgcccaggctttgactgaagaaattaaggcgcagttacaccagatgtatggtgatgatcctaaacttagccctgactatggccgcattattaatctacgccatttgcagcgggtgcgaagttatctggatggccttgatgtttattgtggtggtgtggtggatgaagagcagctgtatttcagccctacgttagtgttggacccgccgcttgatagccgcctgatgacggaagaaatttttggtcctgtactccctctactccctataagtagttttgatgcagctgtacgttttgtgcaaaagcgcgataagccgctgtcggcctatttgttcagtaataacagcacgcagcaacagcagtgggtagagcaaatcagcagtggcagtcagtgtattaacgatgtgctgatgtttatggcagtgtctgaacttccttttggtggcgtgggtccgagtggcatgggccagtattctggcaaagcaggttttgagcagtttagtcatttgaagtctgtactaaaacgtccactctggcctgagccgcctgtgcgttttgcgccatatgcagactggaaacgtaaagtgcttggctggttaagctagc

SEQ ID NO: 215404 - DNA, 1441 bp, Unknown
  Bacterial polypeptide expressing nucleotide sequence isolated from the Sargasso Sea
tatgaataattgggaatactcagaatcaattgaatcagaaaaaattgtcaatattgaaaaaaaatatggaaattttattgacggaaaatttgtcactccaaaatcaaaacaatatatcgatactatctctccttcaactgagaaaattttatcttctatttcaattggaaatcaacaagatgttgattacgcagtagcttcagctaaagaagggttgaaaaagtggagtaaaactaatccttcagaaagagcaaaatatttattcaaacttgccagattgattcaagaaagatcaagagaatttgccgtattggaaagcttagatggaggtaagccgataaaagaatcaagagactttgatcttccacaagttgctcaaaacttcttctactatgctggatgggctgacaagctggatattgcttggggtaatgagcaatacaaaccctatggagttgtgggacaaattatcccttggaatttcccgcttttgatgttgtcatggaaagtagctccagctttagcaactggtaatacagttgttttaaagccagctgagacaacacctctgactgctttattgtttgctgaattatgcgaggaagtaggtcttccagatggggtatttaatttagtaaccggtgatggttctacaggttcacatcttgtaaatcataaagatattaaaaaaattgcttttactggctctactggagtaggtaaatatatccaaaaatctttggctggtagagacgttggtctgactttggagcttggcggaaaagcagcaaatatcgtttatagtgatgcagctttagatgaagcagtcgagggagttgttaacggtatattttttaatcagggacatgtttgttgtgcaggaagtagattacttgttcaagaggatattgaagaaaaatttattaaaaaactagaaaagagaatgcagacattaaatgttggcaatccattagataaaaatactgatgtaggtgctataaattcaaaagatcaattagacaagattgaaaaattggtaaatgaaggtgttgcagatggtggagatttattccaaattgaatgtgaacttccgaaaaatggattttggtttaagccaagtttatttacaagcgttcaggcaaattataaaattgcaaccgaagagatatttggacctgttcttactactttaacttttagaactccggaagaagctgttgagattgctaacaatactgaatatggtctttctgcaggtatctggaccgaaaaaggttcaaaaatattatggactgctgataggctcgaagcaggagtaatttgggcaaacacattcaataaatttgatccagcatctccttttggtggctacaaagaatcaggatttggtagagaaggaggaagacatggtcttctttcttacctaaaggtgtcatcatga

SEQ ID NO: 215405 - DNA, 1661 bp, Unknown
  Bacterial polypeptide expressing nucleotide sequence isolated from the Sargasso Sea
aatgcttgttaatcatccagatatttcaaaaattgcgtttactggatcgacggaagttggcagagttatcagagaaaagactgctggctctggaaaatctcttacacttgaattgggtggaaaatctccatttattgtctttgacgatgccgatctagacagcgctgttgagggcctggttgatgctatctggttcaatcaaggccaagtatgttgtgctggatccaggcttttaattcatgagagtattgaagataagtttcacaaaaaaattcgaaatcggatggataaattacgtgtcggtgatcctcttgataaatcggttgatatgggggctattgtagacaaatcccaactaacaagaataaaaaatctggtttctgaaacggaagggcaggtttattacgctgaatgtgaaataccgaaaaaaggcctttattataaaccgactttaatcacaggcctgtctccatcagataaattgatgcaagaagaaatttttggccctgtcctggtaagcacaacatttcgtacaccaaaagaagcctgtgatttagcaaatgatacaacctatggattagctgcgagcatatggagcgaaaacattaatttagcactgggtttggcgccaaaaataaaagctggtgtcgtttgggtaaatggtaccaacatgtttgatgcagcaattggcttcggtggagttaaagaaagcggtttcggacgtgaaggaggatgggacggtttaaaaagctatctaaaacattcgataaatttttccacaaataaagctaaaataaaacaaagccattctaataaaggctccgtcaatttagatagaacagcaaaactatatattggtggaaaacaagcaaggccagatgggggttactcacaaaaagtttttgatgccgctaataactatgctggacatgttccttcttcaaacaggaaggatattagaaatgctgttgaagcgatgaataaagcgtctaactggtcaacatcttctgggcatttgagagctcaaataatttattttatggccgaaaatcttcatgcaagaagagaagaattttccaagcgcatcgatcaaatgtctggtaataaaagtggaaaaaaagaagttgagttttcgattagacggctgttttcctatgctgcttgggcagacaaatttgatggctcaattagcggtgttccagtaagaggtgtcggcttgactatgcgagaagcggttggaaacataatagtcttttgcccatcaagtgaacccttgctttctttaatttcttgtattgctccagcaatcgcaatgggaaacagagttacaaccatttcaccttttattggatcacttacagcaacagacttttatcaggtattagaaacatcggacattcccccaggtgttataaacattttaactggcaatcaccttgatctagcaccacacgcatccagtcatatggatgtgaacgcagtttggtctttctctgaagaagaaataacaaaaacgattgagtttgaagctgcaaaaaacataaaacgcacatggtgcctgaaaaacattgattggtttgatacaagaacggagggagaaatgtttcttgacgcagcgacggagacaaaaagtgtttggattccttatggtgagggttgag

SEQ ID NO: 215406 - DNA, 1372 bp, Unknown
  Bacterial polypeptide expressing nucleotide sequence isolated from the Sargasso Sea
attgaatcttcagatatagttagtatagaaaaaaaatatggccactttattaatggttcatttgtttcaccaaagagtaaaaggtattttgatagcatttccccatcaacagaggatttgctttcccaagtttcttttggtaataaggccgatattaatcttgcagtttcatctgctagagaaggattcaaaacttggcaaaaagttaaacctatagatcgatcaaagtatttatttaaaattgcaagattgattcaagaaagatcaagggagtttgcagttttagaatccatggatggagggaaacctattagagagtcgagagatgtagacttgccacaggtatctgctaattttttctattatgcagggtgggctgataagcttgacctttcatggggctctgttggattgaagccttatggggtggcagggcaaataattccttggaattttccattgttgatgcttgcttggaaagtagcaccagcactagcaactgggaacagtgttgtactaaaaccagcagagactacaccactgacagcacttttatttgcagaagtttgtgttgaggcaggtttaccagatggagtattcaatcttgttactggtgatggagaaacaggagcatttttagttgatcacgtggatgtagataaggtggcttttactggatctacaaatgttggaaagcaaatccagtcatcaattgcaggtagcaagaagggcttaactttagagcttggagggaaagctgcaaatattgtttacgaggatgcttctatagaccaagcagttgaaggagttgttaatggaatattctttaaccagggacatgtttgttgtgctggaagtcgactacttattcaagaatcaattcaagatgagtttatagaaaaacttgaaagaagaatgcaacaattaagagttggagaccctcttgataagaatactgatattggtgcaattaattcaaagcagcaacttgaaaagatctctgagctggttgaatctggagttagcgacggaggggctatctatcaacctgagtgtgaattacctggaaatggattttggtttaaaccaacattatttacagacgttcaacctgcttatcgtatagctagggaagaaatttttggaccagttttaactactatttcattcaggactcctgaagaagctgttgagattgctaacaatactgaatacggtttatctgctggtatttggtctgaaaaagggtcaaagatactttggacagctgacaatcttgatgcaggtgttgtttgggcaaatacttttaataagttggatccttcttctccttttggtgggtataaagaatctggtttgggagagaaggggg

SEQ ID NO: 215407 - DNA, 1522 bp, Unknown
  Bacterial polypeptide expressing nucleotide sequence isolated from the Sargasso Sea
tatgatctatgctcaacccggaaccgctggtgccatcgttaactttaaagaaaaatacgccaactttatcggtggtaaatgggtcgccccagtcaacggcgaatacttcgataatcgctcccccgtcaatggtcaaaacttctgtaaaattccccgctccgactatcgcgatatcgaactggcgctcgatgcggcccacgccgctaaggatgcttggggaaaaatctcggtcaccgagcgtgcgaatttactgctgcgtatcgccgatcgcgttgagcaaaatctcgaatacttagccgttgccgaaacctgggaaaacggcaaagcggtgcgtgaaactctcaacgccgacttgcctctgtttgtagaccatttccgttacttcgctggctgcattcgagcacaggaaggcagcgccgccgatattgatggcaacaccgtcagctatcacttccctgaacctttaggtgtcgtcgggcaaatcatcccgtggaacttcccgctattaatggcagcatggaaaatcgcccccgcgctcgccgcaggtaactgtgtagtgctcaaacccgccgagcaaacgcccgtctctatccttgtgctactcgaactgattgaagatctgctgccgcccggcatccttaacgtcgtcaacggttttggcgccgaagcgggccaagccctcgccaccagcaaacgcatcgctaaactggcctttactggttccaccgaagtcggttaccacatcttaaaatgtgcagccgaatcactgatcccatcgaccgtcgaactcggcggtaaatcgcctaacctgtatttcgccgatgtgatggaccacgaagacgagtatttagataaagccgtcgaaggtatgttgctggccttcttcaaccaaggtgaagtctgtacttgcccatcaagagtgttaatccaagagtcgatttacgatcgctttatcgaaaaagtgctcgcccgtgcgcaaaccatcaagcagggcaacccgctggataccgccacccaagtgggcgcacaggcctcccaagaacagttcgataagatcttaagctatctcgcgatcggtaaagatgaaggcgcgcaggtgctcttaggcggctcgctctgccaactcgaaggcgagcaaagcaaaggctattacatcagcccaacgatcatgaaaggccataataagatgcggattttccaagaggaaatcttcggtccggttatttcggtcaccacctttaaggatgaagccgaagccttggcaattgccaacgataccgaatacggccttggtgcgggtgtatggacgcgggacatgaaccgcgcccagcgtctaggtcgaggcattcaggctggccgcgtatggattaactgctaccacgcctatcctgcccacgcggcctttggcggttataagaagtcaggcatcggccgtgaaacccacaagatgatgctcaatcactatcaaaacaccaaaaacctcttggtgagttacgatatcaatccgctcgggttcttctaa

SEQ ID NO: 215408 - DNA, 697 bp, Unknown
  Bacterial polypeptide expressing nucleotide sequence isolated from the Sargasso Sea
catggcaaaagatgatgacttcttagataaatgcttagaaggttttgcaatgttcacattaaaccaaggtgaagtttgtacttgtccaagcagagtactagttcaagagtctatctatgataagttcatggagaaagctattgctagaacaaaagctgttaaacaagacaatcctttgaaaatggaaacaatgattggagcacaagcatcattagaacaaatggaaaaaatcaaatcttatctagatttaggtaagaaagaaggtgccaaagttctatgtggtggaaatgttgcaaaaatcaatagtggtttagaaaaaggaaactacattgaaccaactatttttgagggtaataactcaatgcgtatcttccaagaagaaatttttggaccagttgtatcagtaactaagtttaaagatgaggcagaagcattacaaattgctaatgacacactttatggtttaggtgctggtgtttggactagaaatggaaatatcgcttacagaatgggtagagaaatacaagctggtagagtatggactaactgttaccacgcttatcctgcacatgctgcattcggtggatacaaacaatctggtatcggaagagaaacacataaaatgatgcttaaccactacagacaagtgaagaatcttcacgtgtcttacagtgagaagaaattaggcttcttttaa

SEQ ID NO: 215409 - DNA, 1408 bp, Unknown
  Bacterial polypeptide expressing nucleotide sequence isolated from the Sargasso Sea
tatgccaaatagaccttctcttcacgcagtggaaactggcgtgtgtttcgttgacgttgttcacaagcttaacgacagtttcgatacagggaaaacccagtccctggagtggcgtaaaagccagttaaaggcattagaaactttactgaaagacaaccagcacgacattttacaagcccttaaaaatgacttgggcaaatgtaagaccgaagccatggtagcggaacaagggtttctgctttctgatatcaagcatacgcttaagcatttggataaatgggcaaagccacgcaaagtatcaacgcccatggtggcatggccaggtaagagctttcgcaagcctgagccgcttggcactgtgcttattatcggagcgtggaattatccgcttcagttattgcttgccccttatatcgccgctattgcagcgggcaactgtgcggtattgaaaccctctgaattggctgaagaaacctcgtcgctggtggctaagcttatcccccaatatatggataattcatgcgttgccgtaatagaaggcggtaaagatgaagcgacggcgctacttgcctgcaaatgggaccatattttttacaccggtggtgaagtggtgggcaaaattgtcatgagcgccgcggccaaacatttaacgccagtaacccttgagcttggcggtaagagtccctgttttgttgataaaaacacaaaccttgctgtcaccgcgcgccgtttagtgtggggtaaatggatgaatgcgggccaaacttgtattgcgcctgactatgtcattgttgaaaagggctttgagcaaaagcttattgatgcggttaaaaaagagctgaaaaagcaatacggcaaagcacctttatcgtcacgagattacggcaatatcgttaatcttcgtcacttaaagcgtcttgaaagttaccttgaaaacgtcaatgtggtgtatggcggcgagctagatgaatctcgtccagcaatggcgcctacccttgtactggagccatcgctagatagcccgctaatgaaagaagagatcttcggccctattctacctattatcactgttgacaacatggaggcgggcattaagtttgtgaacagcaggcctaagccactcgcactttatgcatttagtgataaggacgatgtgcttgataatattatcagcaaaaccagttcaggcagtgtgtgtactaacgacactatgctgtttatgactaaccctgagttgccgtttggtggcgtaggaaatagcggcatgggtagctatcatggccaagcaggttttgatacattcagccatattaaaacggtaatgaaacgttcttttgcgctcgacgtgttctttcgttatgcgccgttttctaagtttaagctgtcgttgcttaagaagtttttataa

SEQ ID NO: 215410 - DNA, 1073 bp, Unknown
  Bacterial polypeptide expressing nucleotide sequence isolated from the Sargasso Sea
tatggacgaatcaaaaatcaatgatataattaattctcaaaaagatttcttagattccaattctaatagtatcaattcgagaatcttacttttaaaaaagttactaattaacattaaattatttgaagaagaaatttatgaagctctttctaaagatcttaataaagccaaatttgaatcttttctaacagagattcttcttgtagaaaaagaaattaaactttttataaaaaaaataaataaatggtcaaaagacaaaaaagtaaaagcatcgatattaaactttccttcaagaaattatcttaagccagaaccatatggaagagttcttattataactccatggaactacccatttcaactgtctttaacgcccttaattggtgcctttggctcaggaaatactgttgtaattaaaccttctgaattggcgcccaatacatcatctgtgttaagtaagttaatcaaagaaacttttccagaaaatattgtttcagttattgagggagatgctgaagtatcaaaaaacttattatctaaaaagtggaattatattttttttactggaagtacaagagttggaaaaattgtagcaagtgaagccgcaaaaaatttaactcctataacacttgaactaggagggaaaagcccatgtatcattgataaagatataaatgttgaaaagacagctaaaagaattgtatcaggtaaatttattaactgtggccaaacttgtatagctccagattatatcttagttaatgataaaataaaatctaagcttattaatcatcttaaaatagaaattcttaaaacatatggcaacaagccaaatcaatctaataattatggaagaataattagtaaaaatcatttagatagattaactaaaataattgctggtcaaaatatagtttttggtggtcattcaaataaagaagataaatatattgaaccaacattaattatagatcccgatattaactcagcaattatgtcagaagaaatatttggccccattcttccaataatatcttataatgatgttggggaaattgaaaaggtaatattaa

SEQ ID NO: 215411 - DNA, 1875 bp, Unknown
  Bacterial polypeptide expressing nucleotide sequence isolated from the Sargasso Sea
aatgagtaaaattatacagaactttaaaaacatttcttatggtccggcaccagaggacagtaaagatgttatgtcctggatcaattcgctcaataatcctaatcatttatttataaacggtgtatgggtaaaatctaaatcttctaaaaaattacaagtcattaatccggcttctaataaaaaacttacaacactttccatttctaataaaactgatgttaatctggcagtaggagcggcaaaaaaagcatttaattcttggtctaaaacttcctctgatactagggcaaaatatctttatgcattagcaagattaatccaaaaacattctaggtttttatctgtattggagaccattgataatggaaaaccgataagagagacaagagatatagatattcctttagtagcaagacatttttattatcatgctggatgggcaaaaaaaattgatacaaaaataaataaaccaattggtgttgttggtcagataattccttggaattttcctttgttaatgctgtcttggaaaattgctccagcaattgctgcaggaaatactgttgttttaaaacctgcagaatttacgtctttaacagcactttattttgctgaattatgtaaaaaggcaagaattcccaaaggcgtaattaatattattactggtgatggtagtacaggagaacttcttactgcacatcctgatacaaaaaagattgcttttacaggatcaacagaagttggaaaaaaaattattcaatctactgcgaagcatgaaaaaaaactaactatggagttaggaggcaaatcaccatttatagtatttgaagatgctgatcttgatagtgctgttgaaggagtagttgatgcaatatggtttaaccaaggtcaggtgtgttgtgcaggatctcgcttattgattcaagaaagtgtagaaaaattatttattaaaaagttaaaagcacgcatggagaaactacgtgtaggaaatccactcgataaatcaattgatattggtgcaattgttgcaccggtacaattaaaaaaaatacaatcaatagtaaaaaagggagaaaaggaaggttctaaattatggcaacctagttgggcttgtccaactgatggcttattttatcctccttctatttttaccaatgtttccccgtcttcatttattgctcaagtagagatttttggaccagtcttatcagtgcttagttttagaacacctagtgaagcagcaactattgcaaacaatactccttacggtttagcggcaagtatatggtcagaaaatattaaccttgctcttgatattgctcctaaaataaaagctggagttatatggattaattcaactaatttatttgatgctgcctgtgggtttggtggatataaagaaagtggatttggaagagaaggtggtgttgaaggtatcagagcatatcaagataatacactgcctgaggctagtaaaatcattaataaagttaataaaaataaagttgaactttctactatagatgcgacacctaaattatacattggcggcaaacaaaaaagacctgatagtggttattcttttaatcagctatcttctcaaaaagaatttatttgtgatattgctagagctaataggaaagacgtaagagatactgttgaggctgcttctaaatcaaagataggaactttaagtaattttaatcgtgcacaaattttattttatttagcagaaaatctatctcaacgaaaagaaacatttgttaatttattaatgagtattgttggtgctaatagaagccaagccacaaaagaatttgaacaagcttgtgaaagaattttttattatgcttctatggcggataaattgaagga

SEQ ID NO: 215412 - DNA, 1519 bp, Unknown
  Bacterial polypeptide expressing nucleotide sequence isolated from the Sargasso Sea
atgatttatgcaaagccaggtagtgaaggttcggtcgtaagcttcaaagaaagctacggtaattttatcaatggcgaatgggttgcaccggttaaaggtgagtacttcaccgcaacatctccagtagacggcagcgacatcgcacaaatcccacgctcaacatctgaagacattgagcttgcgttagatgcagctcacgctgcgaaaaagggctgggcagatacgtcagtagctgagcgctccaccattcttctgaaaattgccgatcgcattgaagaaaacctagagctacttgccgttgcggaaacatgggacaatggtaaagccgttcgcgaaacgcttaatgcagacattccgctgtgcgcagaccacttccgttattacgcaggctgtattcgaagccaagaaggcaccatcggtgaaatcgataaaaacacggtggcgtatcacttccatgaaccttatggtgttgttgggcaaatcattccctggaacttcccgctacttatggctgcatggaaacttgcgccagcacttgttaccggtaacgtagtggtgctaaagccagcagaacaaacgccagtatctatcttattgttcgccgaactaatccaagacctactaccaccgggtgtactaaacatcgttaacgggttcggggcagaagccggacaggctcttgcaacaagcacaagaatcgcaaaaattgcatttactggctctacacctgttggcggacatatccttcgctgtgctgctgaaaaccttattccatctaccgttgagcttggcggcaagtcgccaaacttattcttcccagacatcatgaatcacgagcctgaatttattgataagtgtgcggaaggtttagtgcttggatacttcaaccaaggtgaagtatgtacgtgtccttctcgagcgattattcacgaagacatctatgatgcattcatggaaaaagtgttggaaaaaattcagaagatcaaacgtggcaacccactagacacagacaccatggtaggtgcacaggcatctaatgagcagttcgaaaagatccttaaatacatcgatatcggtaagtcagaaggggctcaggttgtcactggtggtgagaaagagcagctacctggctttgatggaggctactacattcagccgactatcttgaagggtgaaaaccacatgcgtgtgttccaggaagagatttttggtccggtaatcgctgttcaaaccttcaaaaccgaagaagaggcgattgagattgccaataatacaagcttcggacttggcgctggtgtatggagccgcgatgcgaatgtagcattccgcgtaggtcgagcgattgaagcaggtcgcgtgtggacgaactgttatcacttgtatccagctcacgctgcgtttggcggctacaagaaatcgggcattggccgcgaaacccacaagatgatgctagatcactaccagcagacaaaaaatctattggtaagctacgacatcaacccacttggtttcttctaag

SEQ ID NO: 215413 - DNA, 2362 bp, Unknown
  Bacterial polypeptide expressing nucleotide sequence isolated from the Sargasso Sea
aatgagcaaaattatacaaaattttaaaaacatttcatacggtcctgcccctgaagacagcaaggatgtgatgttatggatcaattctctcaatcacccaaaccttttattcattaatgggaaatggattaaatcgaaatcatctaagaaaatacaggtaataaatccagcaactaataaaaaattaacaacactagctgtttccaataaaagtgatgtcaatgaagcagtcggtgcagctaaaaaggcatttgcctcttggtctaaaacttcatcagacacgcgcgctaaatatttatatgcgctagcaagattaattcaaaaacattctcggtttttgtctgtgctagaaactattgataatggaaaaccaataagagagacgagggatattgatattccattagtagctagacacttttattatcatgcaggttgggcgaaaaaaattgatactaataaacaaaaaccaattggtgtaattggtcaaattattccttggaattttcctctactgatgctggcatggaaaattgcacctgcaattgctgctggtaatactgttgttttaaaaccagcagaattcacttctttaactgctctttactttgctgaactatgccaaaaagcgagactacccaaaggtgttattaatattattacaggagatggcagcacaggtgagattattacctctcatcaagatacaaaaaaaattgctttcactggttctactgaagttgggaaaaaaataattcaatcttctgcagagcaagaaaaaaaattaacaatggagttagggggtaaatcaccctttattgtttttgaagatgctgatcttgatagtgctgtggaaggagtagttgatgcgatttggtttaatcaaggtcaagtatgctgtgcaggttcacgattattagttcaagaaagtgtagaaaaattatttattaaaaaattaaaagcccgtatggaaaaattacgtgttggaaatccattggataaatcgattgatattggtgcgattgtagcgccagtacaattaaaaaaaattcaatcaattgtaaaaaagggagagaaggaaggctcaaagctatggcaacctagttgggcttgtccaacagatggtttgttttatccgccttcaatttttaccaatgtttccccatcttcttttattgcgcaagttgaaatttttggacctgtgttatctgttcttaatttcagaactcctagtgaagcagtgagtatagcaaataataccccgtatggtttagccgcaagtatttggtcagaaaatattaatcttgcacttgatattgctcctaaaataaaagccggagtaatatggattaattcgacaaatttatttgatgctgcatgtggatttggtggatacaaagaaagcggatttggaagagaaggaggtttagagggtataagagcctaccaagataaaacactacctgaagctcctaaaactgcaataaaaataaataagaataaagttgtacttccttcaatagacacaactcctaagttgtatgttggaggtaaacaaaaaagacccgacagtggttactcttttaatcagatgtcggcacaaagagaatttatttgtgacattgcaagagcaaatagaaaagatgttagagatgcagttgaagctgcatcaaaatctaaaattggaattttaaataatttcaatcgttctcaaattttattttatttagctgaaaatttatcacagcgaaaagaaacatttgtaaatttattaatgagtattacaggtgtaaataaaattactgcattaaaagaatttgagcaatcttgtgaaagaattttttattatgcctctatggctgataagtttgagggcaatattcacaaccctccaatgagaggtttaacattagcggtaaaagaaccaattggtattatcgctagtttgatgtgcgaatataaacctttacttagcttaacaacaaccatttcttctttatttgcaaatggtaatgcaagtctgattgtgccatcagaaaaaacatcattaatagcaacatcattatatcaagtttttgagacatcagatattccagcaggatcaatcaatatactaacatcgagaaataatgaacttaatacaaccttagcacaacatgagaacattgatggtatttggtcattctctaataattctagtataaggtcagatataataaaggatacggtttttaatcttaaaagatactggtgccctaaaaataatcgtattgactggtcaaatgagtctgaagagtttttaaatgcatttcttcatgagagttcacaagtaaaaaatatttggataccttacggagagtaa

SEQ ID NO: 215414 - DNA, 988 bp, Unknown
  Bacterial polypeptide expressing nucleotide sequence isolated from the Sargasso Sea
ggtcagattataccatggaactttcctttattaatggctgcttggaaaatagcgcctgcacttgcctcaggaaacactgtaattctaaagcctggagaaactactccgttaacggctcttaagcttgctgaaattattcaagagtctgatttgcctccaggagtagttaatattattactggagatggtactacaggtaacttgttagtaaataatccaaatgtagataaaattgcatttactggatccacagaggtgggtaaaatgataattaattctttagctgcttccaagaaaaaatattctttagaattaggaggaaaagctgcaaatattatttgtgaagatgcaccgattgatcaagcagttgaagggataattaatagtatattctttaaccaagggcacgtatgttgtgcgggttcaaggttatatgtccaagaaagcatctctagtcaaataatatcaaaattacacaatagaatggatcacttaattttaggagatccgttggataaaaatacagatataggagctattaattctaaagcgcaattaaataaaattaaaatgtatttagatattggtaaaaaagatggcggtgtaatttatcagtccaaacatactattccgaagaaaggttattggtgtgcgccaactctttttactgatataagccaatcacacaggattgtacaagaagaaatttttggcccagttttagcaattcaaacttttcgtactattgatgaagtaatagccaaagcaaataatagcccgtatggattatctggtggtatctggacagataaagggtcaaaaatctttcaggtatccaaagaaattcgagcaggagtaatatgggcaaatacatttaataagtttgatccaacatctccttttggcggttataaagaaagtggtatgggtcgagaaggcggattagaaggattgtacccttatgttaatacagtaaataggatttgat

SEQ ID NO: 215415 - DNA, 1699 bp, Unknown
  Bacterial polypeptide expressing nucleotide sequence isolated from the Sargasso Sea
atggttaagaagactaaaaaaagaaagaaatctaaaaagtcggttaaatctaaatcaaaaaaaaaagcgacaaagaaaatttctaaatcttttaagaaaaaaagtcttaagaccaaatcaaaaaatgtgcgaaacaaaaacaatggaggaaaaatgagtgcagaagcaatgaaagtgtcttcagttctagatacctctcatttaaaggttaaatttccatttaaagcaaaatatggaaactacataaatggtaaatttgtagagcctaaatctggtaagtattttgataatacttctcctatttcaaatgagaaaatctgttctgtagcacgatcaaatgaaaaagacgtagatgcagcactagatgcagctcacgcagctttcccaacttggggtaaaacttcaatcacggaaagatcaaacattctcctaaaaattgctgacatcattgagaaaaatcttaatgtgctagcaacagcagaatgtttagataatggtaagccaatcagagaatgtatggcggctgatttaccactagtaatagatcattggagatactttgctggagtaatcagagcggaggagggttcagttgctgaaatcagtaacaacgaatactcttatcacattcctgagccactaggtgtagttggacaaattataccgtggaacttcccactattaatggcaacttggaaacttgctccagctttagctgcaggaaactgtgtagtgctaaaacctgctgagcaaacaccagcatcaatcatgttacttatggaactaattggagatttattacctccaggtgtagttaacgttgtaagtggttttggtttagaagctggtaaaccattagcatcatctaaaagaatcaaaaagattgcttttacaggtgaaacaacaactggtcgattaattatgcaatacgcgtcgcaaaacttaataccgatcacgttggagctaggtggaaaatctccaaacattttctttgaagatgtcatggcaaaagatgacgactttttagataaatgtcttgagggttttgcaatgtttacattgaaccaaggtgaagtttgtacttgcccaagcagagtgctaatccaagaatctatctacgataagttcatggaaaaggctattgctagaactaaagctgttaagcaagacaatcctttaaaaatggaaactatgattggtgctcaagcatcattagaacaaatggaaaaaatcaaatcttaccttgatttaggtaagaaagaaggtgccaaagttctatgtggtggaaatgtagctaaaatcaatagtggattagaaaaaggaaactatattgagccaactatctttgaaggtaacaattcaatgcgtatcttccaagaagaaatttttggaccagtagtatcagtaactaaatttaaagatgagaaagaagcattagaaattgctaatgatactctttatggtttaggtgctggtgtttggactagaaatggaaacatagcttacagaatgggtagagagatacaagctggtagagtttggacaaactgttatcacgcttatccagctcatgctgctttcggtggatataaacaatcaggtatcggaagagaaactcataaaatgatgcttaatcattatagacaagtgaaaaacttacacgtgtcttacagtgagaagaaattaggcttcttttaaa

SEQ ID NO: 215416 - DNA, 1720 bp, Unknown
  Bacterial polypeptide expressing nucleotide sequence isolated from the Sargasso Sea
atggctaagactaagaaaaaaaaagctgttaagaaaagaagaaagaaaacaaaaaagtcgattaaaaaaagaagaaaacttaaaagcggaacgacaaagaaactttctaaatctagaaaaaagctaaaaaagattaagtcgaagtcaaaatcaatacgtaaaacaaatggaggaaaaatgagtgcagagatgaaagtgtcttctgttctagatacctctcatttgaaggttaaatttccgttcaaagcaaaatacggaaactacataaacggaaaatttgtagaacctaaatctggaaagtattttgataatacttctccgatctcaaatgaagttatctgttcagttgcgcgatctaacgaaaaagacgtggatgcagcattagatgcagctcacgcagctttcccaacttggggaaagacatcaatcactgaaagatctaacattttgattaagattgcagatgtattagaaaaaaatcttaatacattagcagtagcagaatgtttagataacggtaagccaatcagagaatgtatggctgctgacttacctcttgtaatagatcactggagatattttgcaggagtaatcagagcagaagaaggttcagttgctgaaataagcaataatgaatattcttatcatatacctgagccactaggtgtagttggacaaattataccttggaacttcccattactaatggcaacttggaaacttgctccagcattagctgctggtaactgtgtggtattaaaacctgcagagcaaactccagcgtctatcatggtaatgatggaaatgattggcgatcttttaccaaaaggtgttgttaacattgtaagcggttttggattagaagctggtaaacctttagcatcttctaagagaataaagaaaattgcttttactggtgaaacaacaactggtagattgattatgcaatatgcatcacaaaacttaatcccaattactttggaattaggtggtaaatctcctaacattttctttgaagacgtcatggataaaaacgatgacttcttcgataagtgtttagaaggttttgcaatgtttacattaaaccaaggagaagtttgtacttgtccaagtagagtactagttcaagagtctatctatgacaaattcatggaaaaagctattgctagaactaaagctgtaaaacaagacaatcctttaaaaatggagacaatgattggtgcgcaagcttcattagaacaaatggaaaaaatcaaatcttatctagatttaggtaagaaagagggtgccaaagttctatgtggaggaaatgttgcaaaaatcaatagtggtttagaaaaaggaaactacattgagccaactattttcgaaggaaaaaacaatatgagaatattccaagaagaaatttttggaccagttgtttctgtaactaaatttaaagatgagaaagaggcattagaaattgctaatgacactctttatggtttaggtgcaggagtatggactagaaatggaaatcttgcatacagaatgggtagagagatacaagctggtagagtttggacaaactgttatcacgcttatcctgctcacgctgctttcggcggatataaacaatctggtatcggaagagaaactcataaaatgatgcttaaccactacagacaagtgaagaacttacacgtgtcttacagtgaaaagaaattaggcttcttttaaa

SEQ ID NO: 215417 - DNA, 1705 bp, Unknown
  Bacterial polypeptide expressing nucleotide sequence isolated from the Sargasso Sea
atggctaagactaagaggaaggctattaaaagagagagaaagaaaacaaaaaagtcgattaaaagaaagaaaaaacttaaaagcggaacgacaaggaaactttctagatcatcaaaaaaagctaagtcgaagtcaaaaaaaagtaaaacaaatggaggaaaaatgagtgcagaaatgaaattgtcttctgttctggatacatctcatttgaaggtcaaatttccgtttaaagctaaatacggaaactacatcaacggtaaatttgtagaacctaaatctggaaagtattttgacaatacttctccgatttcaaatgaaaaaatctgttcaattgcaagatcaaacgaaaaagacgtggatgcagcattagatgcagctcacgcagcttttccgtcttggggtaaaacttcaattacggaaagatctaacatgttacttaaagtagctgatgcgattgagaaaaacttaaacacattagctgtagcagagtgtttagataatggtaagccaatcagagaatgtatggctgcagacttacctttagtgatcgatcactggagatattttgcaggtgtaattagagctgaagaaggttcaattgctgaaattagcagcggtgaatattcttaccatatacctgagccactaggtgtagttggacaaattataccttggaacttccctttactaatggcaacttggaaacttgctccagcattagcagctggtaactgtgtggtattaaaacctgcagagcaaactccagcttcgatcatggtattgatggaacttattggtgatatattacctccaggtgtagttaacattgtaagcggttttggtttagaagctggtaaacctttagcatcttctaaaagaataagaaaagttgctttcactggtgaaacaacaactggtagattgataatgcaatacgcatcacaaaacttaattccaattacattagaattaggtggtaaatctcctaacatttattttgaagacgttatggataaagacgatgacttcttcgacaaatgtctagaaggttttgcgatgtttacattaaaccaaggagaagtttgtacttgtccaagtagagcgttagtacaagagtctatctatgacaagttcatggaaagagctgttgcaagaactaaagcagttaaacaagacaatcctttaaaaatggaaacaatgattggtgcgcaagcttcattagaacaaatggaaaaaatcaaatcttatctagatttaggtaagaaagaaggtgccaaagttctatgtggaggaaatgttgctaaaatcaatagtggtttagaaaaaggaaactacattgagccaactattttcgaaggtaaaaatgacatgagaatattccaagaagaaatttttggacctgttgtttctgtaactaaatttaaagatgagaaagaagcattagaaattgctaatgacactctttatggtttaggtgcaggagtatggactagaaatggtaatcgtgcgtttagaatgggtagagaaatccaagctggtagagtttggacaaactgctatcacgcatatccagctcatgctgctttcggtggatacaaacaatctggtatcggaagagaaacacataaaatgatgcttaaccactacagacaagtgaagaacttacacgtgtcttacagtgaaaagaaattaggcttcttttaaa

SEQ ID NO: 215418 - DNA, 479 bp, Unknown
  Bacterial polypeptide expressing nucleotide sequence isolated from the Sargasso Sea
ccatgccggagagattggtgccatatggatttatcggggaatcttagcgacgagtagaaattcggaggtgagggattttgctcgacagcacctggagacagaaaaacaacaccttaaactaatcgatggatttctggacagaaatcatcgatcttgtttgttgccgctttggagagtcgcaggctttctaactggcgcattaccgtcaatatttagttcacaagccgtattcgcaacagtatcgactgtagaaacctttgttgtttcgcactacatggcgcaaatcaatcggcttcaatctcacaattcccacaacagtatttgcagaacactgcaatcatgttgcgatgatgaggcaagacatgagtcagaggcttcggatttgcttaacgggaagccttcattcttcttgcgagcctggtgtttcctggtgagttcaggctcaaatctagcagttaagtgcgcgcgaattatatgaa

SEQ ID NO: 215419 - DNA, 324 bp, Unknown
  Bacterial polypeptide expressing nucleotide sequence isolated from the Sargasso Sea
atttgatacctacttttagaggtttattatctggaatttatgttgaaatgaaaaaaaaaattactcctaaaaaaattcataatgaattagtaaagtttcataggaaaaatcattttgtcaaagtttctccttttaataaaaatataggaacttcaaatgttattaatagtaatttttgtgaaatctccgtatgtaaggttagattaaaaaataaaatacttattctttcagcaattgataatttaataaaaggcgcggggggtcaagccgtacaaaacatgaatttaatttttggttttagagaaaacttaggattaaaatgaa

SEQ ID NO: 215420 - DNA, 136 bp, Unknown
  Bacterial polypeptide expressing nucleotide sequence isolated from the Sargasso Sea
agaagtcgccgcgactaagatgattgctgtgccaggttgttacccaacagcatcattaacggcattgaaaccattaaagaatttactgacgtcagcctatccagtgatcaatgcggttaatgatgctgttgggtaa

SEQ ID NO: 215421 - DNA, 412 bp, Unknown
  Bacterial polypeptide expressing nucleotide sequence isolated from the Sargasso Sea
ttcaaaaaaaaaattaaaaaaatatagtataatttcttgtcctggatgctacccaacctcagttcaattacctttgattcctttaatacaaaaaaaaatgattaataacgatgagatttatattgactcaaaatctggttattcaggtgctggtaaaaatattaaaaaaaaatttaatcataaaaatttgtttcactctgttcttgcttatggagtaggttcccatagacacatggctgaaattgatcaagaattaagtaaagtgtctaaaaagaaaataaaagttttttttacacctcatttgatacctacttttagaggtattttatcaactatttatcttaagactaaaaaaaatattagtgctaaaaaaatttatttagcactaaaaaaataccataagaaaaatata

SEQ ID NO: 215422 - DNA, 689 bp, Unknown
  Bacterial polypeptide expressing nucleotide sequence isolated from the Sargasso Sea
actgaatgatattgatattatttttacagcattacctaacggtcaagctcaagttatttctaaatatttattgaaaaaaaatactttaatagatttagctgcagattttagattaaataaaagttcagattataaaaaatggtataaacaaaaacattatgccattaataatataaaaaaaagtatctacgcattacctgagattactgataaaaaagtaaaagattttggaattataggatgtcctggttgttatcctacatcgatactgttaccattaattcctttattgaaaaaaaattctattaatacaaataatatacatatagattctaagtctggttactcaggtgcgggcagaggtgtttataaaaaatataagaataaaaatctttatgagtctattagtgcttatggcataggttttcatagacataactctgaaattgaacaagaaattaaaaaatatgttaagtctaaaattaactttttatttacgccacatttatctccaatgttcagaggtattttaagcactttttaccttgatctaaaaaaaggattttcaataaaaaaaattcatgaaattttaaaaagatttcataaaaaaaataaatttgtgaaaattttgagcattaattctctaataagcacaaataatgtaattaatacaaataattgcataatat

SEQ ID NO: 215423 - DNA, 718 bp, Unknown
  Bacterial polypeptide expressing nucleotide sequence isolated from the Sargasso Sea
tatgtcattaaataaaattaatatagcagttgctggagcaactggatatgtaggtctagacttgataaaaatactttcttctcatccgagagtaagcatcaaatatctttgtgcccaaaaaaaaattggtaaaaatatacaattttttgataaaagaattaaaaaaaaattaccaaaaatatctaatttaaaaaatgtagaatggaataaaattgatgttcttttttgttcgttacccactgggcaatctcaaattcttgcaaaaaaattaattaaaaaatataatttaaaaataattgatctttctgctgattttagactttctaataaaaaagatttttataaattttataaattaaaacattctgctccagaattattaaaattttcaaaatattcacttacagagtttgccaaaaaagatttaaaaaaatttaaaattatagcttgtcctggttgttatcctacatcaatacaattgccaatattaccacttttaaaaaagaaactattgaataccaaagatataataattgactccaagtcaggttattcaggtgctggaaaaaatcttaaaaagaagtttacacataaaaatatttttttcgcaataaaagcttacggtatattaaatcacagacatacagctgaaattgatcaggaatttaaaaaggtaactaaatcgaaaatacattataattttacaccccatttaata

SEQ ID NO: 215424 - DNA, 841 bp, Unknown
  Bacterial polypeptide expressing nucleotide sequence isolated from the Sargasso Sea
atccataaggacttattaggattaactaaattgaaatttaccaatatccccgaaaaagaaatagatgttttattcctatgtgctggacacggaaattcgttaaagtttcttaaaaaaaataaatttttgaaaacaacaaaaattattgatttaagtaatgattttagaattagaaaaaataatgaattaaataatttaaagtttatctatggtttaccagagttaaataaagaaacaataaaaaaagcaaatgccatagcgaaccctggatgttttgcaacagcaattcaacttagtttaatcccaatggcaaagcataatctaattaaagatacaattcatgttaatgcaactacaggaagtaccggtgctggaatgaaaaactctgatactacacattttagttggagaaataataatatttcatggtataaagcttttaatcatcaacatcttttagaaattaatcaaacattaaatagattaaatcaaaaatcaaaattgatctttatacctcaaaggggaaattttacaagaggtatattttcaactagttatactaagtatgttggaaatttaaacgaaataaaaaatatatataaaaattattataaaaatcacccatttacagaaatttctgatgaagaaatttcgttaaaatcagtaataaataccaataactgttacatacatttatgtaaacatgaaaacattttattaattacaagtattatagataacctaactaaaggagcttctggtcaagcattacaaaatttaaacctaatgatgaattgggatgaaaatataggtttaaaattaaaagcatctatttattaaa

SEQ ID NO: 215425 - DNA, 578 bp, Unknown
  Bacterial polypeptide expressing nucleotide sequence isolated from the Sargasso Sea
tatgtctaagctaaatgctttaattgctggatcaactggatatattggaattcaattagttaaattgctaattaaacatccaaatataaatattaaatatttatgtggaaacacatctaaaggtaaatcaattacttattttgatcaaagcattaaaactaataaattaccaaaaataataaaatttaataacaatctattaaatgatgttgatatagtttttactgcattacccaatgggcaagctcaaaaaatatcaaataagttattaaaaaaaaatatattaattgatttgtcagcagattttagactcaagtctgcaaaagaatatttaaaatggtataaaattaatcacagctctaaatataatttaaagaatagcatttatgctttacccgaaatttcaaaaaaaaaattaaaaaattataaaataatttcttgtcctggatgttatccaacatcagtactattgccattaatccctttaataaaaaataaactaattgcagataacaatataataattgattcaaaatcaggttattctggagcaggcaggggtgtgcataaaaatataa

SEQ ID NO: 215426 - DNA, 529 bp, Unknown
  Bacterial polypeptide expressing nucleotide sequence isolated from the Sargasso Sea
atggacaaactaaacgtattaattgcgggctcaacgggttatattggaactcaattggtgaaactcctctgtaaacacaaaaatgtgaaaataaagtatctttgtggcaatacatctgttggtaagaatatttcatactatgataaagatttaaagaaatataagttaccaaagataatcaagattaattataaactatttaaaaatgtggatgttatatttacatccttgcctaatggtgaatctcaaaaaattgctaacaaattattaaaaaacaatattatgattgatctatcagctgattttagaataacgaatgcaaaaatatataacaaatattatgggataaagcatatatctttaaataatcttaaaaaaagtatttatggcttaactgaaattaacaagaaaaatttatcaaaaggtaaaattatagcttgtccaggctgttatcctacttctatattgttacctttatttccattaattaaaaaaaatctaattgatttaaaaatatgttatgactcaa

SEQ ID NO: 215427 - DNA, 391 bp, Unknown
  Bacterial polypeptide expressing nucleotide sequence isolated from the Sargasso Sea
tttgagggagatcaaacaaacacttagcagtttaattaaaaataaatttgaaataatttttcttccacacagaggaaattttacaagaggtatattttcaacatcctatttaaattaccaaggatccttagaaagtgcaaatgaattatacgatgattattataaaaatgatccatttacacacatatctaaaaacgaaataagtttaaaaaatgtagttaattcaaataattgtttcattcatcttcataaacacaataatattttattaatcacgtcagtaattgacaatttaattaaaggtgcatctggacaagcaattcaaaatcttaatataatgatgggttggaatgaaacattaggtttaaaattaaaatcaaatatttattaa

SEQ ID NO: 215428 - DNA, 613 bp, Unknown
  Bacterial polypeptide expressing nucleotide sequence isolated from the Sargasso Sea
aatgcacaagctaaacatattagttgctggatccactggttatattggtgttcaattaataaaattattatctaaacacagaaaagtttttatcaaatatctttgtggaaatacttcagtaggtaaaaaaatttcttattttgataaatctttgaaatcaaaaaaattaccaaatataattaaatttaataaaaatttactaaaaaatgtggatttaatttttactgctttaccaaatggggaggctcaaactatttctaaatatatgttaaaaaaaaatgttttaattgatttagcagcagattttagattagaaaaagtaaaaaaatatcttaaatggtataaacaaaagcacaaagcagcatataatattaaaaatagtatttatgcattgcctgaattaaattctaataaaattaaaaattttaaaattatttcatgtccaggttgttatccaacttctatattgttacccttaataccattgattaaaaaaaagttaatcaatcaaaaaaatataataattgattcaaaatctggatattcaggtgctggaagaaatgtacataaaaaatatgctaataaaaacctatatgaatctttaagtgcttac

SEQ ID NO: 215429 - DNA, 435 bp, Unknown
  Bacterial polypeptide expressing nucleotide sequence isolated from the Sargasso Sea
tatgttaaaaaaagtttttattgatggtaaggaaggcactactggtcttcaaatttacgaaagattagacaagcatccaaatgtagagatacttaaaattaatcctgataaaagaaaatgtttactagagaaaaagaaaattatggaaaaggctgatctagtgtttttatgcttgcctgataaagcctctagagaaaccgtagatttaggagaacaacttgaagataattgtcctatatttatagatgcttcaacagcacacagaacatctacaatgtggagttatggattaccggaattatcagaggaatatagaaatagtattataaattctaaattaatagcagttccaggatgctatgctacaggatcaaatttaattatatttccattgacaaagatgggattaatactcttttctcaccatttattata

SEQ ID NO: 215430 - DNA, 378 bp, Unknown
  Bacterial polypeptide expressing nucleotide sequence isolated from the Sargasso Sea
gatgactaaagttggaattataggaggatcaggttttactggcgaggagctaataaaactcttatctctccatgactcaacctctttaatagctattagctcaagagagctaaaaaacacacctgtgtcagacttatttcaaggttctgatttaaattttgtagatccggaagatcagatcttttttcaatgtgatgtcgttttctttgcaactccgcacggaactgcaatggataaagcaaattcttttatccagaaaggaataaaagtcattgacctatctgcagatttccgactgaaagatccttcaatctggaaagaatggtacggttcgaatcatagagatttagaaaacttaaagaattctatttatggtct

SEQ ID NO: 215431 - DNA, 655 bp, Unknown
  Bacterial polypeptide expressing nucleotide sequence isolated from the Sargasso Sea
aatgtctaagcttaacgcattagttgctggatcaactggatatattggtgttcaattaattaaaatattagttaaacacaaatatattaatattaaatacctatgtggaaactcttctgtgggtaaacacatcaaattttatgataaatctttatctaaatataaattacctaaaattttaaaatttaataaaaaattattaaaagatgttcatgttatttttacagctcttccaaatggtgaagcacaggatatatctaaacatttaagcaaaaatcatactctaatagatcttgctgcagattttagattagaaaaagcctctgattatttaaagtggtataaacaaaaacatcgagcaactaatttaataaaaaaaagtatttatttacttcctgaaattaatagaaaagagattaaaaaatataatattatttcatgtccaggatgttatccaacatcaatattgcttcctctatttcctttatttaagaaaaatttaattaaacttaataatatcataattgattcaaaatctggatattcaggtgctggcagaggagttcataaaaaatataaagacaaaaatctatatgagtctttaagtgcatatggagttggttttcatcgtcataattctgaaatagatcaagtg

SEQ ID NO: 215432 - DNA, 571 bp, Unknown
  Bacterial polypeptide expressing nucleotide sequence isolated from the Sargasso Sea
atgtccaagataaatgttcttattgctggttctaccggttatataggtgttcagttaactaaaattttagttaatcacaaaaaagtaaatataaaatatctctgtggtagcacatcaataggtaaaaaaataacttattatgacaaagggctaaaaaaatataaactacctaaaatagtcaaatttaataaaagttttttatcaaacgttgatattgtttttacagcattgccaaatggtcagtctcaaaaaatttcaaaacttttattaaaaaaaaatattttgattgatttatctgctgattttagacttaaaaaagtaagtgattttttaaagtggtataaaattaaacataaagcaaaaaatttgattaaagatagtgtttatgctttacccgaatttaaaagaaatataattaaaagttctaaaataatttcttgtccaggatgttatccaacttctatattattaccattaataccattactgaaaaaaaatttaatttctaataataatataataattgattccaagtctggatattcaggggccggaaggggagttcataaaa

SEQ ID NO: 215433 - DNA, 370 bp, Unknown
  Bacterial polypeptide expressing nucleotide sequence isolated from the Sargasso Sea
atgttaaaaaaatttactaagaaaaaatttcaatttagttttactcctcacttatcaccaatgtttagaggtatattaagtactatttatttagatcttaagaataaaattaccccaaatacaatttataacgaattgagtaaattttataagaataaaaaatttgtaaaagtactaaaaagagattcgttagttagtactaacaatgtaataaatactaacaattgctatatttcaatatgcaaatcaaagtataaaaacaaggtaataattttgtctgctatagataacctgataaaaggaggagcgggtcaagctgtgcaaaatttaaatataaaattcaatttcccagaaaaaactgcactataat

SEQ ID NO: 215434 - DNA, 182 bp, Unknown
  Bacterial polypeptide expressing nucleotide sequence isolated from the Sargasso Sea
tgatccggaagagcttaacaatacgaatagaattcgtctgtttgtatttagcaatgaggaatacgatcagatcgtcctaaccgctcagcttgataatcttggtaagggtgctgctgggcaggcaatacaaaaccttaacttaatgttaaggcttcctgaaacttccggattagagggttgat

SEQ ID NO: 215435 - DNA, 451 bp, Unknown
  Bacterial polypeptide expressing nucleotide sequence isolated from the Sargasso Sea
taagaaattcaagaataaaaatctatatggctcaacaagcgcttatggaataggttctcatagacataatgcagaaattcaacaggaattgagctatattaaaaagaatatagaatttacttttactcctcatatactacctatgttccgagggattttatcaactatttatttaaattataaaagtaaagcaaatttgaataagatatataatgaattaagaagattttatatgaaacataaatttataaaaatattgaagaataaagctctaagcacaaatgatgttattaacacaaataattgtcagatatcagtttgtaaatctaaagataagaaaaaattgattattcttagcagtatagataatttgataaaaggtggggcagggcaagcagttcaaaatttaaatcttatctttaaatttaaattaaacgagggtttaaaatga

SEQ ID NO: 215436 - DNA, 706 bp, Unknown
  Bacterial polypeptide expressing nucleotide sequence isolated from the Sargasso Sea
aatgcctaagcttaacgcattagttgctggatcaactggatatattggtgttcaattaattaaattattagttaaacacaaatatattaatattaaatacctttgtggaaactcctctgttggtaaacacgtcaaattttacgataaatctttatctaaatataaattaccgaaaattttaaaatttaataaaaaattattaaaagatgttcatgttatttttacagcacttccaaacggtgaagctcaggatatatccaaacatataagcaaaaatcatactctaatagatcttgctgcagattttagattagaaaaagcttctgattatttaaagtggtataaacaaaaacatcgagcaactaatttaataaaaaaaagtatttatttacttcctgaaattaatagaaaagagattaaaaattataatattatttcatgtccagggtgttatccaacatcaatattgcttcctctatttcctttatttaagaaaaatttaattaaatttaataatattataattgattcaaaatctggatattcaggtgctggtagaggagttcacaaaaaatataaagataaaaatctatatgagtctttaagcgcatatggagttggtttccatcgtcacaattctgaaatagatcaagtgttaagaaaatttactaagaaaaaatttcaatttagttttactcctcactta

SEQ ID NO: 215437 - DNA, 254 bp, Unknown
  Bacterial polypeptide expressing nucleotide sequence isolated from the Sargasso Sea
ctctgaattaaaaaaatattataaaaatgaaagatttgtcaaaatttcaaatcctgatacttttttaagcactaatgatgtaataaatacaaataattgcattatttctgtttgtaatagcaaatataagagtaagttaattattctttctgttattgataatttaataaaagggggaagtggccaagcagtacaaaatatgaatatacgttgtaaatttaatgaaagtgagggtttaaatggtaaaatttaat

SEQ ID NO: 215438 - DNA, 811 bp, Unknown
  Bacterial polypeptide expressing nucleotide sequence isolated from the Sargasso Sea
catgtccacgcccctcgtcttcatcgacggcgaccaaggcaccaccggcctgcagatccacgagcgcctgcgcggtcgtgtcgagcggcaagacctgacactgctgacgcttcccgccggcgcgcgcaaagacgcgcaacgccgtgccgaagccatcaacgcctgcgacatcgccatcctgtgcctgcccgatgtggccgcgcgcgaggcggtcgcggccatcgtcaacccgcgcgtgcgcgtgatcgacgccagctccgcgcatcgcaccacgccgggctgggtctacggctttccggagatgagcgacgagcaagctcaacgtgttgcgggcgcgtcgcgcgtgaccaacccgggctgctacccgaccggcgcgatcgggctgctgcgcccgctcgtgcaggcgggccttgtgccggcggattacccgatcagcattcatgccgtgtccggctattcgggcggcggccgcgccgcggtggaaacctacgaggggccggaggcagcaaacgccctgccgttccaggtgtacgggctgggtctggcgcacaagcacacgcccgagatccaactgcacgccgggctcacgcagcggccgatgttcgtcccggcctacggcgcgtatcgccagggcattgtgctgacggtgccgctggagctgcgtctgcttaacgccggcgttgatgcgaccgcgctgcacgcatgtctggctgaccactacgctggcgcgccgcatgtggacgtgatgccgcagcaggcaccgtctgccttgccgcatctcgatccgcaagcgctcaacggcaccaacgac

SEQ ID NO: 215439 - DNA, 880 bp, Unknown
  Bacterial polypeptide expressing nucleotide sequence isolated from the Sargasso Sea
atgacacaaaaagtattcatagacggtgaggcggggaccacgggtctgcaaatcttggaaaggctgaacggccggcctgagatcgaacttatccacctgggggacagccaacgaaaagacactgccgcgcgcgctgacgcactgaacacggccgatgtgtcaattctatgtctgcctgatgatgcatcccgggaagcggtttccctcgtcgacactcctaccgcccgcatcatcgatgcatctatagcatacaggaccgatccggactggatttttggttttcctgagtgggcgccgggccagcgcgataaaatcgctgccgcaacgcgcgtcacgaatccgggatgctacgcctgtggttcgatcgccatactgcatccattggtgagcgctgggctcgtccccacaaatcatgccacggccatcaatgcagtgtccggttattctggcggcggtaaaaagcttatcgcggcgtttgaggatgatcaggcgcaaaatactccgaacagcgccttctatctttatggacttggccttgagcacaagcatacggaagaaattcgagtccatgctggtcttaacacccggcctctgttcgttccgagcgtgggccggttcgcccagggcatgatcgtgtctgtgccgctacatctctgggctttacccggtgccccatcggtttccgacgttcacgcagtgctgaccgaccattatgcgtcccagcattttgtaacagtggagagcctggaaaacgcggatgcccacggggcccatttggatccagagggtctcaacggcacaaatcatatgtcgttgtgcgtgttcggcaacgaagcgcgccaacaggtggtcgttactgcagtgctggacaatctcggca

SEQ ID NO: 215440 - DNA, 907 bp, Unknown
  Bacterial polypeptide expressing nucleotide sequence isolated from the Sargasso Sea
agtaggtaaaagtatttcattttatgaaaaatctttatctaaaaataaattaccaaaaattataaattttaataaacaactattaaaagatgtgcagattatttttacagctcttccaaatggagaagctcaagatatatctaagcatttaaataacaagcatactttaattgaccttgctgctgattttagattagataaagcatctgattacttaaaatggtacaaacaaaaacatcgtgcatctaatttaataaataaaagtgtctatttacttccggaaataaatagaaaagaaattaaaaaatataatattatttcatgtccaggttgttatccaacctcaattttattgcccctaattccgttatttaagaaaaatttaattaaacttaacaatattataattgattcaaaatcaggatattcaggtgctggtagaggtgtacataaaaaatttaaagataaaaatctatatgaatctttgagtgcatatggtgttggttttcaccgtcataattcagaaatagatcagatgttaagaaaatatacaaagaaaaaatttcagtttagtttcactcctcatttatcaccaatgtttagaggaatattaaccactatatatgtagaattggaaagaaatgtttcacaacaaaaagtattaaaaatactaaatagtttttataaaaaggaaaattttgtaaaaatattaaaatcaaacgcaatgataagtactaatgatgtaataaacactaataattgttatatttcggtctgtagatctaaatatagtaataaaattattattctttcagctatagataatttaattaagggtggagcaggacaggctcttcaaaacttaaataataaatttaattttcctggaaagactggattaaaatga

SEQ ID NO: 215441 - DNA, 175 bp, Unknown
  Bacterial polypeptide expressing nucleotide sequence isolated from the Sargasso Sea
atgattcgtataggtattgttggagctaccggttatacaggggctgaattacttcgtctgctatcgcttcatgatgatgttgaagttactattgtcacttcaaattcaagaaaaggtgaatacctcacagatgtttttccgtcattgaaacattacgatcttcgttttgtcgatc

SEQ ID NO: 215442 - DNA, 898 bp, Unknown
  Bacterial polypeptide expressing nucleotide sequence isolated from the Sargasso Sea
ttaggctctactggctatacaggattagaattaataaatattctaaataagcacccaaaaattgatatagtttttcttggaagtaaaaactccaaaggaaaaaaattacagaatatttatcctacttttaaaaaatacaatcttcctgtattaaaagattattctgaaattaattacaataatgttgatttagtctttttatcacttcctcataaaatttctcaaaaaacaatatgcaaagattatgggaaaacaaaatttatcgacctttctggagattttagattaaagaatcataaagtctactcagaaaattataaaacaaagcatatatgtaaaaatttacttaaaaaatttgtttatggcttgcctgaactcaattacgacttaattaaatcagcaagcaatatctctgtccctggctgttatccaacttcaatattaatccctatagcgccattaataagcaaaaatttaataaaaacagataatataattattgactcaaaatctggttacagtggtgctggtaaaaaatttaacatagaaaaattaattaaaaaaaataatttaaatttttataattataatactaatcagcatcgtcatatatgtgaaatcaaacaagaacttgaaaaaattagttcaagtaaagttaagttttcatttaatcctcatatattgccaatatttagaggaatgatgagcactatttattgtgacttagaaaacaatataaaaaaaagagatgttattgaaaatataaaaaaacattatttaaaaagttattttgtaaaaatattgaataaaaataaaacagctgatttttatacagtaaattattctaacaattgtctaataaaattctatgatcactatgataataaaaaaaattatt

SEQ ID NO: 215443 - DNA, 803 bp, Unknown
  Bacterial polypeptide expressing nucleotide sequence isolated from the Sargasso Sea
ttgtgctcaaaaaaaactaggaaaaaaaattcaattttttgataagagaataaaaaaaaaactaccaaaaatttcacatttaagacaggtaaactggaataatatagatgtactttttacatctttaccaacaggcgcctctcaaattttgtcaaaagaattatttaaatataaaaaattgaaaataattgatttatctgcagattttagactttcagataaagaaaaatttaagaaattttattcaaaaaaacataaagctgctaatcttttaaaatactcgatttattctttaagtgaatttgtaaaagaaaaaattaaaaactataaaataattgcatgcccaggatgttatccaacctctatacagcttccgttaattcctttattaaaaaagggactgattaaaaaaaatgatattattatagactcaaaatcaggatattctggtgctggaaagaatctaaaaaaaaaattttctcataaaaatctttattcatcgatccatgcatatggaatctataagcatagacacacaagcgagatagatcaggaattttcaaaaatatcaaaaagcaaaataaattatacttttacaccacatctgatcccaacattcagagggatgttatcttctatttatgtacaaccaaaaaataaagttgcaataactaagataaaaaatgagctaaaaaaatatcacaaaagaaattattttgtaaaagtccttcctgttagtaaagatttgggaacagaaaatgttcttaatacaaatttttgtgaaattagtattttaaactaaa

SEQ ID NO: 215444 - DNA, 498 bp, Unknown
  Bacterial polypeptide expressing nucleotide sequence isolated from the Sargasso Sea
aagtttgataaaaaatacttaaaagatgttgatatagtttttacggcattgcctaatggtgaagctcaagccatttcaaaagatttgaatgataaaaatgtattaattgatttagcagcagattttagactcgaaaaagcttctgattataaaaaatggtataatcaaaaacataaagctttagccaatattaaaaaaagtatttattctttacctgaaataactggaaaaaaagtaaaagattttaaaataatttcttgtccaggatgttatccaacttcaattcttataccactgcttccgttattgaaaagtaaattgattaaaaaaaacaatattataattgactctaaatctggatattctggagcgggtagaggtgttcataaaaaatataaagataaaaatttatatgagtctcttagtgcttatggaattggctctcatagacacaatcaagaaatagaccaaatgattaaaagattcacaaaagtaaaa

SEQ ID NO: 215445 - DNA, 545 bp, Unknown
  Bacterial polypeptide expressing nucleotide sequence isolated from the Sargasso Sea
tatgagtaagaaaaatgttcttatatgtggtgctactggatatataggattacaattaactaaacttctatgtacacataaaaaagtaaatattaaatatttatgtggaagtacttctgtcggaaaaaaaatagattcctttgaacaagaattaaaaaaatataaattaccaaaaatttcaaaatttaaaaaagaatatttatcagatgtggatataatatttacagcattgccaaatggtgaagcacaatctatttcaaaatttttaaataaaaataacttactaatagatctagcagctgattttagactcaataataaaaaagattatgaaaaatggtataaaattaaacacaaagcattaaatcaaatcaaaaaaagtatctattctatacctgaaattagtggtcaattaattaaaaaattctcaatagtatcttgtcctggatgctatcctacatctgtattaattccattaattccattaataaaaaaaaacttgattaataatcaaacaattattattgactcgaaatctggttatt

SEQ ID NO: 215446 - DNA, 760 bp, Unknown
  Bacterial polypeptide expressing nucleotide sequence isolated from the Sargasso Sea
catgtccacgcccctcgtcttcatcgacggcgaccaaggcaccaccggcctgcagattcacgagcggctgcgcggccgtgtcgagcggcaggacctgaaactgctgacgcttcccgccgacgcccgcaaagacgggcaacgccgtgccgaggcgatcaacgcctgcgatatcgccatcctgtgcctgcccgatgcggccgcgcgcgatgcggtcgcagccatcgtcaacccgcgcgtgcgcgtgatcgacgccagctccgcgcatcgcaccacgccgggctgggtgtacggctttccggagatgagcgaggggcaggccgatcgcgttgcggcggcgtcgcgcgtgaccaacccgggctgctacccgaccggcgcgatcgggctgctgcgtccgctcgtgcaggcgggcctcgtgccggcggattacccgatcagcattcatgccgtatccggctattcgggcggtggccgtggcgcagtggaaacctacgaggggcaggaggcagcaaacgcgctgccgttccaggtgtacgggctgggtttggcgcacaagcacacgccggagatccaactgcacgccgggctcacgcagcggccgatgttcgtcccggcctacggcgcgtatcgccagggcattgtgctgacggtgccgctggagctgcgtctgctcaacgccggcgttgatgcgactgcgctgcatgcatgtctggcagaacactacgctggcgcgccgcatgtggacgtgatgccgctgcaggca

SEQ ID NO: 215447 - DNA, 613 bp, Unknown
  Bacterial polypeptide expressing nucleotide sequence isolated from the Sargasso Sea
aatgcacaagcttaatgctttaattgctggatcgactggatacatcggtattcaactgataaaattattagtaaaacataaaaatataaatataaaatatttatgtggaaatacatcagttggtaaaaaagtttcattttatgaaaactcattaaaatctaaaaaattaccaaaaataactaaatttaataacaaatatttaaaagatgtagatataatttttactgctctaccaaatggtgaagcacaaacaatatctaaatatttattaaaaaaaaatatattaattgatttagcagcagattttagacttaaaaaaagttcagaatatttaaaatggtataaacaaaaacataaagcaattaataatataaaaaaaagtatttatgcattaccagaaataacaggaaaaaaaattaagaactatgatataattggttgtcctggttgttatccaacttcaattttattaccactgattccattagtaaaaactaaatcgataaatactaaaaacattataattgattcaaaatctggatattctggagctggtagaggtgttcataagaaatataaacataagaatttatatgaatcgctaagcgcataa

SEQ ID NO: 215448 - DNA, 688 bp, Unknown
  Bacterial polypeptide expressing nucleotide sequence isolated from the Sargasso Sea
aatgaaagattctattaatatagctattgctggagccacaggatacattggtttagaactaattaaaatattatcaaagcatccaaaagctaaaatattatatttgtgtgctactaaatctattggaaaatctatatctagttttgataaaagaattagtaataaaaaattacctcttatttcaaaaatagaaaaaattgattggaataacatagatgtaatatttacagccttacctaatggtgaagctcataagatagctaattttttaccatcgaaagtcaaacttatcgatttgtcagctgattttagattaaaagatccaaaagtttttaaaaaatggtacggaattaatcataaatctataaaatttattaacaaatctatttattcggtatctgaattttcaaaagaaaaattaaaaaaatacaatataatttcatgccctggatgttatcctacatctgtacaattgccattaattccattaattaaaaagaaattcataaaagtagataacattattattgattctaaatcaggtttttctggtgcaggaaaaaaaattaaagagaaatttaagtttaaacatttatttgattctgtaagagcttatggcgtaggttcgcatagacatatggcagaaatcgatcaagaactatctaaaatagctaagaaaaaagtaaag

SEQ ID NO: 215449 - DNA, 169 bp, Unknown
  Bacterial polypeptide expressing nucleotide sequence isolated from the Sargasso Sea
tgaagtaataaatactaataactgttatatttctgtgtgcaaatctaaatatagtaataaaataataattctatctgctcttgataatttgattaagggtggagcaggtcaagctgtgcaaaatatgaataataaatttaatttttctgaaacgactggattacaatga

SEQ ID NO: 215450 - DNA, 640 bp, Unknown
  Bacterial polypeptide expressing nucleotide sequence isolated from the Sargasso Sea
tatgtctaagataaatgcattagttgctggagccacaggatacataggtattcaattggttaaattattaactaaacataagagagttaaaattaaatatctttgtggtgatacctctgtaggtaagaaaattagctcttatgataaatactttaataaatataaactaccaaatattgttaaatttaataaagagttattaaaaagtgttgatgttgtatttactgcattacccaatggagaggctcaaaaaatttcaaaaaatttaaataataaaaatattttaattgatttagcagcagattttagacttaaatcagccagtgattatttgaaatggtataaaatcaaacacaatgcacctaaattaatcaaaaaaagtatttattctttacctgagttaaataatcagaacattaaaaaatataagataatttcttgtccaggctgttatccaacatcaattttattacccctagtgccgttaattaataaaaatattgttaaatcaaacaatatcataattgactctaaatctggttattcaggtgcaggcagaaatgttcataaaaaatataacaacaaatttttaaatgagacattgagtgcttatggtttagcttttcacagacacaattca

SEQ ID NO: 215451 - DNA, 703 bp, Unknown
  Bacterial polypeptide expressing nucleotide sequence isolated from the Sargasso Sea
atgtctaagataaatgttcttatttttggatcaactggttatataggaattcaactaacaaaaattttagcaaaccataaaaaagttaatataaaatatctttgtggaagttcttcaataggtaaaaaaatatctacctatgataagagtttagataaatataatcttcccaaaatagttaaatttaataaaaattttttatcatctgtagatgttgtttttacagctttaccaaatggtgagtctcaaaaaatttcaaaacttttattaaaaaaaaatattttaatagatttgtcagcagattttagacttaataaatctagtgatttttttaaatggtataaaattaaacacaaagcaaaaaatatgatcaaacatagtatttatgcattacctgaaattaaaagaaataatattaaaaattcaaaaataatttcgtgcccaggatgttacccaacatctatattgataccattaattccattgcttaaaaaagatttaatttctaataataatataataattgactctaagtcaggatattctggtgcaggtagaggagttcataaaaaatataaaaatcaaaatctttatgagtctcttaaggcttatggtctagccgtacatagacataacagcgagattcagcaagaattagatattaacacaagtaaaataaataattttcaatttacacctcatt

SEQ ID NO: 215452 - DNA, 585 bp, Unknown
  Bacterial polypeptide expressing nucleotide sequence isolated from the Sargasso Sea
aatgcctaagcttaatgcattagttgctggatcaactggatatattggtgttcaattaattaaattattagttaaacacaaacatattaatattaaacacctttgtggaaactcttctgtgggtaaacacgttaaattttacgataaatctttatctaaatataaattaccaaaaattttaaaatttaataaaaaattattaaaagacgttcatgttatttttactgcacttccaaatggggaagcgcaggatatatctaaacatttaagcaaaaatcatactctaatagatcttgctgcagattttagattagaaaaagcttctgattatttaaagtggtataaacaaaaacatcgagcaactaatttaataaaaaaaagtatttatttacttcctgaaattaatagaaaagagattaaaaaatataatattatttcatgtccaggatgttatccaacatcaatattgcttcctctatttcctttatttaagaaaaatttaattaaattaaataatattataattgattcaaaatctggatattcaggcgctggcagaggtgttcacaaaaaatataaaaacaa

SEQ ID NO: 215453 - DNA, 132 bp, Unknown
  Bacterial polypeptide expressing nucleotide sequence isolated from the Sargasso Sea
atagcaaatataaagataaaataataatattgtgtgcaattgataatttgattaaaggtggtgggggacaagctgtgcaaaatatgaattattattttaaatttaatgaaggtgaaggcctaaatgtataaa

SEQ ID NO: 215454 - DNA, 316 bp, Unknown
  Bacterial polypeptide expressing nucleotide sequence isolated from the Sargasso Sea
gaggtatacttagtacaatttattgttgatttaaaaaaaggagtaccattaaataaagccaacattgaattaaagaaattttataaaaatgaaagatttgttaaaatttgtaatctcaatacttatttgagtactaatgatgtaataaatacaaataattgcattatttctgtttgtaatagcaagtataaggataaattaattattatttcagttattgataatttaataaaaggaggaagtggtcaagcagtgcaaaatatgaatatacgttataattttgatgagaacgaaggtttaaatggtaaaatataat

SEQ ID NO: 215455 - DNA, 388 bp, Unknown
  Bacterial polypeptide expressing nucleotide sequence isolated from the Sargasso Sea
atgaaaaaaaaaatcaaagtagccgttttaggctcaactggctatgttggaatggagttagtaaaaattttatcaaatcactcatatgtagatataaattttttaggatcagaaactattcatggtggatatttaaataatattgataatacaaaagtatataatcaacttcctcttttaaaaccaaatgatagttttaatgctgaagatagtgattatatattcctagctttacctcatgcagtatctaataaatatgtaaaaaaatattttaataaaattaatattatagatttatcagctgactttagattagataattttgaagtttataaaaagaattatggcaatgaacatgaatgcaaagagtatttaaataattttattt

SEQ ID NO: 215456 - DNA, 777 bp, Unknown
  Bacterial polypeptide expressing nucleotide sequence isolated from the Sargasso Sea
aaaaagtaagtgattgtataaagctcgatacagatttagataaaaaatttttagaaccctcagcagataacttatcacattgtgatgtagttttttttgcgtctcctaatggtgtagctatggatatggcaagggatcttgtaaaaaatgatataagattaatagacatctctgctgactttaggatacctgatgctgaaatatgggagaagtggtatggccaaaaacacacatctccagaactcattgaacagtccgtgtatggtttgcctgagatgaaaaatcaaagagataaaatatcaaatgcaaaaataattgctaatccgggttgttaccctacatcatcattattaagtctcttaccaatacttgatatgattggcgaacaaagaattatcatcaatgcaacttctggtataacaggagctggcaggaatcttaatcctgataagttgtttgcaccagggaccgaaaattatcaagcctacgcagtggcaaagcacaggcactatcctgaaatgttaaatcagatacagcatataaataaaaatgcagatgtattatttgtgccacacttaagttcgattgaaagaggaatatactctactcattacctaactttaagagatcttgatttagatcatctataccatatctataatgattattataaagactctcagttcataaaaattatcaatcagacttatcctaaacttggtgaagtcaacaccactaatgattgtttaatctcactattttcatcctcagaataga

SEQ ID NO: 215457 - DNA, 127 bp, Unknown
  Bacterial polypeptide expressing nucleotide sequence isolated from the Sargasso Sea
acaaacgtgaaagataaaatagttattttttctgctattgataatttgataaaaggcgcttccggtcaagcaatacaaaatatgaatttaactttcaaatttcctgaaactcttggtttaaaatgag

SEQ ID NO: 215458 - DNA, 466 bp, Unknown
  Bacterial polypeptide expressing nucleotide sequence isolated from the Sargasso Sea
aaatcttaaaaaaaaatttagtcacaaaaacatttattcatctattcaatcttatgccatttacaatcacagacacagaagtgaaatcgatcaagaattatcaaccgcttctaagtcaaaggtaaaatatgtatttacaccaaccttgatacctacatttagaggaattctgtcagcaatttatgttgataagaataaaggtgttactttaaaaaaaattcataatgagttggttagatctcataaaaaaaatcattttgttaagattttaaaaccaaacataaatattggcacaggaaacgttattaatactaatatttgcgaaatatctgtctgtgaattaaaattaaaaaataaagttttgattctttcagcaatcgacaacctaattaaaggagcaggaggacaagccgtgcaaaatatgaacataatttttggtttaaaagagaatgtaggtttaaaatga

SEQ ID NO: 215459 - DNA, 448 bp, Unknown
  Bacterial polypeptide expressing nucleotide sequence isolated from the Sargasso Sea
taaagataaaaatctatatcattctttgagtgcttacggagtcggttttcatcgtcacaattctgaaatagatcaaatgttaagaaaatttactaagaaaaaatttcaatttagttttactccccacttatcaccaatgtttagaggtattctgagtactatatatgttgatttagaaaataatatttcacaaacaaaagtattaaaaacattaattagtttttataaaaatgaaagttttgtgaaaatattaaagtctggcacattgttaagcaccaatgacgtaattaatactaacaattgttatatttcagtgtgtaaatctaaatatagtaataaaataatcattctatctgctattgataatttgattaagggtggggcaggtcaagctgtacaaaatttaaataataaatttaattttcctgaaaagactgggttaaaatga

SEQ ID NO: 215460 - DNA, 805 bp, Unknown
  Bacterial polypeptide expressing nucleotide sequence isolated from the Sargasso Sea
tctacaggttatgttggtatggagttggtaaaacttttatcaaatcatccatttataaatatagtttttttgggatcagactctttaagtaatgaatatttaaaagatattgaaaacaaaaaaacatacgtaaatctaccaattttaaaaaacaacaaatcctttgatgcttctacctcagattatgtatttttagctcttccacatgcagtttctaatatttttgtaaaaaaatattacaataagtgtaaaataattgatttatctgcagattttagattggatagtttaaatacatataaagataattatggagataatcatacttgtggagaatatttaaataattttatttatggattacctgaaattaatagatcaaacatatctaaagctaaaaatatttctgtaccaggttgttatccaacttcaattttattgcctttaatacctttatttgaaaaacaactaatttttacagaagaaataatagttgattcaaaatctggctatagtggagcaggaaaaaattttgataataaaaatataaaatcaaaaaataatttaaatttttataattacaatacaaacacacacagacatatagcagaaattaaacaagaacttttaaaaaaaacatcaaatcagaaaatatcattttcatttaatcctcatatattacctaattttagaggcatgatgtctacaatttattgtgatttaaataacaatattaaaaaaaatgatattatatatatttataaaaatttcgaaaaaaataattactttattaaatatatagagg

SEQ ID NO: 215461 - DNA, 244 bp, Unknown
  Bacterial polypeptide expressing nucleotide sequence isolated from the Sargasso Sea
aattgattgctttaaatcatcacctttcataagagtacaaaataatactaagctctctaatgtaattggatcgaactattgtgatatttcattatcattcaaagataatagacacttcgttgtagaggcgtgtttagataacttagttaaaggtgcctcaggtaatgctgtagagtgtatgaatattatttttgatttcgatcaaacattaggtttgaaacaaatgattccattatatctatga

SEQ ID NO: 215462 - DNA, 340 bp, Unknown
  Bacterial polypeptide expressing nucleotide sequence isolated from the Sargasso Sea
tttacttttacaccacacttaagtcctatgttcagaggaattttgagtacaatttatgtagatttaaaaagtaatataaatataaatcacataaatacgaaattaagaaatttttataataaagataattttataaagattcttccaattaattcactcataagtacaaacgacgtaataaatacaaacttttgtcatgtatctgtatgtaaatctaagcataaaaataaattaataattttgtcagcaatagataatctgataaaagggggggcaggacaggcagtacaaaatttgaactattattttaattataatattaaaaaaggattattatgaa

SEQ ID NO: 215463 - DNA, 451 bp, Unknown
  Bacterial polypeptide expressing nucleotide sequence isolated from the Sargasso Sea
atttaaacacaaaaatttatatgattcgactcatgcctacagcactaagtaccacagacatattgctgaaattgatcaagaatttagaaaatattcgaaaaaaaatattaatttcagttttaatccatatatacttccaacatttagaggtattttaacttctatatatgctgagttaaatgaaggatcatcctctaaaaagttaagaaatgaattaatcaaatattataaaaaagataaattcataaaaatattaaaattaaattcagaacttggttctggaaatgtgataaatacaaataattgtgaaatttctatttgcaatactagaattaagaataaaattgttattttttctgcaattgataacttaataaaaggagcttctgggcaagcaattcagaatatgaatctaatttttaaatttcctgaaaatcttggtttaaaatga

SEQ ID NO: 215464 - DNA, 691 bp, Unknown
  Bacterial polypeptide expressing nucleotide sequence isolated from the Sargasso Sea
ttgtcggcagattttagacttaaaaaagcaaaaaattataaaaattggtataaacaaaatcacaaatcaaaaaaaaatattgccaatagtatttatgcattacctgagattagtagagatagaataaaaaaatttaaaataattgcatgtccaggatgttatccaacttcagtgctactacctttaattccactattaaaagaaaaaatagttaatgaaaaaaatataatcattgattctaagtcaggatattcaggagcgggtagaggagtccatataaaatataaaaataaaaatttatatgagtcacttagtgcttatggagtatcaaatcatagacataaccctgagattgaacaagagttaaataagtatactaaattaggggttcaattttcttttacacctcatctgagccccatgttcagaggtattataagcactatatatttagatttaaaaaaaaaatcaaatgttagcaaaatttcaaaacatctaactaaattttataaaaaagataattttataaaaattttaaaaccaaatacttttttaagcacaaatgatgttattaatactaattattgctatatttcagtttgtaaatcaaaatataaaaacaaaattattgttttatcagccatagataatttgataaaaggtgggacaggccaggccattcaaaacttaa

SEQ ID NO: 215465 - DNA, 629 bp, Unknown
  Bacterial polypeptide expressing nucleotide sequence isolated from the Sargasso Sea
tgaaataaatagaaatgagattaaaaaatacaacattatttcatgcccaggatgttatccaacatctatattgctcccccttgttccattatttaaaaaaaatttaattaaatttaataatattataatagattctaaatctggatattcaggtgctggtagaggtgttcataaaaagtataaagataaaaatttatatgaatctttaagtgcatacggtgttggatttcatcgtcataattctgaaataaatcaaatgttaagaaaatttactaaaaaaaaatttcaatttagttttacacctcacttatcaccaatgtttagaggaattttaagcactatatatgtagacttggaaaaaaatgtttcacaatcaaaaatattaaaaatactaaattctttttataaaaatgagaattttataaaaatattaaaaactaatacattaataagtactaatgatgtaattaatactaacaattgttacatttcagtgtgtgaatcaaaatacagtaataaaattattattctttcagccatagataatttaattaagggtggcgcaggtcaggctttacaaaacttaaataataaatttaattttcctgaaaagactggtttaaaatgaa

SEQ ID NO: 215466 - DNA, 369 bp, Unknown
  Bacterial polypeptide expressing nucleotide sequence isolated from the Sargasso Sea
gtgaataaaaaattaaaaataatcgacctatctgctgattttagattatctgacagttcagtatataaaaagttttatggtagagaacatgcagcaaaaaaattgattaataattctatttatgctttatccgaatttacaaagaacaaattaaaaaaatttaaaataatagcctgtcctggttgctatcccacatcaatacaattacctttaattccgttattaaagaaaaatttaattaataaaaagaatattataatagactctaaatctgaatattctggtgctggtaaaaatttaaaaaagaaatttaagcataaaaatattttttcatcaattcatgcttatggcacctttaagcatagacat

SEQ ID NO: 215467 - DNA, 466 bp, Unknown
  Bacterial polypeptide expressing nucleotide sequence isolated from the Sargasso Sea
tattcattaccagaaatttcaaaacatgaagttaaaaagtttaatataattgcatgtcctggatgttacccaacctcaattttattacctttaattccattggtacaaaaaaaactaattaacctaaaaaatattataattgactcaaaatcaggttattctggagctggcagaggtgttcacaaaaaatataaatatcaaaatttatacgagtcaatcagtgcttatggagttggttttcatagacataattcagaaatagagcaaactttaaaaaaatattcaaaaaagaaaattgtatttaattttactccacatttaacaccaatgtttagaggaattttgagcacaatttatatagaggttaaaaataatgtttctcaaaacaaaatcaaaaaagttttaactgattattataaaaacgatattttcattaaaattttaaaaaacaacagttttataagta

SEQ ID NO: 215468 - DNA, 631 bp, Unknown
  Bacterial polypeptide expressing nucleotide sequence isolated from the Sargasso Sea
atgtcatataataaaattaaagtagcggtggccggggccacagggtatgtaggtttggatttggtaaaaattttatcatcacatccaaaggtggatattttatatctttgcgcacaaaaaaaattaggtaaaaaaattcaattttttgataaaagaattaaaaaaaaattacctaaattgacaaatcttcaatcagtcgaatggaaaaaactggatgtactattcacatcattgccaactggtcagtcgcaggttttagttaacaaactaattaagtttaaaaatctcaaagtaattgatttagctgctgattttagaattaatgataagtcagtatataaagaatattacggcaaagactatagatcaaacgacatattaaaatcttcaatttattccctatcagaatttgttaaagataaaattaaaaaatttaatataatttcttgccctggatgttatccaacgtctatacaaatacctttattacctttgataaaaaagaaattaataaacaaagataatattattatagactcaaaatctggtttctcaggagccggaaaaaatataaagaaaaaattttcccataaaaatattttttcgtcaatacatgcttatagtatttata

SEQ ID NO: 215469 - DNA, 511 bp, Unknown
  Bacterial polypeptide expressing nucleotide sequence isolated from the Sargasso Sea
aattcaggacatataataattgattcaaaatctggaattagtggtgcaggaaaaaaatcagtagaagaaaatttagttaacgaattaaaaaataacttttactcatattcagtaacatctcataaacattttcctgaaattgaccaagagattaagaaagtaagtaaaaagatttcttttacttttattcctaatcttctgccagttttttgtggtttacaatcaaatatttatattgatcataaagatgttgaattaaatcaaattagagatgttatagatggttattatgatggagaattttttataaaaataaaaaaagaaatacctgtaaaactatccgaggttcagggaacaaacaatgttttaataaatatattcgaagattacgaaaaaaaaaaaattttaataattagctccattgataatttaattaaaggtgcatcaggacaggcaattcaaaatatgaacttgatgtttggtttcaaagagaatgaatcactaatctaaa

SEQ ID NO: 215470 - DNA, 613 bp, Unknown
  Bacterial polypeptide expressing nucleotide sequence isolated from the Sargasso Sea
ttgagagcagatttaaaagttgctataatagggccttctggatacacagggcacgaaataattaggatattacttaagcaccctaatgttaaaattaagatattaataggaaataagagtgaaggtaaacacatttcagaaatcttttcttctttatctcaaattgctttacctaaaataaaaagtctaaaagctgtaaatttttctaatattgatattgtcttttcttgtatgcctagtggtaacttagatagtattattcagttaatacctaaggatgtcgtagtaattgatctttcagcagattttagaataaaagatgttaaattatttgagaagtactattcaaaacatcaaagtccaaagtatttaaaaaagtttacttatggtctaacagaatttaatagaaataagattaaaagaagcaggtatattgcttgtcctggttgttatccaacatcaattttaattccaattctaccacttattaaaaaaaatataatttctaacaatgacattatagttgattctaaatcaggtttatcaggtgcaggaagaaacactaaacaagatctactatttagtgaaaattataattcttttaaagcttatg

SEQ ID NO: 215471 - DNA, 627 bp, Unknown
  Bacterial polypeptide expressing nucleotide sequence isolated from the Sargasso Sea
tatggttaataaattaaatattgctatcgctggcgcaacaggatttgttggattagagcttataaaaaaaatatattatcatccttcagtagagataaaatatctgtttgttaaagatagtatagatgaaaatatttatgaaaatttacctaaagaaattaataaattacctgaattaaaaaaatttgatgtaagtcttattaataaatgtgatgtatttttttcttcactaccacattctgagttacacaaagttattaatgatatttcagaaaaagttataattattgatttatctgctgattttagattaccaaatagcaaaacatatcaaaagtggtacaacacagagcacaaaagtccaaatctattaaataaagcagtatatggtttatctgaaatttatagagatcagattaaaagtagtgatttaatagcgtgccccggttgttatccaacttcaatacttttaccattgataccattgttaaaaacgaaagatattgaattagaaaacataattgcagatagtaaatcaggttattcaggtgcgggtaaaaaaatttatagtagtgatcaatacccaaatttaaatcaaaatattgcaatctatggcgttggtaatca

SEQ ID NO: 215472 - DNA, 597 bp, Unknown
  Bacterial polypeptide expressing nucleotide sequence isolated from the Sargasso Sea
tatgtcaaagcttaatgtacttattgcaggatcaactggatatataggtgttcaattaataaaattattaataaaacacaagcatgttaatattaaatatttatgcggaagctcttcaataggaaaaaaaatttcttattatgaaaaaagtttaagaagtaaaaatcttccaaaaattataaaatttaacaaaaagctacttaataatattgatgtaatttttacagctttaccaaatggagaaactcaaaaaatttcaaaatcattattaaaaaaaaatactttaattgatttatcggcagattttagacttagaaaagctaaagattttaaaaaatggtacaaaattaaacataaagcaaaaaatttaatcaaaaaaagcatttattcattgccagaaattacaggtacaaaaattaagaaatattcaattatttcatgtcctggttgttatccaactacaattttactgccactaatacctttaatcaaaaaaaatttgataaataacaaaaatattatcatagattcaaaatctggatattcaggagctggcagaagcgttcataaaaaatataaaaataaaaatttatacga

SEQ ID NO: 215473 - DNA, 341 bp, Unknown
  Bacterial polypeptide expressing nucleotide sequence isolated from the Sargasso Sea
atatacatttaatccacacttaataccgagttttaggggcatactctcatcaatttatataaataaaaaaaaaaatgtaccattgaacaggattgttaaagctctaaagtccttttacaaaaataattattttatcaatgtatataaaccaaatactcaaatgggcactggcaatgttcttaatactaatttttgcgacatatctgtttgtcaaacaagacttaaaaataaaattgtaatattttcagcaattgacaatttaataaaaggagcagctgggcaagctatccaaaatatgaatttattatataatttaaaagaaaattcaggattaaaatgaa

SEQ ID NO: 215474 - DNA, 489 bp, Unknown
  Bacterial polypeptide expressing nucleotide sequence isolated from the Sargasso Sea
attgcccaatggtgaagctcaagccatttcaaaaaatttgaatgataaaaatgtattaattgatttagcagcagattttagactagaaaaagcttctgattataaaaaatggtataacaaaaaacataaagctttagctaatattaaaaaaagtatttattctttacctgaaataacaggaaaaaaattaaaaaattttaaaataatttcttgtccaggatgttatccaacttcaattcttataccgctgcttccgttattaaagagtaaattgattaaaaaaaataatattataattgactctaaatctggatattctggagcgggtagaggtgtacataaaaaatataaagataaaaatttatatgaatctcttagtgcttatgggattggctctcatagacacaatcctgaaatagaccagatgataaaaaaattcacaaaggtaaaatctaactttgattttactccacatctatcaccaatgtt

SEQ ID NO: 215475 - DNA, 505 bp, Unknown
  Bacterial polypeptide expressing nucleotide sequence isolated from the Sargasso Sea
aatgaaaaagaatgtttttatagatggtgaaattggaactactggcttacaagttcacgaaaaattaataaaacaccctaatgttaaaattttatcagtcaatcaagataaaagaaaagacccagattataaaaaagaaatgttcaaagcatcagatgtatctttcttatgtttgccggatgatggtgcaattgaatctgttgaaacagccaatcaactaggaaataaatccccaataataattgacgcttcaactgctcataggataaatccaaattgggcatatggtctcccagaattaggtttggaatttagaaaaaagttattaaactctaaacgtattgctgttcctgggtgttattctacaggtgcaaatgtgatcctaaagccacttttacagaataattttttaagtaataaaaacccaatcgttatttatgctgtaagtggttattctggtggaggaaaggcaatgataaattactttaaaggagaagatcatgag

SEQ ID NO: 215476 - DNA, 295 bp, Unknown
  Bacterial polypeptide expressing nucleotide sequence isolated from the Sargasso Sea
gcaaataacgccgccccgaccgaacatttgggaagtgctcgaccaagtttatgccagcgagcgatatgtaaatgtccactctatagaaaacgcactagcatactcagaccctgcattcgaccctcggtcgacaaacggcacaaaccgtgttgacatttcagtaataccaaacgccatcggtcacgccttgatcatcattcaaatcgacaatctgggtaaaggcgcttctggggccgcagtacaaaacatgaacctcatgcttggcctgccagaaaacgcagggctaacctcttaa

SEQ ID NO: 215477 - DNA, 562 bp, Unknown
  Bacterial polypeptide expressing nucleotide sequence isolated from the Sargasso Sea
tatgtcagtaaaaaaattaaatattgttatagctggagccacaggttttgttggactcgatttaatcaaatttttatcaaaccatccaaaagttaaaataaagtatttatgtgcccaaaagaaaattggaaagaaaattcagtattttgataaaagaattacaaaaaatttacccaagatatcaaaaattacatcagtagattgggctatgattgatattttgtttacggcattacccaatggagaaagccaaataatttcaaaaactctagtgaataaaaaattaaaaataattgacttatcagctgattttagattatccgatagttctgtatataaaaagttttatggtaaagaacatacggcaaaaaaattaattaataattctatttatgctttatctgaatttacaaagaacaaattaaaaaaatttaagataattgcttgcccaggctgttatcccacgtcaattcaattacctttaatcccgttattaaagagaaatttaattaataaaaagaatattataatagactcaaaatctggatattctggtgctggt

SEQ ID NO: 215478 - DNA, 663 bp, Unknown
  Bacterial polypeptide expressing nucleotide sequence isolated from the Sargasso Sea
aaaaaaatataaataaaagtatatatgcattgccagaactatctaaatctgatgttaaaaaatacaaaattatatcttgcccaggctgttacccaacatcaattttaattccgttaatacctttaattaaaaaaaaattgataaatataaataatatagttatcgactcaaaatctggttattctggagctggaagaggtgtccataaaaaatataaagataaaaatttatatgaatcattaagcgcttatggcgttggttttcatagacacaactctgaaatagcacaggaactaaataaaattacaaataaacatgttaattttttatttactccacatttatcacctatgtttaaaggaattttaagtactatttatgttgatttaactaccaaatcaaatttatcaaaaattcacaatgaattaattaaattttataaaaatgattattttgttaaaatttttaaaccaaatacatttttgacaacaaatgatgtgataaataccaatttttgcaatatatctatttgtaaatctaagtataaaaataaagtaattattttgtctacaattgacaatttgattaagggaggagcagggcaggcagtgcaaaatttaaaccattattataattttaatattaaaatgggcttgaaatgaa

SEQ ID NO: 215479 - DNA, 538 bp, Unknown
  Bacterial polypeptide expressing nucleotide sequence isolated from the Sargasso Sea
tatgtccaagattaatgttcttattgcaggttccactggatatattggtattcagttagttaaaattttaaataatcataaaaagataaatataaaatatctttgtggcagttcatccgttggcaaaaaaatttcattttttgataaaactttaagtaaacatagattgccaaaaataattaaatttaataaaagattattaccaaaagttgatgtcatatttacagcattaccaaatggtcagtctcaaaaaatttcaaaatatttattaaaacataatacattaattgatttatcagcagattttagacttaaaaaaactaaagacttttttaaatggtataaaattaaacataaagcgaaaaaaatgataaaaaatagtatttatgctttaccagaaattaaaaaaaatttaattaaaaataaaaaaataatttcttgtccaggatgctatcctacatcaattttattacccttgattccattgcttaaaaaaaaattaatttcaaataataatattattatagattccaaatca

SEQ ID NO: 215480 - DNA, 587 bp, Unknown
  Bacterial polypeptide expressing nucleotide sequence isolated from the Sargasso Sea
ctgtccagggtgtaccccaacatctatattacttcctcttattccattaataaaaacaaaactagtaaaaaccagtaatattattatcgactcaaaatctggatattctggtgcaggaagaggggtgcacaaaaaatatataaataaaaatttatatgagtctctaagtgcttatggcataggttttcatagacataaccctgaaataaaacaatactttacaaaatactcaaaaaaaaaggtaagttttatttttactccacatttatctccaatgtttagaggaattttaagtacgatatacgtagattgtgaaaaaaatgttactcaaaataaaataattagtaaattaaaaagtttttataaaaaagatcattttgttaagatacttaaaaaagaccaatcaataagtacaaatgatgttataaacacaaataattgtgtaatatcagtttgtaaaagtagtgtgcacaataaattaattattctatcatcaatagataatttgattaagggtggtgcaggtcaagcaattcaaaatttaaatataaaatttaactttccaaagaaaatggcacttatatgaa

SEQ ID NO: 215481 - DNA, 464 bp, Unknown
  Bacterial polypeptide expressing nucleotide sequence isolated from the Sargasso Sea
agttcacaaaaaatataaagataaaaatttatatgaatctttaagtgcatatggggttagttttcatcgtcacaattctgaaatagaccaaatgttcaaaaaatttactaagaaaaaatttcaatttagttttactcctcatttatctcctatgttcagaggtattctgtctactatatatttagacttagaaagtaatatttcacaaactaaagtattaaaaactttaactaatttttataaaaaagagaaatttgtaaaaatattaaaatctgacgctctattaagtactaatgacgtaataaatactaataactgtcatatttctgtgtgcaaatctaaatatagcaataaaataatcattctatctgcaattgataatttgattaagggtggagctggtcaagctgtacaaaatctgaataataaatttaatttttctgaaaatactggattaaaatgag

SEQ ID NO: 215482 - DNA, 382 bp, Unknown
  Bacterial polypeptide expressing nucleotide sequence isolated from the Sargasso Sea
gatgacctattccacatccaccaatgcaacgccccaaaaggtgtttatagatggacaatccggcacaaccgggctgcagattgatcgacttctggcttgccacgagcaaattgaaatcctgcgtattcctgatagcgatcgtaaagaccctgaggccaaacaagcatttctcgacgacgcagatattgtcgttctttgcctgccagacgatgcagcaagagagaccgcatctcagtgtcgcgacaccacacgaattctggatgccagcaccgcccatcgcgttgatcctgcctggacatatggtctacctgaactcactcaggatcgaaggcagaagatcgcggacgccaaccgtgtctcgaacccgggatgctggccaacc

SEQ ID NO: 215483 - DNA, 923 bp, Unknown
  Bacterial polypeptide expressing nucleotide sequence isolated from the Sargasso Sea
gtttcagggccgtgggatgaaatttcattcgaagtacaacgcggggaggtattaggttttctcgggcctaacggtgccgggaaatcaaccaccatgaagatgctgacctgttacctgcctcctacttcgggaaatgcggaagtcaatggcttcagcattaaaagccaaagactaaaggtgcaggagcagatcggatatttaccagaaagtgcaccgtcttacaacgaaatgcaggtggaagaatttctcagtttcatcggcgaagtcagaggatatacgggcgcagaattaagaagaagggtcggtcgggttttggaattgacctcactccaggaagcccgcaaacaaatcattgataccctttccaagggattccggcagagaacctgccttgcccaggcactcattcacgatccacctgttttgattcttgatgaacctactgatggacttgatccgaatcagaagcatgaggtgcgggaattgatccgcaggatgagtgaagaacggacgattcttgtttccacccacattcttgaagaagtcgaggcggtctgcactcgcgcattgatcatttcggaaggccggctcgtaggactggggacccccgatgagctattatcacaatccatctaccggaatgcgatcacgctaagtgtgtctggagtcaatgcagaaacgttgttagaagatctcaacggtctggaacaggtctattcggtggaacgtcttgaagatatgccgaatggtgcgattacggtccgggtctttcctaaagaccgcgaatcgatttccagtgagttggagaagtttttaaagaaaaagaaaatgtccattgaacagttttttgtggaacgaggaagactcgatgaggttttccgcaaactgacccttggggaattaagctgggggtggaatgaaag

SEQ ID NO: 215484 - DNA, 745 bp, Unknown
  Bacterial polypeptide expressing nucleotide sequence isolated from the Sargasso Sea
ttatccaaacattcaaaagcaaacattttatatttatgtgccaataaatctgcaggtaagtcgatttattcctttgataaaaaaataaataaaaaaaaactacctaaaataacaaaaattaaaaatgtagattggaaaaaaattaatattctttttacttcacttccaaatggagaggcgcaaaaaattgcaaattttttaccacaacatataaagctgattgatttatctgcagattttagattggataatcataaagattataaaaaattgtacgggataaatcacaattgcaaaaaactaattattaaatctatatatgcaattactgaattttctagaaatagtttagataaatataaagtaatttcatgtacaggatgctatccaacttcagtccagattccattaatcccactgataaaaaaaaaggttattaatacaaataacattattatcgattgtaaatcaggctactctggagcagggaaaaatattaagaaaaaatttaattttaaaaatttgtttaattctgtttcagcatatggtgttggttcgcatagacacatggctgaaattgatcaagaattatcaaaaatttcaaaaagaaaaattcaggtattttttacaccacatttaattcctatgtttagaggaattttatcaactatatatttagaaacaaaagaaaattataatgcttttaagatttttaaattaattaaaaaatatcacaaaaataatt

SEQ ID NO: 215485 - DNA, 164 bp, Unknown
  Bacterial polypeptide expressing nucleotide sequence isolated from the Sargasso Sea
taaaacacaaataaactgtgaaatttcaatttgtaaaacaaaaataaaaaataaaattattattttttcagcaatagataaccctgttaaaggagcttctggtcaagcaattcagaatatgaatttaatttttaaatttccagaaaaaacgggacttaaatgag

SEQ ID NO: 215486 - DNA, 184 bp, Unknown
  Bacterial polypeptide expressing nucleotide sequence isolated from the Sargasso Sea
ttgagtacaaacaatgttattaatactaataattgtcatatttctgtgtgtaaaagtaaatataaagataaagtaattatattgtcagtaattgataatttgattaaaggtggaggaggtcaagctgttcaaaatatgaatatttgctttggatttaaagaaaatgaaggattaaatgtttaaa

SEQ ID NO: 215487 - DNA, 793 bp, Unknown
  Bacterial polypeptide expressing nucleotide sequence isolated from the Sargasso Sea
tgtgacctagttttcacagcagtgccacacggaactgcaactgatattgtcaaagcattgtatgacagaggaatgaagattattgatttgagcgcagactaccgtttgcacaatccagaagattacggaaaatggtacggatgggaacatccacatccagactatttggcaaaatctacatttggcgttccagaattacatagagaagagattaaaaaatcacaattagtttcttgcccaggttgtatggcagtaacatcaatgcttgcattaaatccattaatcaaaaatgatttgattgatactgatcacattattgttgattcaaaaattggttcatctggtgccggtgcaggtgcaggtacatcacatgcaatgcgtgcaggagtcatacgaccatacaaaccagcaaaacatagacacactggagagattgaacaagaactaagtcaaactgcgggtaagaagattaaggtagcaatgagtccacatgcagtggatgtggtaagaggaattttatgtacaaatcatacattcctcaagaaagatattgatgaaaaagatctttggaagatttatagatcagaatatagtgaagaacgatttatcagactgattagagataaagaaggtctacataaattcccagacccaaagtttttggttggttcaaacttctgtgatattggatttgacctagatagagagaacaacaggttaattgcattatcggcatcggacaacctaatgaaaggtgcagcaggttctgcaattcaaaacatgaatgtcatgt

SEQ ID NO: 215488 - DNA, 385 bp, Unknown
  Bacterial polypeptide expressing nucleotide sequence isolated from the Sargasso Sea
ttgcctaaaattgttaaatttaacaaaaagtatctaaatgatgttgatgttgtttttacctctttacctaatggtgaggctcaaattatatcaaaaaatctcttaaaaaaaaatttactgattgatctttcagcagattttagacttgaaagttctaaaatatataaaaaatattataagattcctcatggtgctaaaaaacaaattaaagatagcatctattcaatacctgaattatctaagaaaaaagttaaaaattataaaataatttcttgtcctggctgttatccaacatcaattttaatacctctaattcctttgattaaaaataatttaatttcctctaatatagtagcagattctaaatctggatattctggtgctg

SEQ ID NO: 215489 - DNA, 364 bp, Unknown
  Bacterial polypeptide expressing nucleotide sequence isolated from the Sargasso Sea
atgaacagcactctaacaaaagtaggaattcttggaggttcaggttttactggagaagagctattaaggattctttctagtcatcctaaaactaaagtaatggcagttagttctagggaattactaggacaaagtacaaatgaaattgtagaaggatctaacctagtctttgtagagcctgaagatgatattttttatgattgtgatgtagtcttctttgcgactcctcacggcgtatctatgaatatggtcagtaccttcattaataaaaatataaaggtaatagacctttcagcagattttaggttgaagaacgtgaaaatttgggaggagtggtataactctcctcacacccaagaagaac

SEQ ID NO: 215490 - DNA, 659 bp, Unknown
  Bacterial polypeptide expressing nucleotide sequence isolated from the Sargasso Sea
tatgtctaagattaatgcattagttgctggagctactggatacataggtattcaattggtcaaattattaactaaacataaaagagtcaaaattaaatatctttgtggtgatacctctgtaggtaagaaaattagctcttatgataaatacttcaataaatataaactaccaaatattgttaaatttaataaagagttattaaaaaatgttgatgttatatttactgcattacctaatggagaggctcaaaaaatttcaaaaaatttaaataataaaaatattttaatcgatttagcggcagattttagacttaaatcagccaatgattatttgaaatggtataaaataaaacacaatgctcctaaattaatcaaaaaaagtatttattctttacctgagttaaataatcagaacattaaaaaatacaaaataatttcttgtccaggctgttatccaacatcaattttattaccattagtaccgttaattaataaaaatattgttaaatcaaacaatataataattgattctaaatctggttattcaggtgcaggtagaaatattcacaaaaaatataacaacaaatttttaaatgagacattgagcgcttatggtttagcgtttcacagacacaattcagaaattgatcaggaactaa

SEQ ID NO: 215491 - DNA, 676 bp, Unknown
  Bacterial polypeptide expressing nucleotide sequence isolated from the Sargasso Sea
atgaagcagaaactaaatgcaggtatcattggttcaactggttacacgggtagagaaatttgtcgattactattaaaccacaatagtataaataaaataattccttttgctcgagaagacaatactttcgaaagtgttcatccaaatttattggggtcagaactagaatttgttaatataaataaattagaaaatattgtggacgatctagatgttgtattcttttgcgcaccatctggtactgctatgaatatgattccaaaaatatataacaatgatataaaactaattgatttgagtgcagattttagatttaaagataccaatctatattttaatacctatggtatgaagcataaatgtccaaaaatactggaagatgcagtatatggtttgacagaactaaatagaaatcagattaaggatgcaaagcttatcgctaaccctggatgttatgttattacaataatattgggtctttatcctcttattaaagagaatataattaatttggataaatttatacatgtgaatgccgttaacggaacaacaggtgccggtataaaaccaaaaaaagaacttcttttttcggaattagatagtaatgtattgccatataaccttgaaggtcataggcatggccctgaattagaatctcatttgacttattactctt

SEQ ID NO: 215492 - DNA, 550 bp, Unknown
  Bacterial polypeptide expressing nucleotide sequence isolated from the Sargasso Sea
tatcctttaattaatgaaaatttaattcgtttaaaagatattattattgattcaaaatctggatattcgggtgcgggaagaggtgtgcataaaaaatataaaaataaaaacttatacagctctttaagtgcatatggtatagctgatcatagacataattctgaaatacaacaagaattaaataaagtatgtaataaaaaaatagaatttacttttacaccacatctttctcctatgtttagaggtatattaagcacaatttatttaaatctaaataaaaatgtaagtatttacaaaattacaaatgtaattaaaaaatattattctttacataaatttattaaaatagctaaacccaacacctttataagtacaaatgaagtaattaatactaattattgtaaaatttcagtaaatagttcaaaatcaaaaaaaaaaatcatcattttatcagctattgataatttaattaaaggcggagcaggacaagcagttcaaaatttaaacataatttgtggttttaaaaaggatatgggtttaaatgtataaa

SEQ ID NO: 215493 - DNA, 687 bp, Unknown
  Bacterial polypeptide expressing nucleotide sequence isolated from the Sargasso Sea
tatgaaagattcattaaaaattgcagtagctggagcaactggatatgttggtttggaactaattaaaattttatcaaatcacccaaaagtaaaaatagtttatctatgtgcccaaaaatcaattggaaaatcaattaatatgtttgataaacaaattaaaaaaaaaaatttacccaaaatttctaacgtaaataaaattgattggaaaaatataaacataatttttactgcgttgcctaatggggaagcgcaaaaaattgctaaaaaaattccatctaaagtaaaattaatcgatctctctgccgattttagattaaacaattcaaaattatataaaaaatggtatggaataaatcataactgcaaatatcttataaaaaaatctgtctatgctattacagaattttcaagaaaaaatattgaaaactataaaattatttcttgccctggatgttatcctacttctgttcaaataccgcttgttcctttggtgaaaaaaggaatgataaatataaataatataattattgattcaaaatcaggttactcaggagctggaaaaggaataaagaaaaaattttcttttaaaaatttatttaattctgtttctgcttatggggtcggatctcatagacatatggctgaaattgaccaagaactatcaattgcatcaaaaaaaaaagttaa

SEQ ID NO: 215494 - DNA, 727 bp, Unknown
  Bacterial polypeptide expressing nucleotide sequence isolated from the Sargasso Sea
gcgacctaccgccaagaggccgctgcacaacagcgccaagacgatgccctctgccaacaatctgtttatggcctggtcgagtgggccggcgatgctctggctgaggcgcaattggtcggtgcacctggctgttttcccacagccagcctgctggccttgatgccgctgttgcagcaagggctgattgaaggtgacggcatcgttattgatgccaaaacagggacctcaggtggtggtcgtgccgccaaagaacatttgcttctcgccgaagccgctgaatcggtaagcccctatggcgttgtcggccatcgccacactgccgagattgagctgctagcaagccgtgcggctggtcgtccgatccaattgcaattcaccccccatttgatgccgatggtgcgcggactgttggccaccgtgtacggccgtcttcgcgatccagggctcacagctgaagacctcaccaccgtgtaccaggtcacctaccgcgatcacccctgcgttgaagtgctgccagtggggacctatccagccaccaagtgggtacgtcagaccaatcgcgcggtgttgtcggtcgctgtggatcaacgcacccgccaagtcgtcgtgatgagtgccatcgacaacctgctcaaggggcaggctggtcaggctgttcagtgtctcaatgtgatggcgggcttggcgcagcaaagtggtttgccgcttctgcccttctatccctgag

SEQ ID NO: 215495 - DNA, 557 bp, Unknown
  Bacterial polypeptide expressing nucleotide sequence isolated from the Sargasso Sea
aatgcctaagcttaatgtactaattgctggatcaactggatatattggtgttcaattaactaaattattagcaaaacataagaatgttaatataaagtatttatgtggaaattcctctgttgggaaaaaaatttcatcttacgatgactcattgaagtcaaaaaaactaccaagaattacaaaatataataaaaaatatttaagttatgttgatattatatttaccgctcttccgaatggagaagctcagacaatttcaaaagatttgttaaaaaaaaatacgttaattgatttagctgcggattttagattaaaaaaaggttctgattatttaaaatggtacaaacaaaaacataaggcgttaagtaatataaaaaaaagtatctacgccttacctgaaataataggaaaatcagtcaaaaaatttagtattattggatgtccaggttgttaccctacatctatacttttaccacttattccattagttaaaaaaaaatcaattaacttaaataacatcattatagactcaaaatctggatattctggagcggggc

SEQ ID NO: 215496 - DNA, 1024 bp, Unknown
  Bacterial polypeptide expressing nucleotide sequence isolated from the Sargasso Sea
atgcgtaagctaaatgttttaattgctggatcaactggttatataggacttgaattattaaagatacttataagacatgaaaaccttaatatcaagtatctttgtgctaattcatcagctggaaaaaaattatctaaatttgaaaattattttaaaaataaaaaattaccaaaattaatcaaatttaataaaaaacttcttaaagatgttgatgtaatatttaccgcattaccagtaggggaggcacaaaaaatatcaaaatatcttttgaaaagaaacactcttattgatttagcgggtgattttagaatttcaaactcaaaaaaatttacagagtggtacaaaaaaaaacataaagctaaaaatttaattaaaaatagtatttatgctttacctgaaataactaaaaacaaagtaaaaaattttcaaattttgtcatgtccgggatgttatccaacttcagttttactgcctttaataccattagttaaaaatgatatgatttttttagacaacatagtaatagattcaaaatctggatactcaggagccggtagatctgtacacaaatcttataaaaataaaaatttgtattcatcgataaaagcatacggaattagtacgcataaacataatgctgaaattgatgaacaattaaacaaatatactaaaaaaaaaataaaagtcttctttactccacatatttctccaatgtacagaggtataattagtacaatttatttaaaattaaaaaataacttaagttctaaaaaagttattaataaacttaaaaaattttataagacggaaaaatttgtaaaaattgaaaaatttaataaattattaagtactaatgatgtcgtaaatacaaattattgtaaaatttcattatgcaaaagtagatataaaaatcattatataattttatctgttatagataatttgataaaaggtggatctggtcaagcagttcaaaacttaaatttaaaatacaactttcccaaatataaaggtttaatatgag

SEQ ID NO: 215497 - DNA, 1027 bp, Unknown
  Bacterial polypeptide expressing nucleotide sequence isolated from the Sargasso Sea
atgtctaagctaaatgttttggtatgtggatctacaggatatattggaattgagttagttaaaattttagcaagacataaaaaaatccatattaaatatctttgtggaaatagttctgtaggtaaaaaaatttcattttatgataaatccttatcaaaaaataaattaccaatcataagaaaatttcaaagaaaattattgaaagaggttgatgttattttttcagcactaccaaatggtgaagctcaaaaaatgtctaaatttttattagacaaaaacctactcattgatttatcagcagattttagattaaaaaataaaaatgaatatttaaaatggtataaaattaaacatagcgcccaaaagttaattaaaaattcaatttattcattgccagaattaaaaaaaaatcagttcaaaaatcaaaaagtaatatcttcacctggatgttatcctacttccattttattacctttggcacccctaattcaaaaaaattttatttcaaataaaaacatagtgatagattctaaatctggatattcaggagctggacgtaatgttcataaaaaatataaaaataaaaatctttatgagtctattagcgcctatggaattgcaaatcatagacacaattcggaaattcaacaagaattagatttatatacaaaaaaaaaaaattattttgactttactcctcatctatcacctatgtttagaggaattattacaactattaatgttgatttaaaaaaaaatgtagatgcaaaaaaaatacaccggttcttaagtaaattttataaaaaaagcaaatttatcaaaattaaaaaaattaattctttgttaagcacaaatgaggttataaatactaataattgtttgatatctatttgtaatagtaagaataaaaataaattaataatattatctgcaatagataatcttataaaagggggtggaggtcaggctgtgcaaagtatgaacatttattatggatttaaagaagatgaggctttaaatgtttaaa

SEQ ID NO: 215498 - DNA, 949 bp, Unknown
  Bacterial polypeptide expressing nucleotide sequence isolated from the Sargasso Sea
gatgagcacgaaagtttttgtcgacggacaggaaggcacgaccggcctgaagatttttgaatacctgtcgcaacgcgccgacgtggagatcttgcgtatcgaagaagcgaagcgcaaggacctcgaggagcgccgtcgtctcatcaatgcatcggacgtcacgttcctgtgtctgccggacgtcgcttcgcgcgagtcggcctcgctggtcgaaaacgatcgcaccgtgctgatcgatgcgagcacggcgttccgcacgtcggccgactgggcctacggcctgcccgaactggctcgctcgcaacgcgagcggctgcgcaccgcgaaacggatcgccgtgccgggctgccacgcatcggccttcgtgttggccatgcgtccgctggtcgaaaccggcgtcgtggcgccggacttcgccgcgcacgcgtactcgatcacgggttacagcggcggcggcaagaaaatgattgccgactacgaagcaggcggcaacgacaagctcaagagtccgcgcccgtatgcactcggcctcacgcacaagcatctgccggagatggcggcgcacaccggcctgaactcggcaccggtgttcacgccgatcgtcggtgacttctacaagggtctcgcggtcaccaccttcttctcgccgaaccagatggccaagaagaccacgccgcaagacgtgcgcgcgctgttcgccgagtactacgcgggtgaagccttcgtgcacgtagcaccgttcgattccgaggcgaatctcgacggcggtttcttcgacgtgcaagcgaacaacgacaccaaccgcgtcgacctgttcgtgttcggcaacgaagagcgcttcgtgaccgtcgcacgcctcgataacctgggcaagggcgcatcgggcgcggccatccagtgcatgaacctcgccatcggcgccgccgaagaagccggcttgaaacgctga

SEQ ID NO: 215499 - DNA, 1024 bp, Unknown
  Bacterial polypeptide expressing nucleotide sequence isolated from the Sargasso Sea
atgcgtaagttaaatgtactcattgctggatcaactggatatattggtattcaactagttaaactgttagttaatcacaaaaatattaaaattaaatatctttgtggcagttcttctgttggaaaaaatattgaatattttgatatatcattaaaaaataagaaattgcctaaaatagtaaagtttaataaaaaatatctaaaatatgtggatataatatttacagccttacctaatggacaagctcaaagtttatctaacttacttaataaaaataatattttaattgatttatcagcagactttagactgactaaggcaaaagagtattttaagtggtatggtattaaacataactcagttgggaatattaataaaagtatatacgcattacctgaaataagtaaaaaaactatcaaaaattataaaattatctcttgtccaggatgttatccaacatcgatcttactacccttgataccaattctaaaaagaaaattaattgataataaaaatataattattgactctaagtcaggatattcaggtgctggaagaggagttcacaaaaagtataagaataaaaatttatacgaatcacttagtgcatatggtgtaggttttcacagacataattcagaaatagaacaggaattaaacaaacattctaaaggtaatgtaacttttaattttacacctcatttaagccctatgtttaagggaattcttagtactatttacgtaaacatagactctaaaaattccgtttcaaaaatccgtaattacttatcctcatattataagaatgataaatttataaagattttaaaagttgattctttaataagtactaatgatgttataaatactaataattgttatatttcagtatgcaaaacacaatacaaaaacaaaataattattttatctgcgattgataacctgataaaaggtggggcagggcaaggtgttcaaaatatgaatatactttataattttaagtacagtgagggattaaaatgaa

SEQ ID NO: 215500 - DNA, 2107 bp, Unknown
  Bacterial polypeptide expressing nucleotide sequence isolated from the Sargasso Sea
tatgtatcgattcatcaaaagaagcggcgcgctatcgagcgccgcggttttcttcgccacgcccgcgcttgcgcagaccagcaaaccatccgacgatgcggagccgaaactattggcgccggttgttgtgcaagggcaggccgggcattctctaacgtccagcacgccggctcagcagaagcgcaagctcgacgaaacggcgggttcagtgggctttgtggatagcgagtcgtatacgaacacgtatgcctttaccctgcgcgacgtgctgaaggacgtgccgggcgtgttcgtgcagaaccgctatgggcaggagttgcgtctgtcgatccgcggctcggggattgcgcgttcttatcacacacgcgggctggaaatcctgcaggacggcataccgaccaatcaggccgacggcagcggcgattattatcagatcgatccgctcgcgttgcaggcgaccgaggtctacaagggcggcaacgggctcgcttacgggtcttcgacgcttggcggcgcgatcgattttctgacgccaactgcacacacagcggtcgcgccgaacatcttgcggctcgaaggcggcagttttggcacggtgcgcagcagtgcgcagttttcgcgcgtggtggggccactcgatttcatcggcacgttcacggtcgatcataacgacggctttcgccagcattcgcgcggtcaatatgagcagttcaacgccaacatcggttaccgcttcagtccgaacgtcgagacgcgcttctatctcggcgcatacatcgtcgatcagcaattgccgggtacgctcagcctgagcgatgcgctgaacaatccaaccaaagctgccgctagcgcgttgtcaggcgaccaggcgcgcaacacacgcacggagcggatcgcgaaccgcacgacggtgaaactcgacgtcggccaactcgacatcgacacgtgggccatccacaagagcctctatcacccgatctttcaggtcatcgaccaggacggctggacctatggcgtggcgcctcgctatacggcaacgctgaacctcggcggcatgcgcaacgacgtgattgcgggcgcacgctttttcggcggcaatacgcaggcgcggcagtacgtgaacgttgccggcaatcgtggcacgcagacactcgacgcgtcgcagaacgcctacaactacgaggcctatgtcgagaaccggctgtttttcctgccgaccgtcgcgctgatgacaggagtcaaggcgctgcgcgacgtgcgtgaatatgttgaccacggcggcctcgctgccgacccaacctataaatcggcgagccagacctacaacggcatcaatccgaagctcggtctgttgtggcagccgaatcgcgagattcaggcttttgtcgacattacccgcagccaggacacgccggatttcaccgacctcgcgcagtcgttcgcatcgaccacgcgctttacgccgttgcagtcgcaacatgcgtggacgctggaggtcgggacgcgcggcacgcgtggcgcggtgagttgggacctcacggcgtatcagtcgatggtgcgcgatcagttgctgcagtacacgacgaatccggatattccggccgctaccttcaacgccaacaagaccgtgttgcgcggcattgaagcgggagcttcggtcgatgtgtggcgcgatgttttcaagccgggttcgggagaccggattacgctgtcggggctatggaatctgagcgatttccgtttcagggacgatccgcagtacggatccaaccggattgccggcgtgccggtcaacgtgctgcgcgccgcattgagctatgcgcggccggacggtttccatgtgtcggcgaccgtggattgggtgcccgccggcgcctgggctgatgatgccaacacgctgcgcgtgccgggatacaccttgctgggcctgcaagccggaatggatttccgcaatggcgtgtccgtgttcgtcgatgccaggaatctgaccaacaagcgctacgttagcgatatcagcacggtggccaatgccgctaccgcgagtggggcgatcttttatcccggggagggaaggagtgtttttgccggcataagatacgcgttctga

SEQ ID NO: 215501 - DNA, 424 bp, Unknown
  Bacterial polypeptide expressing nucleotide sequence isolated from the Sargasso Sea
tatgaaaaaaataggaattattaatattactagttattctggattagagcttttaaggatacttagagcacatccagaagttgaaattactcaagtcacaggaagaagtatggcaggtaagaaattaagtaatgttttcagcttttataatggaaaccttgttatacaagatgaacttaaagatagtgtggatttaattttttcttgtttacctcataaagcaagcgctgaagtaattggaaaatttgttaataacggaattaataccatagatctaagcgctgattttaggcttccggttgaactttatgaatctacatatgaatcaaaacatccatacccttctttaataaataaatttatttatggtctgcctgaattaaatagaaataaaatttcttcaagtaaatttttcaaacccagg

SEQ ID NO: 215502 - DNA, 448 bp, Unknown
  Bacterial polypeptide expressing nucleotide sequence isolated from the Sargasso Sea
tataaagataaaaatctatatgagtctttgagcgcatatggagtcggtttccatcgccataattctgaaatagatcaaatgttaaaaaaatttactaagaaaaaatttcaatttagttttactcctcatttatcaccaatgtttagaggtatattaagtactatttatttagatcttgagaataaaattactccaaatacaatttataacgaattgagtaaattttataaaaataaaaaatttgtaaaagtactaaaaagagattcgttagtaagtactaacaatgtaataaatactaataattgctatatctcaatatgcaaatcaaagtataaaaataaggcaattattttgtctgctatagataacctaataaaaggaggagcgggtcaagctgtgcaaaatttaaatataaaattcaattttccagaaaaaactgcactataat

SEQ ID NO: 215503 - DNA, 271 bp, Unknown
  Bacterial polypeptide expressing nucleotide sequence isolated from the Sargasso Sea
taatttaagggattatgaagactatttttcttcccatccattcgtaaatgttttaaataaagcaccagtcgtaaaagatgtaagaggtactaatttttgcaatttgtttatacaaaaattgaaagataaagaaggattgaatatttataggataatttcagttattgataatctaactaaaggtgcttcaggccaagcaatacaaaatatgaatttgatgtctaattttgaagaaacacttggattaaataatatggcattgtatccttaa

SEQ ID NO: 215504 - DNA, 643 bp, Unknown
  Bacterial polypeptide expressing nucleotide sequence isolated from the Sargasso Sea
atgaaagattcattaaaaatagcaatagcaggagccactggttatactggtattcaattaattaaaatattattaaaacatccaaaagttaaaatttcttatctgtgcgcacaaaaatctattggcaaatcaatttctttatttgacaaaagtattaaagaaaaaaaactacctaaaatttcaaatgttagtaatattgattggaattctataaatattttatttaccgctttgcctaatggtgaagcacaaaagatagcaagaattattccaaagcacattttactaattgacttgtcagctgattttagaattgaagatcacaaagtttataaaaaatggtatggcttagaacataaagctaaacatttaataaaagaatccatttacgcaattagtgaatttacaaaacacaaaatcaagaattatagaataatctcttgtcccgggtgttatccaacttcaattcaattgccgctaattcctttgattaaagacagaatgattaatgttaaaaacattatagttgattcaaaatctggttattcaggagctggtaagaaaattgagaaaaaatttaaacataaatatttatatgaatctgttagcgcatacggagtagggtctcatagacatatggctg

SEQ ID NO: 215505 - DNA, 326 bp, Unknown
  Bacterial polypeptide expressing nucleotide sequence isolated from the Sargasso Sea
aatgaatgttgcaatattaggtgctactggttacggcggtattcaagctgttaatcttttaaaaaaaaataaaaactacaaaattacatttttaggaggtaataaaacatctggatcaaagtggaatgataatttcccttttatttatctagataatgatccttatatagaagaaatttcagtagataatatttctaaaaatgcagatgttgcattgctttgcttaccaaatggcctatcttcaactttgacaaggaaattattagatagaggggttaaagttattgatttatcagctgattacagatataagtcattagatgaat

SEQ ID NO: 215506 - DNA, 485 bp, Unknown
  Bacterial polypeptide expressing nucleotide sequence isolated from the Sargasso Sea
aatgcctaagcttaatgcgttagtcgctggatcaaccggatatattggtactcaattaataaagatattagttaagcacaaatatattaacataaaatatctatgtggtaattcgtcagtaggtaagagtatttcattctatgaaaagtcattatcaaaatttaaattacctaaaataagaaaatttaataaaaatttattagatgatgctgatataatttttacagctttacctaatggagaagctcaagatttatctaaatatttaaataaaaaaaatatattaattgatttagctgcagattttagacttgaaaaagcttcagagtataaaaaatggtataagcagaagcatcgagcaattaaacttataaaaaaaagtatctattcactacctgaaattaatagaaaagaaattaaaaattataatattatctcaagccctggttgttatccaacatctatacttttgccattaatacctt

SEQ ID NO: 215507 - DNA, 457 bp, Unknown
  Bacterial polypeptide expressing nucleotide sequence isolated from the Sargasso Sea
taaaaaatataaagataaaaatttatatcaatccttaagcgcttatggagtaggttttcacagacactcatccgaaattaatcaagaattgaagaaatatactaaatcaaaaataaattttatgtttacaccacatttgtcaccgatgtttagaggaattttaagtactatttatctagaaataaaaaaaggacaatcagtaaataaagttcatagaattttaaaaaaatttcatagaaaaaatagatttgttaagatattaaatatgaattcaatgataagcactaatgatgttataaatagcaataattgctttatctcaatttgtaaaacaaaatatagtaataaaattataatactatcttgcatagacaatttaatcaaaggtggagctggtcaagcaatacaaaatatgaatattaaatttgatttcaaatatgatgaaggtttgagatga

SEQ ID NO: 215508 - DNA, 467 bp, Unknown
  Bacterial polypeptide expressing nucleotide sequence isolated from the Sargasso Sea
tatggacaagaaaaatgttcttatatgtggtgctactggatacataggattacagctaactaaattgttatgtaaacataaaaaagtaaatattaaatatttatgtggaagcacttctgttggaaaaaagattgattcttatgaagaagacttaaaaagatataaattaccaaaaatttcaaaatttaaaaaagaatatttattagatgttgatataatatttactgcattaccaaatggtgaggctcaatctatttcaaaatttttaaataaaaataatttattaatagatcttgcggctgattttagacttaacaataaaaaagattatgaaaaatggtataaaattaaacacaaagcattaaatcaaatcaaaaaaagcatttattctatacctgaaattagtggcaaattaattcaaaaatttccaatagtatcttgtcctggatgctaccctacatctgtat

SEQ ID NO: 215509 - DNA, 235 bp, Unknown
  Bacterial polypeptide expressing nucleotide sequence isolated from the Sargasso Sea
caaaaaaacttttgttaataaaaaatttgttcatataaaaaaaccaaatacctttataagcactaatgatgttattaattccaatttttgctatatctcagtatgcaaaacaaggtttaaaaacaagtttataatactttcggcaattgataacctaataaaaggtggatcaggtcaagcagtgcagaatatgaacataagatttaatctaccacaaagtacaggtttggtatga

SEQ ID NO: 215510 - DNA, 511 bp, Unknown
  Bacterial polypeptide expressing nucleotide sequence isolated from the Sargasso Sea
gatgcatagacacctaggtgaatttgatcaggaattatctaaaatagctggaagagctgtaaacattcaatttactcctcacttgataccagcaaatagaggtattttagctactgcttatgtacttgggaactatcaagcagttagaaaagcactatctcaaagatatgaaaatgaacactttattcatattctgccaaacggagagacacccagtactcaccatgttcgagggtcaaatgagtgtcacataggcatagtttctgatcggattgaaaatcgttgtattattgttgcagcgcttgataatctaacaaaaggcagctctggacaagccgtacagaatgccaatcttatgcttgggatcgatgaagactgctggtctcaatttagtgcctctttttccgtagttcatgaaaaatttaaaaaaacaacgtcgaatacaagtaatttttattacttttatttctctagctttagcgacggcacttataggctatgcaatgcgtga

SEQ ID NO: 215511 - DNA, 823 bp, Unknown
  Bacterial polypeptide expressing nucleotide sequence isolated from the Sargasso Sea
atgacttcagagatattcattgatggtgaggctggaacgacgggtttagtgataagagaattacttgcagagcgaccagacctctcttttatcagcctcgatgattccgaaagaaagaatgagacagccagaaaaaatgctctgaattcatgcaagttagccgttttatgtttaccagatgaagcggcacgtgaagcgattactctcatagaaaaccctaatctaaaggtgatcgatacttcaacggctcatagggtttcgccggaatgggtttatggttttccagaaatgactaatggacaaaccgagttgataaaaaaggccaccagggtttctaaccccggttgttatccgacgggagctatatcattgattcgtccgttaattgagaactcagtcatcccgagttcttatccgataactataaatgcagtttctgggtattcgggcgggggaaaatctttaattgaaagatttgaaacaatgacaaacgaggcacccccaatttacttttacggaaccactctttctcataagcatctgccggaaatgcaaaaatatatagggttggaaaatccgccaatattcgttccgtcagtcgccaagtacaagcaaggaatgatagttcaagttccaatccatttaagtaaaaacctgggcgtcgtcggtagcccacaaaaaattcatgatgcactttcacaacattatgatggcagtaaatttattactgttaatccgttggatactgcgcaaggattggtggagatttctccggaaaaacataatcactctaacatgctaggaaataaatgttttttctaac

SEQ ID NO: 215512 - DNA, 481 bp, Unknown
  Bacterial polypeptide expressing nucleotide sequence isolated from the Sargasso Sea
ctcaggtgctggtagaggagttcacaaaaaatataaagataaaaatctatacgagtctttaagcgcatatggagttggttttcatcgtcacaattctgaaatagatcaagtgttaagaaaatttactaagaaaaaatttcaatttacttttacacctcacttatcaccaatgtttagaggtattctgagtactatatatgttgatttaaaaaataatatttcacaaacaaaagtattaaaaacattaattagtttttataaaaatgaaagttttgtaaaaatattaaagtctggaacattgttaagtaccaatgacgtaataaatactaataattgttatatttcagtgtgcaaatctaaatacagcaataaaataatcattttatctgctattgataatttgattaagggtggagcaggtcaagctatacaaaatctgaataataaatttaatttttctgaaacgactggattaaaatga

SEQ ID NO: 215513 - DNA, 952 bp, Unknown
  Bacterial polypeptide expressing nucleotide sequence isolated from the Sargasso Sea
atgagcaccaaagtttttgtcgacggccaggaaggcacaaccggcctcaagatcttcgaatacctgtcggcacgcagcgacatcgagatcctgcgtatcgaggaagcgaagcgcaaggacgtcgacgagcgccgccgcctgatcaacgcgtcggacgtcacgttcctgtgcctgccggacgtcgcgtcgcgcgaatccgcgtcgctcgtcgagaacccgaacaccacgctgatcgacgcgagcaccgcgttccgcaccagcgccgactgggcctacggcctgcccgagctgacccgcgcgcagcgcgagaagattcgcacgtcgaagcgtatcgcggtgccgggctgccacgcatcggcgttcgtgctcgcaatgcggccgctcgtcgatgcgggcatcgtcgcgccgacgttcgccgcgcacagctactcgatcaccggctacagcggcggcggcaagtcgatgatcgccgagtacgagaacgcggcgccgggcggcaagctcgcgagcccgcgcccgtacgcgctcggcctcgcgcacaagcacctgccggaaatggccgcgcacacgggcctcgcgaacccgccgatcttcacgccgatcgtcggtccgttcctgaagggcctcgcggtgacgacctacttcacgcccgagcagctcgcgaagcgcgcgacgccgcaggacgtgcagcgcgtgttcgccgagtactacgcggacgaagcgttcgtgcgcgtcgcgccgttcgatgcggacgcgaacctcgacggcggcttcttcgacgtgcaggcgaacaacgacacgaaccgcgtcgacctgttcgtgttcggcaacgcggagcgcttcgtcacggtcgcgcgcctcgacaacctcggcaagggtgcgtcgggcgccgcgatccagtgcatgaacctgaacatcggcgcggccgaggacgccggcctcaaacgctgat

SEQ ID NO: 215514 - DNA, 341 bp, Unknown
  Bacterial polypeptide expressing nucleotide sequence isolated from the Sargasso Sea
attcacttttacacctcacctaagtcctatgtttagaggtattttgagcacaatttatttagatctaaaaaaaaatatttccattaattatgtaaactcaaaattagaaagattttataaaaatgacgcttttgttaagattttaccaattaattccttcataagtacaaacgatgtaattaatactaattattgccatttatctgtatgcaaaataaagaataagaatagatttataattttgtcggcaatagataatctgataaaaggtggggcaggacaagcagtgcaaaatttaaataattattttggatataatgttaaaaaaggattagtatgaa

SEQ ID NO: 215515 - DNA, 193 bp, Unknown
  Bacterial polypeptide expressing nucleotide sequence isolated from the Sargasso Sea
tattaactcttttttgagcacaaatgacgtaatgaatactaattattgttttatttctgtctgtaaaaccaaatttaaagataaaataataattttatcagtcattgataatcttatcaaaggaggagcaggtcaagcagttcaaaatatgaatttgaaatttggttttaaaaataatgagggattattatga

SEQ ID NO: 215516 - DNA, 379 bp, Unknown
  Bacterial polypeptide expressing nucleotide sequence isolated from the Sargasso Sea
atgaatgttgcaatagttggtgctactggttacggaggtattcaagcggtaaatcttttaaagaagaataaaaaatacaaaatttcatttttaggaggtaataaaacctctggatcaaagtggaatgataatttcccttttatttatctagataatgatccttatatagaagatatttcagtagataatatttcaaaaaattcagatgttgcattgctttgcttaccaaatggaatatcttcaacattgacaagaaaattattagatagaggagttaaagttattgatttatcagctgattacagatataagtccttagaagaatgggaaaaagtatattctaaagaagctgctatttataaaaggagtgacgatgatt

SEQ ID NO: 215517 - DNA, 319 bp, Unknown
  Bacterial polypeptide expressing nucleotide sequence isolated from the Sargasso Sea
atgaatgttgcaatagtaggtgctactggttacggcggtattcaagcggtaaatctcttaaagaaaattaaaaaatacaaaatttcatttttaggaggtaataaaacatctggatcaaagtggaatgataactttccttttatttatctagataatgatccttatatagaagaaatttccatagataatatttcaaaaaatgcagatgttgctttgctttgcttaccaaatggcctatcttcaacattgacaaggaaattattagatcgaggacttaaagtcattgatttatctgctgattacagatataagtctttag

SEQ ID NO: 215518 - DNA, 364 bp, Unknown
  Bacterial polypeptide expressing nucleotide sequence isolated from the Sargasso Sea
tctgccgtcggtcggatctttcgcgcaaggcatggtcgtgagcgtcccgctccactacgatcagctcaacgaagtggggcgtagtgccgagcgcttgcaagcgtgcttgagcgaacgctacgccgacggaacgtacgtctctgtgcgcgatctcaatagaatggacgatctcgaacgcggggcattcatgagacccgattctttagcaaacaccaacaagctcgaactcagcgtctacgccaacgacgtaaagcgaacagccgttctcgtggcccggctggacaacttaggaaagggggcttcgggcgcggcggttcaaaacatgaacttggcgttaggactcgaggagacgagtgggttataa

SEQ ID NO: 215519 - DNA, 271 bp, Unknown
  Bacterial polypeptide expressing nucleotide sequence isolated from the Sargasso Sea
gggcattaacataaacaaaataattaatgttctaaatgtccaatataagaatcataaatttataaaaatctgtaaaataaatactttcttaagtactaatgatgttatcaacaccaataattgctttatttctttatgtaaaagcaaatataaagataaaataataatattgtctgcaattgataatttgattaaaggtggtggaggtcaagctgtacaaaatatgaataattattatgactttaatcaaagtgaaggtctaaatgtttaa

SEQ ID NO: 215520 - DNA, 513 bp, Unknown
  Bacterial polypeptide expressing nucleotide sequence isolated from the Sargasso Sea
gcaaaaatattatcatagattcaaaatcaggctattctggagccggtagaggtgttcataaaaaatataaaaataaaaacctttatgagactttaagtgtatatggaattaaaacacacagacataattctgaaatacaacaagaattagatattgaaactggtaaaaaagtagaatttacttttacacctcatttgtctccaatgtttagaggtattttaacgacaatttattgcaatttgacaaagaaaaataacataaattcaattttaaattatttgaaaaaattttataaaaaagaaatgtttgtaaaaataagtaaaaaaaattcacttataagtactaatgatgttattaatacaaataattgcttaatatcagtttgtgagtcaaagtctaaaaaacaattaattatattgtctgcaattgataatttaattaaaggtggaggaggacaggcagtccaaaatatgaatttaatatttaattttaaaaaaaatatgggtttataat

SEQ ID NO: 215521 - DNA, 257 bp, Unknown
  Bacterial polypeptide expressing nucleotide sequence isolated from the Sargasso Sea
aaaaatttattcttttttaaaaaaatattataaaaataataaatttattaaaattttgaaaccaaatacttttttaggaactaatgaagtaataaacacaaacaactgtcatatttctgtgtgtgagagcaaatataagaataaaattattatattgtcagcaatagataatttgattaagggtggtagtggacaagctgttcaaaatatgaatattttatttggatataagtctgacgaaggattaaatttatgag

SEQ ID NO: 215522 - DNA, 790 bp, Unknown
  Bacterial polypeptide expressing nucleotide sequence isolated from the Sargasso Sea
atgtctaagataaatgcattagttgctggagccacaggatacataggtattcaattggttaaattattaactaaacataagagagttaaaattaaatatctttgtggtgatacctctgtaggtaagaaaattagctcttatgataaatactttaataaatataaactaccaaatattgttaaatttaataaagagttattaaaaagtgttgatgttgtatttactgcattacccaatggagaggctcaaaaaatttcaaaaaatttaaataataaaaatattttaattgatttagcagcagattttagacttaaatcaactagtgattactttaaatggtataaaatcaaacacaatgctcctaaattaatcaaaaaaagtatttattctttacctgagttaaataataaaagtattaagaaatataaaataatttcttgtccaggctgttatccaacatcaattttgttacccctagtaccgttaattaataaaaatattgttaaatcaaacaatatcataattgactctaaatctggttattcaggtgcaggcagaaatattcataaaaaatataacaacaaatttttaaatgagacattgagtgcttatggtttagcttttcacagacacaattcagaaattgatcaggaactaaaaataaaaactggcaaaaaagtaaaatttcaatttacacctcatctttcaccaatgtttagaggaatattaactactatgtatttagatctaaaaagaaatgattctcttaaaaaaatttattcttttctaa

SEQ ID NO: 215523 - DNA, 883 bp, Unknown
  Bacterial polypeptide expressing nucleotide sequence isolated from the Sargasso Sea
attaaattattagttaaacacaaatatattaatattaaatacctttgtggaaactcttctgtgggtaaacacgtcaaattttacgataaatctttatctaaatataaattaccaaaaattttaaaatttaataaaaaattattaaaagatgttcatgttatttttacagcacttccaaacggggaagcgcaggatatatccaaacatttaagcaaaaatcatactctaatagatcttgccgcagattttagattagaaaaagcttctgattatttaaagtggtataaacaaaaacatcgagcaactaatttaataaaaaaaagtatttatttacttcctgaaattaatagaaatgagattaaaaaatataatattatttcatgtccaggatgttatccaacatcaatattgcttcctctatttcctttatttaagaaaaatttaattaaatttaataatattataatcgattcaaaatctggatattcaggtgctggtagaggagttcacaagaaatataaagataaaaacctatatgagtctttgagcgcatatggagttggttttcatcgtcacaattctgagatagatcaagtgttaagaaaatttactaagaaaaaatttcaatttagttttactcctcacttatcaccaatgtttagaggtattctgagtaccatatatgttgacttagaaaataatatttcacgatcaaaagtattaaaaacattaattagtttttataaaaatgaaaattttataaaaatattaaagtctggcacattgttaagcaccaatgacgtaataaatactaacaattgttatatttcagtatgcaaatctaaatacagcaataaaataatcattttatctgctattgata

SEQ ID NO: 215524 - DNA, 763 bp, Unknown
  Bacterial polypeptide expressing nucleotide sequence isolated from the Sargasso Sea
taaaaacttggaatttttaaaacttcctaagttatcattaaataatgattttaatttttcaaattcagatgtcgtttttttagctttacctcatggcatatctcacaaatatgtaaaagaatattacaataaaattaaaataatagatttatcagcagattttagattagattctgaagaaatttataatgataactataaaactattcattcttgctctaaacttcttcaagaatttgcatatggattacctgaaattaataaaaaattaattatgcataaaaataatatagcagttccaggatgttatccaacatctatattattacctctaatacctttaataaaagataaattaattcatacagataatataattatagattctaaatcaggatatagtggggcaggaaaaaaatttgaaatttcaaatattaaaaattcaaatgatttaaatttctataattataaaactaataatcaccaacatatttgtgaaattaaacaagaattagaaaagaataattcaaacaataatattactctttcatttaatcctcatatcatgcctatattcagaggaattatgtctactatatactgcgatcttaacgccaatatcacaactaatgatattaaagattgttataataattattataaagatttaccatttgtaacaattaaaaaagatgaagaaaaatttgatttctttactgttcaaaatactaataattgttatataaaattgtttccacaatag

SEQ ID NO: 215525 - DNA, 622 bp, Unknown
  Bacterial polypeptide expressing nucleotide sequence isolated from the Sargasso Sea
actgggaaacaaagtaaaagattttaaaataatttcttgtcctggatgttatccaacatcaattcttttaccattacttccattattaaaaaataaattgattaaaaaagataatattataatagactcgaaatctggatattcaggtgctggaagaggtgtacataaaaaatataaagataagaatttatacgagtctattagcgcttatggaataggttttcatagacataatccagagattaatcaaatgattagaaaattcacaaaggtagatgctatttttgattttacaccacatttgtcaccaatgtttagaggtatattaagtactatttatgtggatatgaataaatctagctcacaattaaaaattataaaaactttatgttctttttacaagaattctaattttgtaaaagtaatgagcaaagataagttaattagtactaatgatgtaattaattcaaacaactgtcatatatcaatatgtaaaacaaaaaataaaaatagaattatcatactctcagtaatagataatttaattaaaggtggggcaggacaggctattcaaaacatgaatattaaatttggattcccaattaagacaggtttaaaatga

SEQ ID NO: 215526 - DNA, 670 bp, Unknown
  Bacterial polypeptide expressing nucleotide sequence isolated from the Sargasso Sea
gtgcaagaatatttaaaaaattttatatatggtctagctgaaataaatagagataaaatactaaattctaaaaatatagctgtgccaggatgttacccaacatctattttattaccattaatacctttaataaaaaatacattaattgataccaaaaatataattattgattctaaatcaggttatagtggtgcgggaaagaaatttgatatcaataaaataaaatcaaaaaatcattataatttttataattataatacaaataatcacagacatattgcagaaatcaaacaagagctcaataaacataattctgataatgaagttaaattttcatttaaccctcacattcttcctaactttaggggtatgatttctacaatttactgtgatctcaaagatagtgttcaaaaaaatgatattataaatcttttccaagatttacaaaaaataaatccttttataaaatatattgataatgatgaaattcttgattttttttctattcaaaactctaattattgtaaaattaaaatttttgatcattatagtgaagataaactgattatagttagtgctatagataacttgattaaaggtgctgctggtcaagcagtacaatgttttaatatatcagcaaatatagaggaaacagtatctttagtatgaa

SEQ ID NO: 215527 - DNA, 878 bp, Unknown
  Bacterial polypeptide expressing nucleotide sequence isolated from the Sargasso Sea
tttttttgataaaaaattaaaaaataaaaaacttccaaaaataactaaatttaaaaaagaatttcttaaaaaaatagatgttatttttacagccttgcccaatggacaagcgcaaaaaatatctaattttttattatcaaaaaattatttaatagatttatctgcagattttagacttaataaagctaaagaatatttaaaatggtacaaaattaatcattcatcaaaaaaaaatattaaaaaaagtatttatgccttacctgaaataaaaaaagataaaattaaaaaatacaaaattatctcctgtcctggctgctacccaacatcaattttattacctattattccattaattaaaaaaaatttaattaattcaaaaaatataataatagattctaaatcaggttattctggcgcaggcagatcagtacataaaaaacataaaggaaaaaatctttatgagtctttaagcgcctatggaataggttttcatagacataattctgaaattgaacaagagttatatataaatacaggaaaaaaaattagtttttcttttactccacatttgtctccaatgtttagaggaatactaagcacaatatatgtagatttaaaaaaaaatagcaatctgtttttagtaaataaatcacttattgatttttataagaaagatttttttgttaaagttgttcaacctaataaaatgattagtaccaatgatgttataaacactaattattgcaacatatcagtttgtaaaactaaagataaaaaaaagcttataattttatgtgctattgataatttgataaaaggtggatctggccaagctgttcaaaattttaatatattatttaattatcccatatataaag

SEQ ID NO: 215528 - DNA, 928 bp, Unknown
  Bacterial polypeptide expressing nucleotide sequence isolated from the Sargasso Sea
ttgccattcttgggaggaagaggttacgtaggatctgaaattataaaaatacttaataatcatgaacatttttacttagcaaaagttttttcttcctcagctgcaggcactttggttgaaatttactctaaagataaaagtttaaaatatgaacaactaaataaaaatattgatctatcaaatatcgattttgtaattttagctctcccaaataatgcatcagagccttacataaatttaatagataacaaatataaaaaaatcaccattatcgatataagttcagataatagatttaataaaaattggttttacagtattccagagttatcaaaaatgaattcaaatgtatctactaggattagtaatcctggctgttatgcttcagcgatgcaattttcaattcttccaattaaatcaatggtcaaaggaaaaattcattcttttggaatctctggatacagtggagcaggagcttcaccaaacaaaagaaacaatttaaagaatcttgaaaataatataatcccttacaacataaatggacatagtcatgaaaaagaggttagttttcattgctatcaagatatttcattcactccaaatgttgctagtttttttagaggaattttaatgacgtcacatttttctctcaaagaaaaagttccaattgatgatctaattgaattatatgaagaattttataaagattttcctttggttcaaataactaaagatataccaatgatccaagatacaataaacaagcatattacaaagttagggggattttctttggatgcttcaggaaaaactttaaaggtattctgcactttagataatttacttaaaggagctgctacacaagttattcaaaatttgaacatttctttaggaataaacaatacaactggaattacgtatgaataaa

SEQ ID NO: 215529 - DNA, 562 bp, Unknown
  Bacterial polypeptide expressing nucleotide sequence isolated from the Sargasso Sea
tatgtccttaaatgtatgtatctttggtgtatccggttatacgggttcaaagcttctttactatttagataaacataagcaaattaaaatacacggcgtttttgggaattcaacagctggtataaaattgggagatttgtttaaaaatttaaataagtctaacaaaatcaaaatttctaagtatgaagactttgattttagtaaaacagatttaattttcagctgcttgcctaatggtaaattacaaaaagaaataataaaaaacctcaacccaaaaatctctattatagatctttctggtgattttaggctcaaatctaaatcagaataccaaaaattttataatatgactcataggtcttattcattgaaagaaaagttttgttacggcttgtccgagatttatagaagtaaaataaacaaaagtaaatttatttcaaatccaggatgttatccaacttctattttgattcctttaatccccttaataaaagaaaaaaaattaagaattcaagatattataattgattcaaaatcaggtataagtggggcaggtaagcaa

SEQ ID NO: 215530 - DNA, 373 bp, Unknown
  Bacterial polypeptide expressing nucleotide sequence isolated from the Sargasso Sea
agaaataaaaaaaatttcaaagtcaaaaataagttatatttttgtacctcatttaatacctacttttagaggcatgttaacttcaatctacttagatttaaaacctggtattaaaattactaaaatatttagtgagctcaagaaatatcataaaaataacttttttgttaaaataaaacctctaaataaaaatattggtacagaaaatgtaattaatacaaatttttgtgaaatatcagtttgcaagcttaaagaaaaaagaaaaattttaatattatccgcaatagataacttagttaaaggtgcagctggtcaagcaattcaaaatatgaatattttaaaaggttttaaagaaaatttaggacttaaatga

SEQ ID NO: 215531 - DNA, 649 bp, Unknown
  Bacterial polypeptide expressing nucleotide sequence isolated from the Sargasso Sea
aatagtatttattctttacctgaaattacaggtaagaaagttcaagattataaaattatttcttgtcctggatgttatccgacttctattctattacctttgatacctttattaaaaaatagattaataaaaaatcataatattataattgactcaaaatcaggatattctggtgcaggacgaggtgtacacaaaaaatataaagataaaaatttgtatgaatctttaagtgcttatggtgttgcatcacacagacataattctgaaattgaagaaatgatcaagaaatacgttaaaggaaatattcaatttgattttactcctcatttatcacctatgtttagaggcattttaagcacaatttatgttgagcttaataagacctcttcagcatcaaaaattttaaacactttgaaaaaatattataaaaaagcaaattttataaagatattaaataaagacaaattaataagcactaatgatgtaattaatacgaataattgtaatatatctgtttgtaaatcaaaaaataagaataagatagttatactttctgctattgataatcttattaaagggggagcaggtcaggcaatacaaaatatgaatatgaaatttaattttccaaaagatgctggttttaaatgat

SEQ ID NO: 215532 - DNA, 477 bp, Unknown
  Bacterial polypeptide expressing nucleotide sequence isolated from the Sargasso Sea
gcgcaggccggaatgtgcataaaaaatttaagggtaaaaatttatatgaatcgcttagcgcctatggaatagctttgcatcgtcataatccagaaatttctcaagagcttaatttatattcagataaaaagattagatttagtttcacaccacatttaacaccaatgtttcgaggaatactaagtacaatctatgttgatttaaacaaaaacgttaatcaaaataagttgataaatgtgcttagacaatattataagggaaaaacatttataaagattgcaaataaagataatctattgagtactaatgacgttataggcacaaataaatgcattatatctgtctgtaaatcaaagtataaagataaaattattttattatctgctatagacaatttgattaaaggcggctctggtcaagcagtacaaaatatgaatttaagacttggttttaaagaaagagagggtattcagtgat

SEQ ID NO: 215533 - DNA, 742 bp, Unknown
  Bacterial polypeptide expressing nucleotide sequence isolated from the Sargasso Sea
tttgcttatagatttatctgcagatttccgtatcaaagatcctattatttataaaaaattttataaaatgacacataaatcaaaagataatattaaaaagagtatttatttactgcctgaattaaataagaaaaaaataaataaatttaaaatactatcttgcccaggatgctatcctacttcattacttataccaattattcctttattaaaaaaaaaagcaattcataaaaaaaaaattattatcgattcaaaatcaggatattctggcgctggtagaagtgttcataaaaaatttaaaaataaaaatttgtatgaatcagttagctcatatggagttggttttcatagacataattctgaaataaatcaggaatttataaaaattagtaaaaatattgattataattttacaccacatttaattcctatgtttagaggaatacttagctctatatatattgatttaccaaaaaacatgtctgcaaaaaaaattttccttttattacaaaaagagtacaaaaatgcaaaatttattaaatttgctaaatttaatcagcccttaagtacaaatgatgtgataaatacaaataattgtttattatcagtgtgtgaaactaaaaataaaaatagaattatacttttttcagctattgataatcttattaagggtggcgcaggtcaagctgtacaaaatatgaatatttattttggttttaaagaaaatttaggattaatatga

SEQ ID NO: 215534 - DNA, 760 bp, Unknown
  Bacterial polypeptide expressing nucleotide sequence isolated from the Sargasso Sea
agcattgattatgtatttaattgcttacctaatgaaaatcttcacaaaagaagtgatctattgagatcagatatcagtataattgacctttcagttgattttagacttgatgataagaatgagtatgagaactggtatggctttaaacactgcaactttgaggtaaacgatgaattccaatatggactaacagagtttaatagagataagataaaaaaatgtaagcatattgcaaaccctggctgctatgcaactagtatcttaattccactaattgaattgattaaacaaaatgcaattaacaccaacgatattgttattgattcaaaatcaggttactcaggtgcaggtaaaacaaagggaagaaaagagttaattaaagaagtaaatgaaaatatcagaacctatggtattggagatcacaaacacatagctgaaataaaccaagaactaagtaaaatcaaaaatactcaaactgaagttttctttgctgctaatatactacctgttgaaagaggtattttgagtaatatttatattgacacaaataagacatctcaaaatgatatttacgatatattgcaaaaaagatttaatgatgagcattttatacaattgctaccaatgaatgaaattccttcctctagggacgtagttggtactaataacttagtcataggattaaaaaagggatataaagaaaataaattatgtattgttagtgttttagataatttggtaaaaggagctgctggacaag

SEQ ID NO: 215535 - DNA, 532 bp, Unknown
  Bacterial polypeptide expressing nucleotide sequence isolated from the Sargasso Sea
atgaatgttgcaatagtaggtgctactggttacggcggtattcaagcggtaaatcttttaaagaaaaataaaaactacaaaatttcatttttaggaggtaataaaacaattggatcaaagtggaatgataatttcccttttatttatctagataatgatccttatatagaagaaatttcagtagagaatatttcaaacaatgcaaatgttgcattgctttgcttaccaaatggcatatcctcaacattgacaaggaaattactagatagaggagttaaagttattgatttatctgctgattacagatataagtccttagatgaatggaaaaaagtatattccaaagaagctgttatttataaaaggaatgatgatgatttatgtaaagaggcagtctacggtcttcctgaaataaataaagaagccatttcaaaaggaagattaattgcatgtccaggatgttatccaacatctgctcttattccactagctccttatctttcgcaaggaattatgaaaatgaaggaatagt

SEQ ID NO: 215536 - DNA, 805 bp, Unknown
  Bacterial polypeptide expressing nucleotide sequence isolated from the Sargasso Sea
ggaaatacatctagcggaaaaaaattatcattttatgataaaactttaaaaaataagaagttacccaaaataattaaatttaataaaaatttattaaaaaaagttgatgtaatttttacagcattgcccgatggccaagctcaaattatttcaaaaaaattattaaataacaatatattatttgatttatctgcagactttagacttttaaaatcaactgattatttaaaatggtataaatttagtcataaagcaaaaaaaaatattaaaaaatcaatctatgcgttaccagaaattaaaaaaagtaaaataaaaaactacaaaataatttcatgtcctggttgctatcctacatctattttattaccaattattccattaattaaaaaaaaattaatagaaacaaaaaatatagttattgattcaaagtcaggttattctggtggaggtagaggtatacacaaaaaatatgcaaagcaaaatctttatgaatcattgagtgcttatggtatgggtttccataggcataattctgaaattcaacaagaattaaatatttgttcaaataaaaaaattaattttatttttactcctcatttgtcaccaatgtttagaggtatattaagcacaatatatgtagatataaaaaaaaatgttagtctaaaaaagattcaaagagctttaaagaatttttataaaaatgaaaaatttgtgaatataaaaaaaattaattaccaagtaagcacaaatcatgtaataaatagtaattattgcaatatttctgtatgtaaaacaaaaatataat

SEQ ID NO: 215537 - DNA, 601 bp, Unknown
  Bacterial polypeptide expressing nucleotide sequence isolated from the Sargasso Sea
caaatagtatcttgtcctggatgctaccctacatctgtattaattccattaatcccattaattaaaaaaaacttaattgataatcaaacaattattattgactcgaaatctggttattcaggagcaggtagaggagtacataaaaaatataaagataaaaatttatatgaatctttgagcgcttatggattggcaaatcatagacataattctgaaattcaacaagagcttgatcttaaaactggaaaaaaaaataaatttcattttacacctcatcttacaccgatgtttagaggtattttaagcactatttatgttgatttaaaaaagggaattaacataaacaaaattattaatgttttaaatgaccaatataagaatcaaagatttataaaaattagtaaaataaatactttcttaagcaccaatgatgtgatcaacaccaataattgtttaatttctgtatgtagaagcaaatataaagataaaataataatattgtctgcaattgataatttgattaaaggtggtggaggtcaagctgtacaaaatatgaataattattatggctttaatcagagtgaaggtctaaatgtttaaa

SEQ ID NO: 215538 - DNA, 757 bp, Unknown
  Bacterial polypeptide expressing nucleotide sequence isolated from the Sargasso Sea
cacatcaaattttatgataaatctttatctaaatataaattaccaaaaattttaaaatttaataaaaaattattaaaagacgttcatattatttttactgcacttccaaatggggaagcacaggatatatctaaacatttaagcaaaaatcatacactaatagatcttgctgcagattttagattagaaaaagcatctgattatttaaagtggtataaacaaaaacatcgagcaactaatttaataaaaaaaagtatttatttacttcctgaaattaatagaaaagagattaaaaaatataatattatttcatgtccaggatgttatccaacatcaatattgcttcctctatttcctttatttaaaaaaaatttaattaaattaaataatattataattgattcaaaatctggatattcaggtgctggtagaggagttcacaaaaaaaataaagataaaaatttatatgagtctttaagcgcatatggagttggttttcatcgtcacaattctgaaataaatcaaatgttaagaaaatttactaaaaaaaaatttcaatttagttttactcctcacctatcaccaatgtttagaggtattctgagtactatatatgttgatttagaaaataatatttcacaaacaaaagtattaaaaacattaattagtttttataaaaatgaaagttttgtaaaaatattaaagtctggcacattgttaagcaccaatgacgtaataaatactaacaattgttata

SEQ ID NO: 215539 - DNA, 883 bp, Unknown
  Bacterial polypeptide expressing nucleotide sequence isolated from the Sargasso Sea
atataccggcgaagaactagctaggcttttggctaatcatccaaatgttaaattaaaatccctaacatctaaaactcatgaaggaaaagagataaatgctatctttaaacttaatgagaaaatccctggtaaatttaaatcccctcaagtcgagaatttaaatgattgtgatgttgtattttttgccacacctaatggagttgcaatgaacatggcaaatgccctcattgaacaaggaattaaggtaattgatatatcagccgatttcagactgacgagcgctgaacaatttaccgagtggtatgaaatgaagcactcttctcctgacttacttcacgaaagtgtatacggtttacctgaaatgagagggcagagagaaaaaattcagcatgcacaacttgttgctaatccgggatgttatcctacatcgatacttcttggtgtgcttcccataatagaatcgcttccagagcaaaccataattgttgatgctaaatcaggaataagtggagcaggcagaaatttaaatagcaaaaagctattcaatcagggagaggaaaatttccaagcttatgctgtaaaaaatcatagacattaccctgagactctaaatatcttacagaactatcaaagtaatttagatctactctttgtccctcacttgagctctatgtacagaggcatattttcgacaatttatatgcacacaaaaaatatcgatattgaggaaatcagagagacatttcataattattataatggttctgaatttgtgaagattgcagatgatggagaattcccgagaatttctgatgtttcaaatagtaaaaaatgtagaatagctctaaatgaagtcagaaatagctatgggaaaacaaatcta

SEQ ID NO: 215540 - DNA, 600 bp, Unknown
  Bacterial polypeptide expressing nucleotide sequence isolated from the Sargasso Sea
caataatatcttgtcctggatgttatcccacatctgtattaattccattaatcccgttaattaaaaaaaacttaattaataataaaacaataattattgactcaaaatctggttattcaggagcaggtagaggtgttcataaaaaatataaagataaaaatttatatgagtctttgagtgcttatggattagcaaatcatagacataattcagaaattcagcaagagcttgatcttaaaactggcaaaaaaaataaatttcatttcactcctcatcttacgccaatgtttagaggaattttaagtactatttatgttgatttaaaaaagggcattaacattaacaaaattattaaggctctaaatgtacaatataagaatcaaaaatttataaaaataagcaaaattaatactttcttaagcactaacgatgtgatcaacacaaataattgcttaatttctgtatgtaaaagcaaatataaagataaaataataatattgtctgtaattgataatttgattaaaggtggtggaggtcaagctgtacaaaatatgaataattattatgactttaatgaaaatgaaggtttaaatgattaag

SEQ ID NO: 215541 - DNA, 781 bp, Unknown
  Bacterial polypeptide expressing nucleotide sequence isolated from the Sargasso Sea
aatggtcagaataggtatcattggcgctgctgggttgtcaggaattgaacttctacatttgctttccagacattcagaagtaaatgtaaagctggtgacttccacaaaatatcaggggaagaatgtgtctgaaattttccctgatctttatagatattcactctcattcaattcaaatgaagcagaagtacttgactgcgatgccgttttcctagcagtaccaaaccaagcgagcctaaaaattgttccaaaattactcgatcagggtgttcgcgtaatagatttatcaggagccttcaggctggctgatacaaagatttttgaaaaattctataagttagaacatacttatccagaattactgaaagaagcagtttttggtctgcctgaatttttcagtcaacagattaaacgagctagaattgttgcaaatccaggatgttattctacctgtgctctgctggggcttttgccgcttgctgaattacttggcgagttggatcgacctcctattattgatgcaaaatcaggagtgagtggagcaggaggaagaaccgaagatggctctatgaattatgtaagtataaacgaaaattttaaggcttacaaaattttttcacatcagcaccaacctgaaattcaacaatacttaaatgatttgagcacatacagttccaaaaaaaatggtgatgtaatcttcactccccacctgcttccagttaaccgaggaattttatccacaaatttatattcattttcagagatcagtagacagggacca

SEQ ID NO: 215542 - DNA, 106 bp, Unknown
  Bacterial polypeptide expressing nucleotide sequence isolated from the Sargasso Sea
catgagtgcgatcgataatctgatgaaaggagcttcaggacaagccgtacagaacatgaatataatgtttggactcaaagaatctactggtttagtcaaaatttaa

SEQ ID NO: 215543 - DNA, 787 bp, Unknown
  Bacterial polypeptide expressing nucleotide sequence isolated from the Sargasso Sea
tatgcgcaagctaaatatattaattgctggatcaactggttatataggtgttcaattaataaaattgttaatcaaacacagatacataaatataaagtatctttgtggtagttccagtgttggaaaaaatatttctctttatgacaaagatttaaaaaatgctaaattgcctaaaatcgttaaatttaataaaaatttattaaataaagtagatgttatatttacagcgttgccgaatggagaaagtcaaaaaatatcaaattttttaactaaaaataatgttttaatagatttgtcagcagattttagattaaaaagttcttatgaatattctaaatggtacaaaattagacattcatccataaaaaatattaataaaagcatttacgctttaccagaaattaagggaaatttgataaaaaataaaaaaattattgcttgtcccggatgttatccaacatctattttattaccactgattcccttaattaaaaaaggtatagttaaacataaaaatataataatagactcaaaatcaggttattcaggtgcgggcagaaatattcacaaaaaatttgcaaataaaaatttatatgagtctttgagcgcttacggtatatcaaatcaccgtcataattcagaaattcaacaagaattgaattatgaaacaaaaaaaaatgttgaatttagttttacacctcacttgacgccgatgttcagaggtatacttagtacaatttatttagatttaaataaaaatattaattccaataaaatttcacttatt

SEQ ID NO: 215544 - DNA, 625 bp, Unknown
  Bacterial polypeptide expressing nucleotide sequence isolated from the Sargasso Sea
atgaaaaataagattaaagtagccgttttaggctcaacaggctatgttggaatggaattagtaaatattctatcaaatcattcttacgtagatataaattttttaggctcagaaactattcatggaagttatctaaataatattaatagtacaaaagaatataatgatcttcctcttttaaaaccaaataatagttttaatgctgaagatagtgagtatgtattcttagctttacctcacgcagtatctaataaatatgtaaaaaaatattttaataaaattaatattatagatttatcagctgactttagattagataattttgatgtttataaaaaaaattacggcaatgcacatgaatgcaaagagtatttaaataactttatttatggtcttgttgaaataaatagagaaaaaatattggattcaaaaaatatagcggtgccaggttgctacccaacttctattttaataccattaatacctttaataaaaaataaattaattgataccaagaatataattattgactctaaatcaggttatagtggagcaggaaagaaatttgatttcaataagatgaaatcaaaaaatgattataatttttataattataatacaaata

SEQ ID NO: 215545 - DNA, 478 bp, Unknown
  Bacterial polypeptide expressing nucleotide sequence isolated from the Sargasso Sea
atgtcattaaatagaattaaaactcttgtagcaggcgcaaccggatttgttggtttagatttagtgtatcttttatcaaaacatccaaatgttaaaataaaatatttgtgtgcaaaaaaaaatataggaaaaaaaattaattcttttgataagagaataaaaaaaaaattaccgaaaatctcaaatataagaagtgcaaaattatctgaaattgatttaatttttttagctttacctaatggtgaggctcaaagaatgattaataaaatatatacaaaatacccaaatatcaagtttattgatttatcagcagattttagaattcaaaatccaataaaatataaaagatggtataataataatcataaagcacataagttaatcaaaagttcattatattcaatttctgaatttgttaaaaataaaatgaaatcttatagaataatagctaatcctggatgctacccaacttcaatac

SEQ ID NO: 215546 - DNA, 905 bp, Unknown
  Bacterial polypeptide expressing nucleotide sequence isolated from the Sargasso Sea
tcaagaaaaaaagattaataaatttgataaaaaaattaaaaaaaaattaccgaaaattgttaaatttgaaaaaagtctacttaaaaatgttgatgttgtttttacagccctgccaaatagtgaagctcaaaaaatttcaaattttttactaccaaaaaatgttcttatagatttatccgcggattttaggttagataaagctaaagattatttgaagtggtataaaatccaacataaatctaaaaaaaatattaaaaaaagcatctattcattacctgaattatgtaagagcaaattaaaaaattttaaaattatttcttgtcctggctgctatcctacttcaatcttgctaccacttattcctctttttaaatctaggttagttaaaacaaacagtataattatagactctaaatcaggatattctggagccggaagaataatacacactaaatataatcaatttgaattaaatgaaaccttgggtgcatatggagttggttatcatagacataattctgaaatagaacaagaacttgaaaagaatactaatagtaaggttgaattttcattcacaccccatttatcaccaatgtttagaggaattttaagtactatctatttggatatgaataaaaatgcatcaattaacaaaatttatacatatttgaagaaattttataaaaaagattattttataaatattgaaccaataaatacttttttaaacacaaagaaagtaattaattctaatttttgtaatatatcaatatgcaaaacaaaaaataaaaataaaattatagttttatcggctattgataatttaattaaaggtggggcagggcaagcagttcaaaatttaaatctatattataaatacaaattaactaagggtttaatttaat

SEQ ID NO: 215547 - DNA, 703 bp, Unknown
  Bacterial polypeptide expressing nucleotide sequence isolated from the Sargasso Sea
aaaattgaaaaaattgattggaataaaattgatgtaatatttacggccttacctaatggagaggcacataaaattgcaaatttattgccaacaagagttaaactcattgatttgtctgcagattttagattaagaaatccaaaagtatataagaaatggtatggaattaatcacaaatcaacaaaatttattcctaaatctatttattcaatatctgaatttgcaaaaagatcattaaaaaaatataatataatttcctgccctggctgttatccaacgtctatacaaatacctttaataccactaattgaaaaaaaattaataaaagtagacaatattattattgattctaaatctggtttttcaggcgctggaaaaaaaattaagcaaaaatttaaatttaagcatttatttaactcggttagagcttacggggttggttcacatagacatatggctgaaattgatcaagagctatcaaaggctgccaaaaaaaaagttaatgtttctttcactccacatttaattccaatgtttagaggaattttgtcaacaatatatattgaaagtaaaaaaaatataaaagcaaagaatatttataattttttaaaaaaatatcataaaaataatttttttgttaagatgtcaaagtttaataggcctataggcacaggtgatgttataaactcaaattattgtcaaa

SEQ ID NO: 215548 - DNA, 574 bp, Unknown
  Bacterial polypeptide expressing nucleotide sequence isolated from the Sargasso Sea
tatgtctaaaataaaaattaatatagttgttattggtgccacaggatatacaggtctagatttagtttttcttctttctaaacatcccaaggcaaatattatcaacttatgtgcaactaaaaacttaggaaaaaaaataagtttttttgataaaagaataaaaaaaaaattacctaaactttcgtctataaataatatagactggaataaagttgatcttgcatttctatcattaccaaatggtgaggcacaaaaaataattgcaaaaatctttcataaataccaaaaaataaagtttattgatttgtcagctgattttagaattaaagatgcaaagaaatatgaattaaattataatataaagcataaagcaaaaaaactaataaaaaattcaatttattcaatttcagagtttgttaaaaaagatattaaaaagtacagaataatcgcaaatccaggatgttacccgacatctatacaaattcctctaatacctctcattaagaagaaacttattaaaatcaacaatttaactatagactccaaatcgggctactcgggagctggaaaaatt

SEQ ID NO: 215549 - DNA, 742 bp, Unknown
  Bacterial polypeptide expressing nucleotide sequence isolated from the Sargasso Sea
aaaaatatttcatattatgataaatctttatcaaaaaaaaaattacctaaaattgtaaaatttaatcctaaattattaaatggtattgatgttgtttttacagctctgccaaatggtgaggctcaagatatagcaaaaaaacttaatgataatattactctaattgatttagcagcagattttagattaaaaaaagctaatgattatttaaaatggtataaacaaaaacatcgagctccaaaattacagaagaaaagcatttattgtttaccggagataaatcgtagtgaattaaaaaattacaatataatttcatgtccaggatgttatccaacatcaatattattacctcttgttccgctaattaaaaaaaaattagttaaattagacaatataattattgattcaaaatctggttattcaggcgcaggtagaggagttcataaaaaatataaagataagaatttatacgagtctttaagtgcttatggtgttggttttcatagacataattctgaaattcatcaatttttaagcaattttacaaataaaaattttatatttagttttactccacatttatctccaatgtttagaggtatattaagtacaatttatttagatttagaaaaaaatgttaatcaatcaaaaataatcaaaacacttgtgaagtcttataagggagaaaattttgttaaaatattagactctgataaactctcgagcacaaatgatgttatta

SEQ ID NO: 215550 - DNA, 598 bp, Unknown
  Bacterial polypeptide expressing nucleotide sequence isolated from the Sargasso Sea
tgttatccaacatctgctcttattccattagttccttatctctcgcaaggaattattgaaaatgaaggtatagtaattgattctaaaagcggaacttctggaggtggtcgagaaccaaaccaaaagctactattatcagaatgtggagaaggtctatcagcatatggattgataaaccatagacatacctcagagatcgagcaagtagcatcattaatttctggaaataaaattgaactactttttacacctcatttagttccaatttcaagaggtatgcattcgactatatatgggagattaagagacccagggctaacttctgatgattgcagaattcttttggataattattatagaaatttcaaaaatattaaagtcttacctgttgatacattcccttcaacaaaatgggttaaaaatacaaatcaaatttacctttctgtaaaagttgatattcgaaatggaaggatagttatattatctgtaattgataatttgttaaaaggacagactgggcaagcaattcaaaatttaaatattatgagcggattttcaatggatgaaggtcttgatttaactaataattatccataaa

SEQ ID NO: 215551 - DNA, 715 bp, Unknown
  Bacterial polypeptide expressing nucleotide sequence isolated from the Sargasso Sea
cttgaagtcaaaaaaattaccaagaattactaagtataataaaaaatatttaactaatgttaatattatatttacagcgctaccaaatggagaagctcaattaatttcaaaagatttattaaaaaaaaacactttaattgatttagcagctgatttcagacttaaaaaagcttctgattatttaaaatggtataaacgaaaacataaggcctctagtaacataaaaaatagtgtttatgctataccagaaataacaggaaaattaattaagaaatataacattattggatgcccgggttgctatcctacatcaatacttctacctcttattccattagttaaaaaaagatcaatcagcttaaagaatatcattatagattcaaaatctggatattctggggcgggtagaggagtgcataaaaaatataaaaacaaaaatttacacgaatctattagtccatatggcttagtttttcatagacataactcagaaattcttcaagaattaaaaaattacacatcttcaaaaattaattttacttttacaccacatattattccaatgtttagaggtatcttaagtacaatttatttggatttaaaaccaggtactactttgaataaagtacaaaatattttgaaaaaatttcataaaaagaataaattcgttaagataaagagtgttaactcttttttaagcacaatgatgttatga

SEQ ID NO: 215552 - DNA, 739 bp, Unknown
  Bacterial polypeptide expressing nucleotide sequence isolated from the Sargasso Sea
gttggaaaaaaagtttcaagttatgataattcaagatctgttaaaaacttacccaaaattatcaagtttagtaaaaaatacttaaaggatgttgatatagtttttacggcattgcctaatggtgaagctcaagtcatttcaaaagatttaaataataaaaatgtattaattgatttagcagcagattttagactcgaaaaagcttctgattataaaaaatggtataatcaaaaacataaagctttagcaaatattaaaaaaagtatttattctttacctgaaataactggaaaaaaagtaaaagattttaaaataatttcttgtccaggatgttatccaacctcaattcttttaccattgcttccgttattaaaaagtaaattgattaaaaaaaacaatattataattgactctaaatctggatattctggagctggaagaggtgttcataaaaaatataaagataaaaatttatatgaaactcttagtgcttatggaattggctctcatagacacaatcctgaaatagaccaaatgattaaaagattcacaaaagtaaaatcttctttcgattttactccacatttatcaccaatgtttagaggaatattaagtactatttatgtagatttgaataaatctagctctcaatcaaaaattattaaaaatttgtccaatttttataagaaatctacttttgtaaaaataatgagcaaagatagattgataagtactaatg

SEQ ID NO: 215553 - DNA, 124 bp, Unknown
  Bacterial polypeptide expressing nucleotide sequence isolated from the Sargasso Sea
aaagaaaaaagaaaaatccttatttggtcagccattgataatttagttaaaggagctgcaggtcaagcaattcaaaatatgaatataataaataattttaaagagaacttgggtattaaatgaa

SEQ ID NO: 215554 - DNA, 697 bp, Unknown
  Bacterial polypeptide expressing nucleotide sequence isolated from the Sargasso Sea
atgaaaaataagattagagcggccgttttaggctcaaccggctatgttggaatggagttagtaaaaatcctatcaaatcattcttacgtagatataaattttctaggatcagaaactattcatggcagttatttaaataatattgataatacaaaagaatataatcaacttcctcttttaagaccaaataatagttttaatactgaagatagtgattatgtttttttagctttacctcatgctgtatctaataaatatgtaaaaaaatattttaataaaattaatattatagatttatcagctgactttagattagataattttgatgtatataaagaaaattatggcagtgaacatgagtgcaaagagtatttaaaaaattttatctacggtctcgctgaaataaacagagataaaatagaaaattcaaaaaatattgcggtacctggatgttatccaacttctattttattaccattaatacctttgattaataataaattaattgataccaagaatataattattgattctaaatcaggttatagtggagcaggaaagaaatttgatttcaacaaaatgaaatcaaaaaatgattataatttttacaattataatacaaataatcacagacatattgcagaaattaaaaaagaacttaataaacatagttcaaaaaatgaagtaaagttttcat

SEQ ID NO: 215555 - DNA, 286 bp, Unknown
  Bacterial polypeptide expressing nucleotide sequence isolated from the Sargasso Sea
atgaaaaacataggaatcataggagcttcgggatataccggtgccgagttactcaggctaatagctgaacaccctgaatttaacctccaaattgcaactggagaaacccaagcaggcactgccatccgggatctatatcccagcctttcaaccgcataccccaatgcacactttgattcatttactcctgaaattgtcgacggccttgacctcgtattctgcgccttacctcatggagtgagtcaaaatgttatcccagatatatacgaaacagtgggtcacattt

SEQ ID NO: 215556 - DNA, 466 bp, Unknown
  Bacterial polypeptide expressing nucleotide sequence isolated from the Sargasso Sea
aaatcttaaaaagaaatttacacacaaaaatattttttcttctataaaagtttatggaatatctaatcacaggcacacagctgaaattgaccaagaatttaaaaaagtatctaaatcaaaaatacattacaactttactcctcatttagtacctacatttagaggaatgttatcaactatttatgttgagccgaagggaaatgtcacaatcaacaaaattcacaaagaattaaaaaattttcataaaaaaaatatctttgtaaaaatattaccaattaataaaaatttaggtacagaaaatgtaataaatacaaatttatgtgaaattagtgtttgtaaattaaaaggcagtaaaaagattatgatattatctgcaatagataatttaataaaaggagcatcaggacaagcagttcaaaatatgaatattatatacaatttaaatgaaaaaattggccttaaatga

SEQ ID NO: 215557 - DNA, 331 bp, Unknown
  Bacterial polypeptide expressing nucleotide sequence isolated from the Sargasso Sea
ttgactccaatgttcagaggtattcttagcacaatatatgtagatataaaaaataatgtaacaaaaaataaaattaataaatatttaaaggatttttataaaagtactaaatttgttcatattgcaaaaacagatactttattgagcacaaatgatgtgataaatacaaataattgcattatatctgtttgtgaaagtaaatataaaaacaaattaattattttatcagttattgataatttattaaaaggaggaagcggacaagcagtacaaaatatgaatttaatttataattttaaggaaaacgaaggattaaatgtcaaaaattaat

SEQ ID NO: 215558 - DNA, 218 bp, Unknown
  Bacterial polypeptide expressing nucleotide sequence isolated from the Sargasso Sea
aaaccctttcatccagataatgccgaagggtcagtttcccgatcttcgttctacggtccattcaaaccgatgttcaataggatgggcgtccgatatcagtggaagtcaatggatggtccaaaccagcatagacaatcttgtcaaaggcgcatcaggacaggcgatccagaacatgaatctgatgttcggattaacggaaacctgcggattgacctgaa

SEQ ID NO: 215559 - DNA, 922 bp, Unknown
  Bacterial polypeptide expressing nucleotide sequence isolated from the Sargasso Sea
atgcttggatcaactggatatattggtgttcaattaattaaattattaattaaacacaagaatgttaatattaaatatttatgtggtaattcatctgttggaaaaaaaatctcatcttatgatacttcgttaaagtcaaaaaagttacctaaaattacaaaatacaataaaaaatacttaaataatgttgatattatatttactgctctaccaaatggagaagctcaagaaatctcaaaagatttattaaagaaaaatactttaattgatttagctgcagattttagattaaaaaaaggttctgaatatttaaaatggtataaacaaaaacataaagcgttaaataatataaaaaatagtatttatgctttacctgaaataacaggagaaatagttaaaaaatttagtattatcggatgtcctggctgttatccaacttcgatacttttaccacttataccattagttaaaagaaaatctgttaacttaaaaagtataattatagattcaaaatctggatattctggagcgggaagaggtatacataaaaaatttaaaaacaagaatttatacgaatctcttagtgcgtatggtgtagggtttcatagacataattctgaaattcaacaagaattaaaaaattattcttcttcaaaaattaattttacatttacaccccatattattccaatgtttagaggaattttaagcactatttatttggatttaaaaccaggcattactctaaataaagtacaaaatattttgaaaaaatttcataaaaagaataaatttgtaaaagtaaagagtgttaactcttttcttagcacaaatgacgttatgaatactaattactgctttatttctgtctgcaaaactaaatttaaagataagataataattttatcggctattgaccaat

SEQ ID NO: 215560 - DNA, 556 bp, Unknown
  Bacterial polypeptide expressing nucleotide sequence isolated from the Sargasso Sea
atgagtaaggtagcaatagtcggtgccactggttttactggtatagaattactaaaaatattaaaagttcattctaaaattattaagattgatttattttcttttagtaaccctggaaaaaaaataaatgatttttgttcagatctaaagtttgatgacacattaaatgatttttcgagtattatttataaagattacgacttagttttctttgcttgtcctaatggtactgttatgaaagcatattcagattttaaggatgaggaagtcaagataattgatttagctgcagattttagattagatgatgaaaagatttggagagagtattatggtgaaaaacatatatgtccaaatttactttcaaaaacagtttatggactaactgagctaaacagagaaaaaataagagatgcgacaatagttgctaatccgggatgttatccaacagctgctataatttcactatttccgttattaaaagaaaaacttatagaagaaaaaaatattattatcgatgcaaagtctggttatagtggagcaggaagagtaaatc

SEQ ID NO: 215561 - DNA, 688 bp, Unknown
  Bacterial polypeptide expressing nucleotide sequence isolated from the Sargasso Sea
catgaataataagataagagtagccgttttaggctccacgggctatgttggaatggagttagtaaaaattctatcaaatcatctttacgtagacataaatttcttaggatcagaaactattcatgatagttatctaaataatattgataatacaaaagaatataatcaacttcctcttttaaagccaaatgatagttttaatgtagaaaatagtgattatgtattcttagctttacctcatgcagtgtcaaataaatatgtaaaaaaatattttaaaaaaattaacattatagatttatcagctgactttagattagataattttgatatttataaaaaaaattatggtaatgaacatgaatgcaaagagtatttaaagagttttatttacggtcttgcagaaataaatagagataaaatattaaattctaaaaatattgcagtacctggatgctatcctacttctattttattaccactaatacctttaataaaaaatgaattaatcgatactaaaaatataattatagattctaaatcaggttatagtggagcaggaaagaaatttgattttcataaaatgcaatctaataatgattataatttttataatttacatacaaacaatcacagacatattgcagaaattaacaagaactttataaacataattcagaatatgaaataa

SEQ ID NO: 215562 - DNA, 751 bp, Unknown
  Bacterial polypeptide expressing nucleotide sequence isolated from the Sargasso Sea
attgcctaaatttattaatattaatgatattaattatgataatatagatttagtcttttcaggacttcctcatgataatttacataatttaatcaatactatacctagaaatattaaagtaatagatatgtcatcagacttcagatttaaaaatgtagatatttataaccaatattatgaaacagagcataattccaaagaattattaaaagattcagtttatggtttaactgagatctatagaaataatattaaaaaagctaggattgtagcttgtccaggttgttatccaacagcagttcttttgtcaataatacctttagtaaagagtaatattattgatttagaggatatcattgctgatgctaaatcgggcgtatctggcgcaggcagaggattaaaaaatgaattattgttttctgaaatagcagagagtatgaagccctataatgtatcaaaacataggcatacacccgaaattgaggagaagatttatttagaatctaataaacaaattaagattagttttacacctcacttagttccaattaatagaggagaattagtaactttatatttaaaattaagtaagaaccataaattaaatgatgcaatagcgtgcttaaatcatttttataaagatgatgaatttattattatttcagattcaggaaacccagcaaatacttctaatgtaaggggttcaaataattgtttaatatctgtttttgaagatagaatccaaggaaga

SEQ ID NO: 215563 - DNA, 817 bp, Unknown
  Bacterial polypeptide expressing nucleotide sequence isolated from the Sargasso Sea
atatctttttttgataaaagaattaaaaaaaagctaccaaaattatcttcaattaaaaatattaattggagcttacttgatttagtttttctttctttaccaaatggcgaagctcaaaaaattattaagaaaacttattataagtataaaaaattaaaatatttagatctatctgctgattttagaattaaaaatcctaatattttttacaaaaattataagatcaaacataaagccaaagaattgatcaaagactctatctattcaataagcgaatttaataagagcaagattcaaaattatagaataatttctaatccagggtgttatcctacttcgatccaaataccattaataccattattattaaagagacttataaaattaaatgacattgtaattgatgctaagtctggttactcgggcgcaggtaaaaattttgaagttaaatttaaacataaaaatctttacacttctgccttcgcatatgctgtaaaatcacatagacatatttgtgaaattgaccaagaatttgaaaagatatgtaaatccaaaattcactatacatttaacccacatttactcccaacttttagaggaatattaacaagcatatatttaaaaccaaataaacatactaatatttcaaaaataagaaatgctttattgaaattttacaagaattcaaaatttataaaaatccataatttagataccgaaataggatccggaaatgttttaaatacaaataattgtgaaatatcagtttgtaaaacaaaagataagaataaaatcgtaattttttctgccattgata

SEQ ID NO: 215564 - DNA, 938 bp, Unknown
  Bacterial polypeptide expressing nucleotide sequence isolated from the Sargasso Sea
atttaataaattctgttatcaaaacacccaatgggtgaatattacaaacttatgcgctaaaaaaaacctaggtaaaaaaattgtttattttgataaaagaattaaaaaaaaattacctaaaataacttctataaaagatattgactggaaaaaaatagaccttgtatttctatctttaccaaatggtgaagcgcaaaaaataataaaaaagacctattataaatttgataaattaaaatatatagatctatctgctgattttagaataagaaattcaaagatttataaaaaaaattacgggcttaatcataaggctaaagatttaataaaaaattcaatatattcagttgctgaatttactaaatcaaagattaaagattttagaataatttctaatccaggctgttacccaacatcaatacaaatacctttagtaccattaataaagaaaaaagtaattaaactagataatatagtaattgattctaagtctggatattcaggagctggaaaaaattttgaaaagaaatttacacataaaaatttatataaatctactttcgcttacggaattaagaaacatagacatgtatgtgaaatagaccaggaattttcaaaacatactaataaaaaagtcaaatttacttttaacccccatttaatacctacttttagaggaattctttcttcaatttatataaatacaaacaaaaatataaattcgaacaagatcagatcggcattaaagaagttttacgaaaaaaatagatttgttaaaatcttaaatataaatactcaaattggttcaggtaatgttttaaatacaaataattgtgaaatttcagtttgtgatacaagaataaaaggtagaattgtaattttttcagctttagataatttaattaaaggagcatcaagtcaagctgtgcaaaatatga

SEQ ID NO: 215565 - DNA, 404 bp, Unknown
  Bacterial polypeptide expressing nucleotide sequence isolated from the Sargasso Sea
ttctcataaacatatggctgaacttgatcaagaattatcaaaaatatccaaaaagagagttgaagtattcttcacacctcatctaattccaatgtttagaggtattttatctactatatatatagacactcataacaatatagatgctaagaaaatttataaatatttaaaaaattatcacaaaaaaaattattttgtaaaatttgctaaattcaatcaacccattgggacaggtgaagttatgaatacaaatttttgtaatatttctgtctgcaaaagcagaataaaaaataaagttattatactttctactattgataatctaattaaaggtgcatcgggtcaggctgttcaaaacatgaatgtggcctttaaatataaagagagtttaggtttagtatgaa

SEQ ID NO: 215566 - DNA, 301 bp, Unknown
  Bacterial polypeptide expressing nucleotide sequence isolated from the Sargasso Sea
cacaatttattttcagtctaatgaaaaaatagacttaaaagaatatgttagttatttttctgagcatccctttgtaaatgttcttaatgaatctccaaaagttaaagatgtaaggggaacgaataattgcaacttgttcattcaggaattaaagaagaataatgatctaaattcatatagaataatatctgtaatagataacctaacaaagggtgcttctgggcaagcggttcaaaacatgaatttgatgtttgattttaaagaaatgcttggtttaaataatatgccattgtatccttaa

SEQ ID NO: 215567 - DNA, 559 bp, Unknown
  Bacterial polypeptide expressing nucleotide sequence isolated from the Sargasso Sea
tatccttggactgctacctttagttaagaataagcttccaatagattcaattattattgatgcaaagtcaggaattagtggggcaggtagaactaaagttaatgaaaatctaaaagatgacattcatgaaaactttagagcatatgctactggaggacatcgacatctccccgaaataattgaagtccttgaaggaatttatgggtcatctttaaaaattaattttttacctcaccttattcccgccatgaggggaatctactcaacaatatatgttaatttcgaggatgctcagaataaatcaatagaagagatttatagagatttttaccaagactcacttaatattgaattaatgttagatggtcaggttcctgaaattctaaaagttgctgagacaaataattgtcagataggtatttatcaatcagccattgagaatcaaattgtgatcatttcagctattgataatttagttaagggagccgcaggtcaagcgatagaatgttataatctaattactggtaattatcaattgaaaggtataaatgatggttga

SEQ ID NO: 215568 - DNA, 523 bp, Unknown
  Bacterial polypeptide expressing nucleotide sequence isolated from the Sargasso Sea
aatgactaaaaatagtataaacattgttgtggctggggctacaggatatgtaggtttagatttagtatatctactatcaaaacacccgaatataaagattaaacacctctgtgcgcaaagaaacctaggtaaacaaataaatttttttgataaaagaataaaaagaaaactcccaaaaattacagcaattaattcggtagattggaatgaaattgatttactttttttatcattgcctaatggtgaggcacaaaaattaattaaaaaactttatgagaagtatcaaaatttaaaatttattgatttatcagcagattttagattagaaaataaaagcaaatatcaaacaacttatttaaaaaagcataaagcaaaaagtttaataaataagtctatatattcagtttctgagctcaagggtagcaatcttaaagattttagaatagtagcgaatccaggatgttatccaacgtctatccaaatcccattgatacctttatttaaaaaaaaactaataaatctt

SEQ ID NO: 215569 - DNA, 261 bp, Unknown
  Bacterial polypeptide expressing nucleotide sequence isolated from the Sargasso Sea
aaatttcagaaaagcaaattataaatatttataaaaatttttatgaaaatgaattctttataaatatagaggaatcaaaaattgtagaactaaaagatgtagttaatacaaataatgtttcaatttcttgtcacgcgaataaaaaaaataaacttataatagtttcagcaatagataatctcttaaaaggggcggcagggcaagcaattcaaaatatgaatttaatgttaggagttgatgaaaaaacatcattaaaatgag

SEQ ID NO: 215570 - DNA, 800 bp, Unknown
  Bacterial polypeptide expressing nucleotide sequence isolated from the Sargasso Sea
attgttaccaaataaacagctttacaaaattattaaggatcttcctagtgaaataagcgtaattgacttatcaatcgattttcgacttaataacgaacaggactatttaaattggtacgaatttaaacatgataatccagatcttatcgaagattttaaatacggattgactgaattgaatagaagtcaaattaaggcagcaagacatattgcaaatccaggatgctatgcaactagtgttttaataccattaacaattttagttcaggaaaaagctataagaactgataatattattattgatgcaaaatctggctattctggagctggtaaaactaaagataagcatcagctattaaaagatgtacacgaaaatattaaaacatacggtgtcggcgaccacaagcacatagcagaaattaaccaagagttaactattcataataatggtaaaaatatagaagtatttttttcagcaaacttaattcctgttgaaagaggaatattatctaatatttatataagtcctgttgagttatcagcagaagagattcaaaggatattatatgataaatttaaagatgaggcttttatcaaaactttaccactaaatgaaattccaactactagggaagttttaggaacaaataatctaataattggagttaaaaaaggatataagaatgatacaatttgtatagttagcgctctcgataatttagtgaagggtgcagcaggacaggccatgcaaaattttaatttaatgaatgagatagatgaaggaatagcattgatatgaa

SEQ ID NO: 215571 - DNA, 286 bp, Unknown
  Bacterial polypeptide expressing nucleotide sequence isolated from the Sargasso Sea
ttatgttgagccgaaggaaagtgtcacaatcaacaaaattcacaaagaactcaaaaattttcataaaaaaaataactttgtaaaaatattaccaattaacaaaaatttaggcacagaaaatgtgataaatacaaatttatgtgaaattagtgtttgcaaattaaaaggtagtaaaaagataatgatactatctgcaatagataatttaataaaaggtgcatcaggacaagcagttcaaaacatgaatattatttataatttaaatgaaaaaatcggtcttaaatga

SEQ ID NO: 215572 - DNA, 848 bp, Unknown
  Bacterial polypeptide expressing nucleotide sequence isolated from the Sargasso Sea
aaattttatgataaatctttatctaaatataaattaccaaaaatattaaaatttaataaaaaattattaaaagacgttcatgttatttttacagcacttccaaatggtgaagcacaggatatatctaaacatttaagcaaaaatcacactctaatcgatcttgctgcagattttagattagaaaaagcgtctgattatttaaagtggtataaacaaaaacatcgagcaactaatttaataaaaaatagcatttatttactacctgaaataaatagaaaagagattaaaaaatataatattatttcatgtccaggctgttatccaacatcaatattgcttcctctatttcctttatttaagaaaaatttaattaaattaaataatattataattgattcaaaatctggatattcaggcgctggtagaggagttcataaaaaatataaagataaaaatctatatcaatccttgagtgcttatggagttggttttcatcgtcacaattctgaaatagatcaaatgttaagaaaatttactaaaagaaaatttcaatttagttttactcctcacttatcaccaatgttcagaggtattttgagtactatatatcttgacttagaaaataatatttcacaatcaaaagtattaagcacattagctaaattttataaaaatgagaaatttgtaaaaatattaaagcccgattcatttttaagtaccaatgacgtaattaatactaataactgttatatttctgtgtgcaaatcaaaatatagcaataaaataatcattctatctgctattgataatctaattaagggtggggcaggtcaagctatacaaaattt

SEQ ID NO: 215573 - DNA, 406 bp, Unknown
  Bacterial polypeptide expressing nucleotide sequence isolated from the Sargasso Sea
atgacaaaagtattcattgatgggcaatcgggtacgaccggacttcagattttcgatatgcttcgtagccgttccgacctggaaatcatcacgatcccagagactcaaagaaaaataccagaggctagaaaggagctactcaattcgtctgatatcaccattttatgtttgcccgatgatgcggcgatagaggcagccaaatttagagaaagcgaaactcgaataattgatgcgagcaccgcgcaccgcatcgacgaccaatgggtttacgggcttccagagctcagcgaggatcataggcaacaaatccgagatgctgaattagttagcaatccaggttgctacccccaaggttttatattgctagtgaaacccctgatagatgcgggaattcttgagagacaag

SEQ ID NO: 215574 - DNA, 784 bp, Unknown
  Bacterial polypeptide expressing nucleotide sequence isolated from the Sargasso Sea
tatgggtaagaaaaatgttcttatatgtggtgctactggatatattggattacaactaacaaaacttctatgcacacataaaaaaatagatattaaatatttatgtggaagtacttctgttggaaaaaaaatagatttctatgaacaagaactaaaaaaatataaactaccaaaaatatcaaaatttaaaaaagaatatttatcagatgtggatataatatttacagcattgccaaatggtgaggcacaatctatctcaaaatttttaaataaaaataatttactaatagatctatcagctgattttaggctcaataataaaaaaaattatgaaaaatggtataaaattaaacacaaagcattaaatcaaatcaaaaaaagcatttattctatacctgaaattagtggtaaattaattaaaaaatttccaatagtatcttgtcctggatgttatcccacatctgtattaattccattgatcccgctaataaaaaaaaacttaattaataatcaaacaattattattgattcaaaatctggttactcaggagcaggtagaggagtacataaaaaatataaagataaaaatttatatgagtctattagtgcttatggattagctaatcatagacataattctgaaattcaacaagagcttgatcttaaaactggcaaaaaaaataaatttcatttcacacctcatcttacacccatgtttagaggaattttaagtactatttatgttgatttaaaaaaaggtattaaaataaacaaaattatttaa

SEQ ID NO: 215575 - DNA, 425 bp, Unknown
  Bacterial polypeptide expressing nucleotide sequence isolated from the Sargasso Sea
gatatttttaataaatattatcaaacttcacacaaatcacctgaaatattagaagttagtgtttatggtttatctgaaatttttagaaatgatatcaagaatgctagagtagttgcctgtccaggaagttatccaactgcagctttactatctataatacctttaattgagggaggaatcatttctttagaagaaattattattgatgctaaatctggtgtttcaggcgcagggagatcaaataaagaagaattaatgttttcagaagtatcagaaagcatgaaaccatacaatattggtaaacatagacatactcctgaaattgaaaagggtattgaaagcataagtggtaaagaaataaaaataaactttacccctcatttaattcctataaacagaggggaattgcttactatatacctaaa

SEQ ID NO: 215576 - DNA, 463 bp, Unknown
  Bacterial polypeptide expressing nucleotide sequence isolated from the Sargasso Sea
atgaaaaataaaattagagtggccgttttaggctcaaccggctatgttggaatggagttagtaaaaattctatcaaatcattcttatgtagatatcaattttttaggatcagaaactattcatggctgttatttaaataatattgataatacaaaggaatataatcaacttcctcttttaaaaccaaatgttagttttaatcctgatgattgtgattacgtatttttagctttacctcatgctgtatctaataaatatgtaaaaaaatattttgataaaattaaaattttagatttatcagctgactttagattagataattttgatgtttataaaaaaaattatggtaatgagcatgaatgcaaagagcatttaaaagattttatttatggtcttgctgaaatatatagagaaaaaatattaggttcaaaaaatatagctgtacctggttgctatccaactt

SEQ ID NO: 215577 - DNA, 842 bp, Unknown
  Bacterial polypeptide expressing nucleotide sequence isolated from the Sargasso Sea
taatatagttgtaataggagcaactggatatacaggattagatttattttttttactatccaaacatccaaaagcaaatataataaatttgtgcgctacgaaaaagttaggaaaaaagattaatttttttgacaaaagaattaaaaaaaaattaccaaaaatatcttcaattaaaaagattaactggaaaaaaattaatttagtatttttgtcgttgccaaatggggaagctcaaaaaattattaagaaaatttattataaatatcaaaatataaaatttattgatttatctgctgattttagaattaaagacgaaaaaaaatataaaaaatattataaaaaaaaacataaagctactaaacttataaagaattcgatatatgctatatctgaatttgttaaaaatgaaatttataaatatagaattgtagcaaatccaggatgctatccaacatcaatacaaatacccttaattcccttaataaaaaagaatttaatcaacacaaaaaatataactatagactctaaatctggttattctggtgcaggtaaaaatttagaaaaaaaatttagacacaaaaacttatattattcaacttttgcatacagtacaaaaaatcatagacatatttcagaaattgatcaagaatttaaagaacatactaaaaaaaatattaaatttacttttaacccacatattctaccaacttttagaggcattttgacttctatatatattgaattaacaaagaactcttcatctaaaaagataagaaatgaattaataaaatactataggaatgataaatttataaagataatgaaattaaattcagaagttg

SEQ ID NO: 215578 - DNA, 688 bp, Unknown
  Bacterial polypeptide expressing nucleotide sequence isolated from the Sargasso Sea
atggtataaaaaagatcataaagcaaaatataatattaagaatagtatttattctttacctgaaattactggtaaaaaagttcaagattataaaattatttcttgtcctggatgttatccgacttctattctattacctttaatacctttattaaaaaatagattaataaaaaattataatattataattgattcaaaatcaggatattctggcgctggaagaggtgtacacaaaaaatataaagataaaaatttgtataaatctttaagtgcttatggtgttgcatcacacagacataattctgaaattgaagaaatgataaaaaaatgtgttaaaggaaatattcaatttgattttactcctcatttatcacctatgtttagaggtattttaagcacaatttatgttgagcttaataaaacttcttcagcatctaaaatattaaacacgttgaaaaaatattataaaaaagcaaattttataaaaatattaaataaagacaaattaataagcacaaatgatgtaattaatacgaataattgcaatatatctgtttgtaaatcaaaaaataagaataagataattatactttctgctattgataatcttatcaaagggggagcgggtcaagctatacaaaatatgaatatgaaatttaattttccaaaagatgctggttttaaatga

SEQ ID NO: 215579 - DNA, 781 bp, Unknown
  Bacterial polypeptide expressing nucleotide sequence isolated from the Sargasso Sea
atgatttcagtgggcatagtcggcgcgtcaggttacacaggtgaagaactgataaaacttcttattgcgcatcctgaagcatctatagatgttttaacatcaagaacctatgctggaaaatgtgttgatgatatttatccatttgatgaaaaattggaaaaatactttttagaacctgttgtagataatctattatcatgcgatgtagttttctttgcttcacctaatggcgtcgcaatgaacatggcaaaagaacttataaaaaataatatcagaataattgatatatctgctgattttagaatacctgatgtagatatttgggagaaatggtacggacaaaaacatacttgtccagaattgattgaagaggctgtttatggacttcctgaaataaaaaaccaaaaagagaaaatatcaaaagctaaaattattgctaatcctggatgttatccaactgcatcactcttaagccttttacctattattagtttaattcaacaacaaagaattattattaattcgacatcaggcatttcaggtgcaggaagaaatctaaatcctgaaaaactattttctgctggtaccgataattatcaggcttatgccattgctaaacatagacactacccagagatgcttgctcagataaatagcataaataaaggtattgatttactttttgtccctcacttaagttccatagatagagggatttattctactcataaaataactttgccaaatttaaaccttaaacagctttatgatatttataatg

SEQ ID NO: 215580 - DNA, 784 bp, Unknown
  Bacterial polypeptide expressing nucleotide sequence isolated from the Sargasso Sea
agaagcgcaggatatatctaaacatttaaacaaaaatcatactctgattgatcttgctgcagattttagattagccaaagcttctgattatttaaagtggtacaaacaaaaacatcgtgcaactaatttgataaataaaagtatctacttacttcctgaaataaacagaaaagagattaaaaagtataatattatctcatgtccaggttgttatccaacttccattttgttgcctctgatacctttattcaagaaaaatttaattaaatttaatagtatcataatagactcaaaatctggatattcaggagctggtagaggtgttcacaaaaaatacaaaaataaaaatttatacgagtctttgagcacatatggagttggttttcatcgtcataattcagaaatagatcaaatgttaagaaaatttactaagaaaaaatttcaatttatttttactcctcacttatcaccaatgttcagaggtattctaagcacaatatacctcgacttagaaaaaaatatttcacaatcaaaagttttaaatgcattagctaatttttataaaaatgagaaatttgttaaaatattaaaatctgacacattattaagcactaatgacgttataaatactaatgattgccatatttcagtatgcaaatctaaatacactaataaaataataattctttctgctatagataatctaattaagggtggagcaggtcaagccgtgcaaaatttaaacaataaatttaattttcctgaaaagactggattaaaatga

SEQ ID NO: 215581 - DNA, 538 bp, Unknown
  Bacterial polypeptide expressing nucleotide sequence isolated from the Sargasso Sea
actccgaaactcttggaacagggtatacgcgtcattgacctttccggagtttatcgcatccgtgacatcaaaatttttgaggaaagttacgcactcaagcacagttctccgggacttctggaggaagcagttttcggactcccggaatattttcgttcatccctgagtgatgcgcgtctggttgccaatccaggctgttatcccacaggagccctgctcggaatcctcccatttggcgatctgctggaatcattgtacaggccgccgatcattgatgctaagtccggcgtcagcggagcaggaggaagggttgaggatgatgcgaccaattatgtggaagtgaatgaaaacttcaaagcttacaaggctttcaagcatcagcatcagcctgaaattaaacagtatttggaggatcttagtcctttcgaaagtaaaaccattggtgagccggttttcacgccctacctgctgcccttgagcaggggcatcctttccgggatttatcttcatttcaatcgcagaatcaatgaatcggaaa

SEQ ID NO: 215582 - DNA, 595 bp, Unknown
  Bacterial polypeptide expressing nucleotide sequence isolated from the Sargasso Sea
actgcaacagggagccataataccacttaaacctcttgtcgaaaatttctctataaagaatatcgtcgtagatgcaaaagtaggatcatcagcatcgggagctcatgttagtcaaggaactcatcatcctgaaagacagggagtagttagaagttataaaccaagcatgcatcgccatatagctgagatgcaacaagaattaaataaagatgggaagatatcaatgaacttttctcctcatgcagttgaattggttagaggaattcaaagtacaatacatatatttatggaaaatgattttgatgaacgtgatatctggcaggcataccttaaatattataaagatgaaccttttgttagatttattagggaaaaatctggaggatatcgctttcctgagccaaaaatagttatgggaacaaacttgtgtgatattggatttgaaaaagatcccttaaccggaaggcttattgtgatttcagctatagataatctagttaaaggtgctgcaggtcaagcaattcaatgtatgaacatttgtactggtcttgatgaatcaactggattaaatcaactagggtttcaccccatatga

SEQ ID NO: 215583 - DNA, 801 bp, Unknown
  Bacterial polypeptide expressing nucleotide sequence isolated from the Sargasso Sea
ctaaaaaattcaataaatttaataattagaaataattatgatattagaaattataaagatatcgatgttgttttttcatgtatgccgcagggtgagctatccaaaaattttagcaaatttaagttccaaaaaaatcaatgtttaattgacttaagtgcagattttagattaccagagaatttaaatcaaaaatggtatggaataaaaaggaataaagatatttacaaaaaatttcaatatattctcccagaattaaatacaaaaaaaataaggaccaaattcgtttccaacccaggatgttatgcaacatctattgcgcttgcaattgctccactaaataaagtcttaagtacagaaataataatcgatagtaaatctggaatttcaggtgctggaaaaaatacaaatattcaatatttgttcaatgaagctaatgaaaatttcagtatttataatgctggtgaacataggcatgccccggaggttgaaaattttattaaagtgaattacaagaaaaaaattaatatttttatggttcctcaacttttaccaattacaagaggaatcctttcaaatgtttatgttacgctcagaaaaaatattacagaaacttcattgaaaaatatatttataaagttttacaaggataagaattttataaaagtattaaatagtggattaccatcaatcaaagatgttctcaatacaaacaattgcattatagggataaaaaaaattaaaaatactcagacctttatgatcacaagtgttattgataatttgttaaaaggtgcatcgggt

SEQ ID NO: 215584 - DNA, 366 bp, Unknown
  Bacterial polypeptide expressing nucleotide sequence isolated from the Sargasso Sea
gaatttatggatcatctttaaaaattaattttttacctcaccttattcccgccatgaggggaatctactcaacaatatatgttaatttcgaggatactcagaataaatcaatagaagagatttatagagatttttaccaagactcacttaatattgaattaatgttagatggtcaggttcctgaaattctaaaagttgctgagacaaacaattgtcagataggtatttatcaatcagccattgagaatcaaattgtaatcatttcagctattgataatttagttaagggagcagcaggacaagcgatagaatgctataatctgatcactggcaattatcaattgaaaggtataaataatggttgaa

SEQ ID NO: 215585 - DNA, 809 bp, Unknown
  Bacterial polypeptide expressing nucleotide sequence isolated from the Sargasso Sea
aattttatctaaacatccaaacgttaatattgttttttttggaactgaaaataacccagacacattacttggagatattgacccaacaatcaaactttatagtaaatctcttactcaacttaatgaaaaatttgaccattcttcagtcgatacagtatttatggcacttccgcatggcgtatctcacaattatgtaaagtcattttacgataaacttcagatcattgatttatctgctgattttaggttagataatattgaaatatataaaaaaaattataatgagaaacactcagcttcaaatttacttaatgaatttcaatatggacttgttgagataaatagaaattttctacttaataaaaagaatatagcagttccaggttgttatccaacttcagctcttattcctttaatacctttattaaaaaatgaaattattgattcaaagaatattataattgattctaaatcaggctatagtggggctggtaaaaaatttgatttggataacattaaaaatccaaaagactataatttttataattataatactaatagtcatcgacatatttgtgaaattaagcaagaattaatgaagcatacaaaattatcagatgttttattttcatttaatcctcatatccttcctaattttagaggcatgttatcaactatgtattgtgatttattaccaggtatgaataaaaataatgtaattaattgtttgaatgaaatcgccattaacaatgaatttataaaatttatacatgatgatcaaagagcggatttttttctattcaaataca

SEQ ID NO: 215586 - DNA, 625 bp, Unknown
  Bacterial polypeptide expressing nucleotide sequence isolated from the Sargasso Sea
tatgtcatataacaaattaaaaatagctgtcattggtgctacaggatatactggattagacttagtttatttcctttctaagcatccaaaagtaaaaataacttatttaattgcaacaaaaaatttaggaaaaaaaatttcattttttgataaaagaattaataaaaaacttcctaaaatttcatctattaaaagtattgattggaagaaattagatctaatttttttatcattacctaacggagaagctcaaagattgattaaaaaaactttttacaaatataagaaacttaaatacatagatttatcagctgattttagaatttcaaatgccaagttatattcaaaaacttataaaaaaaaacattatgctaatgatttaataaaatattcattatattcaataagcgagcttaacaaacatagaattaagaatttcagaataatagctaaccctggttgttatccaacatcaatacaattacccttgatacctataattaaaaaaaatttaattgattttaataacatcatcattgactcaaaatcaggatattcaggtgcaggtaaaaattttaaaaaaaaatttactcatgataacctatttagttcaacgtttgcatat

SEQ ID NO: 215587 - DNA, 481 bp, Unknown
  Bacterial polypeptide expressing nucleotide sequence isolated from the Sargasso Sea
atgtcaaaaaataataaaaaccctgtattagtctccattattggcggcagcggttataccggtgcggagctaattcgtctgatttcaaaacactcttatttccagctgtatcaagttgtagctaatagaaacgccggcaaaaaaatccaagatatattccctcaccttaggcatttaaagttacctgactttataagttttgagcaaatgaattttgataatgtggatcttattttttgtgctttaccgcactcaaaaagccaggagataattgtaaaaattcctagagggaaaaaaattattgatctatcagcagattttagattggaacggattgaggaatatgaacgatggtatggatcaaaacatattgcgtattctttacaggaagaggcagtttatggcttaacagaaatatacaaagaagaaataaagaatgggtctttgattgcctgcactgggtgtaattccgctgcaactc

SEQ ID NO: 215588 - DNA, 356 bp, Unknown
  Bacterial polypeptide expressing nucleotide sequence isolated from the Sargasso Sea
aaataactttcaatttacaccacatttagcaccaatgtttagaggcatacttagcacaatttatgttgatcttaataatggtataaaaataaaaaatgtgaatgcagaattaaaaaaatattttaaaaatgaatattttataaaaattgctgatcctggcacttttataagcaccaatgatgtaataaatacaaataattgcattatttctgtttgtaatagtaaaaataagaataaattaattatactttctgcaattgataacttaataaaaggtggaagtggacaagctgtacaaaatatgaatatacgtttcaattttaaagagaacgaaggtctaaatgttaaaaattaat

SEQ ID NO: 215589 - DNA, 514 bp, Unknown
  Bacterial polypeptide expressing nucleotide sequence isolated from the Sargasso Sea
aatgtataaaatcgctattcttggagcttcgggctatacgggcgctgaattgatccgaatattatctaatcatcccgaaatggagattgaagtcttagcagctcattctaaagctagccaaaaaatggaaattgtgtttccccatttgcgatcactaaaattaccatctttagttacaattgatgatgtggatttttctaaaattgatctttgcttttgcgcattaccccataaaacctcgcaagaggttataagagttttaccaaagcatttgaaaataattgacctgagtgcggatttccgtctccaggacgctgctgaatatgaaaaatggtatggtaattctcatcaagctttggaaatacaagataaggcagtttacggattaacagaattttaccgtaaagaaattaggggtgcccgagtggttgctggtacaggatgtaacgctgcgactggcctctacattttacgccctctggttgaaaaggcattattgatcttgaaaacataa

SEQ ID NO: 215590 - DNA, 919 bp, Unknown
  Bacterial polypeptide expressing nucleotide sequence isolated from the Sargasso Sea
tatgtccataaaacataaattgaaaatagctgtaatgggtgcaactgggtacactggtttagatttagtttatattctatctaaacatcctaaagttgagatcgtaaatttatgtgctacaaaaaacttaaacaaaaatatttctttttttgataaaagaattaaaaaaaaacttccaaaaacatcatcaattaacaaaattaattggaatgatttagatttggtttttttgtcattacctaacggagaagctcaaaaaattataaaaaaaacttattacaaatttaaaaatttaaaatatattgatctatcagctgattttagaattactaacccaaaggaatattataaaacttataatataaaacataatgcaaaagaattaattaaaaaatcactatattcaataagtgaatttaataaatttaatattcaaaattataggattatttctaatccaggatgttaccctacatcgatacaattagcgcttaatccattattaataaaaaaattaataagtataaaagatattacaattgactcaaagtctggatattcaggtgctggcaaaggtcttaagaacaaatttaagcataaaaatctttttaattctacgtttgcttatagcgttaaaaatcatagacatatgagtgaaatagaccaggagttttataagattacaaaaaataaagttaattatacttttaatccatatttgcttcctacatttagaggtatcttgtcttctatatatgtaaatactaaaggaaaaataaaagctgaaaaaataagaaatgaattaaaaagattttataaaaagtctaaatttataagaattttaaaattaaattctgaattaggatctggggatgtcttaaatacaaataattgtgaaatatcagtatgcgaaactagg

SEQ ID NO: 215591 - DNA, 589 bp, Unknown
  Bacterial polypeptide expressing nucleotide sequence isolated from the Sargasso Sea
tatgaataaacaagtgaaagttgccgttttaggcgcgactggctatgttggtattgagttagtaaaaattttatttactcaccctcatgtaaaaataaattttttaggttgtgaaaatattaatagtaaaatatcagaaagaaaagacactatatttgataattcagagttaccaaatttatcaataaacaatgaatttaatcctatcaattcagatttagtgttccttgctctacctcatggtgtatcacataaatatataaataaatattataaaaaaattagaataatagatttatctgcagattttcgtttagattctgttttatcttacaaaacatactataatatagatcatagctgtcctgaattacttgataagtttatttatggtttgcctgaaattaatcattctaaaataataaataactataatatctctgttccaggttgttatcctacatcaatattattgccattaattccacttatgaaaaaagatttaattaaatgtgacaatataattattgattcaaaatcagggtatagtggagcaggaaaaaaatttgaaaagaaaaatattaaaaac

SEQ ID NO: 215592 - DNA, 801 bp, Unknown
  Bacterial polypeptide expressing nucleotide sequence isolated from the Sargasso Sea
aatgcctaagcttaatgcattagttgctggatctactggatatattggtgttcaattaatcaaattattaattaaacacaaatatattaatattaaatatttatgtggaaattcatctgttggaaaaaatatttcttattatgataaatctttatcaaaaaaaaaattaccaaaaattgttaaatttaatcaaaaattgttaaatggtgttgatgttgttttcacagctttaccaaatggtgaagctcaagatatagcaaaaaaacttaatcataatattattctaattgatttagcagcagattttagattagaaaaagttaatgattatttaaaatggtataaacaaaaacatcgagctccaaaattacagaagaaaagtatttattgtttacccgaaataaatcgtagtgaattaaaaaatcacaatataatttcatgtccaggatgttatccaacatcaatattgttgcctctagttcctttgtttaaaaaaaaattagttaaattagataatataattattgattcaaaatctggttattctggtgccggtagaggagttcataaaaaatataaagataagaatttatacgagtctttaagtgcttatggtgttggttttcatagacataattctgaaatacaccaatttttaagaaaatttactaataaaaattttcaatttagttttactccacatttgtctccaatggttagaggtatattaagtactatttatttagatttagagaaaaatgttaaatcatcaaaaatcatccaaacgcttaaaggagtttt

SEQ ID NO: 215593 - DNA, 167 bp, Unknown
  Bacterial polypeptide expressing nucleotide sequence isolated from the Sargasso Sea
agttcaaaatactaactatgtgagaattggtgtttttgctgatatatcaaaaagaaaaactataataatcagtacgatagacaatttagtcaaaggagctgccggtcaggctatccaaaatatgaatttaatgtttggttttaatgagtctgaatctttggtgtagt

SEQ ID NO: 215594 - DNA, 709 bp, Unknown
  Bacterial polypeptide expressing nucleotide sequence isolated from the Sargasso Sea
atgaaaaataagtttaaagtagccgttttaggctcaacaggctatgttggaatggagttagtaaaaattctatcaaatcattcttacgtagacataaattttttaggctcggaaactattcataaaagttatctaaaaaatattgaaaatacaaaagaatataatcaacttccacttttgaaaccaaatgatagttttaatgctgaacatagtgattatgtattcttagctttacctcattcagtatctaataaatatgtaaaaaaatattttgataaaattaatattattgatttatcagccgattttagattagataattttgatgtttataaaaaaaattatgggaatgaacataagtgcccagaacatttaaaaaattttatttatggtctcgctgaaataaatagagataaaatagtaaattctaaaaatatagcagtaccaggttgctacccaacttctattttattaccattaatagcattaataaaaaataaattaattgataccaagaatattattattgattctaaatcaggttatagtggagcaggaaagaaatttgatttcaataaaatgaaatcaaaaaatgattataatttttacaattataatacaaataatcacagacatattgcagaaattaaacaagaacttaataagcataattcagataatgaagtaaaattttcatttaatcctcaca

SEQ ID NO: 215595 - DNA, 623 bp, Unknown
  Bacterial polypeptide expressing nucleotide sequence isolated from the Sargasso Sea
aatgataaaagttggaataattaatgtcactggatatggaggcgctgagcttgctaggattttgtataaccacaagtcagttaaaatagtttctgttacaggaagaagcttggtagggaaaaaacttaatgaggtttttccacatttatatgatatggatttaactattaaagaatctataactgaaaattgtgatgttatattttccgcattacctcatacagcaagtgctgagcagataaaaaattatgtaaatgatgatgtgaaaattatagatttgagtgctgattttaggcttaacaacattaatgattatgaaaaatggtaccaggctgaacatccacttgaaaattatttaaataaatttacatatggattaacagagttatacagagagcaaattaaagaatcaagttatattgctttgccaggatgttttcctacatcaacattgttggcacttgcgcctgctttgagtaataaattaatcaaccctccgttgattattgattctaaaacaggagtttctggagcaggaaggaaactttcacttaacacgcatttttctgaaattaacgaaaatgtcaaagcttattctgtgtttggtcatagacatctttctg

SEQ ID NO: 215596 - DNA, 532 bp, Unknown
  Bacterial polypeptide expressing nucleotide sequence isolated from the Sargasso Sea
atgactcatagcatctttattgatggtgctgccggcactacaggattacaggtggctgacaggctggctcgacatccaggtgttaccgcgcatgctctcaacgacaaagagcgcaaggacaaaggcgctcgtcaacagttgatggcggcttcagatttgacgattctttgtttgcctgatgcggccgcgcgcaaggctgccgatatggcggcgcagacaggcgcgcgcttgatcgacgcatcatctgcacacagaacgcatgctgaatgggtttatgggtttgcggaattggacactggacaacgtgatgccgtcgcgaaagcaatgcggatcagcaacccggggtgctacccaaccgggtttttggcgcttacccgcccgctgattgatgccggtattttgccgcgtgacgcgttgctgaccgttccggcagtgtcaggctttagtggagggggcaatggcatgattgcgcgacaagccaacggtgcgctgccaagatatagtagctatggtgtgacgtggcacacaagca

SEQ ID NO: 215597 - DNA, 813 bp, Unknown
  Bacterial polypeptide expressing nucleotide sequence isolated from the Sargasso Sea
tatttatgtggaaattcttccataggaaaaaaaatatcattttatgacaagactatcaaaaaagaacttcctagaataagtaaattagataaatcaaaaatgaatgaatgtgacataatttttacagcattacctaatggtgacgcacaaaaaatatcaaagttactaaataaaaaaaatactttaatagatttatctgctgattttagactgaataatagtaaatcctattttaaatggtacaaacaaaaacataaatctgtaaaaaatattaaaaatagtatttattcattacctgagctgaatcagaaaaatattaaaaaatatcaaattatatcttgtcccggatgttatccaacatcaatattgctaccattaattccgttgattaaaaaaaaattaatactactagataatattataatagattcaaaatctggatattcaggagcgggtagaggtgttcataaaaaatatgcaagtaaaaatttgtacgaatctttaagtgcttatggagttggttttcatagacataactctgagatagaacaagaaatgaaaacttatattaatagtaagtttaaagtaacttttacacctcatttaacaccaatgtttagaggaattttaagtacaatatatatagatttaaaaaatagtattactcaaagcaaaatcattaaagagttaaaaaaattttataaaaataaaaaatttgtaaaaattatgaacaaagacaagatattaagcacaaatgatgtaattaatacaaactattgctacatatctgtttgcaaaactaaatataaaaat

SEQ ID NO: 215598 - DNA, 502 bp, Unknown
  Bacterial polypeptide expressing nucleotide sequence isolated from the Sargasso Sea
tatgacaagaaaagtatcagtagccatactgggctcaactggttttgttggtatagaactagttaaaatattatcaaaccatccgaatgttaatattgttttttttggaacagaaaacaaccctaatacattgcttaaagatatcgatcctagaataaatcttcaaaataatccatcaactgaattaaatacaaactttgattattctatagctgatacagtttttctcgcacttcctcatggagtttcaaacaaatatgtaaaatcattttacaataaacttcaaataatagatttatccgcagattttagactagacgatataaatatgtataagattaattatgatgaaatgcattctgctccaaatctattaaatgagttcatttatggacttccagaaattaataaaaatatattgaataataaaaataatattgcagttcctggctgttatccaacttctgtattaatccccattaatccctctataaaaaacaat

SEQ ID NO: 215599 - DNA, 439 bp, Unknown
  Bacterial polypeptide expressing nucleotide sequence isolated from the Sargasso Sea
ctcattagaaaatgatttgaaaaataacttcaaagcgtattcccctgaattccataggcatcaacctgaaattaagtcatttttagcttcaataaaaggtacaaataataaaattgtttttactccacatttattgccattattcagaggagaatatataactgcatatttagaagttgaaaatttcaacgaagatcttaataattgttacgaaaactactataatgaaagtaagtttgtaagaattttaaaaaaaggtacaatacctgaattgtcaaaggtacaaaatacaaatttttgtgatattggcgtttttataaatgaaaatacagtagttgttcactcagctatagataatttgataaaaggtgcagcaggacaagcaattcagtgtttgaacttaatgataggtgaaaaagaagaatatattttagaataa

SEQ ID NO: 215600 - DNA, 756 bp, Unknown
  Bacterial polypeptide expressing nucleotide sequence isolated from the Sargasso Sea
tatgcataaattagatgtattagttgctggatctactggatatattggcgtccaattagttaaactattagctaatcacaaaaatattaatataaaatatttatgtgggaatagttcggtaggaaaaaatatatccttttttgataaaaaattaaaaaataaaaaattacctaaaatcgttaaatttaaaaaagtatttttaaaagatgttgatataatatttaccgctcttcccaatggtgaagcgcaggatttatcgaattatttattaaaaaaaaatatattaatagatttagctgcagactttagacttgatgatgccaatcagtataaaaaatggtataaattgaaacataaatctaaaaaaaatattttaaatagcatatatgcacttcctgaaaataacaaaaaaagctttaaaaaatacaaaataattgcttgtcctggatgttatccaacatctatacttctgcctttattgcctttggtaaagaataatttaataaaattaaataatatagtaatagattcaaaatctggatattcgggagcaggaagaagtatacacataagaaacgcaaaaaaaaatctatatgagtcattaagtgcttatggattggcaactcatagacataattctgaaattgaacaagaattaaaaaaagttacatctaaaaaatttgcatttacttttacacctcatttatcaccaatgtttagaggcatcctaagcactatataccttgatataccaaa

SEQ ID NO: 215601 - DNA, 307 bp, Unknown
  Bacterial polypeptide expressing nucleotide sequence isolated from the Sargasso Sea
ggcatctactcaacaatatatatacaattagaagaaaccgtatatttaaatattcaagatttatatgaattattttacgaagattcaccaaatgtaaagattatgcaacctggacaggtgcctgacataaagtcgattacaaatacaaataattgcaatatttctgtcaataattccaacatccccaatcaattggtgttgatttcatccattgataatttagttaagggggctgctggacaagcggttgaatgctacaatttaatgaatggttttaatcaaagtacaggaataaaaaatggttgag

SEQ ID NO: 215602 - DNA, 637 bp, Unknown
  Bacterial polypeptide expressing nucleotide sequence isolated from the Sargasso Sea
ttgccagaattttctgaaagtaaattgaaaaattataatataatttcatgtcctggatgctatcctacatcaatacttttacctctcatacctttaataaaaaaaaaaattataaatttaaaaaatataattatagactctaaatctggatactctggtgctggcagaagtgttcataaaaaatataaaaatcttaatttatatgagtcaattaaagcttacggcgtaggatttcacagacataattcagaaatagagcaagaaataaaaaaaattacaaaaaaagataattttaatataacttttacacctcatttaactcctatgtttagaggtatccttagtactatttatattgaaacaaaaaaaggatataaattgaaggatattaataaggaaataaaaaaaacatttcttaataaaaaatttgttcatattaaaaaacctaatagtttaataagtactaatgatgtaattaattccaatttttgttatatctcagtctgtaaaacaaaatataaaaataggtttataatactttcggcaattgacaatttaataaaaggtggatcagggcaagcagtgcagaatatgaatataagatttaatttaccacaaacttcaggtttgatatgaa

SEQ ID NO: 215603 - DNA, 859 bp, Unknown
  Bacterial polypeptide expressing nucleotide sequence isolated from the Sargasso Sea
atgcgtaagcttaatgtattaattgctggatcaacaggatatattggtattgaactaattaaactattggtaaaacataaaaacataaatataaaatatttatgtggacaatcatctgttggtaaaaatatttcaatatatgaaaaatctttaaaaaataaagatttaccaaaaatcattagattcaataaaaatcttttaaaagaagttgatgttatttttacagcactacccaatggtgaggcacaggaaatttcaaataaattgttaaacaataatattctgattgatttatctgctgattttagacttagaaaaagtaatgattataaaaaatggtataaacaaaaacataagtcaataaaaaatattaaaaatagtatttattcattacctgaaatttcaaaagataaagtaaaaaaatttaatataataagttgtcctggatgttatccaacgtctattctattaacactaatacccttgttaaaaatgaaattaatattaacaaataatattattattgactctaagtctggttattctggagcaggtagaggagttcataaaaaatacaaacaaaaaaacctatatgaatcattaagtgcttatggagttggttttcatagacataattctgagattgaacaggaattaaaaaagtttagccaaaataatataaatttttcatttactccccatttatctcctatgtttagaggtattttaagtacaatatatatagatcttaaaaataatgtgaaaattaaaaaagttcaggacacattgaaaaaattttataaaaatgaaaaatttgtaaaaattttaaaaattgactctcaaattaagtacgaatgat

SEQ ID NO: 215604 - DNA, 891 bp, Unknown
  Bacterial polypeptide expressing nucleotide sequence isolated from the Sargasso Sea
aatgactaaactaaatgtattagtagctggatccactggatatataggagttcaattaattaaacttctaataaaacacaaaaatataaatataaaatatttatgcggaaattcttcagtagggaaaaaaatatcattttatgatagaactattaaaaaaaaacttccaaagataatcaaattagataaatcaaaaataaatgaatgtgatataatttttactgctctacctaatggcgatgcacaaaaaatatcaaagtttctaaataaaaaaaataccttaattgatttatctgctgactttagactgaatgatagcaaatcatatcaaaaatggtacaaacaaaaacacaaatgtgtaaaaaatattaaaaatagtatttactctttacctgagcttaatcagaagaatatcgataaatatcaaattatatcttgccctggatgttatccgacatcaatattgttaccattaatcccattaattaaaaaaaaattaatactattgaacaacataataatagattcaaaatctggatattctggagcaggaagaggtgttcataaaaaatatttaagtaaaaatttgtatgaatctttaagtgcttatggagtcggctttcatagacataactcagagatagaacaggaaatgaaagcttatattaatagcaagtttaatgtaacttttaccccacatttgacgccaatgtttagaggaattttaagcacaatatatatagatgttaaaaataatataactcaaaatataattataaaagagttaaaaaaattttataaaaataaaaaatttgtgaaaattatgaacaaagataaattattaagcacaaatgatgttattaatacaaattattgctacatatctgtgtg

SEQ ID NO: 215605 - DNA, 472 bp, Unknown
  Bacterial polypeptide expressing nucleotide sequence isolated from the Sargasso Sea
atgttttgtactgttgatgaaaacttctcagcttatggtctactttcacaccgacataccccagaaatagaacaagcacttgctacagaaggtaatggaaataaaagagaagacatttcattgctgttcacaccgcatttggcaccaatgaacaggggtattttggccacttgctatgccaaagtaaaagctgaacttgatacagatactgcaatacaagttctagctgagacctattcaggtatgccttttatcgtggttgatgaaaagtcgcccagcacaaaatcaacttttggttccaatgctgctcacataacagcacgagtcgacccaagaactggctggctaatctcactttgtgcaatagataaccttggcaaaggtgcttctggacaggctgttcaatgcgcgaatatcgttctcgggcttgacgaaacagaaggacttagtgcagttgggataagcccatgac

SEQ ID NO: 215606 - DNA, 745 bp, Unknown
  Bacterial polypeptide expressing nucleotide sequence isolated from the Sargasso Sea
atgtctaaaaagaagattaatatagctgtaataggagcaacaggatatacaggtttggatttagtttttttactatccaaacatcccagtgcgaatattaaaaatttatgtgcaacaagaaatttaggaaaaaaaatttctttttttgatcaaagaattaaaaaaaaattaccaaaaatatcttcaattaataaggtacattggagtaaaattgatttagtatttttttctttaccaaatggagaggcccaaaaaattattaaaaaaatctactataaatataaaaaaataagatttattgatttatctgcagattttagaattaccgacccaagcaaatatagaaagaattataaaaaaaaacataaagcaacaaagcttataaaagactcaatttatgcaatttcagagtttgttaaaaaaaatatttataaatatagaatcatagctaatcctggttgctatcctacatcaatacaaattcctttagttcctttgattaaaaaaaatttgattaatattaataatttaacaatagactctaaatcaggttactcaggtgcaggaaaaaacttagaaaaaaaatttaaacataagaatctatataattccacttttgcttatagcactaagaaccatagacatatctctgaaattgatcaagaatttaaaaagtatacaaaaaaaaatgttaaatttacttttaatcctcaatataattccaaccatttaggggaattttaac

SEQ ID NO: 215607 - DNA, 658 bp, Unknown
  Bacterial polypeptide expressing nucleotide sequence isolated from the Sargasso Sea
tatgtcatttaaaaaaaagataaaggtagcaataataggagcaactggttatacagggttagatttagtgtatttattatctaagcactctaaggttaaaatattaaatttatgtgctacaaaaaatcttggaaaaaaaatatcttattttgacaagagaataaaaaaaaaattaccaattatttcgtcaattaaaaaaattaattggagcaaaatagacttagtttttttatctcttccaaacggtgaagctcaaaaaattataaaaaaaatattttataaatataaaagtataaaatttattgatttatctgctgactttagattatctaatgtaaatacatattataaaaattataaaattaaacataaggcgccaagtttaataagtagctctatttattcagtaactgaattaagtagagactacattaaaaagtacagaataattgcaaatcctggatgttatcctacatctattcaaatacctttaatacctttattaaaaaaaagattaattaaaaaccaatatataacaatcgattcaaaatctggattttccggggctggaaaaaatataaaaaagaaattcacacataaaaatctattaagttctacatttgcttatgggatttattttcatagacatgtatgcgaa

SEQ ID NO: 215608 - DNA, 808 bp, Unknown
  Bacterial polypeptide expressing nucleotide sequence isolated from the Sargasso Sea
atgaaaaataagattaaagtagccgttttaggctcaacaggctatgttggaatggagttagtaaaaattctatcaaatcattcctacgtagatataaattttttaggatcggaaactattcaaggtagttatttaagtaatattgataatacaaaagaatataatcaacttcctcttttaaaaccaaataatagttttaatgttgaagatagtgattacgtattcttagctttacctcatgcagtatcaaataaatatgtaaaaaaatattttaataaaattaatattatagatttatcagctgactttagattagataaatttgatgtttataaagaaaattatggcaatgaacacgagtgcaaagagcatttaaacaactttatttatggtcttgctgaaataaatagagataaaatattaaattctaaaaatatagctgtgccaggatgttatccaacttctattttattaccattaatacccttaatacaaaataaattcatcgataccaagaatataattatagattctaaatcaggttatagcggagcaggaaagaagtttaatttcaataaaatgaaatcaaaaaatgattataatttttataattataatacaaataatcacagacatattgcagaaattaaacaagaacttaataagtataattcggaaaatctagtaaagttttcatttaaccctcacattcttcctaattttagaggtatgatttctacaatttattgcgatcttaatgatagtataaaaaaaacacatatcataaatctattccaagattacaaaa

SEQ ID NO: 215609 - DNA, 922 bp, Unknown
  Bacterial polypeptide expressing nucleotide sequence isolated from the Sargasso Sea
atgtctaagctaaatgctttaatcgctggatcaactggatatattgggattcaattagttaagttactattaaaacatccaaatataaatattaaatatttatgtggcaacacatctaaaggtaaatcaatttcttattatgataaaatttttaaaaaaaaaaaattaccaaaaataattaagtttagtaagaatttattagaagataccaatttagtctttactgctctacctaatggacaagctcaaaagatatctaataaattgttaaaaaaaaatatcttaattgatttatcagctgattttagacttaggtctgcaaaagaatatttaaaatggtacaaaattaaacatagttcaaaaaacaatattaagaaaagtatttatgcattgcctgaattatcaaaaaaaaagttaaaaaattataaaataatttcatgtccagggtgttatcccacatcagtactattacccttaattcctttggtaaaaaacaacctaattcaaattaataatattataattgattcaaaatcaggttattctggggctggaagaggagtacataaaaaatatgccaacaaaaatctttatgaatctttaagtgcttacggtgttagttctcatagacataactctgaaattgaacaggaattaaatagttatacaaaaaaaaatattaaatttagttttacaccacatttaagtccaatgtttagaggaattttaagcactatttatttggatctaaataaaaatatttctgtaaaacatataaattctaatttaaaaaaattttataaaaaagatttatttgttaagattcttcctattaattcacatattagcacaaatgatgtaattaacacaaattactgtcatatatcagtatgcaaatctaaatataaaaataaattaataa

SEQ ID NO: 215610 - DNA, 355 bp, Unknown
  Bacterial polypeptide expressing nucleotide sequence isolated from the Sargasso Sea
ggcaaaaaataaatttcactttacacctcatcttacaccaatgtttagaggtattttaagcactatttatgttgatttaaaaaaaggtattaatataaataaaattattaaagttctaaatatccaatataagaaacaaaaatttataaaaattggaaaaataaatactttcttaagcactaacgatgtgatcaacactaataattgcttaatttctgtatgtaaaagcaaatataaagataaaataataatattgtctgcaattgataatttgattaaaggtggtggaggacaagctgtacaaaatatgaataattattatggctttaatgagagtgaaggtctaaatgtttaa

SEQ ID NO: 215611 - DNA, 632 bp, Unknown
  Bacterial polypeptide expressing nucleotide sequence isolated from the Sargasso Sea
catttcaaaaggaagattaattgcatgtccaggatgttatccaacatctgctcttattccattagctccttatctttcgcaaggaattatagaaaatgaaggtatagtaattgattctaaaagcggaacatctggaggtgggcgagaacctaaacagaagctacttttatcagaatgtggagaaggcctatcagcatatggattaataaaccatagacatacctctgagattgagcaagtggcatctttaatttctggaaataaaattgaactgctttttacacctcatttggttccaattacaaggggtatgcattcgactatatatgggagattaagagatccaggattaacttctgatgattgcagaattcttttggataattattatagaaatttcaaaaatattaaagtcttacctgtagatacattcccatcaacaaaatgggttaaaaatacaaaccaaattttcctttctgttaaagttgatattcgaaatggaaggattattattttatctgtaattgataatttattaaaagggcagactggtcaggcaattcagaatttaaatattatgagtggattttcaatggatgaaggtctagagttaactaacaattttccataaa

SEQ ID NO: 215612 - DNA, 813 bp, Unknown
  Bacterial polypeptide expressing nucleotide sequence isolated from the Sargasso Sea
cctggagctttaccaatattcactcacattcaattcaaatgagacagacgtacttggctgcgatgtcgtttttctcgcagtaccaaacgaggcaagcctagcacttgttccgaagctgctcgaacagggaattcgcgtaatcgatttatcaggtgcctacaggctggctgatacaaaggttttcgaaaaattctataaactgacacatacttacccggaattactgaaagaagcagttttcggactgcctgaatttttcagcaagcagatttcagcagcaaaacttgtttcgaatcccggatgttattccacatgcgcactgctcggaattttgccgcttgctgaaatgcttggtgagttagatcagcccccggtgattgatgcaaaatctggtgtgagtggcgccggaggaagggttgaagatgattccatgaattatgtaagtgtaaacgaaaactttaaggcgtacaaagttttctcacatcagcaccagcctgaaattcagcaatacctgaatgaattgagctcatacagttctgatataaacggggaagtcatattaactcctcacttgcttccggtcaaccgtggaatattgtccacaatttatattcatttccgggaagcagtggatccagacaaaattgtccggagttattcagaatttgcagataaacaaaaatttgttgaatttttaggaaaggctcatttccctgatataaaaatgacatcacatacaaaccgctgtatgataggcatagaatgtgatcaaagcggacaaaacttggttattgtttcaagcctggataattt

SEQ ID NO: 215613 - DNA, 422 bp, Unknown
  Bacterial polypeptide expressing nucleotide sequence isolated from the Sargasso Sea
acacgcatatggtatttttaaacacagacatagaagtgaaatggatcaagaattttcaaagatttctagaaataaagttaaatatacttttataccacatctaatacctacgtttagagggatgctttcgtcaatttatgtagaacttaataataatgtttcaatacaaagaattcataatgaattaaaaaaatatcataaaaaaaatcattttgttaaaattttatctctgaataagaatctaggcactgagaatgttataaatacaaatttttgtgaattaagtatatgtaaattagagggaaagaataaagttttaattttgtctgcaatagataatttaatcaaaggagctgcaggtcaagctgttcagaatatgaatataattaaatattataaagaaaatttaggtttaagatgag

SEQ ID NO: 215614 - DNA, 472 bp, Unknown
  Bacterial polypeptide expressing nucleotide sequence isolated from the Sargasso Sea
atggccggtggtgggcagggtcgtgtcgcggtgatcggtgcatcgggctacggggggctgcagaccattcggcttctgcaggaccatccgtccttgaccgtgacgttcctcggcggagaacggagtgcaggacggcgctggagctcgatctgttcatttctgccgctgccggatgatcccgttgttcagtccgctgatgctgagcgcatcgctgaggccgcggattatgccgtcctcagcctccccaatggattggcctgtcaactcgcacctgaacttctgcagcgaggagtccgggttgtggatctctcggccgactttcgctaccgatcgctggagcagtggagtcaggtgtatgcccaggaggccaaccgtctctcacgggacgattcggacctctgccaacaggcggtgtatggattgccagagtggcatggtcctgccatcgccgaggccaggttggtggccgcgc

SEQ ID NO: 215615 - DNA, 565 bp, Unknown
  Bacterial polypeptide expressing nucleotide sequence isolated from the Sargasso Sea
tatgtctaattataagttaaaaattgctatagctggtgccactgggtatgttggattagatttagtaaatttattatcaaaacatccaaagattaaattagttaatctttgtgcaacaaaaaatttaggtaaacaaatccatatttttgataaaagattaaaaaaaaccttaccaaagattagtagattaaaccaagtaaaatggaatgaaattgatttactttttttatcacttccgaatggagcagctcacaatattatcaaaaaattatattacaaatatagtcacttaaaatttattgatttatccgctgattttagaataaaaaatcatttaatttataaaagatattacaaaaaaaaacataacgctaaaaatttgattaataactctttatactctatcgcagaattgaaaaaaaaaataattacgaattataggattatttctaatcctggatgctatccaacttctatacaattggcgttatatcctttgattaaaaaaaaacttattaaatttgacgatattataattgactcaaagtcaggttactctggtgca

SEQ ID NO: 215616 - DNA, 670 bp, Unknown
  Bacterial polypeptide expressing nucleotide sequence isolated from the Sargasso Sea
tttgccaaatggtcaagctcaaaaattagttagtaaagttttttacagatatttgaatttaaaatttatagatctgtccgccgattttagaatatttgacattcatgaatataaaaaaaactataaaatgaaacataaatgtccagaattattaaaagatacaatctattcaatttctgagtttgtgaaaaaagatattaataaatttagaattattgcaaatcctggatgctacccgacatcagtccaattgcccataatacctttacttaagaaaaaattgataaaaaataatattactatagattcaaaatcaggttattctggtgctggaaaaaatttggaaaaaaaatttaaacacaaaaatttgtataattcaacttttgcatacggtacaaaaaaacacagacatatagttgaaatcgatcaagaaatgaataaacatttagggcaaaagattaattttacttttaatccacacttacttcctacttttagaggaattcttacatcaatttatgtagatttaaaaaaaggaaaaaaaattgaaactctaagaaatgaattaattaacttttacaagaaagatagatttattaaaatattgaaattaaattcacaaataggatctggaaatgtaattcatacaaataaatgtgaaatttcagtt

SEQ ID NO: 215617 - DNA, 350 bp, Unknown
  Bacterial polypeptide expressing nucleotide sequence isolated from the Sargasso Sea
tccagtaggttattcttttatcccacatttaataccaacttttagaggcttgttatccgcaatgtatgttgaaaaagaaaaaaatgtaactttaaaaaaaattcacaaagaattaattaggtttcataaaaaaaattattttataaaaatcgcaaaaataaacaaaaatattggaacagagagcgttattaatagtaatttttgcgaaatatcagtttgtaaactaaggtttaaaaataaaattctcattctttcagctatagataatttagtaaaaggtgccggaggtcaagcaattcaaaacatgaacttaatttttggttttaaagagaatttaggtttaaaatgaa

SEQ ID NO: 215618 - DNA, 236 bp, Unknown
  Bacterial polypeptide expressing nucleotide sequence isolated from the Sargasso Sea
tgaacggtttaaagaagagaaattcattgaagtacttccgattggtgacattcctaaaactaaagatgtagttggtacaaataatttagtaattggtttaaaaaaaggctataaagaaaataaagtttgtatagttagtgctttagataatctcttaaaaggtgcagctggacaagcgatacaaaattttaacataatgaatgattttgatgaaggtgaagggatattaatgtgaa

SEQ ID NO: 215619 - DNA, 912 bp, Unknown
  Bacterial polypeptide expressing nucleotide sequence isolated from the Sargasso Sea
ggatatttaggtatagagttaatacgaattctctctatgcatccaaatgtaaaattatcaaaaatttttcaaagagaattaccgattgatcaggagtttccacatttacaatcattaaacttgaaagatatacaaacagaaaacttagatgattttaaaaatctagattgcgtttttttagcattacctcacggttcagctcatgaatatgtaaaagaattaatatcaaaagttaaaattatagatctgagttctgattttagaatttctagtcaagaagattacaataaatattataaatctaattttgatgtcaatactcaaagtcagtttcaatatggcttcattgaaaattctggtgatgaaataaaaaaatcttcaaacatttccaacccagggtgttttgcattaacaacacagttatctttattgccatttcactccataattaaaaatgtatctgtaactgctattacaggatctagtggtggtggtaaaaatccaacaaacaaaaatcatcattcaacaagatctaaagatattttttcttataatatcaactcccatcgccacttggctgaaatttatcaatcttttccaaatttaagaaaaaacctttcttttgtgccattatctgggcctttttcaagagggatatatttaactagtcatattgaaacaaaagaaaccatcaataatgattttttagatacatgtttggcagattgttttaaatccgctccttttataagaattcaaaataataccaaactctcaaatgtagttggttcaaacttttgtgatatttcagtgtcttttaaagatgagaatcattttgttgttgaagcctgtttagataatttagtaaaaggtgcttctggtaacgctgtagaatgcatgaaccttatcttg

SEQ ID NO: 215620 - DNA, 600 bp, Unknown
  Bacterial polypeptide expressing nucleotide sequence isolated from the Sargasso Sea
tatgacaaaaaaagtatcagtagccatactgggctcaactggctttgttgggttagaattagttaaaatattatccaatcatccaaatgttaacattgctttttttggtacagaaaacaacccagataaattgctgaaagatattgatccttcaatagatctttctactaatccatcaactaaattaaatgaaaattttgatccttctaaagttgatacagtttttttagctcttccccatggtgcatctcacaaatatgtaaaatctttttacaataaagttcaaataatagatttgtcagcagattttcgattggatgaaattgcaatttatgagagaaattataatgaaaaacattctgctccaaatttattaaaagatttcttatacggacttcctgaaattaataaaaatatattaagtaacaaaaaaaatattgcagtacccggctgttatccaacttcaattttaattccattaatccctcttttaaaaaataatataattgactcaaaaaatatcataatagattctaaatcaggatatagtggagctggcaaaaaatttgatttactttatataaaaaattctaaggattt

SEQ ID NO: 215621 - DNA, 769 bp, Unknown
  Bacterial polypeptide expressing nucleotide sequence isolated from the Sargasso Sea
aaaagggatttattgaaatcagatgtcagtataattgacctatcagttgattttagacttgatgataaaaatgagtatgagaactggtatggctttaaacacggcaactttgaggtaaacgatgaatttcaatacggattaacagagtttaatagagataagataaaaaaatgtaagcatattgcaaaccctggctgctatgcaactagcatcttgaccccattaattgaattgataaaacaaaatgcaattaaaaccgacgatatcgttattgactcaaaatcaggttactcaggtgcaggtaaaacaaagggaaaaaaagagttaattaaagaagtaaatgaaaatatcagaacctatggtattggtgatcacaaacatatagctgaaataaaccaagaactaagtaaaatcaaaaatattcaaactgaagttttctttgcggccaatatattgcctgttgaaagaggcattttgagtaacatttatattgacacaaatgaggtatctcaaaatgatatttacgatatattacaaaaaagatttaatgatgagcattttatacaattgctaccaatgaatgaaattccttcttctagggaggtagttggtaccaataacttagttataggattaaaaaagggatataaagaaaataaattatgtattgttagtgttttagataatttgttaaaaggagctgctggacaagcaattcaaaattttaatttaatgaatgattacgatgagaggttaggactagaatgag

SEQ ID NO: 215622 - DNA, 595 bp, Unknown
  Bacterial polypeptide expressing nucleotide sequence isolated from the Sargasso Sea
atagcagtaccaggatgttacccaacttccattttattaccattaatacctcttataaaaaataaattaatcgataccaaaaatataattatagattctaaatcaggttatagtggtgcaggaaagaaatttgatttcaataaaattaaatcaaaaaatgattataatttttacaattataatacaaacaatcacagacacattgcggaaatcaaacaagaacttaataaacataactcagataaagaattaaaattttcatttaatcctcacattcttcctaattttagaggtatgatttctacaatttattgtgatctaaatagtagcattcagaaaactgatattataaatctatttcatgacttacaaaaaataaacccttttataaaatttattgataatgatgaagtccttgattttttttctgttcaaaattctaattattgtaaaattaaaatttttaatcatcatagtgaggataaaattattatagttagcgcaatagataacttaatcaaaggcgctgccggtcaagcagtacaatgttttaatataactgaaaatattgaagaaacagtatctttagtatgac

SEQ ID NO: 215623 - DNA, 798 bp, Unknown
  Bacterial polypeptide expressing nucleotide sequence isolated from the Sargasso Sea
ctcttccaaatggcgaagctcaaaaaatttcaaatcatttattgaaaaaaaatatactaatagatttatcagctgatttcagactcaaaaattataaagattataagaaatggtataaaattaaacattcttcaattaaaaatattaaaaatagtatatacgcattaccagaggtaaatagaaatgatataaaaaattataaaattatatcatgcccaggttgttacccgacttcagtattaatcccgttaatacctttaattaaaaagaatttaattaaacaaaacaatattataattgattcaaaatctggttattcaggagcaggtagacaaatacacagaattaaaaagaaggaaaatttatatgattccttaagttcatatggaataagatatcacagacataattctgaaatacaacaggaactaaattctcattcaaaaaaaaatattgaatttacattcactccgcatttatcaccaatgtttagaggtatattatcaactatatatgtagatgttaataaaaacatcaattttataaatgtatataaatatcttaaaaaatattatcaaagtgaaaaatttataaaggtattaggtcccaacaaaatgataagcacaaatgatgtgattaatacaaacttatgcaaattatcaatatgtaaatcaaaacaaaataataaaataattatattatctgctattgataatttaattaaaggtggttcaggtcaagctttgcagaattttaatattaaattcaattttaatgaaaagttaggcttaatatgaa

SEQ ID NO: 215624 - DNA, 670 bp, Unknown
  Bacterial polypeptide expressing nucleotide sequence isolated from the Sargasso Sea
acatcgcgcaactaatttaataaaaaaaagtatttatttactacctgaaataaacagaaaagagattaaaaattataatattatttcatgtcctggatgttatccaacttctattcttttgcctttgatacctttattcaagaaacgtttaattaaatttaataatattataatagactcaaaatctggatactcgggtgctggtagaggcgttcacaaaaaatataaagataaaaatttgtacgaatctttaagcgcatatggagttggatttcatcgtcacaattcagaaatagaccaaatgttaagaaaattcacgaagaaaaaatttcaatttagttttactcctcatttatcaccaatgtttagaggtatattaagtacaatttacttagatctggagaacaaaattaccacaaataatatttataaagaattacataaattttataaaaatcaaaaatttgtaaaagtactaaaaagagacaccttagtaagtacaaacaatgtgataaatactaataactgctatatttcaatatgcaaatcaaagtataaaaataaagtcatcattctttcagcaatagacaacttaataaaaggaggtgcggggcaagctgtgcaaaatttaaatattaaatttaattttccagaaaaaactgcactataa

SEQ ID NO: 215625 - DNA, 739 bp, Unknown
  Bacterial polypeptide expressing nucleotide sequence isolated from the Sargasso Sea
tgtagatgtagttatcctagcaatgcccaatggtaaagctaaatcatattttgatatcattaataaaataaataatcaaattatttttattgatataagctctgactttagaacagacaatgcttggcattatagactgcctgaattaagaaaatataatggttcaaaaaccattagcaatcctggttgttatgcaactgcaatgcaattatcaatagcacctattatggatttagtcgacggggatattaattctattggtatttctggctatagtggggcgggagcaactcctaattcaagaaataatcaatcaaaactggaaaataacctaattccatactcactatctggacatgctcatgagaatgaagtcagaatgaatctttataaacagatccatttttctccccatgtagcaagtttttttaggggtatattagtaacatcaaaattaaaattaaagaagaaaaacagcgtagaaaatatttttaacatgtataaaaatttttatgaaaattctaagttaattaatattaaaaaagatattccaatgatcaatgaaattataaatactcatactgttgaaataggcgggttctcccttgatgaaaataaacaacatttgacactatgttgcactttagacaatcttcttaaaggagcagcaactcaggttattcaaaatataaatgctgcttgtggttttgatgatttaacaggagttaactatgaataa

SEQ ID NO: 215626 - DNA, 728 bp, Unknown
  Bacterial polypeptide expressing nucleotide sequence isolated from the Sargasso Sea
tctttgtggtaattcatctgtaggtaaaaaaatttcttactatgacaaaacattatctaataaaaaattaccaaaaattattaaatttaataaaaagcttttaaaagagatagatgttattttcactgcactaccaaatggtgaagctcaagttatatcaagtcatttaaacaaaaataaaattttaattgatcttgctgctgattttagactagaaaaaagttcagaatatttaaaatggtacaaaaaaaaacacaaagctataaaattaattaaaaaaagcttatattctctacctgaaattaatggaaaagaagtaaaaaaatatcaaattatttcatgtcctggatgttatccaacttcaatattattaccgcttatacctttgtttaaaaacaaattagttaaagtaaaaaatattattattgactctaaatcaggatattcaggtgcaggtagatctgttcataagaaatataaagacaaaaatctttatgggtcattaagcgcatatggagttggttttcatagacataactctgaaattgaacaaatgttaaacaaatatactagtaaaaaaatagatttcaattttactccacatttaacaccaatgtttagaggaattttaagtactatttatatagatctagatagcaatgttacacaacataaagttattaaaaaacttacagaatattataagaactataagtttgttaaaattt

SEQ ID NO: 215627 - DNA, 475 bp, Unknown
  Bacterial polypeptide expressing nucleotide sequence isolated from the Sargasso Sea
atgacggtgcgaggggggcgaggcgaacgcgcgggctcgagcgcgcgaaggacgccgtcggtggtgacgcgagcggtgaagagggtgttcatcgacggcgaggcggggacgactgggttgcaagtgcgcgagcggttgcaggctcgttcggatatcgagctgatacagttggatgaatccaagagaaaggatttggacgcgagaaagaaggcgttgaacgagtgtgatgcggcgattttgtgtctgccggacgcggcggcgatagaggcggtgaagctagtggagaacgacacgacggtcgtcatcgacgcgtccacggcgtttcgcgtcgcggatggttggacgtacggttttccagagctcgctcccggtcaccgggacaaggtgaagacgtctaagcgcatatccaatcccggttgctatcccacgggtttcatcgccctgaccagaccgctcgtcgacgccggtattttat

SEQ ID NO: 215628 - DNA, 941 bp, Unknown
  Bacterial polypeptide expressing nucleotide sequence isolated from the Sargasso Sea
tttgttaaaacataataaagtgaacattaagtatttatgtggaaattcatctgtaggtaaaaaaatatctttttttgataaatcaattaaaaaaaaacttcctttaataacaaagcttagtcagtctaaaataaataattcagatgtcatatttgcagcattacctaatggtgaagctcaacttatatcaaaacttataaacaaaaagaaagttcttatagatttatcagcagattttagacttaatgacagtaagtcatatttgaaatggtacaagcaaaagcataaagcaattaaaaatatcaaaaatagtatttactctttgccggaattaaatttaaaaagtgttaaaaaatacaatataatttcttgcccaggatgttatccgacttccattctattacctttaattcctttgataaaaaaaaaattaattaaaactaataatattatagttgactctaaatctggttactctggagctggcagaggtgttcataaaaaatataaaaaaaaaaatttatatgagtcacttagtgtatatggtgtaggttttcatcgccataactctgagattgaacaagaaataaaaaaatattgtcgtgaggaatttaaaataacatttacacctcacttagtaccaatgtttagaggtatattaagtaccatttatattgatttaaaatcaaaaaaaagcaaattaaatgtacttaatcaactaaagaaattttacaaaaaaagtaagtttgttaaagtaatgaagaaaaattcgtttctgagtacaaatgacgtgattaatacaaacaactgttacatttcagtttgtgatacaaaatatataaataaaattattatagtatcagctgttgataaccttatcaaagggggatccgggtcagctattcaaaatatgaatttaaaatttactttaaagagagcga

SEQ ID NO: 215629 - DNA, 464 bp, Unknown
  Bacterial polypeptide expressing nucleotide sequence isolated from the Sargasso Sea
catgtctactgaaataaatgtggccgttttaggctctactggctatgtggggtatgaattagttaagatgttaattaagcacccaaaagtaaaaattaatttcttaggatgcgatagtaagataaaaaattcactatttaatgaagataaaaacttagaattttcaaaacttccaaaattatcattaaatgatgattttgatgtttctagttctgatatagtttttttagctttacctcatggcatctcacacaaatatgtaaaaaactattataataagattaaaataatagatttatcagcagattttagattagattcagaagaagtttatacaagcaactataaaactactcattcttgttcaaaactattacaagaatttgtatatggactacctgaaattaataaaaaattaattataaatagaaataatatagctgttcctggttgttatcctacat

SEQ ID NO: 215630 - DNA, 468 bp, Unknown
  Bacterial polypeptide expressing nucleotide sequence isolated from the Sargasso Sea
aaaatataaaaaataagttcaaatttaaaaatttattcaattcagtttcagcttatggtgttggtcgtcatagacacatggccgaaattgatcaggaactttcgaaaattgctaaaaagggaattaaggttatctttactcctcatttaattccaatgtttagaggaatcttatctactatataccttgagacaaataggaagattacacctagaaaaatttataatgtattaaaaaaatatcataaatcaaatttttttgtaaagattgcaaaatataacactcctataggcaccggtgatgttatgaatactaattattgtaaaatttctgtatgtaaaaacagagaaaaaaatagtgtaattattatttctgcaattgataatttgctaaaaggaggctctggacaagccgtacaaaatatgaatgtttcgttcaatcttagggaaactcttggtttaatatgat

SEQ ID NO: 215631 - DNA, 163 bp, Unknown
  Bacterial polypeptide expressing nucleotide sequence isolated from the Sargasso Sea
tccaacaaatgcctggtatatccgcaagtaattaatggcactgcaattgtcatttccgtaattgataacctcttgaaaggagcatctggtcaagcggttcaaaacatgaaccttatgtgtggtttggaagaaactttaggactaaaaattaaaaactcagttt

SEQ ID NO: 215632 - DNA, 595 bp, Unknown
  Bacterial polypeptide expressing nucleotide sequence isolated from the Sargasso Sea
atatcttgtcctggatgttaccctacatctgtattaattccattaatcccattaataaaaaaaaacttaattaataatcaaacaattattattgactcgaaatctggttattcgggagcaggtagaggagtacataaaaaatataaagataaaaatttatacgagtctttaagcgcttatggattagcaaatcatagacataattctgaaattcaacaagagcttgatcttaaaactggcaaaaaaaataaatttcattttacacctcatcttacaccgatgtttaaaggtattttaagcactatttatgttgatttaaaaaagggcattaacataaacaaaataattaatgttcttaatgtccaatataagaatcataaatttataaaaatctgtaaaataaatactttcttaagtactaatgatgttatcaacaccaataattgctttatttctgtatgtaaaagcaaatataaagataaaataataatattgtctgcaattgataatttgattaaaggtggtggaggtcaagctgtacaaaatatgaataattattatggctttaatcaaagcgaaggtctaaatgtttaaa

SEQ ID NO: 215633 - DNA, 475 bp, Unknown
  Bacterial polypeptide expressing nucleotide sequence isolated from the Sargasso Sea
atggctaaaatacaattaggtatcgccggcgcgagtggttacgggggacaggaacttttacggctagcagtgcgacacgacgatgtcgaaatcgccgtcgcaatgtcctctgccgcaaataacgagacacaagaacttccagctctgaagaacttatggaatgggcaaatcgaacctttttcgattgagaaactaatcgccaaaagcgaggttgtatttcttggattacccgacggaattagcgcagaacttgcacccaaactagtaaaaaatcaacgcaaagtgttcgatctttccggtgcgttcagacttcgcgataaagaactccgaaaacagtggtatccaaaaagcccctcgctgcctgcaacaactacctatggactcccagaatggaatagagaggatctctcgacggccaatcttgtagcttgtgcgggttgctatcccacagcagccattctcgctctgaagccat

SEQ ID NO: 215634 - DNA, 766 bp, Unknown
  Bacterial polypeptide expressing nucleotide sequence isolated from the Sargasso Sea
actgggagaaacccaagccggctctgccattcgggatctgtatcccagcctttcaactgcataccctaatacatactttgattcgttttctccggagattgttgatggcctagacctcgtattctgcgcattacctcacggagtgagtcaaagcgtcatcccagatatacacggaacagttggccacattgttgatctaggttctgattttcgtctaaaagatccttctctttatcaagagtggtacgggtcagagcatacctgccctgagctactcaatgactttgtctacggactcccagaattatttagagatgaaattgaaggagcagatcttatagcagcaactggatgcaatgccgcagcagctattttcgctcttgcgccctttgtgcaatcacaaacaatagattccggttcaatgattgtagatctcatcactggggtaagtggcgcgggtaggccacccaaagaaaacacaacattctgtgctgttagcgggaatatcaccccgtatgggctgctaacacatcggcatacacctgagattgagcaagcattaactactttcgtaggggatacgagttctgtgctttttaccccccacctagcaccaatagatcgcggaatcatagcgacatgctacggacgagcaaagtctgcaatttccactgatgaggctctaaatcagctggaaacgttctataaagaagaacccttcttcgtcgttgatgaaaggcctccttccactaaatctaccctgggt

SEQ ID NO: 215635 - DNA, 215 bp, Unknown
  Bacterial polypeptide expressing nucleotide sequence isolated from the Sargasso Sea
ttttattgatttgttaaatgatgatagcagatcagattttttttctgttcaaagaactaataaatgtgtcttaaaattacttaaaggtcataaaaaagataaaataattattattagtttaattgataatttggttaaaggcgctgcaggacaagcaacacaatgttttaatttaagttttaatatagaagaaagtacagcattaaaattatgag

SEQ ID NO: 215636 - DNA, 778 bp, Unknown
  Bacterial polypeptide expressing nucleotide sequence isolated from the Sargasso Sea
atgcgtaaaataaatgcattagttgctggttcaacaggttacattggtgttcaattaataaagctattaataaagcacaaatttgtaaatataaaatatttatgtggaaactcatcaattggaaaaaaaatatctaaatttgataaatcacttaattctttaaaacttcctaaaataataaaatttgataaaaaatatattaaaaatgttgatgtgatttttacagctttgcctaatggcgaagctcaaaaaatatccaaatatattaataaagatgtcgttttaatcgatttagctgctgattttagactagaaaaaccttctgattatttaaaatggtacaaacaaaaacataaagcaaaaaataaaattaaagaaagtatttattcactaccagaaattacaggtaataagttgaaaaattataatatcatctcgtgtcctggctgttatccaacttcaattcttttaccattaataccattaatcttgaaaaaattaattaatgtttcaaatcttatagctgattctaaatctggatattctggggctggtagatctattcataaaataaagaaaaaagataatttgtacgagtctttaagcgcatatggggtagggtttcatcgacacaattctgaaattgaacaaatgttaaaaaaatatattaataaggattttaaattaattttcactccacacttaactcctatgtttagaggtatattaagtacaatatatattgaactaaataacggtgtatcaataagtcaaataa

SEQ ID NO: 215637 - DNA, 619 bp, Unknown
  Bacterial polypeptide expressing nucleotide sequence isolated from the Sargasso Sea
aagcttgttgcagctccgggttgcttccccaccgcaagcctgatgcccctgctgcccttcctcaagcagggcctgatcgaaaccagcggcatcataattgatgcgaagacaggcacgtctggcgggggtcgcgtgccgaaggaggcgatgcttcttgcagaggcctcggaatccatcgcgccctacggcgtgatcggccatcgccacacctctgagatagagcagatggcgatggaggtggctggccaggaggtacgggttcagttcacgccgcatctggtaccgatggtgcgtggtctgctgtccacggtgtacgcccgcctgcgcgaccccggcctcaccgctgaggattgcaccacggttctggaggcgatctaccgccaccacccctgcgtccaagttctgccagtgggcacctatcccgccaccaagtgggcgcgccacaccaaccgtgccctgctttcggttcaggtggacacccgcaccggccagctggtgttgatgagtgccatcgacaacttgatcaagggtcaggccgggcagggcgtgcagtgcctcaacctgatggcgggccttgctccgcagactgggctgcctttgcaatcattttatccctgac

SEQ ID NO: 215638 - DNA, 451 bp, Unknown
  Bacterial polypeptide expressing nucleotide sequence isolated from the Sargasso Sea
atgacaaaaattattaaaaagccagtatcagtttcaatcattggtggtagtggttatactggagcagagcttattcgtctcttatcaaagcacccatattttaaattgtttcaagttgtagctaacagaaacgtaggcaaaaaaattcaaactgtgttcccccaccttagacatttagatttaccagactttataagctttgaggaaatgaatttcgaagaagttgatataattttttgcgccttaccacatgctacaagtcaggagatcatagtaaagattccacaaggaaaaaaaattattgatctatcagcagatttcagattggaacggcttgaagagtatgaaagatggtatggaaaaaaacatatcgctcctgctctacaagagaaggcagtttatggattgactgaaatttacaagaaaaaaataaaagagggatctttgatcg

SEQ ID NO: 215639 - DNA, 523 bp, Unknown
  Bacterial polypeptide expressing nucleotide sequence isolated from the Sargasso Sea
atgtctttaaatgtatgcgtttttggggttactggatatacaggctcaaaacttctctattatttgaataagcataaaaaaataacaatcgttggggtttttggaaaatctaaagttggtaaaaatttggatgaacttcatcctaatattaaaggcttacctaaattaagaattagtgaccacaatgattttgattttagcaaagcagatttggtttttagttgtttaccaccaggtatgtttcagtcaaaaattatagaaaatttagaccctaatattcctattattgatttatctggagactttaggctagaaaataaaaaaacttacgaacatttttatgaaacttctcataaaaattttcatttgaaaaataaatttgtctatggactatctgaaattaataaagatttaataaaaaaatctagattcatttctaatccaggctgttatccaacatcaattttgattcctttagtaccattattagaaaataaaatagtaaattcaggtcatattatta

SEQ ID NO: 215640 - DNA, 540 bp, Unknown
  Bacterial polypeptide expressing nucleotide sequence isolated from the Sargasso Sea
taaagaaatagatgtagtcttttctgctttgttaaatggtcaagcgcaaaaaatttcaaataaacttacaaagcgtaatgttcttattgatttatcagctgattttcgacttaaagatcctaatttatattctaaatattataaaattaaacactcagcagtaaaaaatataaaaaaaagcatatatgcacttcccgaaattaaaaataaaaaaataaaaaattataatataattggttgtcctggttgttatcctacatcaatacttttgcctttaattccacttatcaaaagaaatcttatttcaaaaaaaaatattataatagattcaaaatctggttattctggagctggaagaggtatacataaaaaatataaaaataaaaatttgtacgagtctttaagtgcttatggtattaaatctcacagacataattcagaaattcaacaagagcttaacattgaaacaaaatataaaattgattttacttttacacctcatcttacaccaatgttcagaggtattttaagtactattta

SEQ ID NO: 215641 - DNA, 399 bp, Unknown
  Bacterial polypeptide expressing nucleotide sequence isolated from the Sargasso Sea
atatttgtgaaattaagcaagaattaatcaaacatgcaaaattatcagacgttttattctcatttaaccctcatatcctccctaattttagaggcatgttatcaactatctactgtgatttattaccaggtatgaataaaaataatgtaataaattgtttgaatgaaatcgcaattaacaatgaatttataaaatttatacatgatgatgaaagagcggattttttttctattcaaaatacaaacaattgcatattaaaaatttttgatcattatgactcttcaaaaataattattgttagtcttatagataatcttgttaaaggggcagcggggcaagcggtacaatgctttaacgtaagtaatggttttgcagagaacacagcattgattaaatgaa

SEQ ID NO: 215642 - DNA, 605 bp, Unknown
  Bacterial polypeptide expressing nucleotide sequence isolated from the Sargasso Sea
taaaaagaatatagcagttcctggttgttatccaacttcagttcttattcctttaatacctctgttaaaaaatggaattattgattcaaagaatttaataattgactctaaatcaggctatagtggtgctggtaaaaagtttgatttggaaaatattaaaaactcaaaagactataatttttataattataatactaatagtcatcgacatatttgtgaaattaagcaagaattaataaaacatgcaaaattatcagacgttttattttcatttaaccctcatattctgcctaattttagaggcatgttatcaactatgtattgtgatttattgccaggtatgaataaaaaagatgttataaattgtttgaatgaaatcgcgattaataatgaatttataaaatttatagatgataatcaaagagcggattttttttctattcaaaaaactaacaattgcatattaaaaatttttgatcattacgactcttcaaaaataattattgtcagtcttatagataatcttttgaaaggggcagcggggcaagcggtacaatgctttaatgtaagtaatggctttcaagagagcacagccttgatttaat

SEQ ID NO: 215643 - DNA, 838 bp, Unknown
  Bacterial polypeptide expressing nucleotide sequence isolated from the Sargasso Sea
aaattacttaaaataaaattaaataaagaatttgattgcaatcaaagtgacatagtttttctatgtttgcctcataaaatatcacaatcctatgtaaaaaaattttatggtaaaattaaaattattgatctttcagctgattttagattagataatgcaaatacctattataaaaattattctataaaacattcatctcctaagcttttaaaaaaatttatttatggtctatatgaaataaattatgataaaattaaaaaaaacaaatatattgcagtacctggttgctatcctacttctgttcttttaccattaatacccttagtaaaaaataatttaatagaaactgatgaaattattattgatagtaaatctggttatagtggagcaggtaaaaattttgataaaaataatctttttaaatttggagaaaatttaaatttttataattataatactaatgatcacaggcatatttgtgaaattaaacaagaattagaaaaaaatacaaaaaataaagttaatttttcatttaatcctcatattttaccaatatttagaggcatgatgtccactatgtattgtaatttaaaaagaaatatttcaatcaaaaaattaaatgatactttaaaaaaatcttataaaaattttgaagatattgaaattataacaaacgacattagagtggattttaactctgttcaaaatacaaataagtgttttattaaattatttaatcattataatagttcaaaggttgtaattgtaagtcttatagataatttacaaaaaggtgcagcagaacaagcaattcaatgtatgactttaataaataatc

SEQ ID NO: 215644 - DNA, 820 bp, Unknown
  Bacterial polypeptide expressing nucleotide sequence isolated from the Sargasso Sea
atgcctaagcttaatgcattagtagctggatcaactggatatattggtgttcaattaattaaattattagttaaacacaaatatattaatattaaatatctttgtggaaattcctctaaaggcaaaagtattaaatcttatgataaatctttatctaaatataaattaccaaaaattttaaaatttaataaaaaattattaaaacatgttcaggttatttttacagcacttccaaatgggggagctcaggatatatctaaacatttaagcaaaaatcatactctaatcgatcttgctgcagattttagattagctaaagcttctgattatttaaagtggtataaacaaaaacatcgtgcgagtaatatgataaagaaaagtatctacttacttcctgaaataaacagaaaagatattaaaaagtataatattatttcatgtcctggatgttatccaacgtctattcttttgcccctaatacctttattcaaaaaaaatttaattaaatttgatagtattataatagattcaaaatcaggatattcgggagctggcagaggtgttcacgataaatataaagataaaaatttatacgagtctttaagtgcatatggagttggtttacatcgtcacaattcagaaatagatcaaatgttaagaaaatttactaagaaaaaatttcaatttagttttacacctcatttatcgccaatgttgagaggcattctaagtactatatatctcgacttagaaaaaaatatttcacaatcaaaagtattaaacacactaactaatttctataaaaatgaaaaatttataa

SEQ ID NO: 215645 - DNA, 652 bp, Unknown
  Bacterial polypeptide expressing nucleotide sequence isolated from the Sargasso Sea
atgtctaaaaaaaagataaatatagctgtaataggagcaacgggatatacaggtttagatttagtatttctattaagcaaacatcctaatgcaaatattataaatttatgtgccacaaaaaatttaggtaaacatatttctttttttgacaaaagaataaaaaaaaaattaccaaaaatatcttctataaataagataaattggaaaaaaattgatctagtctttttgtctttacctaatggagaggctcaaaaaattataaaaaaaatctactataaatataaagatataagatttattgatttatctgctgattttaggattactaatccagataaatataaagaaaattacaaaaaagagcataaagcagtaaaacttataaaaaaatcaatttattcaatatctgagttcgttaaaaaagatatttataagtataggatcatagcaaatcctggttgttacccaacttcaattcaaattccattgataccattaattaaaaaaaatttaataaatatcaacaatctaactatagactcaaaatctggttattcgggtgctgggaagaacttagaaaaaaaatttaaacataggaatttataccaatctactttcgcatacagcactaaacaacatagacatatttaag

SEQ ID NO: 215646 - DNA, 781 bp, Unknown
  Bacterial polypeptide expressing nucleotide sequence isolated from the Sargasso Sea
ttatctaaacatccaaacgtaaatattgttttttttggcactgaaaataatccagacactttgattaaagatatcgacccaactataaaattttatagtaattcttttactcaacttaatgaaaaatttaacaattcttcagtagatacagtatttatggcacttccgcatggcgtatctcataattttgtaaaattaaattatgataaacttcaaataattgatttatctgctgattttagattagatgatattgaaatatataaaaaaaattataatgagaaacactctgcttcaaatttacttaatgaatttcaatatggacttgttgagataaatagaaattttctaaaaaataaaaagaatatagcagttccaggttgttatccaacttcagctcttattcctttaatacctctattaaaaaataaaattattgattcaaagaatataataattgattctaaatcaggatatagtggtgctggtaaaaaatttgatttggaaaacattaaaaatccaaaagactataatttttataattataatactaatagtcatcgacatatttgtgaaattaagcaagaattaatgaaacatgcaaaattatcagatgttttattttcatttaaccctcatatcttacctaattttagaggcatgttatcaactatgtattgtgatttattaccaggtatgaataaaaataatgtaataaattgtttgaatgaaatcgcaattaataatgaatttataaaatttatacgtgatgagcaaagag

SEQ ID NO: 215647 - DNA, 580 bp, Unknown
  Bacterial polypeptide expressing nucleotide sequence isolated from the Sargasso Sea
atgaataaaattattaaagtagccgttttaggctcaacgggatatgttggtttagaattagttaaaatacttatgaagcatccaaaagtattaataaattttttaggatgtgaaaacaatccaaataaaagattaaaaaattttgatgatagtattaatgacaaaaaacttcctttattaaatttaaataaaaattttaactgtactaattctaacattgtttttttagcattacctcatggtgtttctcaaaattttgtaaaaaaattttataataaaattagaataattgatttatcagctgacttcagactagactcaaaaaatatctataaattaaattatggtataattcacaaatgtcctgatttactaaataaatttgtatatggactacccgaaataaataaaaaaaatattattaaaaacacaaatattgctgttcctggatgttatccaacatctattttattgcctttaattcccttattaagaaaaaaattaattaatacaaacaatataattattgactcgaaatcaggatatagtggggctggaaaaaaatttgatatccacaaat

SEQ ID NO: 215648 - DNA, 974 bp, Unknown
  Bacterial polypeptide expressing nucleotide sequence isolated from the Sargasso Sea
aatgattaaagtaggcataattggagcaaatggatatttaggtgttgagttaataagaattctttctgtacatcctaaagttaaattatcaaaaatctttcaaagagaaatggaaatagatgaggaatttccacatttacagtcattaaatatgaaagatttacagacatctaatctcgatgattttaaaaatctcgattgtgtttttttatcattacctcatggttcagcccatgaatatgtcaaggaattattatcaaaagttaaaatcatagacctaagttctgattttagaatttctaatcaagaggattatagcaaatattacaaatcaaattttgatgctgacattcaaagcaagtttcaatacggatttattgaaaattcaatcgatgacataaaaaaatcttctaacatatctaatcctggttgctttgcgcttacggctcaactatctttattaccatttcaatctataattaaaaaagtatctattactgctattactggatcaagtggtggtggtaaaaatccttctatgaaaaatcatcattctacaagatctaaagatattttttcatacaacataaattcacatcgacatttagcagaaatttatcaatcttttccaaatttaaaggagactctatcatttgtgcctctgtcgggccctttctctcgaggtatatatctaacaagtcacattgaaacatatgaagattcaacttatgagtccttaaattccattttaattgattgttttaaatcatctcctttcattagagtacaggataatactaagctttctaacgtagtaggttcaaattattgtgatatttcaatgtcttacaaagatgaaagacactttgtaatagaggcttgtttagataacttagtaaagggtgcctcaggtaatgcaattgagtgtatgaatataatctttgatcttgatcaaactttgggattgaaacaaa

SEQ ID NO: 215649 - DNA, 1012 bp, Unknown
  Bacterial polypeptide expressing nucleotide sequence isolated from the Sargasso Sea
atgaacattgcaatagttggtgcaacaggaaatgttggaagaaaaataatagaaattttagagaaaaaacaaattaatatagaaaatctatttttacttgcttcaaaaaatagtgaaggaaaaaaaattaactataatggaaaagaacatgtagtaacagatcttgaaaaatttgatttttccaatgttaaaattgcattttttgcagctgggagtggtgttgctgaaaaatgggctcatgtcgccgctgaaaaaacaattgtaattgataattcaaaatacttcagaaaagatcctgatattccattaattgttccagaagttaattcaaaaaaattatctgatgtaaaaaacaaaaatattattgctaacgctaattgttcagtaattccagttgtggtggctttaaagccattacacgacctgtatgatatcaatcgaatagttgcatctacataccagtcagtatcaggagcaggtaaatcagctatggatgaactattatctcaaactgagaattattttcaaaataaaaaaatatcatcgaaaaatttcactaagcaaattgcatttaatgcaatccctcatattgatagttttttagaaaatggttacacaaaagaggaacaaaaaactaatgatgaaatcaagaaaattttagataaaaaaattaaagtgacttcaacttgtgtaaggatacccgttcttgtttctcattgtattagtgcaaatgtagagtttaataaaaaatgttatttagatgaaattagaacagttttgtctacttctcctgggtgtaaggttgttgatgaacatcaagacggaggttatataacgcctattgaggcagaggataaatttgaaacttttatctcaagaataagactggatgagtctagggaaaatacaattaatttatggatcgtatctgataatttagttaaaggggcggcattgaacgcagtgcaaattgctgaaagtttgattaaaaatgatttttatggaagataaa

SEQ ID NO: 215650 - DNA, 851 bp, Unknown
  Bacterial polypeptide expressing nucleotide sequence isolated from the Sargasso Sea
aatgttaaatgttggcatcataaatataactggatatgcaggttctgaaattgctaggcttgtatattctcatccagagttaaatctagtttcagcaactggaagaagtaaggctgggcaatatcttgatgaagtttttcctcatcttgaaaaaataaatataaaaatacaagaagaacttagcgataatgttgacttcgtattttcagcattacctcacgctgcaagcgctgagaaactatctcaatatgttgatagtggtataccttcaattgatatatcagccgattttagacttaaggatcttggaacatatgaagaatggtatgatatcaagcatccaaggccggaattaatttctcaagctacctatggattaccagaactacatagaaacgaaatcaaaagtagtaaactagttgctaatccaggatgtttccctacaggaggaatactatctatggctccagcagtacaaaatgatttagtagaagaattaattatagtagattcaaaaactggaatttctggagcaggaagaacagctaaagaagcttttgggttttcagaactaaatgacaattgcgccgcttatggaactaaagggcacaggcatcaacctgaaatggctcaagaacttaatttcttaggtgaaaacaaagtaaaagttttattcactcctcatttagtatccatgacaagagggattttaggcactaattatggatctttgaaaaaagatttagatgaaaatgaagtagttgagctatataaagaattttacaaaaacgaaccattcattaaaatagtaagtgcacctcctgcaacaaagcatacttggggttctaatt

SEQ ID NO: 215651 - DNA, 1021 bp, Unknown
  Bacterial polypeptide expressing nucleotide sequence isolated from the Sargasso Sea
tatgcctaagcttaatgcattagttgttggttcaactggatatattggtgttcaattaataaaattattagttaaacataaatatattaatattaaatatttatgtggaaatacctctgttggtaaaaaaattacttattatgataaatcattatcaaataaaggattacctaaaattgttaaatttaataaaaaccttttaaaagatatagatgtaatttttacagctcttccaaatggagaagctcaagatatttcaaaatatttaacgaaaaatattactttaattgatttagctgctgattttagattagaaaaaacatctgattatcttaaatggtataagcaaaaacatagagcaaaaaatttaataaaaaaaagtatatattctcttccagaaattaacggcaaagaattaaacaattatcaaattatttcatgcccaggatgttatccaacttctatattgttacccctaatacctctttttgaaagtaatttagtaaaagtaaaaaatataattatggactctaaatcaggttattcaggtgctggcagaggagttcataaaaaatataaagataaaaatctttatgaatctttaagtgcctacggtgttgggtttcatcgtcataattctgaaatagatcaaatgttaaaaaaatatactaaaaaagaaataaattttagttttacacctcatctaacacctatgtttagaggaatattgagtaccatttatatagatttggaaattggtgttacacagtcaaatgttgttaaaaaactctcaacattttatcaaaaagataattttgttaggattttaaaacaaaatactttaatcagcactaacgatgtgattaatacaaacaattgccatatatcagtttgtaaatcaaaatataaaaataaaattgtaatactttctgctattgataactttattaaaggtggcgcaggtcaagctgtacaaaatttaaatatgaaatttaattttcccttaaaaactgcattgtaa

SEQ ID NO: 215652 - DNA, 1048 bp, Unknown
  Bacterial polypeptide expressing nucleotide sequence isolated from the Sargasso Sea
atgaaagtaggaattgtaggtgcatcaggttatgtaggaggagaagtactcagactactgttaagtcatccaaaggtagaagtctcaatggttacttcaagacaacatgcaggaaaatttctacacagagcacaacctagtcttagaggtttcactgacctaaaattctcagaattagattacgaaaaaatgagtgattcatgtgacttagtttttacagcagtgccacatggtaccgcaactgaaattgtgaaatcattgtatgacagaggaatgaaaattattgatttaagcgcagattatcgtctacataatccagaagattatggtaaatggtacggatgggaacatccacatccagactatttagcaaagtcagtgtttggagttccagaattacacagagaagagattaaaaaatcacaacttgtttcatgcccaggatgtatggcagtaacttcaatgcttgcattaaatccattaatcaaaaatgatttgattgatactgatcatattgttgttgattcaaaaattggatcatcaggtgcaggtgcaggtgcaggtacatcacacgcaatgcgtgcaggagttatcagaccatacaaaccagcaaagcatagacacactggagaaattgaacaggaattaagtcaaaccgcaggtaaaaaaatcaaggttgccatgagtcctcacgcagtagatgtcgttagaggaattttatgtacaaaccatacattccttaagaaagatgttgatgaaaaagaactctggaagatatacagagctgaatacagtgaagaacgttttgttagactaattagagataaagaaggattacataaattccctgatcctaaatttttggttggttcaaatttctgtgatattggatttgatttagacaaagaaaataacagattgattgcactatcagcatcagacaacctaatgaaaggtgcagcaggttctgccatccaaaacatgaatgtaatgtcaggattcgatgagttcgaaggaattatgtattcccctctaacacctgtataat

SEQ ID NO: 215653 - DNA, 1024 bp, Unknown
  Bacterial polypeptide expressing nucleotide sequence isolated from the Sargasso Sea
atgtcaaagctaaatgtattaattgctggtgccactggttatataggaattcaacttactaagctcttattagatcattcaaatattaagattaaatatttatgtggcaacacatcaaaaggtaaatcaattaaatattttgataaatctataaatgcaaaaaatttacctaaaattactaaattcaattacacaaatttaaaagatgttaaagttatatttacagcattaccaaatggtgaagcgcaaaaaatttccaaaaaattactacctcacaacatactaattgatttgtctgctgattttagacttaaatcttcaaaagagtattttaaatggtataaaattaaacataagtctaattcaaatattaaaaatagcatttattctatacctgaattttcaaaaaaaaatgttaaaaattataaaattatttcttgcccaggatgttatccaacatcaatattattacccttagttcctataattaaaaaaaaattaattggtataaaaaatattataattgattctaaatctggttattctggggctggaagaggtgttcataaaaaatatgctaataagaatttatatgaatctttaagtgcctatggtgtaggttttcacagacataattctgaaattcaacaagaattaaactttcattcaaataataaagttaattttaattttacacctcatctaacaccaatgtttagaggtattttgagcaccatttatattgatttaaaacctggagtaagtattagcaaaattcataaagaattaaataatttttataaaaaagattttttcataaaaatactcccacttaattcattgataagtacaaatgatgttataaatacaaattattgcaacatatcaatttgtaaaacaaaatataaagataaaataataatattatcagcaattgataatcttataaaaggaggagcgggacaggctgttcaaaatttaaatttttattataaatttaacagtaagaaaggtttaatatgag

SEQ ID NO: 215654 - DNA, 772 bp, Unknown
  Bacterial polypeptide expressing nucleotide sequence isolated from the Sargasso Sea
atgcagtatgtttcaaagatattatctgcaggagtcaaaattatcgatttatcagctgattatagattcaatgatgcagatagatggaagaaaaattatgacactgatcatatagatcctataaatttaaaggagagcatctatggtttgccggaactttacagggacgacataaaaatatctaacttagttgcagtgccaggttgttatccaactgcaagtctcttgtcattaatgccgatcatgagccagcttaaaagtaacgatatcatcatagatgctaaatctggtttcagtggagctggaaaagcaaaatctgaagggggtctcgcagagtcgatgaaagataactttaaagtttactctccagattttcacaggcatgaggatgagatcaaatactatgcagacaaaatcatggataagaaatttaatgtttcgtttgttccccacttacttcctcacttcagaggggagtacataacagcatatgttgagcctgaagatataaacaaagatttccaaaaaatttacgaaaattattatgccgatgaaaaactagtaaaagttttaaaaaaaggtacagtacctgaaataataaatataagcgggatgcatacttgcgaaattgccgttagtgccaaaaaaagcagcaacaaattaatcataaatgctgccttggacaacctacttaaaggtgcagcaagtcaagcagttcagtgttttaatcttatgcatgacatagatgagtttcattcgctaaaatattaat

SEQ ID NO: 215655 - DNA, 1048 bp, Unknown
  Bacterial polypeptide expressing nucleotide sequence isolated from the Sargasso Sea
atgaaagtaggaattgtcggtgcatccggttatgtaggaggagaagttctcagactattacttagccaccctaaagtcgaggtttcaatggttacatcaagacaacatgtaggaaaatttctgcatagggcacaacctagccttagaggctttactgatttgaaattttcagaattagattatgaaaaaatgagtgactcttgtgacctagttttcacagcagtgccacacggaactgcaactgatattgtcaaagcactgtatgacagaggaatgaagattattgatttgagcgcagactaccgtttgcacaatccagaagattacggaaaatggtacggatgggaacatccacatccagactatttggcaaaatctacatttggcgttccagaattacatagagaagagattaaaaaatcacaattagtttcttgcccaggttgtatggcagtaacatcaatgcttgcattaaatccattaatcaaaaatgatttgattgatactgatcacattattgttgattcaaagataggttcgtctggtgccggtgcaggtgcaggtacatcacatgcaatgcgtgcaggagtcatacgaccatacaaaccagcaaaacacagacacactggagagattgaacaagaactaagtcaaactgcgggtaagaagattaaggtagcaatgagcccacatgcagttgatgtggtaagaggaattttatgtacaaatcatacattcctcaagaaagatattgatgaaaaagatctttggaagatttatagatcagaatatagtgaagaacgatttatcagactgattagagataaagaaggtctacataaattcccagacccaaagtttttggttggttcaaacttctgtgatattggatttgacctagatagagagaacaacaggttaattgcattatcggcatcggacaacctaatgaagggtgcagcaggttctgcaattcaaaacatgaatgtcatgtcaggatttgatgagttcgaaggaattatgtattcccctctaacacctgtataat

SEQ ID NO: 215656 - DNA, 1024 bp, Unknown
  Bacterial polypeptide expressing nucleotide sequence isolated from the Sargasso Sea
atgcctaagcttaatgcgttagtcgctggatcaactggatatattggtactcaattaattaagatattagttaagcacaaacatataaatataaaatatctatgtggtaattcttcagtaggtaaaagcatcgtttcttatgataagtcattatcaaaatataaattacctaaaatcaaaaaatttaataaagatttattaaacgatgttgatgtaatttttactgctctaccaaatggtgaagctcaagatatatctaaacatctcaataataaaaatattttaattgatttagctgcagattttagacttgaaaaagcttcagaatataaaaagtggtataagcaaaaacatcgagctgttaaacttataaaaaaaagcatttattcacttcctgaaattaatagagaagaacttaaaaagtataatattatttcaagccctggctgttatccaacgtccattcttttaccattaattcctttatttaataaaaattttattaattttaaaaatattataatagactctaaatctggttattctggtgcaggaagaggtgttcataaaaaatataaaaataaaaatttatatgagtctttaaaagcatatggtgttggtcatcatcgacataattcagaaattgatcagatgttaaaaaaatttactaagaaaaaaattgaggtaagttttacacctcatttatccccaatgtttagaggtattttaagtactatttatttagatttgaataaaaatgtaaatcaatcaaagatcataagtttattatctaagttctataaaaaagaaaaattcattaagatttctaagtcagatactttaataagtacaaatgatgttattaatacaaataattgtctaatttcagtatgtaaatctaaatttaaaaataaaattataatactttcagctatagataatttaataaaaggtggagcagggcaagcagttcaaagtctaaataataaatttaactatcctgaaacgactggattaatatgag

SEQ ID NO: 215657 - DNA, 637 bp, Unknown
  Bacterial polypeptide expressing nucleotide sequence isolated from the Sargasso Sea
tatgatatcagttggaattatcggagcctcgggttatacaggcgaagaattagtgaaaattttacaaaatcacccaaatgttgagattaaatctttaacatctagaactcatgtcggtaaaaaaattagtgaagtttttgagcttgataaaccaataaatgatgtatttaaaaaaccaacgactgagaatttaattggatgcgatgttgttttttttgctacacccaatggtatagcaatggatatggcagcagaactcattaataagaatattagaatcattgatatatctgctgactttagattaaagaatccagatacatgggaaaaatggtatgggaaaaaccattctgccaaatcattgttatctgagtgtgtatatggtttgccagaaattccaagtcagaaagagaaaattaaaaaggcattaattgttgctaatcctggatgttatcctacttcggcgttattagctttattgccaatcgttaaagatcttgaaaaacaaaaaattattcttaactcgacatcaggaataagcggagcagggagaaacttagatagcaaaaagcttttttccgaaggtgaagataattatcaagcatatgctgttaggtctcatcgtcattatccctga

SEQ ID NO: 215658 - DNA, 1024 bp, Unknown
  Bacterial polypeptide expressing nucleotide sequence isolated from the Sargasso Sea
aatgtctaaacttaaagtattaatagctggatcaacaggatacatcggtattcaattaattacatttttatgtaaacataagaatgtagaaataaaatatttgtgcggaaaatcatctgttggacaaaatatttcttattattcgaagaaattaaaaaagaaaaaattacctaaaataacaaaatttaaaaaagaacttttatataacgttgatttaatattcactgcgttaccaaatggagaagctcaggaaatttctaaatatctattaaaaaaaaatgttttgatagatttggcagcagactttagattaaaaaatcctaaagattacttcaaatggtataagcaaaaacacaaagcaattagaaatattaaaaaaagtatatacctgcttcctgaattaaataaagaaaagttaaataattatcaaattatatcatgtccaggatgttacccgacttctatacttttgcctttaattcctttaataaaaaaaaaattaataaatcttaataatataattattgactctaagtccggatattcaggtgcaggtagaggcgttcataaaaaatatgctaacaaaaatttatatgactcattaagagcttacggtgtaggttttcatagacataactcagaaatccaacaagaaattaataaagtaacaaataaaaaaattggcttcatatttacgccccatctttcaccgatgtttagaggtatattaagtactttatatatcagtacaaaaaatagtatttcaataaataaaattcataattgtcttaatagcttttttagaaaaagtgaatttgttaaaatcatgaaagtaaattcattaatagggactaatgcagttatgaatactaataaatgtattatttctgtatgcaaaacaaaacacaaaaataagtttgtgattttatcatctttagataacttaataaaaggaggttcaggacaggctatacaaaatatgaacctcaagtttaattttccatctagtagaggtcttaaatga

SEQ ID NO: 215659 - DNA, 1006 bp, Unknown
  Bacterial polypeptide expressing nucleotide sequence isolated from the Sargasso Sea
aatgaaaaatgtagtaattttaggtgctagtggatttgttggttatgaactttataatatgtgtaaagtacatccaaatataaatctatcagctttgtctgccaataaatcagctggagaattggttgatgataaagaattagagcaatcacttagatataaaacaattgaaaatatagacttcgagaatgttgattttattttcaattgtttacctaatatacagatgcataaattaattcataatctaaataaaaatataaggattatcgacctttcaattgacttcaggctggatgaaaaggaagaatataaaaattggtataatttcgatcatgaaagttttgaattaaatgaaaattttcaatttggccttacagaatttaatagggagagcataaaagaaagtaaacatgttgctaatccagggtgttatgcaacaagtgtattagttccattaatagaattggtttcaaaggatgcaattgagcaagatgatattataattgatgcaaaatctggatattctggtgcaggaaaaacaaagcccaagcatgagctcataaaggaagtaagtgaaaatattgcaacatatggagttggtgaccataagcacatagctgaaataaatcaggagttatcaaaaaatactaaaaataaagttgaagttttttttgctgcaaatctaataccagttgaaagaggtatcttaagtaatatttatgtaaaccttaataataaaacattaaatgaactttatgaaattttagttgagcgttttaaagaagagaaattcattgaagtactcccgattggtgatattcccaaaaccaaagatgtggtcggaacaaataatttagtaattggtctaaaaaaaggctataaagaaaagaaaatctgtatagtcaccgctttagacaatctcttaaagggtgcggcaggtcaggcgatacaaaattttaacgtaatgaatgattttgatgaaggcgaagggatattaatgtga

SEQ ID NO: 215660 - DNA, 958 bp, Unknown
  Bacterial polypeptide expressing nucleotide sequence isolated from the Sargasso Sea
catgaagaatatagcaattttaggtgcaagtggatttgtgggaaatgagttgattagtatgtgcattaatcatccagagattaatattgccgggctatcagctaataggtctgcaggagaacaaattaatttggaggatattaaaaagaaaaataaatccgaattatattataagaaaatagaagaaatagacttttccaatattgattttgtattcaattgtttaccaaatgaacagttttacaaaattataaaggatcttccaagtgaactaagcgtaattgatttatcaattgattttagacttaataacaaaaaggactatttagattggtacaaatttaaacatgataatccagatcttattgaagattttaaatatggattgactgaattgaatagaagtcaaattaagagagcaaaacatatcgcaaatccaggatgctatgcaactagtgttttaataccattaacaattttagttcaggaaaaagctataagaactgataatattattattgatgcaaaatctggatattctggagcaggcaaaacaaaaggtaaacatcagctattaaaagatgtacacgaaaatattaaaacatatggtgtaggcgatcacaaacacatagcagaaattaaccaagagttaactatccataacgatggtaagaatgtagaagtattcttttcagcaaacttaattccagttgaaagaggaatattatctaatatttatataagtcctgttgagttatcagcagaagagattcaaaagatattatatgataaatttaaagatgaggcttttattaaaactttaccgctaaatgagattccaaacactagggaagttgtaggaacaaataatctaataattggagttaaaaaaggatataagaatgatacaatctgtatagttagtgtcttagataatttagtgaagggcgccgcagga

SEQ ID NO: 215661 - DNA, 562 bp, Unknown
  Bacterial polypeptide expressing nucleotide sequence isolated from the Sargasso Sea
attgataccattaattccactaatcaaaaaaaaccttattaataacaaaacaatcatcatagactcaaaatctggttattcaggagcaggtagaggtgtacataaaaaatataaagacaaaaacttatatgagtctcttagtgcttatggcctagcaaatcatagacataattctgaaatccaacaagaattagatttagaaactggaaaaaaaaatagatttcattttaccccgcacttaacaccaatgtttaggggaattttaagcaccatttatgttgatgtaaaaaagggagtatcattaagaagagttcaaagtgtcttaaacaatcattataaaagtcataagtttgtgaaaatttctaaaacaaatacatttttaagtactaatgatgtaataaatactaacaattgtttaatttcagtatgtaatagcaaatataaagataaaataataatattgtctgtaatagataatttgattaaaggtggtgggggacaagctgtacaaaatatgaattattattttaattttaatgaaagtgatggtttaaatgtttaa

SEQ ID NO: 215662 - DNA, 498 bp, Unknown
  Bacterial polypeptide expressing nucleotide sequence isolated from the Sargasso Sea
caaaatcagggattagtggagcgggaagaagcacagtagaaaatgttctaaaaactgaaatacaagaaaatttcagagcatacgcaacttcaggtcatagacatttaccagagataaaacaagttttacaagaaagttatggatccagtcttgaaattaattttcttccgcacctcataccggctatgcgaggtatttacgctacgatccatgttaactttgaggaaaaagtggaagagaactttagaaaccttttctatgaattttacaaaaattctccaaatattcttttgatgggtgaagatgaagtgcctgagattataaaggtatccaatacaaacaactgtcaaattggcgtctattcttcagctattgataatcaaattgtcattatctctgcaatagataatttagttaagggagctgccggtcaggctatggagtgttacaatttactaactggcaataaccaactgaaagggttagataatggttgaa

SEQ ID NO: 215663 - DNA, 1018 bp, Unknown
  Bacterial polypeptide expressing nucleotide sequence isolated from the Sargasso Sea
atggacaaacttaacgtattaattgcgggctcaactggttatattggaactcaattggtgaaactcctctgtaaacacaaaaatgtgaaaataaaatatctttgtggcaatacatctgttggtaagaatatttcatcctatgataaagatttaaagaaatataagctaccaaagataatcaagattaattataaattatttaaagatgtagatgttatatttacatccttgcctaatggcgagtctcaaaaaattgctaacaaactattaaaaaacaacatcatgattgatctatcagctgattttagattaacgaatgcaaaaatatataacaaatattatgggataaagcatatatctttaaataatcttaaaaaaagtatttatggcttaactgaaattaataagaaaaatttagcaaaaggtaaaattatagcttgtccgggttgttatcctacttctatacttttacctttatttcctttaattaaaaaaaatttaattgattctaaaaatattgttattgactcaaaatcaggtttttctggagctggtcgtggcgttcataagaaattcaagaataaaaatttatatggttcaaccagcgcttatggaatagcctctcatagacataatgcagaaattcaacaggaattgagctatgttaaaaagaatatagaatttactttcactcctcatatacttcccatgtttcgagggattttatcaactatttacttaaattataaaagtaaatctaatttgaataaaatatacaatgaattaagaagatattacatgaaagataaatttataaaaatattgaagaataaagctttaagcacaaatgatgttattaacacaaataattgtcaaatatcagtttgtaaatctaaggataaaaaaaaattaattattctaagcagtgtagataatttgataaaaggtggggcagggcaagcggttcaaaatttaaattttatctataattttaagtttaatgagggtttaaaatgag

SEQ ID NO: 215664 - DNA, 361 bp, Unknown
  Bacterial polypeptide expressing nucleotide sequence isolated from the Sargasso Sea
actgggaaaaaaaaataaatttcattttattccacatctaacaccaatgtttagaggaattttaagtaccatttatgttgatgcaaaaaagggtgtttcattaagaaaaattcaaggagtcttagtcaatcattataaagcgcataagtttgtgaagatttctaaaacaaatacatttttaagcactaacgatgtgataaatactaataattgtttaatttcagtatgtaatagtaaatataaagataaaataataatattgtctgcaatagataatttgattaaaggtggtggaggacaagcagtacaaaatatgaattattattttaattataatgaaagcgatggcttaaatgtttaa

SEQ ID NO: 215665 - DNA, 1006 bp, Unknown
  Bacterial polypeptide expressing nucleotide sequence isolated from the Sargasso Sea
aatgaaaaatgtagtaatattaggtgctagtggatttgttggttatgaactttacaatatgtgtaaatctcatccaaatattaatctatctgcattgtctgccaataaatcagctggagaattggttgatgataaagaattagatcaatctctcagatatcaaacaatcgaaagtatagattttgaaaatattgattttatttttaattgtttacctaatatgcagatgcataaattaattcataatcttaataaaaatgtaagaattatcgacctttcaattgacttcagactcgatgaaaaggaagaatataaaaagtggtataattttgatcatgaaagttttgaattgaatgaaaattttcaatttggccttacagaatttaatagggagagtataaaaaaaagtaagcatgtttctaatccaggctgttatgcaacaagtgtattagttccattaatagagttggtttcaaaggaagcaattcagcaagatgatattataattgatgcaaaatctggatattctggtgcaggaaaaacaaagcccaagcatgagctcagaaaagaagtaagtgaaaatattgcaacatatggagttggcgatcataaacacatagctgaaataaatcaggaattatcaaaaaatacaaaaaataaagttgaagttttttttgctgcgaacctaattccagttgaaagaggtatcttaagtaatatttatgtagaccttaataataatacattaaatgaacttcatgaaattttagttgagcggtttaaagaagagaaatttattaaggtgcttccaattggtgatattcctaaaactaaagatgtggttggtacaaataatttagtaattggtttaaaaaaaggctataaagataataaaatctgtatagttagcgctttagataatctcttaaaaggtgcagcaggacaggcgatacaaaattttaatataatgaataattttgatgaaagtgaagggatattaatgtga

SEQ ID NO: 215666 - DNA, 979 bp, Unknown
  Bacterial polypeptide expressing nucleotide sequence isolated from the Sargasso Sea
agccgttttaggctcaacaggttatgttggtttagagttagtttatctgctaactaaaattgagaatattacaattaaatttttgggaagtgaaaataacaaagataatgatattttaaagtttgatagcagaataaaaaaagaacttccaaaaattaaacataattctgaattcaatatcaaaaatattgatctactatttcttgcattaccacataagatttctcaagaatttgtaaaaaaatattacaataaaattaaaattatagatttatcagctgattttagattagatgatcatgaaatttataaaaataattatgatacagaacatatttgtcctgagttattaaacaaatttgtttatggtttatatgaaattaatcataatgatatacaaaaatctaataatatagctgttcctggatgttatcctacttcagtactcttacctcttattcctcttttaaaagatcaaataatcaaatcttccaatataataatagatagtaaatctggatatagtggagcaggaaaaaattttaataaaaaaaatttatttaaaacaaataatgatttaaatttttataattataacactaataatcatcgtcatatttgtgaaattaatcaagaactaaacaaacattcattagaagaaattaaattttcttttaatccccatattttacctatttttagaggcttaatgtcaactatatactgtgatttaaacaaagatatttctttacaagatgtaaatttttttttgaaaaatttctataatgatttcgataatataaaagttattactgacgatgaacgtttagattttaatgtggttcaaaatactaataattgtattattaaatgctttaaacattatactaaatcgaaaataattattgttagtgtaattgacaatttacagaaaggcgcagctggtcaagcaatacaatgtatgaaagccatattataa

SEQ ID NO: 215667 - DNA, 586 bp, Unknown
  Bacterial polypeptide expressing nucleotide sequence isolated from the Sargasso Sea
tatggctattaaaacttatattgacggcgcagagggtactacgggtttacaattaaaacaacgattattatcccatcctgaaatccaaatcatttctgctgatgtaaataaaagaaaagatttaaattataagcttgatcaattttctaactcagatttaatctttttatgtttacctgataatgaagctttactaataacaaataaaattcatgaaaattttggcaatgaaaaggtaataattgatgcttcatctgcacacagagtttcagatggatgggtatatggatttcctgagttaaatagttcacaaagacagtttttgaaaaattcaaatcgtattacaaatcctggttgttatcctactggcgctttatcaattataagacctcttgtagaaaataatttcattgataataccagcaagttaattatcaatgctgttagtggttatactggtggaggaaaaaaacttattgattatttctcaaataataaaaaagataagtttttttattattctacatttttaaaccacaaacatacaaaagaaattaaacactatggtttattagagcattcacca

SEQ ID NO: 215668 - DNA, 907 bp, Unknown
  Bacterial polypeptide expressing nucleotide sequence isolated from the Sargasso Sea
gctgggtaaacacgtcaaattttacgataaatctttatctaaatataaattaccaaaaattttaaaatttaataaaaaattattaaaagacgttcaagttatttttacagcacttccaaatggggaagcacaggatatatctaaacatttaagcaaaaatcatactctaatagatcttgctgctgattttagattagaaaaagcttcagattatttaaagtggtataaacaaaaacatcgagcaactaatttgataaaaaaaagtatttatttgcttcctgaaattaatagaaaagagattaaaaaatataatattatttcatgcccaggatgttatccaacatcaatattgcttcctctatttcctttatttaagaaaaatttaattaaatttaataatattattattgattcaaaatccggatattcaggtgctggtagaggagttcataaaaaatataaagataaaaatctatatgaatctttaagcgcatatggagttggttttcatcgtcacaattctgaaatagatcaaatgttgagaaaatttactaagaaaaaatttcaatttaattttactcctcacttatctccaatgtttagaggtattcttagtactatatatgttgaattggaaaataatatttcacaaacaaaattattaaaaacattagttagtttttacaaaaatgaaagttttgtaaaaatattaaagtttgacacattgttaagtaccaatgacgtaataaatactaacaattgttatatttcagtgtgcaaatctaaatatagcaataaaataataattttatctgctattgataacttgattaaaggtggggcaggtcaagctatacaaaatttaaataataaatttaattttcctgaaaagactggattaaaatga

SEQ ID NO: 215669 - DNA, 949 bp, Unknown
  Bacterial polypeptide expressing nucleotide sequence isolated from the Sargasso Sea
catgagccaccccactgtctacatcgacggcgaccaaggcacgaccggattgctgatccacgaacgcttgcgcgggcgtgacgacctgcagctcgtcacgctgccggacgccgagcgcaaggatcccgtgcgccgcgccgaggcaatcaacgcagccgacatcgcgatcctgtgcctgcccgatgcggccgcgcgcgaagcggtcggcttcatccggaatccggcggtgcgcgtgatcgatgcgagttcggcccatcgcacgcagccggattgggtttacggctttcccgaaatggcgaacgggcacgcgcagacgatcgcgcacgcgcggcgcgtcaccaatcccggctgctatccgaccggcgcgatcgcgctgctgcgccccttgcaacaggccggcctgctgccgcgcgactacccggtgagcatccatgccgtctccgggtactcgggcggcggacgggctgccgtcgacgcattcgagtcgaacgatgcgtcgcaagcgaaaccgctacaggtctacggcctcgcactcgcgcacaagcacgtgccggagatccagctgcacgccggtctgacgaatcgcccgatgttcgtgccggcctacggtgcctatcggcaaggcatcgtgctcaccgtgccgatcgagctgcgcctgcttcctgccggcgtgaccggtgagcagttgcatgcgtgtcttgcgcaccattacgccggcgcgcgtcacgtcgacgtcacgccgctcgcggcgacgcaagcgatcacgcatctcgatccgcaagcgctgaacggcaccaatgacctgcggctcggcgtgttcgtcaatgccgatcacggccaggtgctgctgtccgccgtgttcgacaatctcggcaaaggggcatccggcgcggccgtgcagaacctcgacctgatgctcggcgcggtagaggtggcgaaagcggcataa

SEQ ID NO: 215670 - DNA, 847 bp, Unknown
  Bacterial polypeptide expressing nucleotide sequence isolated from the Sargasso Sea
ccgaatgatagttttaatacagatgatagtgattatgtattcttagctttacctcatgcagtatctaataaatttgtaaaaaaatattttaataaaattaatattatagatttatcagctgactttagattagataattttgatgtatataaagaaaattatggcaatgaacatgagtgcaaagagcatttaaacaattttatctacggtctcgctgaaataaatagagaaaaaatagaaaattctaaaaatatagcgatacctggatgttatccaacttctattttattgccattaatacctttaataaaaaataacttaattaatactaagaatataattattgattctaaatcaggttatagtggagcaggaaagaaatttgatgtcaacaaaatgaaatcaaagaatgattataacttttacaattataatacaaataatcacagacatattgcagaaattaaacaagaacttaataaatatagttcagaaaatgaagttaagttttcatttaatcctcacattcttcctaattttagaggtatgatttctacaatttattgtgatctcactaatagtataaaaaaaactgatgttataaatttatttaaagaattacaaaaaataaatccctttttaaaatatatcgataacgatgaaacccttgattttttttctgtacaaaattctaattattgtaaaattaaaatttttaatcatcacagtgaggataaaattatcattgttagcgcaatagataacctaataaaaggtgctgccggtcaagcggtgcaatgctttaatatatcagaagatattgaagaaacggtatctttagtatgat

SEQ ID NO: 215671 - DNA, 1003 bp, Unknown
  Bacterial polypeptide expressing nucleotide sequence isolated from the Sargasso Sea
tatgaaaaaaaagaatatagggatagtagggggttcaggatatgctggagaggagctattatctttaatctcaaaacatcaatacatgaatatcttagctgttagctcaagagagtttgaagggcagcctatatcttcagtctttaaatccttcatagatccagagttaacttttttaaatccaacagataaaaaattttttgaatgtgatgtagtttttttctgtacccctcatggatcttctatgtctatggcaaagaaatttttagatagtgaaataaaaataattgatctatctgcagattttaggattaaagataaagatacttgggaacagtggtatggaatgaaacatgagcaacctgaactcattgaacagtcagtttatggtctggtagacatttatgctaaccatataaaaaaagcagatcttgtggctgttcctggttgttaccccactgcaagtttattgggcatttctcctttattaaataaagaaataaatatcagcaatatagttattgatgccaagtcaggaatgacaggggcaggaagatcaacagttgaagggggtatgaaaaaggaaatgcatgaaaatcttagagcatatggtgttttagggcatagacattcaccagaaattattcaagaagttaataaagccagcggcaaagaaataaacttaagttttatacctcacctaatccccatgatgagagggatatatgcatccatttatatacataccgattctaaggctctaaataatgatatttttcaagagttttataaggagtcaccatccgtaaaagtaatagaagatataccaaagatatctgatgtagttaatactaataaatgtgagatatctctatttaatacctctgttgatggacagtatctagtcataacagcaattgataatttacttaaaggcgcttctggtcaagcaattcaatgctttaatttgatgtttggtttagaattagaagagagtttttaa

SEQ ID NO: 215672 - DNA, 728 bp, Unknown
  Bacterial polypeptide expressing nucleotide sequence isolated from the Sargasso Sea
agctgattttagattaaaggatgtaaatacttgggagcaatggtataacactccgcacactcaaaaagatcttttatctgagtcaatttatggattaactgaactaaatttgagaaatttaaagtcagcaaaaatagttgcagtacctggttgctatcctactgcaagcatcttaggtgttctcccccttttgaaatcagaatttaatatagaatctataatcattgatgctaagtctggaattagtggtgcaggtaggaactcagtaaaaaacggtttatctaatgacataaaagaaaatttcagggcttacggtctagaaggccataggcatttacctgagataagagagatagtggaacttgtttcaggctatccaattaaattaaattttttacctcatcttatacctgccatgagaggcatttattcaacaatatacttacagttaaaggagactcaaggcctgaatgtgcaagatttatatgagtccttttataaggattcaccaaatgtaaggatcatgaaaccaagtaatgcgccagacattaaatctgttgcgcatacaaataattgtgatatctcagttaattattcaaatatagaaaaccaagttattgtaatctcatctattgataatttacttaagggggctgctggtcaggctgtagaatgctacaatctgatgaaaggttttaatcaaagcgcagggctaaataatggttgag

SEQ ID NO: 215673 - DNA, 1048 bp, Unknown
  Bacterial polypeptide expressing nucleotide sequence isolated from the Sargasso Sea
atgaaagtaggtattgtcggtgcatccggttatgtaggaggcgaagtcctcagactattactcagccatcctaaagttgaggtttcgatggtaacatcaaggcaacatgtaggaaaatttttgcacagggcacaacctagcctcagaggctttactgatttgaaattttcagaattagattatgaaaaaatgagtgacaattgtgacctagttttcacagcagtgccacatggaacagcaactgatattgtcaaagcattgtatgacagaggaatgaaaattattgatttgagtgcagattatcgtttacataatccagaagattatggaaagtggtatggatgggaacacccacatccagattatttagaaaaatcaacatttggcgttccagaattacacagagaagaaatcaaaaaatcacaattagtttcttgcccaggttgcatggcagtaacatcaatgcttgcattaaatccattaatcaaaaatgatttgattgatactgatcacattatcgttgattcaaagattggttcatctggcgcaggtgcaggtgcaggaacatcacatgcaatgcgtgccggagtcatacgaccatacaaaccagcaaaacatagacacactggtgaaattgaacaagaactaagtcaaacagctggtaaaaagatcaaggtatcaatgagcccacatgcagtagatgttgtaagaggaattctatgtacaaaccacacattccttaagaaagatgttgatgaaaaagaactttggaaaatttatagatcagaatatagtgaagaacgatttatcagattaattagagacaaagaaggtctacataaattcccagacccaaagtttttggttggttcaaacttctgtgatattggatttgacctagatagagaaaataataggttaattgcattatctgcatcagacaacttgatgaagggtgcagctggctctgcaattcagaacatgaatgtcatggcaggatttgatgagttcgaaggaattatgtattcccctctaacacctgtataat

SEQ ID NO: 215674 - DNA, 532 bp, Unknown
  Bacterial polypeptide expressing nucleotide sequence isolated from the Sargasso Sea
aaaaaaaacgattaacttaaagaatatcattatagactccaaatctggatattctggagcgggtagaggagtacataaaaaattcaaaaataaaaatttatacgaatctcttagtgcatatggtgtagggtttcacagacataattcagaaattgatcaagaattaaaaaataacacttctttaaaaatcaattttacttttacaccccatattattccaatgtttagaggtatattaagcacaatttatttggatttaaaaccaggtaatactttaaataaagtgcaaaatattttgaaaaaatttcataaaaagaataaatttgtaaagataaagagcgttaactcttttctaagcacaaatgacgttatgaatactaattattgctgtatttctgtctgcaaaactaaatttaaagataaaataataattttatcagtcattgataatcttattaaaggaggagcaggtcaagcagttcaaaatatgaatttgaaatttggttttaaaaatagtgagggattaatatga

SEQ ID NO: 215675 - DNA, 1030 bp, Unknown
  Bacterial polypeptide expressing nucleotide sequence isolated from the Sargasso Sea
atgaaaaaaaagattagagtggccgttttaggctcaaccggctatgttggaatggagttagtaaaaatcctatcaaatcattcttacgtagatataaattttctaggatcagaaactgttcatgacagttatctaaataatattgataatacacaagaatataatcaacttcctcttttaagaccaaataatagttttaatactgaagatagtgattatgtttttttagctttacctcatgcaatatcaaataaatatgtaaaaaaatattttaataaaattaatattatagatttatcagctgactttagattagataattttgatgtatataaagaaaattatggcaatgaacatgagtgcaaagagtatttaaacaattttatctacggtctcgctgaaataaatagagataaaatagtaaattcaaaaaatatagcggtacctggatgttatccaacttctattttattaccattaatacctttaattaaaaataaattaattgataccaagaatataattattgattctaaatcaggttatagtggagcaggaaagaaatttgatttcaataaaatgaaatcaaaaaatgattataatttttacaattataatacaaataatcacagacatattgcagaaattaaacaagaacttaataaacatagtacagaaaatgaagtaaggttttcatttaatcctcacattcttcctaattttagaggtatgatttctacaatttattgcaatctcaataatagtataaaaaaaactgatatcataaatctattcaatgacttacaaaaaataaatccttttataaaatatatagataatgatgaaacccttgattttttttctgttcaaaattctaattattgtaaaattaaaatttttaatcatcatagtgaggataaaattatcattgttagtgcaatagataacctaatcaaaggtgctgccggtcaagcggtacaatgttttaacatagcagaaaatattcaagaaacagtatctttagtatgat

SEQ ID NO: 215676 - DNA, 759 bp, Unknown
  Bacterial polypeptide expressing nucleotide sequence isolated from the Sargasso Sea
tattaaaaaaaaatatcttgattgatttatcagcagattttagactcaagtcagcaaaagaatatttgaaatggtataaaattaagcataattctaaaaataatataaaaaatagtatttatgctctacctgagatttcaaaaaaaaaattaaaaaattataaaataatttcttgcccagggtgttatccaacatcagttttattaccattaattcctttggtaaaaaataatctaattgaaacaagtaatataataattgattcaaaatctggatattctggaggtggcagaggtgttcacaaaaaatattcaaaaaaaaaattgtatgaatctttaagtgcttatggcgttggttttcacagacataattctgaaatccaacaagaattaaataattattctaaaaataaaatagaattcacttttacacctcacctaagccctatgtttagaggtattttaagcacaatttatttagatctaaaaaaaaacatttccataaattacgtaaactcaaaattagaaaaattttataaaaatgacgcttttgttaaaattttaccaattaattcatttataagtacaaacgatgtaattaatactaattactgctacgtatctgtatgcaaaataaagaataagaatagatttataattttgtcggcaatagataatctgataaaaggtggggcaggacaagcagtacaaaatttaaataattattttggatataatgttaaaaaaggattagtatgaa

SEQ ID NO: 215677 - DNA, 913 bp, Unknown
  Bacterial polypeptide expressing nucleotide sequence isolated from the Sargasso Sea
atgaatcaacttaatgttttagttgcagggtctacagggtacataggagttcagctcgtaaaacttttatgtaatcacaaatatataaagattaaatatctttgtggaaattcgtctattggaaaaaatatttatgcatatgacaaaacattaaagaaatataatttgccaaaaattgttaaagttaattatagatactttaaagaggtagatgtaatttttactgctttaccaaacggacaaagtcaaattattgggaataatttaaataaaaaaaatatactaatagatttatctgccgattttagaataaaagacgtaaatgtttacaaaaaattttataaaattaaacataaatctaaaaagttattaattgatagcgtgtatggattatctgaattatacgaacaagaaataaaaaataaaaaaattatagcctgtcctggttgttatccgacatcaattataacacctctatttccactatttaaaaaaaaatatctaaaaattaataaagttataattgactcaaaatcgggatattcaggcgctggaagatcaattttaaaaaaagaaaaaaaaatgaatttatttaattcattaactgcctatggtatacctaatcaccgccataacgctgaaatatatcaagaactttcttttatatcaaaaaaaataaagtttaattttactcctcacattatacctatgtttagaggtatcttatctactatatacgttgagaaaaaaaacaatataagcacagaaaaaattttaaattttttgaaaagattttataaaaaaaataaatttattcgaatatgtaaaaaaaatatgcttattggtactaaaaatgtaataaatacaaattattgtgatatttcagtgtgtgaaacaaaaatgataaaagtgg

SEQ ID NO: 215678 - DNA, 961 bp, Unknown
  Bacterial polypeptide expressing nucleotide sequence isolated from the Sargasso Sea
atgaaagtaggaattgtcggtgcatccggttatgtaggaggagaagttctcagactattacttagccaccctaaagttgaggtttcaatggtcacatcaagacaacatgtaggaaaatttctgcatagggcacaacctagccttagaggctttactgatttgaaattttcagaattagattatgaaaaaatgagtgactcttgcgacctagttttcacagcagtaccacacggaactgcaactgatattgtcaaagcactgtatgacagaggaatgaagattattgatttgagcgcagactaccgtttgcacaatccagaagattatggaaaatggtacggatgggaacatccacatccagactatttggcaaaatctacatttggtgttcctgaattacacagagaagagattaaaaaatcacaattagtttcttgcccaggttgtatggcagtaacatcaatgcttgcattaaatccattaatcaaaaatgatttgattgatactgatcacattattgttgattcaaagataggttcgtctggtgcaggtgcaggtgcaggtacatcacatgcaatgcgtgcaggagtcatacgaccatacaaaccagcaaaacacagacacactggagagattgaacaagaactaagtcaaactgccggtaagaagattaaggtagcaatgagcccacatgcagttgatgtggtaagaggaattttatgtacaaatcatacattcctcaagaaagatattgatgaaaaagatctttggaagatttatagatcagaatatagtgaagaacgatttatcagactgattagagataaagaaggtctacataaattcccagacccaaagtttttggttggttcaaacttctgtgatattggatttgacctagatagagagaacaacaggttaattgcattatcggcatcggacaacctaatgaagggtgcag

SEQ ID NO: 215679 - DNA, 487 bp, Unknown
  Bacterial polypeptide expressing nucleotide sequence isolated from the Sargasso Sea
aatgtcattaaaaataggaattattggtgctactggtattacaggcctagaattagttaatatactccagaaccatcctagtgtttctgagattacaccattttctttttcatctgctggcaaatcactaaattctctagatgaaagaataagtcaagagattaataaatgtttatcctttgaagcaatcaattttagttcttttgactgttttttcttttgcacagaaaacggagtttcaatgagtttttatgagaaaatattaaaatcagaatgtaaagtaatagacctgtcggcagattttagaattaaaaatactaacacatgggaaaaattttataatcttaaacattgtgtttctaaccacgcaaatgtcaccgtatatggactttcagagttttacagaaatgaaattcaatcttctcaaattattgctaatccaggatgctatccaactgcagcgctattgccattaattccattatga

SEQ ID NO: 215680 - DNA, 522 bp, Unknown
  Bacterial polypeptide expressing nucleotide sequence isolated from the Sargasso Sea
tatgtctttaaatgtatgtatctttggtgtatccggttatacgggttcaaagcttctttactatttagataaacacaagcaagttaaaataaatggagtttttgggaattcaacagttggtataaaattaggtgatttatttaaaaatttaaatagttctaacaaaataaaaatttctaactatgaagactttgattttagtaaaacagatttaattttcagctgtttgcccaatggtaaattacaaaaagaaataataaaaaatcttaaccctaaaatctctattatagatctttcaggtgattttaggctcaaatctaaattagaataccaaaaattttataatatacctcataggtcccatccctttaaagaaaaattttgctacggcttgtctgaagtatatagaagaaaaattaacaaaagtaaatttatttcgaatcctggatgctatccaacatctattttgattcccttaatacctttaataaaagaaaaaaaattaagaattcaagatattat

SEQ ID NO: 215681 - DNA, 254 bp, Unknown
  Bacterial polypeptide expressing nucleotide sequence isolated from the Sargasso Sea
caagattatttatgaagacttctatgaaaatcatccttttacttttttatctaaaaatgatatgaacctaaaagaggtaattaatactaataattgccatttgaaaatagaattccacgaaaatataattcatataactactgttttagataatcttcttaaaggggcatcaggtcaagcagtacaaaacttgaatattatttatggttatgaggaaagcttaggtctaaattttaaaggttcaatttattaat

SEQ ID NO: 215682 - DNA, 769 bp, Unknown
  Bacterial polypeptide expressing nucleotide sequence isolated from the Sargasso Sea
tatgtcaaaaaaagtatcagtagccatacttggctcaactggctttgttggtttagaattaatcaaattattatctaaacatccaaaggtagaattggttatttttggtacagaaaacaatccaaataatttatcaactcaattaaatgaaaaatttgattactcttcaattgatacagtttttttagcacttccacatggcgtatcacataagtatgtaaaatctttttacaacaaagttcaaattatagatttatcagcagattttagactagatgatattgaaacttataagaataattatgatgataaacattctgctcctaatcttttaagtgaatttgtctatggtcttccagaaattaatcaaaaaatattaattaataaaaataatattgcagttcctggttgttatccaacttcagtattaatccctctaattcctttgttaaaaaacaaaataattagctcgaaaaatataataatagactcaaaatctggttacagtggagctggtaaaaaatttgatttaaacaatataaaaaattcagaagattttaatttttttaattataatactaataatcatcgacatatttgtgagattagacaagagttaaaaaaaattattacatcttcagaggtcttattttcatttaatcctcatattttaccaaactttagaggaatgatgttcacaatgtattgtgatttattatcaggtatgaccaaaaatgatgtaataagttgttttaaagatatggctaaa

SEQ ID NO: 215683 - DNA, 925 bp, Unknown
  Bacterial polypeptide expressing nucleotide sequence isolated from the Sargasso Sea
aatggcaacaaaagacattaatgttggagtcataggggcgtcaggctatactgggtcagatctaataagaatgctgtcgggccacccgaagattgatttgaaatatgtttcagcaaataatcacgcaggccagagagttggtgaaatatatccctatttaaatggaaaagtcgatttattccttgaaaaatgggaagatataaattggtctgtggtcgatgtgatttttagctgccttccccacgggatttttcatgaaatatttccaatgttaccagctgaaaagataataattgacttatctgctgacttccgactgtcgaatgccaaagattatgcagagtggtataatttcgaacataaatcagtagaaacaataaatcactttgtctatgggctgacagagctaaatcgatcaaatataaaaaaatcagagaaggttgcttgcccaggttgttatccgacagcgacattgctggccttatatccgctgatcgccgatgatttgatagatattaaccatataactattgatgcaaagtctggcattagtggcgcggggaggagcccaaaaagagacctgctatttagtgagatttcagagtctttcagaccatattctgtaactggacatagacacattatagaaattgaacaacaattaatgcttcattcaaaaaaagacattagaattaattttataccacatttagttccaatgaataggggggagcttgtgacatcacatgttagattaagtaaggatatcaaattaaatgaaattattgagatctaccagtctaaatatagaaatgataacttcataaatattatgagcaatggtaatgtgccgaatacgataaatgtgaggggaacaaataattgtgatattgctgtgataccgggtagagttgacaaaactttg

SEQ ID NO: 215684 - DNA, 388 bp, Unknown
  Bacterial polypeptide expressing nucleotide sequence isolated from the Sargasso Sea
atgtataaaatcgctattttaggagcttctggctacactggcgcagagttaatccgaataataactaaccatcctgaaatggaaattgaagttttagctgctcactctaaagcgggcctaagagtggacaacgttttccctcatttgcgatccttggaattacccactttaattaaaattgaagatgtggattattccaatattgatctttgcatttgtgcattaccacataaaacttcgcaagaagttataaaaagaattccaactgatttaagaataattgatttgagcgcagattttcgtctacagaacgctgatgattatgaaagatggtatggtaatgctcatcaagctttggagtccaagatgaggcagtttacggcctaac

SEQ ID NO: 215685 - DNA, 703 bp, Unknown
  Bacterial polypeptide expressing nucleotide sequence isolated from the Sargasso Sea
agattaaatcaaaaaagtcataataagtggtacgaatcaaagagaaacaaaaatacttttaaagattttcattatatattgccagagataaataaggcaaaaattaataagaataagaacatttctaatcctggttgctatgcaacatctattctgctaggtctatctccaattaacaaaattttaaagaaatctgagaatattattgtggatacgaaatctggaatttctggtgcaggaaaaagtggtaaattagagcatagtttcacagaatgtaatgagaatttatctacatacaatgttggaagtcacagacacgcaccagaaattgaacaactcttaaacagagaatttaaaaaaaatgttaacgtaataatggttcctcatttgctacctataaaaagaggaataatgtctaacatatatattttaagaaataccactttcaatgaaaaaaatattattaacgaattcaaaaaatattattcaaaaagtagtttcgtaaaaattctagacaataggctcccagaaataaaagaggtacaaaatacaaattactgttatattggaatcaaagttctaccaaacaataaaagcctgcttatatcatgcgtaattgacaacttattaaaaggtgctgcaagccaagctattcaaaatatgaacttattatttggactagaagaaaacctaggactttaaa

SEQ ID NO: 215686 - DNA, 417 bp, Unknown
  Bacterial polypeptide expressing nucleotide sequence isolated from the Sargasso Sea
tttttgaggtcagtcttcaagcatatggcgtgctaggccatcgccatacgcctgaaattgaagcctatttaggcacgcctgttatcttcacgccgcaccttggtaatttcaaaagaggtattctggcaacggtaaccgtgaaagttaaagctggtaccaccagcgcacaacttgagaaagcgtacactgacgcctatgctgataaacccattgtgcgtttgcgcaagagtttcccaaaaattgatgacgttgctcacactccctttgtcgaccttcactggaagttggatgaagcatctgggtatgcagttgttaccgctgccattgacaacgtaatgaaaggtgcagcttcacaagcgattcagtgccttaacataatgacgaaacaacctatagaaacagggttagtactatgag

SEQ ID NO: 215687 - DNA, 618 bp, Unknown
  Bacterial polypeptide expressing nucleotide sequence isolated from the Sargasso Sea
aattaattaaaaaatttccaatagtatcttgtcctggatgctaccctacatctgtattaattccattaatcccattaattaaaaaaaacttaattaataatcaaacaattattattgactcgaaatctggttattcaggagcaggtagaggtgtacataaaaaatataaagataaaaatttatatgagtctttgagtgcttatggattagcaaaccatagacataattctgaaattcaacaagagcttgatcttaaaactcacaaaaaaaataaatttatttttacacctcatcttacacctatgtttagaggaattttaagcactatttatgttgatttaaaaaagggtgttaacataaacaaaataaataatgttcttaatgtccaatataagaatcaaaaatttataaaaattagtaaattaaatactttcttaagtactaatgacgtgatcaacaccaataattgcttaatttctgtatgcaaaagcaaatataaagataaaataataatattgtctgcaattgataatttgattaaaggtggtggaggtcaagctgtacaaaatatgaataattattatggctttaatcagagcgaaggtctaaatgtttaaa

SEQ ID NO: 215688 - DNA, 522 bp, Unknown
  Bacterial polypeptide expressing nucleotide sequence isolated from the Sargasso Sea
taaatacaaaaggaataattatagattctaagtcgggttattctggagctgggaaaaatcttaaaaaaaaatttacacataaaaatattttttctgcaattaaaacatatggcatttcaaatcatagacatacagctgaaattgaccaagagtttaaaaagagcactaaatcaaaaatattgtataattttactcctaatttaataccaacttttagaggaatgttatccactatatatgttgagccaaaaggaaatgttacaatcagaaaaattcacaatgaacttagaaaatttcataaaaaaaatcattttattaatattttgccaattaataaaaacttaggcacagaaaatgtattaaatacaaacttatgtgaaataagcgtatgcaagttaaagggtagtaaaaaaattatgatattatctgcaatagacaacttaattaaaggagcatcaggacaggccgttcaaaatatgaatttattatacaatcttaatgaaaaaattggtctaaaatgaa

SEQ ID NO: 215689 - DNA, 278 bp, Unknown
  Bacterial polypeptide expressing nucleotide sequence isolated from the Sargasso Sea
tttcaatcgcagaatcaatgaatcggaaatagaggaacgcttcattgctttcgcggaaaataagcctttcatccagatcatgccgaagggtcaatttcccgatcttcgttccacggtccattcaaaccgatgtgcaataggatgggcgtccgattccagtggaagccaatggctggtccaaaccagtatcgacaatcttgtcaaaggcgcatcagggcaggcgatccagaacatgaacctgatgttcggatttacggaaacctccggattgacttgaa

SEQ ID NO: 215690 - DNA, 1006 bp, Unknown
  Bacterial polypeptide expressing nucleotide sequence isolated from the Sargasso Sea
ttttgtggagcaactggatatataggactacagttaacaaaactcctttgtaaacataaacatgtaaatataaaatatttatgtggtagttcatctgttggaaaaaaaataagtttttatgacaaggaattgaaaaagtacaaactaccaaagatatctaaatttaacaaaaaaaatctattagatgtagacattatttttacagccttaccaaatggcgaagcacaacttatatcaaaatttttaaataaaaataatgtcctaattgatcttgctgctgattttagactcaatactaaaaacgaatatgaaaaatggtacaaaattaaacacaatgcttcaaatctaattaaacaaagtatttactctattcctgaaataagtggcacattactaaagaattttaaaattatatcatgccctggctgttatccaactactatattaattccactaattccattaattaaaaaaaaccttattaataataaaacaatcatcatagactcaaaatctggttattcaggtgctggaagaggaatacataaaaaatataaaaataaaaatttatatgagtcacttagcgcatacggtttagcaaatcatagacataattctgaaatccaacaagaacttgatctaaaaactggtaaaaaaaataaatttcattttacaccacatttaacacccatgtttagaggaattttaagtacgatttatgttgatttaaaaaaaaacgtatctttaaataaaattcaaagtgttttaaccaatcattataaaagtcataagtttgtaaatatttctaaaacaaatacgttcttaagtactaatgatgtaattaataccaataattgctttatttcagtatgcaaaagcaaatataaagataagataataatattgtcagcaatagataatttgattaaaggtggtgggggacaagctatacaaaatatgaattattattttaattttaatgaaagcgatggtttaaatgtttaaa

SEQ ID NO: 215691 - DNA, 931 bp, Unknown
  Bacterial polypeptide expressing nucleotide sequence isolated from the Sargasso Sea
aatgagctataagaaaattggtttgattggaggaagaggttatgttggtcaagaaataatttctttactgaataatcataatcaactaaatattgtttcagtttactcatcatctaaagctggacagccagtgaatattgattcattgggcgaaatgacttatcaggatcttgccctagataagatcgatttaggcgacgaggaggcattcattttagctttacctaatatggaatctcagcggtatgttgatttgattacaaattataactctgaagcaattattattgatttgagttccgatcatcgttttgatgaggattgggaatatagaattccagagttatctgatcctgttagctcaaataaaattagcaatccaggatgttatgcatccgcaatgcagtttatgatcgcacctattcttaacattttagttggtccagtaaatctctttggagtttctggatatagcggtgcaggcgcatcccctaaccaaagaaatgatagagaattgctaaatgataatattctcccttattcgcttgttaaccatcttcacgagagggaagtgcaaacacacagttatccaaatattttttttacacctcatgttggtaatttttttaggggtattatgatgactggtaatttttttcttacaaaacaatctgatcctgaagaaataataaatttatttattgatttttatcaaggcatgaaccttatttctattcaagaatcacctccaaatttacagaaagttcaaaatacttcgagtgtaataattggaggctttgaggtggatcaagcaacaaataggctgacattttgctgcgcacttgataacctgcttaagggagcagcaacgcaggctgttcaaaatttaaattctgcatttgggtgggacgataacgcaggaattatttaa

SEQ ID NO: 215692 - DNA, 1021 bp, Unknown
  Bacterial polypeptide expressing nucleotide sequence isolated from the Sargasso Sea
atgcctaagcttaatgcattagttgctggatctactggatatattggtgttcaattaatcaagttattaactaaacataaatatattaatattaaatatttatgtggaaattcatctgttggaaaaaatgtttcttattatgataaatctttatcaaaaaaaaaattaccaaaaattgttaaatttaatcaaaaattgttaaatggtgttgatgttgttttcacagctttaccgaatggcgaagctcaagatatagcaaaacaacttaatcataatattactctaattgatttagcagcagattttagattagaaaaagttaatgattattttaaatggtataaacaaaaacatcgagctccaaatttacagaagaaaagtatttattgtttaccagaaataaatcgtgatgaattaaaaaatcacaatataatttcatgtccaggatgttatccaacatcaatattattacctctggttcctttgtttaaaaaaaaattagttaaattagataatataattattgattcaaaatctggttattctggtgcaggtagaggagttcataaaaaatatagagataagaatttatacgagtctttaagtgcttatggtattggttttcatagacataattctgaaatacaccaatttttaagaaaatttactaataaaaattttcaatttagttttactccacatttatctccaatgtttagaggtatattaagtactatttatttagatttagagaaaaatgttaatcaatcaaaaatcatcaaaacgcttaagaagtcttataagagtgaaaattttgttaaaatattagactctgataaacttttaagcacaaatgatgttattaatacaaacgattgctttattacagtgtgtaaaacaaaatataaaaacaaaataatcattatttcagcaattgataatttaatcaaaggtggagcaggccaggctgttcaaaatttaaataataaatttaattttcctgaaaaaactgctttatgat

SEQ ID NO: 215693 - DNA, 847 bp, Unknown
  Bacterial polypeptide expressing nucleotide sequence isolated from the Sargasso Sea
atgcttaagaaaaatgttcttatttgtggagcaaccggatatataggattacagttaacaaagctcctttgtaaacataaacatataaatataaaatatttatgtggtagttcatcagttggaaaaaaaattgatttttatgataaggatttaaagaagtttaaactaccaaagatatccaagtttaacaaaaaatacctatcagatgtagatattatatttacagcacttccaaatggtgaagctcaatctatatcaaaatatctaaacaaaaataatctccttatagatcttgctgcagattttagactcaatactaaaaatgaatatgaaaaatggtataaaattaaacatagcgcctcaaatctaattaaagatagtatttattctattcctgaaataagtggaaaattaataagaaaatttaaaattatatcttgtcctggatgttatccaactacggtattaattccactaattccattaataaaaagaaacctaattaacaacaaaacaattatcatagactctaaatctggttattcaggagctggaagaggcgtacataaaaaatataaaaataaaaatctatacgagtcacttagtgcttatggattagcaaatcatagacataattctgaaattcaacaagaattagatttaaaaactggaaaaaaaaataaatttcattttaccccacatctaacaccaatgtttagaggaattttaagcactatatatgttgatataaaaaagggtacttccataagaaaaattcaaaatgttttaatcaatcattacaagagtcataagtttgtgaaaatatccaaaacaaatacattttaag

SEQ ID NO: 215694 - DNA, 940 bp, Unknown
  Bacterial polypeptide expressing nucleotide sequence isolated from the Sargasso Sea
aatgacaaaagtattcattgatgggcaatcgggtacgaccggacttcagattttcgatatgcttcgtagccgttccgacctggaaatcatcacgatcccagagactcaaagaaaaataccagaggctagaaaggagctactcaattcgtctgatatcaccattttatgtttgcccgatgatgcggcgatagaggcagccaaatttagagaaagcgaaactcgaataattgatgcgagcaccgcgcaccgtatcgacgaccaatgggtttatgggctaccagagctcagcgtgactcatagacaacaaatccgagatgctgaattagttagcaacccaggttgctacccccaaggttttatattgctagtgaaacccctgatagatgcgggaattcttgagagacaagccgctctttcctgtaacgctgtatcaggatactccggggggggcaggcaaatgatcgaagaatttgagataggcgatattgcaaaaaaacaactattagcagtgaacgactatagcttgactctcaatcacaagcatgtgcctgaaatgcgcaagcattccgggttgacgacaaatcctttatttctccccaccgtcgctaattactataaaggtatgatcgttcgaattccgatacacctcgggacccttgcagaaagtaagggcgataccatcgtagaatgcctaaaagaacgataccgaaagtgccaattcattagggtccatgactataacaacgttgatctgttagagaagggtcgattaaacccaatcggttgcaacgatactaacttcatggacttgatgtgctttggaaacggcagtcagctggtattgctcgctagatacgacaatcttgggaaaggtgcagctggggcagccgttcaaaatctaaatatcatgcttgggatcgaggaggagaaaggattatga

SEQ ID NO: 215695 - DNA, 997 bp, Unknown
  Bacterial polypeptide expressing nucleotide sequence isolated from the Sargasso Sea
aatgcctaagcttaatgtattagtcgctggatcaactggttatattggtatccaattgataaaattgttaaacaaacataaatatgtaaaaataaagtatttatgtggaaacacatcagtaggaaaaaaaatttcttattacgataaaacaattggattaaaaagattacccaaaattgtaaaattcaataaaaaatttttgaatgaaattgatgttgtatttacagcacttcccaatggagaagcgcaagtaatttcaaaatatttgaataaacagaatgttttaattgatcttgctgcagattttaggcttcaaaaagctttagattataaaaaatggtataaaaaagatcataaagcaaaatataatattaagaatagtatttattctttacctgaaattacaggtaaaaaagttcaagattataaaattatttcttgtcctggatgttatccgacttctattctattacctttaatacctttattaaaaagtagattaataaaaaattataatattataattgattcaaaatcaggatattctggtgctggaagaggtgtacacaaaaaatataaaaataaaaatttgtatgaatctttaagtgcttatggtgttgcatcacacagacataattctgaaattgaagaaatgataaaaagatgtgttaaaggaaatattcaatttgattttactcctcatttatcacctatgtttagaggcattttaagcacaatttatgttgagcttaataagacttcttcagcatcaaaaatattaaacacgttgaaaaaatattataaaaaagcaaattttgtaaaaattttagataaagacaaattaataagcacaaatgatgtaattaatacgaataattgcaatatatctgtttgtaaatcaaaaaataagaataagataattatactttctgctattgataatcttattaaagggggagcaggtcaggcgatacaaaatatgaatatgaaattaatt

SEQ ID NO: 215696 - DNA, 877 bp, Unknown
  Bacterial polypeptide expressing nucleotide sequence isolated from the Sargasso Sea
aaatcaattaaatacaatctaccattaattacaaaaattactaaatctagaataaacgaatgtgatataatattttcagcactacctaatggagaagctcaaagtatttcaaaaaatttaaaaaaacataatgttctaattgacctttctggagattttcgtttaaaaagttcaaaagaatacttaaaatggtacaaaaaaaaacatagtgcagtaaataatattaaaaagagtatctataatttaccagaattatcaaatttaaagttaaaaaattaccaaattatatcttgtccaggatgttatcctacatctatattaataccattagttccattaataatgaaaaaaataatcaaaactcaaaatattattattgactcaaaatctggatattctggtgctggccgaggagtacataaaaaatttaaagataaaaatttgtacgagtctttaagtgcttatggaataactttacatcgtcataattctgaaattatgcaagaattaaatttttattcaaaacgtaatatcaaatttacttttacaccacatcttacaccaatgtttcgtggaatactaagcactatatatattgatgtgaataaaaatattaatcaaaataaagtactaaatattcttaaacaatattataaagggaaaaaatttattaaaattgcaaacaaagataccttcttaagtactaatgatgtgataggtacaaataaatgtataatatcagtttgtaaatctaagtataaagataaaataattatattgtctgcgatagataatttaattaaaggtggttctggtcaggcagtacaaaatatgaatttaagattcgggttaaaagaaaatgaaggtattcaatgat

SEQ ID NO: 215697 - DNA, 973 bp, Unknown
  Bacterial polypeptide expressing nucleotide sequence isolated from the Sargasso Sea
ggaactcagttagtaaaactcttatgtaaacacaaaaatattaaaataaaatatctttgtggcaatacatctgttggtaagaatatttcatcctatgataaagatttaaagaaatataagctaccaaagataattaagattaattataaactatttaaagatgtggatgttatatttacatcattacccaatggtgagtctcaaaaaattgctaacaaactattaaaaaaaaatatcatgattgatctatcagctgattttagattaaagaatccaaaaatttataacaaatattatgggattaaacataaatctttagataatcttaagaaaagtgtttatggcttatctgaaattaataagaaaaatttatcaaaagcaaaaattatagcttgtccaggctgttaccctacatctatacttttaccgctatttcctttaatcaaaaaaaatttaattgattttaagaatattattattgattcaaaatcaggtttttctggagctggtcgtggcgttcataaaaaatttaaaaataaaaatctatatggttcaacaagcgcttatggaataggttctcatagacataatgcagaaattcagcaggaattgagttatattaaaaagagcatagaatttactttcactcctcatatcctacctatgtttcgtgggattttatcaactatttatttaaattataaaagcaaagcaaatttgaataagatatacaatgaattaagaagattttatatgaatcataaatttataaaaatattgaagaacaaagctctaaccactaatgatgttattaacacaaataactgtcaaatatcagtttgtaaatctaaagataagaaaaaattaattattcttagcagtatagataatttgataaaaggtggagcaggacaagctattcaaaatttaaatcttatctttaattttagattaaacgagggtttaaaatgag

SEQ ID NO: 215698 - DNA, 937 bp, Unknown
  Bacterial polypeptide expressing nucleotide sequence isolated from the Sargasso Sea
catgagctcacccgttgttttcatcgacggcgaccaaggcaccaccgggttgcaaatccacgaacggctgcgcaaccggaccgatctgaaactgctcacgcttcccgccgcggaacgcaaagatccgcggcgtcgcgcagaggccatcaacgcctgcgacatcgccatcctctgcttgcctgacgccgccgcgcgcgacgcggtggatgccatcgtcaatcctgccgtgagagtcatcgacgcaagttccgcccaccgcacgcagccgggctggacatacggctttccggaaatggcggcgggacaggctgagcgcattgcgaacgcacgccgggtgaccaatcccggttgctatccaaccggcgcaattggcttgctgcgtccactgttgcaggccgggctcattcctgacaactaccccgtcagcattcatgctgtgtccggctactccggacgtgggcgtgccggcgtggaagagcacgaggggcacggtgccgtcaacgcgccttcatacgtggtgtatggcctggaactcgcgcacaagcacaccccggagatccagcagcacgccgggctcgcgcagcgtctcatcttcgtccctgcgtatggttcgttccgccagggcatcgtgctgaccgtgcccctggatttacggctgctcgcccccggcgtggatggcgctacgttacacgcgtgccttgcacgccactatgccgaggcggctcatgtacatgtcttgccgctgcacgaatcgtgcgccttgaagcaactggatccgcaagcgttgaacggtactaacgatatgcgcctaagcgtgtttcctaacatggagcacgggcacgtcctgttatccgcggttttcgataatcttggcaaaggcgcatccggcgcagcggttcagaacctgaacctgatgctcgcgcagcaatctcgatga

SEQ ID NO: 215699 - DNA, 937 bp, Unknown
  Bacterial polypeptide expressing nucleotide sequence isolated from the Sargasso Sea
aaatattgaaaatcttttcttaatagcttcaaaaaacagtgaaggaaaaaagataaattataatggaaaagagcatacagtaactgatcttgaaaaatttgatttttcaaatgttaaaattgctttttttgcagcaggaagctcaattgctgaaaaatgggcacttgctgctgctgaaaaaactattgttatcgataattcaaaatattttagaaaagatcctgatattccgttaattgttccggaagtaaatccaaaaaaacttgctgatgtaaaaaataaaaatattattgctaacgctaattgttcagtaattccggttgttgtagctttgaaaccgttacatgatttgtataatatcaatcgtatagttgcatccacgtatcagtcagtgtcaggcgcaggtaaaagtgctatggatgagctattatcacaaactaaggattattttcaaaataaagaaatagcatcaaaaaattttactaagcagattgcttttaatgcaattcctcacattgatagctttttagaaaacggttacacaaaagaagaacaaaaaactacagatgaaataaaaaaaattttagataaaaaaatcaaagtaacttcaacttgtgtaagaatacctgttcttgtttcacattgtataagtacaaatgtagaatttaataaaaaatgtgatctgaacgaaataaaaaaagttttatctagttctcctggatgtaaagttgtcgatgatcgagaagacggtggttatattacgccaatagaggcagaggataaatttgaaacttttatttcaagaataagattggatgagtctcgtgaaaatacaataaatttgtggatcgtatcagataatttagtaaaaggggcggcattgaacgcagtacaaattgctgaaagtttgattacaaatgatttttatggaaaataa

SEQ ID NO: 215700 - DNA, 592 bp, Unknown
  Bacterial polypeptide expressing nucleotide sequence isolated from the Sargasso Sea
atgatcaaggtcggaatcgtcggcggcacggggtataccggtgtcgagctgttgcgtttgttggcgcaacacccgcaagcgcaggtcgaggtgattacctcgcgctccgaggccggcatacgtgtcgatgagatgtacccgaacctgcgcggtcattacgacaacctggcgttcagcgtgccggacgttgctaccctgggcgcctgcgatgtggtgttcttcgccaccccgcatggtgttgcgcatgccctggccggtgagctgctggccgccggcaccaaggtgatcgacctgtccgccgacttccgcctgcaggacgccgatgaatgggccaagtggtacggtcagccgcacggcgcgccggacctgctgccggaagcggtgtatggcttgccggaagttaaccgtgacgcgatcaagcaggcgcgtctaatcgccgtgccgggctgctaccccactgccgcgcagctggcgctgattccgctgcttgaggccgggctggctgataccacgcaggtgattgctgactgcaaatccggggttagcggtgccgggcgcggtgccagcgtgggttcgctgttcagcgaggccg

SEQ ID NO: 215701 - DNA, 662 bp, Unknown
  Bacterial polypeptide expressing nucleotide sequence isolated from the Sargasso Sea
tatgaaaaacatcgccattatcggtgccagtggttacacaggcgcacaactaacagctttagtccatgcggagtctgaattatcgattcaaggtctgtatgtctctgaaaatagtttagataaaggtagagctttagcagatttgtaccctgtctacagccacattgacttagctctgtcaccactgactgaagctgcgaaggcgaagatcgtcgccgaggcggatgccgtggtgttagcgaccgagcattcggtgagtttgcatttagcggcttggttctacaaccaaggtttagccgtgtttgacttaagcggtgcctatcgtttcagcgatgtggcgcagtaccctaagtggtacggttttgagcatgaatatcccgaagtgttggccaaggcagtctatggtctggccgagtggaatgccaaagaagtcgccgccactaagatgattgctgtgccaggttgttacccaacagcatcattaactgcattgaaaccattaaagaatttactgacctcagcctatccagtgatcaatgcggtcagcggtgtgacaggtgcgggtcgtaaggcgcaactgcataccagtttttgcgaagtgagcctcacaccctacggtgtattaggccacagacatcaacccgaaattgccactcaactgg

SEQ ID NO: 215702 - DNA, 822 bp, Unknown
  Bacterial polypeptide expressing nucleotide sequence isolated from the Sargasso Sea
ttgaaattctttttacttctttacccacaggttattcgcaagttattgcaaaaaaattatttaaatataaaaatttaaaaataattgatttatcagctgattttagattatcgaatccaaaaaaatttaaagaattttatttgacaaatcacaaagctccaaatcttcaaaaatactcaatttactctgtatctgaatttgttaaacaaaaaattaaaaattacaaaataatttcctgccccggttgttatccgacttctgttcaaatcccattaataccattaattaaatcaggtattattgaaaataaagatattataattgattctaaatcaggttactctggcgctggaaaaaatttaaaaaaaaaattttcacataaaaatttatattcatcaatttatgcttatggtgttagcaaacatagacacacaagtgagattgatcaggagttttcaaaaataacaaaaaataaaattaattatgtttttacacctcatttgataccaacatttagagggatgttgtcttctatctatgttaaaccaaaaaaaaataaaacaattagaaatatatataacgaattaacaaaatttcataaaaaaaattattttataaaaatacatcctataaataaaaattttggtactgaaaatgttttaaatactaatttttgtgaaataagtgtttgtaaagtaagaaataaaaatagagtattaattttatcagctatagacaacctagtaaaaggagctgcaggtcaagcaatacaaaatatgaatataatttatgattttaaggaaaatcttggattaaaatgaa

SEQ ID NO: 215703 - DNA, 508 bp, Unknown
  Bacterial polypeptide expressing nucleotide sequence isolated from the Sargasso Sea
attacaattgactcaaaatctggatattcaggtgctggcaaaggtcttaagaacaaatttaagcataaaaatctttttaattctacgtttgcttataatgttaaaaatcatagacatatgattgaaatagaccaggagttttataagattacaaaaaataaagttaattatactttaaacccacatttacttcctacatttaggggcatcttgtcttctatatatgtaaatactaaaggaaaagtaaaagctgaaaaaataagaaatgaattaaaaagattttataaaaaatctaaatttataaaaattttaaaattaaactctgaattaggatccggagatgtcttaaatacaaataattgtgaaatatcagtatgcgaaacaaggataaaaaacaaactaattattttctctgctatagataatttagttaagggtgcatctggtcaagctgtacaaaatatgaatttactttataaattttctgaaacacttggtttgaaatgaa

SEQ ID NO: 215704 - DNA, 583 bp, Unknown
  Bacterial polypeptide expressing nucleotide sequence isolated from the Sargasso Sea
gctgcgcgtcgcagttcttggggcaagcggttacactggtgccgagctgattcgattactttcctgccaccagaaagttgatctgactttgttaacttcagagcgatatgcgggtaaggacattggacaagtatttcctcaacttggaagactgggcctgccaacgctgtgtaaaattgaggaagtaaattgggaaaagactgatatagacgtggttttttgtgcattgcctcacggcacaactcaggatgttgtttctgggctattggttccagaggaaaaatggtctgagaatggttgtcactacttaagatataaaaataacaatttcatttggggggaaggtataaaaattatagatctctccgcggattttaggttagcaaatttcgatgtatatgaaaagtggtatggtcagccgcatcgcgcccaaaggctacagcatgttgctctgtatggattaacagagctgtgtcgtgacaagcttttaattagtaatttgatagcttgcccagggtgttatccaacaacaagtttgctgccagcttataccattaatagatgcgaaaataattacgtcgga

SEQ ID NO: 215705 - DNA, 694 bp, Unknown
  Bacterial polypeptide expressing nucleotide sequence isolated from the Sargasso Sea
gactccacacatcctgagttattatctcagactgtatatggtctttcagaattgcaccgagaaaaaattaaaagtgcccagattgttgctaacccaggctgctaccctaccagtgtcattcttgctctcgcaccattaatgaaaactgattgggtagatttaaccagcattatctctgacagtaaatcgggtgtttcaggcgcagggcgaaaactatctacaacaactcatttttctgaagtaaacgaaggtgtgaccccttattgcttggccggccatcgtcataccccagaaatggaacaggaactagcaggtctagccagaaaacccattaaaataagtttttctcctcacctaattccaatgagtcgaggaatgctaagtacggtttacattaatttaaaaacgaaattaaatgaagacgatctaatcgagcattatcaaaagttttatagcaatgaatactttgttcgaatcctaagcaaaggcaagcttgccagcactcatgctgtttcccattccaatttctgtgacattgggatcaaaatagatacgcgggtgggcaggctgatcattacaagtgccctagataaccttgtaaagggtgcttctggtcaagccattcaaaacatgaacatcatgcaagggtttgaagaaaaattagggcttcaatcacccggaattttcccataaa

SEQ ID NO: 215706 - DNA, 799 bp, Unknown
  Bacterial polypeptide expressing nucleotide sequence isolated from the Sargasso Sea
cctaacggaggagctcaaaaaattattaaaaaaacaattaaatataaaaatttaaagtttatagatttatcagctgattttagattaaatgatacaaacaattatagaaaatggtataaaaaaaaacacttagcaaaaaatttaattagtgactctatttattcaattcctgagttagtgaataaagacattaaaaaatataaaataatatctaaccctggttgttatccaacatcaattcagttagctcttattccattattaaaaaaaagattattcaaacccaaaaatattattattgattcaaaatccggattttcaggtgcaggtaaaaacttcaaaaagaaatttaaattcaaaaatatcgacaattcagtttttgcttatggaattaaaaaacacagacatatgtctgaaatggatcaagaatttaaaaaaaacacaaaatcaaaagtattatatacttttaatcctcatgttataccgacgtttagagggattttatcttgcatatatatagaaaaaaacaggggtcaaagtattaaaaaattacatagtgaattagtaaaattttataaaaataatcaatttataaaaataatgaagttaaataatcctataagtactggcaacgtaatagatacaaataattgtgaaatatcagtatgcgaaactagagacaaaaaaaaatttgttatattttcggctattgacaatctgattaaaggtgcttctggtcaagcaatacagaacatgaatattatttatggatttagagaaacacttggtcttatatgag

SEQ ID NO: 215707 - DNA, 820 bp, Unknown
  Bacterial polypeptide expressing nucleotide sequence isolated from the Sargasso Sea
attaaaaagaatcttccaaaaatttcttcaatcaaaaaaattaaatggaaagaacttgatctagtttttttatctttacctaatggagaagctcaaaaaattattaagaaaatatattatttaaataagaaactaaaatttattgacttgtcggctgattttagaattagaaacatcaaaacatataaaaaatattataaaataaaccatacagcaccaagtttaattcttgattcattatattcaataagtgaattcaacaaaaacaaaattaaaaattataggattatagcaaatccaggatgttatccaacttcagttttgatacctcttattcctttaattaaaaaaaaccttattaaaaataatgatataactattgactcaaaatcaggttattctggagctggtaaaaatttaaataagaaatttaaacataaaaatttatacaaatctacatttgcgtataacgtaagaaatcatagacatgtgtctgagatgaatcaggaaataatgaaacagacaaaaaagaaaattttatacagttttaatccccatttaattccaacttttagaggaattttatcatctatttatattaaaattcctaaaagtgtaaccgctaatgccttgagaacagaacttgttaaatattataaaaattcatcatttattaaaattttaaatttaaataagcaaattggatctgggaacgtattaaacactaataattgtgaaatatctgtatgtaactcaatggtaagagataaagtaatcattttttcggctatagataatcttgttaaaggtgcggcaggtc

SEQ ID NO: 215708 - DNA, 852 bp, Unknown
  Bacterial polypeptide expressing nucleotide sequence isolated from the Sargasso Sea
acttcgccgttctgagtcttcccaacggcctggcatgtcaattggcgccacaactgctggagcgtggtgtgcgggtggtggatctttccgccgacttccgctatcgctccctcgaccagtggcttcaggtgtatgccaaggaggccgggtctctcaatcgaaaggacgccgagctttgcagcaatgctgtctatggcctgcctgaatggaacggccctgcgatcgccgaggcgaacttggtggcggctcctggatgtttccccaccgcgagtctgctgcccttgctcccttttctcaagcaaggtctgattgagacgaacggcatcgtgattgatgccaagaccggcacctccggtggtggacgggtgccaaaggaagcgatgttgctggcggaagcctcggaatccattgcgccctacggcgtcattggtcatcgccacacctcagagatcgaacagatggcgacggaggtggctgggcaggaggtgcgtcttcagttcacgccgcatctcgtgccgatggttcgcggtctgctctcaacggtgtatgcccgactgcgcgatcctggcctcaccgctgaggattgcaccaccgttctggacgccatctacaggcaccatccctgcgtcgaggtgctcccagtgggcacctaccccgccaccaaatgggcgcggcacacgaatcgcgccctgctgtcagttcaggtggacacccgcacgggccagctggtgttgatgagtgcgatcgacaacctgatcaagggccaggctgggcagggcgtgcaatgcctgaacctcatggccggcctcgcgcctgagacgggtctgcctctgcagtcgttctatccctgac

SEQ ID NO: 215709 - DNA, 658 bp, Unknown
  Bacterial polypeptide expressing nucleotide sequence isolated from the Sargasso Sea
ttgtcaggtagtatttacggattaccagaaataccaggacagagagaaaaaataaaaaaagcctcaattgttgctaatcctggatgttacccgacctcggctctcttagctttaatgcctatcgtaaaaaatttaaaaaaacagaaaattatagttaatgctacatcaggtataagtggagctgggagaaatcttgacagtagaaaattattcccagaaggggaagataattatcaagcatatgctgttaggtcgcacagacactatcctgaaattcttcaaacacttagcgatgacaatgatgatttggatgtcttgtttgtcccgcatttaagctctatgacaagagggatatactcaacattatatttgaagcatgatttcgaagaaattgaagaagttgttcagggctataaagatttctatggcaaatcatcatttattgaaattacagatcccgaagcatttccaaagctatctgaagttacaatgaccaataaatgcaagatctctttacataaagttgattcagcacatggagatgtcaatctggttattttatctgcaatggataatttagttaaaggagcttccggtcaggctgtccaaaatatgaatatcatgttcgatatggacgaaaaacactcattagtttgat

SEQ ID NO: 215710 - DNA, 748 bp, Unknown
  Bacterial polypeptide expressing nucleotide sequence isolated from the Sargasso Sea
atcaagataatagatctttctgcagattttagattatctaatattagcgaatataaaaaatattatggaaaaaaacataaggctaaaaatttaattaaaaaatcaatttattcaatttctgaatttgttaaaaaagatataaaaaaatatgaaataatttcatgcccaggatgttatccaacttcaattcaattaccattaatacctttaattaaaaaaagatttattaaaagcaatggtattattattgattcaaaatctggatattcaggtgcaggtaagagtttgaaaaaaaaatttaatcataagaatatttattcttctatacatgcttatggtatttttaagcacaggcataccagtgaaattgaccaagaatttaaaaaggtatctaaaaaaaaaattaattacgtttttgtaccaaatctaataccaacatttagaggaatgctttcatcaatctatattgatttaagctatggcataactgcaaaaaaaatatttttagaattaaaaaaataccataaaaaaaatttttttataagagtattgccttttaataaagatttaggtactgaaaatgtattaaatacaaatttttgtgaaatatcagtttgtaaattaaaagataaaagaaaagtattaatattatctgcaatagacaatttagtaaaaggagctgcaggccaagctatacagaatatgaacatactttatggcctaaaagaaaatttaggattgaaatgag

SEQ ID NO: 215711 - DNA, 706 bp, Unknown
  Bacterial polypeptide expressing nucleotide sequence isolated from the Sargasso Sea
cttcattatatacagaattttataaaaaaaaacatatgggctaaagatttaattcataaatcgatctactctgtatcagaatttgtaaaagataaaattagaaattataaaatcatatcctgtccaggttgttatcctacttctattcagctaccattacttcctttattaaagaaaaacattataaatactaaaaatattataatagattctaaatctggttattcaggtgcaggaaagaattttaaaataaaatttaaacataagaatattttttcctcaatacacgcttacggtatttataaacatagacatacgagtgagattgatcaggaaattaagaaagttactaaatctaaagttaattatatttttgtgcctcatttgatacctactttcagaggaatgttaacatctatttatcttaatttaaaaccaggtataagtgctaaaaaaatttataatgaacttaaacaataccacaaaaaaaattattttgtaaaaatgactccttttaacaaaaatctaggtactgaaaatgtattaaatacaaatttttgtgaaatatcagtatgtaaattaagagttcaaaataaaattgttattttatctgctattgataatttagttaaaggtgcggctggtcaagcaattcaaaatatgaatataatttataaatttaatgaaaatcttggtttaaaatgag

SEQ ID NO: 215712 - DNA, 865 bp, Unknown
  Bacterial polypeptide expressing nucleotide sequence isolated from the Sargasso Sea
gcggcctgttccgattttgctgttctgagcctccccaacggcctggcctgtcagttggcaccccaactgctggagcggggtgtgcgggtggtggacctctccgccgacttccgctaccgctccctggagcagtggctgcaggtgtacgccaaggaggccggctccctcaaccgtcaggacgctgaactctgcagcagtgccgtctacggcctgccggaatggaacggccctgccatcgctgacgcgaagcttgttgctgctccggggtgcttccccaccgccagcctgctgcccctgctgccgttcctcaagcagggcctgatcgagaccagcggcatcatcattgatgccaagacgggcacctccggcggagggcgcgtgccgaaggaggcgatgctgctggcggaggcctcggaatccatcgcgccctacggcgtgatcggccatcgccacacctctgagatcgagcagatggcgatggaggtggctggccaggaggtgcggcttcagttcacgccgcatctggtgccgatggtgcgtggtctgctgtccacggtgtatgcacgcctgcgcgaccccggtctcaccgccgaggattgcaccacggttctggaggcgatctaccgccaccacccctgtgttcaggttctgccggtgggcacctatcccgccaccaagtgggcgcgccacaccaaccgtgccctgctgtcggttcaggtggacacccgcaccggccagctggtgttgatgagtgccatcgacaacctgatcaagggtcaggccgggcagggcgtgcagtgcctcaacctgatggcgggcctcgctccggagacggggctgcccctgcagtcgttctatccctgac

SEQ ID NO: 215713 - DNA, 354 bp, Unknown
  Bacterial polypeptide expressing nucleotide sequence isolated from the Sargasso Sea
cctttgtgccccacctggtgccgatgattcgcggtattgaagcaacactgtacgccgagttgtctgatgccgctgatttcgaccgcctgcaggcgctgtatgaagagcggtaccgcaacgagccgttcgtggatgtcatgccctttggcagccacccggaaacccgcagtgtgcgcggcgccaacagctgccgaatggccctgcaccgccaggaacagagcaacatcgtgatcgtaacctcggtgatcgacaacctggtgaagggtgccgccgggcaagcggtgcagaacatgaatatcatgttcggcctggatgagaccctggggctgcaagcaccggcattgctgccctgag

SEQ ID NO: 215714 - DNA, 673 bp, Unknown
  Bacterial polypeptide expressing nucleotide sequence isolated from the Sargasso Sea
atgatatcagttggaatagtaggagcatcagggtataccggcgaagagctagctaggcttttggctaatcatccaaatgttgaattaaaatctctaacatctaaaactcatgaaggaaaagagataaatactatctttaaactagatgagaaaatccctggtaaatttaaatcccctcaagtcgagaatttaaatgattgtgatgttgtattttttgctacacctaatggagttgcaatgaacatggcagatgctctcattgaacaaggaattaaggtaattgatatatcagccgatttcagactgacgagcgcggaacaatttaccgagtggtatgaaatgaagcactcttctcctgacctacttcatgaaagcgtatacggtttacctgaaatgagaggacagagagaaaaaattcagcatgcacaacttgttgctaatcctggatgttatcctacatcgatacttcttggcgtacttcccataatagaatcccttccagagcaaaccataattgttgatgctaaatcaggaataagtggagcaggtagaaatttaaatagcaaaaagctattcagtcagggagaggaaaatttccaagcttatgcagtaaaaaatcatagacattaccctgagactctaaatatcttacagaactatcaaagtaatttgg

SEQ ID NO: 215715 - DNA, 706 bp, Unknown
  Bacterial polypeptide expressing nucleotide sequence isolated from the Sargasso Sea
aatggagttacataaagacgtgagaaatgtaggaataataggcgcttcagggtttgcaggcgaagaacttattcgttttttagactcacatagctattcttcaatactagccgttagctctagagaactcagaggccaaacaacttctaattttgtaaatggaactaacctaacttttgtagatcctgatgacgatatcttctatgagtgtgatgtcgttttctttgcaacacctcatggcatatctatgcaaaaggcaaaaagtttccttgaaagaggtataaaagttattgatctctctgcagattttagattaaagaatcctgaggtttggaagaaatggtatacctcaaaccatgaagacttaacaggccttaagtcggcagtttatggccttactgaactcaatgctgaccttattaaagatgccaacttgatagctgttcctggttgctatccaacagcctctattctaggtttagcccctattataaaaaataatacaaatattgattcaattattattgacgctaagtcgggcattagcggagcaggtaggagctctgtagaaaataatcttagagatgacatcaaggaaaattttaaagcttatgcaacatctggacatagacatttacctgagattgagcaaattttagaagaaatgtgtggatcttctttgagaataatttcctacctcatttaa

SEQ ID NO: 215716 - DNA, 860 bp, Unknown
  Bacterial polypeptide expressing nucleotide sequence isolated from the Sargasso Sea
ttatacgggtgtggaattgctgcgtcttttgagccagagagacgatataaagctttgctgcgttacctcgcgggagctggatggtcagaccgtttgttcccgttttccaaatcttcgaggaaaggttgatttacgcttcagcaatccagattcgtctgacttaaaaaactgtgaggtagttttctttgctaccccccatgctgtcgccatgcactcagtgccagaattgattgaatatggtacaaaagtgatcgacttgtctgctgatttcagaataaacgacataaagatctgggaaacctggtatcaaacgtcgcatacttgcccagagttggttgacatggcagtttatggtttgccggaggtaaacagggatgatatcaagcaagcacaattgatagcagttccgggctgctatccaactgcgattcaactagggtttttacctcttcttgaaatgaacgttgtcgatacaatgtctctaatcgcggacgcgaagtcaggtgttagtggtgcggggagaaaagcggcggatccgtatatactatgtgaagccacagagtcgctcaaagcatacggaatggcgggtcatcgtcatcatcccgaaatctgtcagcaacttaacatagcaagtaattccaaagttggattgaccttcattccgcatcttgcaccaatgagcagaggcatattcgccactctttatgcaaagccgacaggtgatgaaagtttgtctgggcatgttctaagagagatttatcaaaagcgatatgccgaggagccttttgtagatatcttggaaacgggagaagcgcccgcgacaagggacgtcagaggtgcgaataattgtaaaatctcgg

SEQ ID NO: 215717 - DNA, 741 bp, Unknown
  Bacterial polypeptide expressing nucleotide sequence isolated from the Sargasso Sea
tatgtataacgtatccattattggtgccagtggttacacaggggcgcagcttgtagagttagtacaacagcatcctgaattgacgctgtctggaacctatgtgtcgtcgaacagcgccgatgccaataaacccattggcgagctacacggaaagttagcccacgttgatgcaacacttatccccattagcgacagtattttagagtcgttagcgcatgacgttgactttatattcttagcaacgcctcatgaagcaagccacgactggatgccattgcttacctcaggctcagcaaaagtactcgatctctctggcgcatttagactaaaagacactgaggtattcgaggccttttatggtttttctcacaagcagcaagcaagtttagacaatgcggtttatggactggctgaatggtattcctcgtctattgagcaagccaaaattattgctgtaccgggctgctaccccaccgccagcctaagtgcacttaagccgctgggtgaaaacaatttgttagatagcgctgttcgtcccgtcattaatgcagtgtccggagtctctggggccggtagaaaagcaagccttaccaccagctttttcgaagttagcctgcatgcctatggtgttttaggccatcgccatacgccggaaattgaggcatacctcggcacccccgttatcttcacgcctcatctaggtaattttaaacgcgggatattagctacggtaacggtgaa

SEQ ID NO: 215718 - DNA, 370 bp, Unknown
  Bacterial polypeptide expressing nucleotide sequence isolated from the Sargasso Sea
tttaaaaaatattttgaaaaaggatattagttttacctttaatcctcatttgctacctacatttagaggtatattgtcatctatttatgtaaaacttgaaacaggtaaaaatataaaaatgttaagaaatgagttaaaaaaattttataaaaattctaagtttattaagattgcaaaaattaattctccattaggctctggaaatgttttaaatactaatagatgtgaaatttcagtttgcgagactagagtaaagaataaaatattaattttatcagctatagataatttagtaaaaggggcttcaggtcaagcagttcaaaatatgaatttaatgtttaaatatccagaaacgctaggtctaaaatga

SEQ ID NO: 215719 - DNA, 229 bp, Unknown
  Bacterial polypeptide expressing nucleotide sequence isolated from the Sargasso Sea
cgttctcggagataaccctttcattcagatcatgccaaagggtcagtttcctgatcttcgttccacggtccattcaaaccggtgtgcaataggatgggcgtccgattccagtggaagccaatggttggtccaaaccagcatcgacaatcttgtcaaaggcgcatctgggcaggcggtccagaacatgaacctgatgttcggatttacggaaacctctggattgacctaa

SEQ ID NO: 215720 - DNA, 724 bp, Unknown
  Bacterial polypeptide expressing nucleotide sequence isolated from the Sargasso Sea
atggccggcggtggccagggccagggtcgtgtcgcagtggtcggtgcttccggatacggagggttgcagaccctccgccttctgcaggggcatccgtctctgacggtcaccttcctcggcggagaacggagtgcgggacgacgctggagttcgatctgctcctttctgccgctgccggatgaccctgtcgtgcagtccgctgaccccgatcgcattgccgaggcagccgattacgccgtcctgagcctccccaatggtctggcctgtcagctcgccccagagcttctgcagcggggtgtgcgggtggtggatctctccgcagatttccgatatcgctcactggagcaatggagtcaggtgtattcccaggaggccagccgtctctccagacaggactccgacctttgccgagaggcggtctatggcttgccggagtggcatgggcccgccatcgccgaggccatgctggtggctgcaccggggtgcttcccaacggccagcttgatgccgttgctgcccttcctgaaacagggcctgatcgaaaccgacggcatcatcattgatgccaagacaggcacgtccggcggggggcgcgtccccaaggaggcgatgctgctcgcggaggcatctgaatccattgccccttacggcgtcatcggtcatcgccacacctccgagatcgaacagatggcccaggaggttgccgggcaggatgttcgtttgc

SEQ ID NO: 215721 - DNA, 835 bp, Unknown
  Bacterial polypeptide expressing nucleotide sequence isolated from the Sargasso Sea
ggccgttatgttggcacggaacccgtattttgagttgagttacgcttttgcttccgctggccgcgctgctgaacctttttcgaatttatatccacgttatcaaaacgttgttgatatccaggtgcagccttggacggacgatttagtggaagagttagcaggcaaactggatgtagcctttttagctttacctcatgaagtcagtgaagcggtcacgcctttgttattggccaaaggaatagctgtgtttgatttatccggcgctttccgcttaaaagatccggctttgtatcctaaatattatggctatgagcatcagcatcctgaactcttgggtcaagctgtgtattcattaatggaatggctggataagcctttaccacagcttgtttcagtgccaggttgttacccaacggcttgttcgctggctttattacctttgttaaaagcaggtttagtggccgatggctgcattcctgtgattaatgccaccagtggtgtgtcaggggctggccgtaaagcggcgttaaacacctcattttgtgaagtaggcttaaatgcttatggcttttttaaacacagacacagaccagaaattgagcagaacttaggccgtaaagtggtatttacgccacatttaggcaactttaaacgtggcattcttgccaccagcgtggtgactttaaaatcaggcgtgactgcagagcaagtatcagccgttttccagcaggcttacgcagctaagccattagtacgtttagtcaaacattcgcccaatgtggctgatgtggcaggcacgccattttgtgatatccactgcaacaggatggtgagc

SEQ ID NO: 215722 - DNA, 466 bp, Unknown
  Bacterial polypeptide expressing nucleotide sequence isolated from the Sargasso Sea
tccgcctatccggtgatcaatgcggtcagcggtgtgacgggcgcgggccgtaaggcacagctgcataccagtttttgcgaagtgagcctcacaccatacggcgtattaggccacagacatcaacccgaaattgccactcaattggggcaagaggtgatcttcacgccgcaccttggcaacttcaagcgcggcattttagcaaccatcacggtacagctaaaaccaggcaccaccactgccgatgtggctgcggcatacagtgtttatgaccaagctccgctggtgacggtgaaacagaaccagttcccgaaagtggatgatgtagtgctgactccgaattgccacttaggttggaagtttgatgagaacagtggctacttagtggttgccagtgccatcgacaatttgatgaaaggcgcggcgagccaagccctgcaatgcataaagattcactttaacctttaac

SEQ ID NO: 215723 - DNA, 655 bp, Unknown
  Bacterial polypeptide expressing nucleotide sequence isolated from the Sargasso Sea
tttaaatactcaatttattctttaagtgaatttgtaaaagaaaaaattagaaactttaaaataatcgcctgtcctggatgttatccaacttctatacaactcccattaatccctttattaaaaaaaggacttattaacaaaaatgacattatcatagattcaaaatcaggatattctggtgctggtaagaatttaaaaaaaaaattttctcacaaaaatctctattcctcaattcacgcatatggaatctataagcatagacacacaagcgagatagaccaggaatttttaaaaatatcaaaaagaaaaataaattatatttttacacctcatcttatccctacatttagaggaatgctgtcttctatttacatacaaccgaaaaacagagttacaattactaagataaaaaatgaattaaaaaaatatcacaaaagaaattattttgtgaaggtacttcctgctaataaaaatttgggaacagaaaacgttcttaatacaaatttttgtgaaattagtatttgtaaacttaaagaaaagaatagaatattgattctatctgccattgataatttagttaaaggtgcagctggacaagcgattcagaatatgaatattttatttggatacagagaaagtactggattaaaatgag

SEQ ID NO: 215724 - DNA, 829 bp, Unknown
  Bacterial polypeptide expressing nucleotide sequence isolated from the Sargasso Sea
atatttaagttatgttgatattatatttactgctctgccgaatggggaggctcaattaatttcaaaagatttattaaaaaaaaatactttaattgatttagctgctgattttagactaaataaagcttctgattatctaaaatggtataaacaaaagcataaagcattaagtaatataaaaaaaagtatttatgctttacctgaaataacaggaaaattagttaaaaaatttagcattattgggtgtccaggttgttacccgacatcaatacttttaccacttgttccattagttaaagaaagatcgatcaacttaaagaatatcattatagactccaaatctggatattctggggcgggtagaggagtgcaccaaaaattcaaaaacaaaaatttatacgaatctcttagtgcgtatggtgtaggttttcatagacataattcagaaattgatcaagaactaaaaaataactcttcttcaaaaatcaattttacttttacaccccatattattccaatgtttagaggtatattaagtacaatttatttggacttaaaacctggtactactttaaataaagtacaaaatattttgaaaatatttcataaaaataataaatttgtaaaaataaagagtattaactcttttttgagcacaaatgacgttatgaatacaaattattgctttatttctgtatgtaaaaccaaatttaaagataaaataataattttatcggtcattgataatcttattaaaggaggagcaggtcaagcagttcaaaatatgaatttgaaatttggtttcaaaaatagtgaaggattattatga

SEQ ID NO: 215725 - DNA, 799 bp, Unknown
  Bacterial polypeptide expressing nucleotide sequence isolated from the Sargasso Sea
ttattagatagaggacttaaagttattgatttatcagctgattatagatataagtctttagatgaatggaaaaaagtatattccaaagaagcttctatttataaaaggaatgatgatgacttatgtaaagaggcagtttacggacttcctgaaataaataaagaagaaatttcaaaaggaagattaattgcctgtccaggatgttatccaacatctgctcttattccattagctccttatctctctcaaggaattattgaaaatgaaggcattgttattgactctaaaagcggaacctctggaggtggtcgagaaccaaaccaaaagctactgttatcagaatgtggagaaggtctttcagcatatggattaataaaccatagacatacctcagagatcgagcaagtggcatctttaatttctggaaataaaattgaactgctatttacacctcatttagtaccaatctcaaggggtatgcattccactatatatgggagattaagagatccaggattaacttctgatgactgcagaattcttctggataattactatagaaactttaaaaatattaaagtcttacctgtagatacattcccatccacaaaatgggttaaaaatacaaaccaaattttactttctgttaaagttgataatcgaaatggaagaataattatgttatctgtaattgataatttgttaaaaggtcagactgggcaagctattcaaaatttaaatattatgagtggattttcaatggatgaaggtcttgatttaactaataattttccataaa

SEQ ID NO: 215726 - DNA, 889 bp, Unknown
  Bacterial polypeptide expressing nucleotide sequence isolated from the Sargasso Sea
ggaaccgaaaataatccagacactttgattaaagatattgatccaactatcaaattttatagcaattcttttactcaacttaatgaaaaatttgaccattcttcagtcgatacagtatttatggcacttccacacggcgtatctcacaattatgtaaagtcattttacgataaacttcagatcattgatttatctgctgattttagattagatgatattgaaatatataaaaaaaattataatgataaacactcagcttcaaatttacttaatgaatttcaatatggacttgttgagataaatagagattttctaattaacaaaaagaatatagcagttcctggttgctatccaacctcatgtcttattcctttaatacctttattgaaaaatgaaattattgattctaagaatataataattgattctaaatctggctatagtggggctggtaaaaaatttgatttggaaaatattaaaaatgcaaaagactataatttttataattataatactaatagtcatcgacatatttgtgaaattaagcaagaattaatgaaacatgcaaaattatcagacgttttattttcatttaaccctcatatcctacctaattttagaggcatgttatcaactatgtattgtgatttatcaccaggcatgaataaaaataatgtaatcgattgtttgaatgaaatcgcaattaacaatgaatttataaaatttatacatgatgatcaaagagcagattttttttctattcaaaatacaaacaattgcatattaaaaatttttgatcattacgactcttcaaaaataattattgttagtcttatagataatcttgttaaaggggcagcgggacaagcagtacaatgctttaatgtaa

SEQ ID NO: 215727 - DNA, 910 bp, Unknown
  Bacterial polypeptide expressing nucleotide sequence isolated from the Sargasso Sea
tcatctaatgtgcatgtagctgtgctgggtgctagtgggtataccggtggagaaatgttacgtcttttaaataaccatcctgcttgcaagccagtagctcttacaggtgaacgccatgctggtatggctttaggaaatatttttccaaattttgttaactccggcttgccagatttgatcagattagaacaggttaattgggaagaaattgaggttgtattttgttgtctaccgcatgggaaaacccatgaagttgtcaagtccttacctgataagattaagattattgatctgtcagcagattttcgcttttcaaacgtaacaaaatatgagtctgtttatggtgtgaagcatgcggcgaaaaaactacaagaggaagctgtatatggactaactgaattttttaaaaatgaaattagtcaagccaagttagtcgcttgtcctggatgttacccgactggtgctcagataccgctgatacctctttttgagcaaaacctaattttaccaaataatattgttattgatgcaaaatcaggcgttagtggtgctggtcgtgagcttaaacaggatttattattttcagaaattaatgaaaattttagagcatatggtgttggagttcatcgacacggacctgaaatagaacaggggttatccatagcttatgggcaaaatgtgcaaattaattttactccccacatagtaccaattacccggggtattctgacaacaatttatgttaaccttaaaagtggtcaagatataaatgatattcgacaatgtctaattaaacgatttaataatgaaccctttgttgatgttttagatgaaggtactaatccatcaataaagaatgttcatggaaccaacagatgcttgatcagtttttccaaggcaggcttcagga

SEQ ID NO: 215728 - DNA, 646 bp, Unknown
  Bacterial polypeptide expressing nucleotide sequence isolated from the Sargasso Sea
cttgaatattttcgttcatccctgagtgatgcgcgcctggttgccaatccaggctgttatcccacaggatccctgctcggaatcctcccatttggcgatctgctggaatcattggacagacctccgatcatagatgccaagtccggcgtcagcggagcaggaggaagggttgaggacgatgcgaccaattatgtggaagtgaatgaaaatttcaaagcttacaaggctttcaagcatcagcatcagcctgaaattaaacagtatttggaggatctcagtcctttcgaaagtaaaaacattggtgagccggttttcacgccctacctgctgcccttaagcaggggcatcctttccgggatttatcttcatttcaatcgcagaatcaatgaatcggaaatagaggaacgcttcaatgctttcgcggaagataaccctttcatccagatcatgccgaagggtcagcttcctgatcttcgttccacggtccattcaaaccgatgtgcaataggatgggcatccgattccagtggaagccaatggttggtccaaaccagtatagacaatcttgtcaaaggcgcatcagggcaggcgatccagaacatgaacctgatgttcggatttacggaaacctcaggattgacctaaa

SEQ ID NO: 215729 - DNA, 592 bp, Unknown
  Bacterial polypeptide expressing nucleotide sequence isolated from the Sargasso Sea
ttatccgacagccgtgcagttgggattcctgccgttgctggagcagggcctggtcaatccggcaaggctgatagccgatgccaagtctggcgccagcggtgccggccggcagggcaagattggcatgcttcacggtgagataggcgagagtttcaaggcctacggcgcttccgggcatcggcatttgccggagattcgccagggcctcatggccgctgcagggaaaggcgttggtgttacctttgtgccgcacctgataccgatgattcgcggtattgaagccacgctctatgccgagctcgataaccctcaggattttgaccgccttcaggcgctgtatgaggcgcgttataaaaatgagccgttcgttgatgtcatgccgttcggcagtcatccggagacccgcagtgttcgtggtgccaatcattgccggatggcattacaccgccaggaagacagtaatatcgtgattgtgtcatcggtgatcgacaacctggtaaaaggcgccgccggccaggcggttcagaatatgaatatcatgttcggcctggatgaaaccatggggctgaacgctccggctctgctgccgtga

SEQ ID NO: 215730 - DNA, 952 bp, Unknown
  Bacterial polypeptide expressing nucleotide sequence isolated from the Sargasso Sea
tttagtaaaattttatcttctcatcccaaggtaaaaatcaaatatctttgtgcacaaaaaaaaattggaaaaaagatccaattttttgataaaagaattaaaaaaaatttacctaaaattaccaaattagacaaagtagattggaaaagcattgatgttctatttacttctttgccaacgggtaattcgcaggttcttgccaataaattgattaaatataaaaaactgaagattattgatttgtcagcagattttagattatctaataaaaataaatttaaagaattttatcttaaaaaacataaagcaagtaatctcttaaaattttcaatttactcattaactgaatttgtgaaggaaaaaatcaaaaattataaaataattgcatgtccgggttgctacccaacttctatacaaatcccattaattcctctaataaaaaagggacttattaaaacaaatgatataataatagattcaaaatcaggttattccggtgctggaaaaaatttaaagaaaaagtttccacataaaaatatatatagttcaatacatgcttacggaattttgaaacatagacatactagcgaaatcgaccaagagttttcaaaagtttataaaggtaaaataaattatacttttactccaaatttaattcctacctttagaggaatgttatcttccatttatgttaagcttaatggaaaaactaagattaaaagtatacacaatcacttaaagatttatcataagaataattattttattaaagtattaccaattaataaagcacttggaacggagaatgttttaaatacaaacttttgcgaaattagcgtttgtaaactcaaagaaaaaaatagaatattaattctatctgctatagataatttaattaagggtgcggctggtcaggctgttcaaaatatgaatttaatttatgatttaaaga

SEQ ID NO: 215731 - DNA, 739 bp, Unknown
  Bacterial polypeptide expressing nucleotide sequence isolated from the Sargasso Sea
gatgaatggggaaaaagtatattccaaagaagcttctatctataaaagggatgatgatgatttatgtaaagaggcagtctacggtcttcctgaaataaataaggaagctattgcaaaaggaagattaattgcatgtccaggatgctatccaacatctgctcttattccattagctccttatctttctcaaggaattattgaaaatgaaggtatagttattgattctaaaagcggaacctctggaggtggtcgagaaccaaaccaaaagttactcttatcagaatgtggagaaggtctttcagcatatggattgataaaccatagacatacctcagagatcgagcaagtggcatctttaatttctggaaataaaattgaattgctttttacacctcatttagttccaatctcaaggggtatgcattcgactatctatgggagattaagagatccaggattaacttctgatgattgcagaattcttttggataattattatagaaattttaaaaatattaaagtcttacctgtagatacattcccatcaacaaaatgggttaaaaatacaaaccaaatttacctttctgttaaagttgatattcgaaatggaaaaattattatattatctgtaattgataatttgttaaaaggacagactgggcaagcaatacaaaatttaaatattatgagtggattttcaatggatgaaggtcttgagttaactaataattttccataa

SEQ ID NO: 215732 - DNA, 905 bp, Unknown
  Bacterial polypeptide expressing nucleotide sequence isolated from the Sargasso Sea
gtcaggtagctatgtatctgaaggaagcctagataaacacaaattactgagtgatttatatccagagcacctaggtttgcttgatactcctttacttcctcttacaaagtcagcgttcgacgacattaatgcgaatgcagattacgtatgcctgtgtaccgaccataaagtaagtgtagatttagccccgcaatttttagcgatgggcaaaaaggtgtttgacctatcgggtggttatcgccttgcaagcaatgatgattacgttacttattacggctttgaacataagcaccctgagttattaaatgaatcggcctatggtttagctgaatggaatagcaacgacattgcaaatgcaaatttagtggctgttgccggctgttatcctactgcagcgctgaatgcgttaaagccactacagcaagcaggtttgttaagcgacgacaaaattattattaatgcagtgtcgggggtaactggtgcagggcgtaaagccagtgtaggtactcacttttgtgaagtgtcgctagcgccatatggtttatttaatcatcgccacggaccagaaatagagcaacaccttggtcaccaggttttatttacacctcatttagggaactttgctcgcggtattttagaaaccatttacgtgcaactaaaacctaatgttacaagtgagcaagtggctaaggcctacagcgtgcttgaaaacgagcctttaatccgcttgttaggtagtaagatcccgtcaattaagggagttgcaaagcagccttatgttgatattggttggcagcagcaaggctctcagctcattgttatggcagccattgataatttactaaaaggtgctgcagggcaagctctgcagtgtattaatttatcaatgaatttagaccacacca

SEQ ID NO: 215733 - DNA, 364 bp, Unknown
  Bacterial polypeptide expressing nucleotide sequence isolated from the Sargasso Sea
aaaaatttcaaataagaaaattaattatacttttatccctcacctaattccaacattcagaggtatgctttcaacgatttatttagaaaaaactgaaggttttagtataaagaaaattcatcaagaattaaaaaaatattatagaaaagattattttattaaaatacaaccaattaataaagatgtgggaacagaaaatgtaattaatacaaatttttgtgaaatctctgtttgtgaaattaaatctaaaaataaaataataattttatcagctattgataatttggtcaaaggcgctgctggtcaagcagtgcagaatatgaatttattgtttaatttaaaagaatatgctggattaaaatga

SEQ ID NO: 215734 - DNA, 652 bp, Unknown
  Bacterial polypeptide expressing nucleotide sequence isolated from the Sargasso Sea
gcctaaattaatagatgccaaaaattttaagtatgttttacctgaaataagtaaaaatgttgctaaaggcaatattgccaaccctggatgttatgcaacatcgattcttctaggactatcacccttggctaaagatattaataaaaaaaatattatagttgatacaaagtctggtgtttcgggggcagggaagagcaataaagctgagcatatttttaatgaagcaaatgaaaacttaagcacatatgctgttggaagtcataaacacaaaccagagattgaatatattcttaaaaaaaatttcaaatctgacattaacttacttatggttcctcacctgttgccaattacgaggggaattttatcaaatatatatattcagtttgaaaccaaagtaaacattaattcgatacataaaaaatttacagatttctataaaaatcaaaaatttataaaagttttcaaagatgaattgccagctattaaagatgttcaatttactaacaattgccacattggattaaagacatttaaaaatagtaatgtcctactagtttcagctgtaattgataatcttataaagggagcttcaggccaagctgtgcaaaacatgaatctaatgtattcgttagacgaatcgctaggattttaa

SEQ ID NO: 215735 - DNA, 307 bp, Unknown
  Bacterial polypeptide expressing nucleotide sequence isolated from the Sargasso Sea
agaggcattctatcgactatttatttagatataaataaaaaatcgtctttaaaaaaaattagagatgaattaataagatattacaaaaactcaccttttgtaaaaattcttaaattaaacaatgaaataggatcaggaaatgtgatgaataccaacatttgtgaaatttctatatgtcagacaagagttaaaaacaaaataatcatattttctgcaattgataacttggttaaaggagcctctggtcaggcaatacaaaatatgaacttattatatgattttttagaaacagatggattaaaatgaa

SEQ ID NO: 215736 - DNA, 633 bp, Unknown
  Bacterial polypeptide expressing nucleotide sequence isolated from the Sargasso Sea
taagtgaatttaataaatttaatattcaaaattatagaattatctcaaatccaggatgttaccctacatcgattcaattagcacttaatccattattaaaaaaaaaattaataaatataaaagatattacaattgactcaaaatctggatattcaggtgctggcaaaggtcttaagaacaaatttaagcataaaaatctttttaattctacgtttgcttataatgttaaaaatcatagacatataagtgaaatagaccaggagttttataagattacaaaaaataaagtaaattatactttaaacccacatttacttcctacatttaggggcatcttgtcttctatatatgtaaatactaaaggaaaagtaaaagctgaaaaaataagaaatgaattaaaaagattttataaaaaatctaaatttataaaaattttaaaattaaattctgaattaggatctggagatgtcttaaatacaaataattgtgaaatatcagtatgcgaaactaggataaaaaataaactaattattttctctgctatagataatttagttaagggtgcatctggtcaagctgtacaaaatatgaatttactttataaattttctgaaacacttggtttgaaatgaa

SEQ ID NO: 215737 - DNA, 496 bp, Unknown
  Bacterial polypeptide expressing nucleotide sequence isolated from the Sargasso Sea
gtctccggtgccggacggggggcgtccgttggggctctgctttgtgagacgtcggattctttcaaggcctatgccgcgtccggccatcgccacttgccggaaattcggcaagcattaaccgaggttgcgcagcagagagtaggtctcacctttgtgccgcatctcgtgccgatgattcgaggcattgaggcaacgctttatggaaggctgaatgacctgagtgtcgacctgacggcgctttaccaaaagcgctatgagaaggagccttttgttgacgtgatgcccgacggctctcatccagacacccgcagtgtgcggggttcaaatacggttcgtatcgcctgccatcgaccccaggacggcaatacagcggtgatccttgcagtagaagacaacctcgtaaaaggggcggcagggcaggcgatccagaatatgaatctgatgtttggcctcgcggaaaccgagggcctgcaagcggccgcgctctggccgtgag

SEQ ID NO: 215738 - DNA, 562 bp, Unknown
  Bacterial polypeptide expressing nucleotide sequence isolated from the Sargasso Sea
gctgaacaagttaaaaagactcgaatgatcgctgtgccagggtgttatcccactgcgtcattaaccgcattaaagccactaaaacccctattaacagatatgtttccggtgattaatgctgttagtggtgtaacgggagctggccgtaaagcgcagctgcataccagtttttgtgaagtcagcttaacgccatacggtgtattaggtcacagacatcagccagaaattgcaacgcaattaggccaagaagtgatttttacccctcaccttggcaattttaagcgtggcattttggcgacgattaccgtgcagcttaaagctggtacaacagaagccgatgtcgcaaaagcttacagcgtgtatgacagctcaccgattgtgaccgttaagcacaatcaatttcctaaagtagacgacgtggtattaacaccaaactgtcatttaggttggaaatacgatgccagtactggttaccttgttgtggcgagtgcgattgataacttaatgaaaggtgcagcgagccaaggtttgcaatgtatcaaaatccacttcggcgtttaac

SEQ ID NO: 215739 - DNA, 841 bp, Unknown
  Bacterial polypeptide expressing nucleotide sequence isolated from the Sargasso Sea
gacctttctgaatgtgatgtggttttcctcgcggttccaaacaaggcaagccttgaatatacaccgaaactattggaccagggaatccgcgtcattgacctttccggagtttatcgcatccgtgacatcaaaatttttgaggaaagctacgcactcaagcatagttctccgggacttctgaaggaagccgttttcggactcccagaatattttcgttcatccctgagtgatgcccgcctggttgccaatccaggatgttatcccactggagccctgcttggaatcctcccatttggcgatctgctggaatcattggacaggtctccgatcattgatgccaagtccggcgtcagcggagcaggaggaagggttgaggatgatgcgacgaattatgtggaagtgaatgaaaatttcaaagcttacaaggctttcaagcatcagcatcagcctgaaattaaacagtatttggaggatctcagtactttcgaaagtaaaaacatgggtgagccggttttcacgccctacctgctgcccttaagcagaggcattctttccgggatctatcttcatttcaatcgcagaatcaatgaatcggaaatagaagaacgcttcaatgctttcgcggaagaaaaccctttcatccagatcatgccgaagggtcagcttcccgatcttcgttccacggtccattcaaaccgatgtgcaataggatgggcatccgactccagtggaagccaatggctggtccaaaccagcatcgacaatcttgtcaaaggcgcatcagggcaggcgatccagaacatgaacctgatgttcggatttacggaaacttccggattaa

SEQ ID NO: 215740 - DNA, 732 bp, Unknown
  Bacterial polypeptide expressing nucleotide sequence isolated from the Sargasso Sea
tttcagcggattttagattgaagaatacaaaaatttgggaggaatggtataactcccctcataccgaagaagagcttttatccgaatcagtctatggattaactgaactaaatttaaaaaagataaaatctgcaagactagtcgcagttccaggctgttatcctacttctagccttttaggggttctccctcttttgaattctgagcttaaaatcgattctattattattgatgccaagtctggtattagtggtgcaggtaggacaacagttgagagcggtttattggaggaaatacaggataattttagagcatatggtttggaaggtcataggcatttacctgaaatacaagagatattagaactagtttctggttatcccatcaagataaatttcttacctcatcttatacctgccatgagaggaatttattcaacaatatatttgcagttagaagaattgtttgacctaaatattcaagatttatataagtcctattatgaaggttcaccaaacgtaaaaattatgaaatctggtaatgcaccagacataaaatcaattgcaaaaacgaataattgcaatatctcaattaattcttcgaatataaaaaatcaaattattgttatttcatcaattgataatttagttaagggggctgctggtcaagctgtagagtgttataatttaatgaatggttttagtcaaaacacaggtctagataatggttgag

SEQ ID NO: 215741 - DNA, 741 bp, Unknown
  Bacterial polypeptide expressing nucleotide sequence isolated from the Sargasso Sea
tatgtcaaaacgtaaaacacattttaatagagctaatatagctatacttggagctagtggttatactggtattgaggcaataaggctattagtgaacaacagtaactataatattgtagctttaactgcagatagtaatgctggtatgagtgtatctgaagtttacccacatttgagtagaattaatcttccagatttaaaaaaaatagaagatattaatttttctaaaatagatgcagttatctcttgtttacctcatggtaaaagccaaaaaatactctcttctttgccaaaaaatattaagatttgtgatttgtctgcagattttaggtttggggatgttcagtcatatgaaaaagtttataataaaagccacgaggctaaaggtctacaaaaagaggcagtatatggactaactgaaataaatagagataaaattaaaaaagctagatttgtcgcaaatccaggctgttatcctacctctgctttattaccaattttacctttaatagatagtgatattattaaatatggaactatagttgtagactcgaagtctggagtttctggagcaggaaggactcttaaaaataatttactctatagcgaagtatctgaaggattttctgcctatgggttagttaaccatagacatagtccagaaattcaaagtcaaataacttattttggttcatctgaatataaagttctttttacacctcatcttttaccaattaaaag

SEQ ID NO: 215742 - DNA, 403 bp, Unknown
  Bacterial polypeptide expressing nucleotide sequence isolated from the Sargasso Sea
gcataccagtttttgcgaagtgagcctcacaccatacggcgtattaggccacagacatcaacccgaaattgccactcaattggggcaagaggtgatcttcacgccgcaccttggcaacttcaagcgcggcattttagcaaccatcacggtacagctaaaaccaggcaccaccactgccgatgtggctgcggcatacagtgtttatgaccaagctccgctggtgacggtgaaacagaaccagttcccgaaagtggatgatgtagtgctgactccgaattgccacttaggttggaagtttgatgagaacagtggctacttagtggttgccagtgccatcgacaatttgatgaaaggcgcggcgagccaagccctgcaatgcataaagattcactttaacctttaa

SEQ ID NO: 215743 - DNA, 884 bp, Unknown
  Bacterial polypeptide expressing nucleotide sequence isolated from the Sargasso Sea
aaaagaattaaaaaaatataaattaccaaaaatttcaaaattaaaaaaagaatatttattagatgttgatgtaatatttacagcactaccaaatggtgaggctcaatctatttcaaaatttttaaataaaaataatttattaatagatcttgcggctgattttagacttaacaataaaaaagattatgaaaaatggtataaaattaaacacaaagcattaaatcaaatcaaaaaaagcatttattctatacctgaaattagtggcaaattaattcaaaaatttccaatagtatcttgtcctggatgctaccctacatctgtattaattccattaatcccattaataaaaaaaaacttaattaataatcaaacaattattattgactcgaaatctggttattcaggggcaggcagaggagtgcataaaaaatataaagataaaaatttatatgagtctttaagtgcttatggattagcaaatcataggcacaattctgaaattcaacaagagcttgatcttaaaactggtaaaaaaaataaatttcatttcacacctcatcttacaccgatgtttagaggaattttaagtactatttatgtggatttaaaaaagggtgttaacataaacaaaataattaatgttttaaatgtccaatataagaatcaaaaatttataaaaattagtaaaataaatatttttttaagtactaatgatgtaataaacaccaataattgcttaatttctgtatgtaagagtaaatataaagataaaataataatattgtctgcaattgataatttgattaaaggtggtggaggtcaagctgtacaaaatatgaataattactatggctttaatcagagcgaaggtttaaatgtttaaa

SEQ ID NO: 215744 - DNA, 577 bp, Unknown
  Bacterial polypeptide expressing nucleotide sequence isolated from the Sargasso Sea
tgttatcctacctctagtcttttaggggttcttccacttttgaattctgaacttcagatagagtctatcattgttgatgccaagtctggtattagtggagcaggcaggaaaacagttgaagatggtttatcggaggaaataaaagagaattttagagcgtatggtatcgaaggccataggcatttacctgaaatacgagagatagtagagctggtttctggttactctattgatattaattttttaccacatcttataccagctatgagaggtatttactcaacaatatatttgcaattaagtgatttgcaagatctaaatattcagactttatatgaatcattttatgaagattcaccaaatataagaattatgaaacctggtaaggtgccagacattagatcaattgcaaatacaaataactgcaatatatcagtaaattattcaaatattacaaatcaaattattgttatttcatcaatcgataatttagttaaaggggctgctggacaagcagtagagtgttacaatttaatgaatggttttaatcaaagtacaggtctagataatggttgag

SEQ ID NO: 215745 - DNA, 904 bp, Unknown
  Bacterial polypeptide expressing nucleotide sequence isolated from the Sargasso Sea
agagctaaaaaacactcctgtgtcagacttatttcaaggtactgatttaaattttgtagatccggaagatcagatcttttatcaatgtgatgttattttcttcgcaactccgcatggaactgcaatggataaagcaaattcttttattcagaaaggaataaaagtcattgatttatctgcagattttcgactgaaagatccttcaatctggagagaatggtatggttcgaatcatagagatttagaaaacttaaagaattctgtttacggccttactgaacttaatgctgagttgatagaaaccagcaatcttatagctgtacctggctgttatccaaccgcatctatacttggattgctgcctttagttagcaacaagcttccaatagattcaattatcattgatgcaaagtcaggaattagtggggcaggtaggacaaaagttaacgatagtttaaaagatgacattcaggaaaattttagagcatatgctactggaggacatcgacatctccccgaaataactgaagttcttgaaggaattcatggatcatctttaaaaattaattttttacctcaccttattcccgccatgaggggaatctactcaacaatgtatgttaatttcgagaatactcacaatcaatcaatagaagagatttatagtgatttttaccaagactcactcaatgttgaattaatgttagacggtcaggttcctgaaattctgcaagttgctgagacaaataattgtcagataggtatttataaatcagccattgagaatcaaatagtgatcatttcagctattgataatttagttaaaggagccgcaggtcaagcgatagaatgttataatctaattactggtaattatccattgaaaggtcttaataatggttga

SEQ ID NO: 215746 - DNA, 847 bp, Unknown
  Bacterial polypeptide expressing nucleotide sequence isolated from the Sargasso Sea
aaaatttaaaaaagaatatttatcaaatgtagatataatatttacggcattgccaaatggcgaggcacaatttatttcaaaatttttaaataaaaataatttactaatagatttagcagctgattttagacttaataataaaaaagattatgaaaaatggtataaaattaaacacaaagcattaaatcaaatcaaaaaaagtatttactcaatacccgaaattagtggtaaattaattaaaaaatttccaatagtatcttgtcctggatgttacccaacatctgtattaattccattaatcccattaataaaaaaaaacttaattaataatcaaacaattattattgactcgaaatctggttattcaggagcgggtagaggagttcataaaaaatataaagataaaaatttatatgagtctttgagtgcttatggattagcaaatcatagacataattcagaaattcaacaagaacttgatctcaaaactggcaaaaaaaataaatttcattttacacctcatcttacaccaatgtttagaggaattttaagcactatttatgttgatttaaaaaagggtataaacttaaacaaaattattaaggttctaaatattcaatataagagtcaaaaatttataaaaataagtaaaataaatactttcttaagcactaacgatgtaatcaatactaataattgcttaatttctgtatgtgagagcaaatataaggataaaataataatattgtctgtaattgataatttgattaaaggtggtggaggacaagctgtacaaaatatgaataattattatggctttaatcagagtgaaggtttaaatgtttaa

SEQ ID NO: 215747 - DNA, 951 bp, Unknown
  Bacterial polypeptide expressing nucleotide sequence isolated from the Sargasso Sea
gttggtctagaattaataaaaattttaacgaagcatccgaaagtcaaaatattatatctttgtgctaataaatcttctggaaaatcgatctataattttgataaaaagatattaaaaaaaaatttacctagaatcacaaaaataaaagatgttgattggtataaagtagatataatttttacagctttacctaacggagaagcgcaaaaaatagcaaatcttattcccccacatgtaaaattaattgatttatcggcagattttagattaaaagatttcaatatctataaagaatggtatggaaaggaacacaagagcaagaaattaataaataaatccatatatgcaattacagaatttacaagaaaaaaattaaatcaatatcaaatcatctcttgtcctggttgctatcccacttctgtacaattgccattgataccactaatgaaaaataaaatggttaatctagaaaatatagttattgattcaaagtctggatattctggtgcaggaaaaaatataaaagataaatttaaatttaataatttatttaattctgtctcagcctacggagtaggccatcataggcatatgcctgaaattgagcaggaattatctaaggcttccaataagaaaattaaggtaatttttacacctcatcttatacctatgtttagaggaatattgtctactatatatttagaaacaaaaggaaattttaatgcaaaaaaaatatttaaatatttaaaaaactaccacaaaaaaaacttttttgttaaacttgcaaaatttaattccccaataggaactggagatgtcatgaatacaaatttttgtaaaatttcagtttgtaagaatagagaaaaaaataaggtgataataatttctgcaattgataatcttatcaagggagcctcaggccaagctgttcagaatatgaatattgccttt

SEQ ID NO: 215748 - DNA, 772 bp, Unknown
  Bacterial polypeptide expressing nucleotide sequence isolated from the Sargasso Sea
tgatgcctcacgtgaatcggtctctatgattgataatccacttgtcaaagtcattgacgcaagtactgcacatcgagttgctgaggattgggtttatggcatgcctgagtacgacagagatcaaagaggccggatagcggatgcgaagcgagttagtaatccgggatgttacgcaatcgcatcaattggtcttcttcacccacttacaagtattggtcttctgccttcggattttcccattactatcaatgcaatatctggttactctggaggaggtaagtcaatgattgctgaattcgaaaatccggaagaagagagttataccgaagtgccgtttcgcgtctacggaatgaaactggagcataagcatgttccagaaattgagaaatggagtggattaagtgggcgtcccttattcgtgcccagcgttggtcgttaccacaggggaatgattgtgcaagtgcctctgcaattgtgggcacttcctaagaagccaacagcggcggaagtgcaagaagctttggagaagcactataacggttgtcgctttgtgactgtggaatctgttgacgatgtcgagaaggttgggtttttaacgccagaaaaaattaatgatacaaatgagttacggctttatgtctttggcaatgaacagagagaacaagcggttttggtagggctgctagacaaccttggtaaaggtgcttcaggtcaggcagtgcagaatatgaatattatgttagggctgccagaagaggctggtttgcaatag

SEQ ID NO: 215749 - DNA, 643 bp, Unknown
  Bacterial polypeptide expressing nucleotide sequence isolated from the Sargasso Sea
tctatattcaattagtgaatttaataaaattaaaataaaaaattatagaatcatatcaaatccaggttgttatcccacatcaatccagcttgtattaattcctttaataatgaaaaatttgataaaaacaaaagatattataattgactctaaatctggtttttcaggtgcaggaaaaaatctagagaaaaaatttaaacataaaaatttatataattcaacatatgcttacggaattgaaagtcacaggcatatttgtgaaattgatcaggagctttacaaacacacaaaaaaaaaaataagattttcttttaatccttatcttttacctacattcagaggaatactaacttcaatttatcttaaaatagatgataaaaattcacctaatataattagaaatgcactagttaatttttacaaagggtcaagatttataaaaattttgaaattaaattctcaaataggttcaggtaacgtaattaatactaataattgtgaaatttcagtttgtaaaacaagagaaaaaaatagaattattattttttcagctatagataatctaatcaagggcgctgcaggtcaagcagtgcaaaatatgaatttactatatggcttcaaagaaactcttggtcttaaatga

SEQ ID NO: 215750 - DNA, 871 bp, Unknown
  Bacterial polypeptide expressing nucleotide sequence isolated from the Sargasso Sea
ttcaggtactgatttaaatttttgtagatccggaagatcagatcttttttcatgtgatgtcgttttttttgcaacgccgcatggaactgcaatggataaagcaaattcttttattcagaaaggaattaaagtcattgatctatctgcagattttcgattgaaagatccttcaatatggagagaatggtatggttcgaatcacagagatttagaaaatttaaagaattctatttacggtctgactgaacttaatgctgagttgatagaaaccagcaatcttatagctgtgcctggctgttatccaactgcatctattcttggattgctacctttagtcaaaaacaagctttctatagattcaattatcattgatgcaaagtcaggaattagcggggcaggtaggactacagttaatgaaagcctaaaagatgatattcaagaaaattttagagcatatgctactggaggacatcgacatctccccgaaataattgaagtccttgaaggaatttatgggtcatctttaaaaattaattttttacctcaccttattcccgccatgaggggaatttactcaactatatatgttaatttcgaggatactaaccatcaatcaatagaagagatttatagagatttttaccaagactcactcaatattgaattaatgatagatggtcaagttcctgaaattctgaaagttgctgagacgaataattgtcagataggtatttatcaatcagccattgagaatcaaattgtgattatttcagccattgataatttagttaaaggagccgcaggccaagcgatagaatgctacaatctaatgactggtaattatcaattgaaaggtataaataatggttga

SEQ ID NO: 215751 - DNA, 232 bp, Unknown
  Bacterial polypeptide expressing nucleotide sequence isolated from the Sargasso Sea
aatttctatattgatgaaccttttattaaaatttattcaggtaataaaattcctaaggtaaaagaagttcaaaatacaaataatcttgcattaaatttgttttctgattattcaaaaagaaaaatagtaattgttagctgtattgataatctagttaaaggggctgcaggacaagcaatacaaaacatgaatattatgtttgattttgaggaaacggagtctttaatttagt

SEQ ID NO: 215752 - DNA, 859 bp, Unknown
  Bacterial polypeptide expressing nucleotide sequence isolated from the Sargasso Sea
ttcaaatgatgcaaacatagttaactgcgatgtcgtttttcttgctgtcccaaaccaagcaagccttgaacttgttccaaagttactagaccagggaattcgcgtaatcgatttatcaggtgcttacagactggatgatataaagattttcgagaaattttataaactaaagcatatttacccggaattacttaaagaagcagtttttggactgcctgaatttttcagggagaagattgaatcagcaagacttgttgcaaacccagggtgttattcgacatgtgcactgcttggaattttaccacttgctgaaatgcttggtaagttagaccaatcccctgtgattgatgcaaaatcaggcgtgagtggtgccggaggaagggttgaagatgattccactaattatattagtgtgaatgaaaattttaaggcatacaaagttttatcgcatcagcatcagcccgaaattcagcaatacctaaatacgcttagctcatacaattctaaaaaaaacggtgaggttatctttactcctcacctgcttccagttaaccgtggaatattgtccactatttatattcatttccaagaagcagtggatgaagacctggttgtaaagaaattttcagaatttacagataagcaaaaatttgttggatttttgggtatggcccatttccctgatataaaaatgacagcccatactaaccgctgcatgataggtatagaatctgatcagagcggacaaaactgggttattgtttccagcctggataatttgattaaaggtgcggcgggacaggcaattcaaaatatgaatataatgtttggacttgaggagggtctgggcttagaataa

SEQ ID NO: 215753 - DNA, 844 bp, Unknown
  Bacterial polypeptide expressing nucleotide sequence isolated from the Sargasso Sea
aaaagttggaattataaatgtaaccggctattctgggatggaacttgccaggatactttctgggcatcctgaagttaaaattgtatctgtaacaggtaggagtgcagttggtaaaaaagttaatgaaattctgcctcatttacacgatattgaccttacaatagaacctgaaatatccggatcattggattttgttttttcagctcttccgaatgtttttagtgcagaagctttgaaaagtgttatttctagtggaattaaatgcatagatatagctgcagattttagactgaatgatttgaaagtttatgaaaaatggtataactcaaaacatccttgccctgaatttttaaaagatagtgtatacggccttcctgaactttaccgttcagatatatcgaaaagtaatttggttgctaacccaggttgttatcctactgcatcaatattaggcttagctcctgctttagaatctaaaattatttcaagcgatattttaatagacgctaaatctggagtctcaggggctggtaggggattgtctttaaaaactcattttgatgaggttgatgaaagcgttagtgcatatggattagacgggcatagacatatgccagaaataaaacaagaattatctcttatatcaaataaaaacgtttctgtaactttcgtgccacatttaattccgatgaatagaggtattttagcaaccatttatgctcctttatcagaatcctttaaagaaaaaaatactaacttgtccagttctgtacaaactatctacaaaaattattatcaaaaagaaccttttgttaatgtacaggattcgccacctgccactaaa

SEQ ID NO: 215754 - DNA, 743 bp, Unknown
  Bacterial polypeptide expressing nucleotide sequence isolated from the Sargasso Sea
agttatagatctttcagcagattttagattgaagaatacaaaaatatgggaggattggtatgactcacctcatacccaagaagaactcttattcgaatcagtatatggattaactgaattaaatttaagagagataaaatctgcaagactggtcgcagttcccggttgttatcctacgtgtagccttctaggggttcttcctcttttaaattctaaacttgaagtcgattcaattattattgatgccaagtctggtattagtggtgcaggcaggaaaacagttgaaaatggattatcagaggatatacaagaaaattttagagcatatggtttggacggtcataggcacttacctgaaatacaagaaatattagaactagttgcaggttaccctattaagttaaattttttacctcatcttatacctgccatgagaggaatttactcaacaatatacatacagttaagagaattgctggatttaaatattcaggatttatatgagtcatattatgaagattctccaaatgtaaaaatcatgaaatctggtaaagtgccagatatcaagtcaattgcaaaaacaaataattgcaatatttcaattaattattcgaatataaaaaatcaaattattgtaatttcatctattgataatttacttaaaggagctgctggacaagctgtggagtgttacaatttaatgaatggttttaatcaaagcacaggtctagataatggttgat

SEQ ID NO: 215755 - DNA, 737 bp, Unknown
  Bacterial polypeptide expressing nucleotide sequence isolated from the Sargasso Sea
tgattggaaaaaagtatataccaaggaagctgctatttataaaagaaatgatgatgatttatgtaaagaagcagtctacggtcttcctgaaataaataaagaagccatttcaaatggaagactaattgcatgtccaggatgttatccaacatctgctcttattccattagttccttatctttcgcaaggaattattgaaaatgagggtatagttattgattctaaaagcggaacctctggaggtggtagagaaccaaaccaaaaactactcttatcagaatgtggagagggtctttcagcatatggattgataaaccatagacatacctctgagatcgagcaagtagcatctttaatttctggaaataaaattgaactgctttttactcctcacttagtcccaatttcaaggggtatgcattcgacaatatatgggagattaagagatccaggattaacttctgatgattgcagaattcttttggataattattatagaaattttaaaaatattaaagtattacctgtagatacatacccttcaacaaaatgggttaaaaatacaaaccaaatttttctttctgttaaagttgataatcgaaatggaagaataattatattatctgtaattgataatttgttaaaaggtcagactgggcaagcaatccaaaatttaaatattatgaatggattttcaatggatgaaggtcttgatttaactaataattttccataat

SEQ ID NO: 215756 - DNA, 1009 bp, Unknown
  Bacterial polypeptide expressing nucleotide sequence isolated from the Sargasso Sea
atgggcaagaaaaatgttcttatatgtggagctactggatatataggattacaactaactaaactcctatgtacacataaaaaaattagtattaaatatttgtgtggaagtacttctgtaggaaaaaaaatagatttttttgaacaagaattaaaaaaatataaattaccaaaaatatcaaaatttaaaaaaaaatatttatcaaatgtagatataatatttacagcattgccaaatggtgaagcacaatctatttcaaaatttttaaataaaaataatttattaatagatctagcggctgattttagacttaataataaaaaagattatgaaaaatgctataaaattaaacacaaagcattaaatgaaatcaaaaaaagtatttattctatacctgaaattagtggtaaattaattaaaaaatttccaatagtatcttgtcctggatgctaccctacatctgtattaattccattaatcccgttaataaaaaaaaacttaattaataataaaacaattattattgactcgaaatctggttattcaggagcaggtagaggagtacataaaaaatataaagataaaaatttatatgagtctttgagtgcttatggattagcaaatcatagacataattctgaaattcaacaagagcttgatcttaaaactagaaaaaaaaataaatttcattttacaccccatcttacacccatgtttagaggaattttaagcactatttatgttgatttaagaaagggcattaacataaacaaagtgattaatgttctaaatgtccaatataagaatcataaatttataaaaatctgtaaaataaatactttcttaagcactaatgatgttatcaataccaataattgctttatttctgtatgtaaaagcaaatatagagataaaataataatattgtctgcaattgataatttgattaaaggtggtggaggtcaagctgtacaaaatatgaataattattatggctttaatcagaatg

SEQ ID NO: 215757 - DNA, 943 bp, Unknown
  Bacterial polypeptide expressing nucleotide sequence isolated from the Sargasso Sea
atgcatacccctgttgttttcatcgacggcgaccaaggcaccacaggcctgcagatccatgcccgcctaaagggccgtaccgatcttcgcctgctgaccctccccgaggccgagcgcaaggacccgcaacgccgctgcgaagcgatcaacagcgccgacatcgccctgctgtgcctgcccgacgacgccgcccgcgaggccgtggccgcaatccacaacccgcaagtgcgagtgatcgacgccagctctgcgcaccgcaccacacctggctgggtgtacggcctgccggagctggacgaacagcaagccgagcgtatcgcgcaaagcaagcgagtcagcaaccccgggtgctatcccaccggggccatcacgctgctgcacccgctggtcaaggccggttttctgcctgcggactacccgctgagcatccacgccgtctctggctactccggtggcggtcgcgcggcggttgagcggcatgaacagcccggcgccgccaaagcccctgccctacagttgtatggcctggagctggcgcacaagcacgtaccggagatccagcagcatgcggggttgtcggcgcggccgatgttcatgcccggctatggcgcctaccggcaaggcatcgtactgagcattcccctgcaacttcgcctgctgcctggacacatcagcgccgagcaactgcaagcctgcctggagcagcattaccagggtgcccgccatgtccaggtgatgcccctgcatcagtgcggcgctgcggcaaacctcgatcccgaggcattgaatgacagcaatgacctgcgcctggcgctgtacgccaaccccgagcatggccaggtgctgctcaccgcagtgttcgacaacctgggcaaaggtgcctctggtgctgccgtgcaaaacctcgacctgatgctcggtgccttacaggcacacggctgat

SEQ ID NO: 215758 - DNA, 1009 bp, Unknown
  Bacterial polypeptide expressing nucleotide sequence isolated from the Sargasso Sea
atgactaaagttggaattataggaggatcaggttttgctggtgaggagctaataaaactcttatctctccatgattcaacttctttaatagctattagctcaagagagctaaaaaatactcctgtgtcagacttatttcaaggttctgatttaaattttgtagatcccgaagatcagatcttttttcaatgtgatgtcgttttctttgcaactcctcacggaactgcaatggataaagcaaattcttttatccagaaaggaataaaagtcattgacctatctgcagattttcgactgaaagatccttcaacctggaaagaatggtacggttcgaatcatagagatttagaaaacttaaagaattctatttacggtcttactgagcttaatgctgagttgatagaaaccagcaatcttgtagctgtacctggctgttatccaactgcatctattcttggattgctacctttagttagcaacaagcttccaatagattcaattatcattgatgcaaagtcaggaattagtggggcaggtaggactacagttaacgaaagtctaaaagatgacattcaggaaaattttagagcatatgctactggaggacatcgacatctccccgaaataattgaagtcctagaaggaattcatgaatcacctttaaaaattaattttttacctcaccttattcccgccatgaggggaatctactcaacaatatatgttaatttcgaggatactcagaatcaatcaatagaagagatttatagtgatttttaccaagactcacttaatatcgaattaatgttagatggtcaggttcctgaaattctgaaagttgctgagacaaataattgtcagataggtatttatcagtcagccattgagaatcaaattgtgatcatctcagctatagataatttagttaaaggagccgcaggtcaagcgatagaatgctacaatctaataactggtaattatcaattgaaaggtataaataatggttgaa

SEQ ID NO: 215759 - DNA, 1024 bp, Unknown
  Bacterial polypeptide expressing nucleotide sequence isolated from the Sargasso Sea
tatgaaagtaggtataataaatatcactggttatgcagggtcagagcttgctagaatcatagctcagcacccagaagtagagcttgtatctgctacaggcaggagtgctgccgggcaaaatattggtgaagttttcccccatttagcatctttggatctgactttaaccgaagaactagatgacaacgttgacatagtattttcagcacttccacacaaagcaagtgctgaagccttactcccattcatagaagctggtcttaaagttatagacattagtgcagactttagattaaaagatcctcaagtttatgagaaatggtaccaaaccgttcatcccaaacccgaattattggaaaatgctgtttacggattacctgaactatatagagaagaaatcactgaatcgcatataatcgcaaacccgggatgctatccaaccagtgcgatattgggcttagcccctgctataaaaaacaacctgattaaaaagaacgtcataatagatagtaaatccggtgtctctggagctggcagaggtctcaatttaacgacgcattactcagaaatcaatgagaacgttcacgcatattcagtgaatggacacagacaccttccagaaattagccaggaattatgttcaattaatgatgatgagtttgacgtaacatttattccgcaccttatccctatgacccgaggtattctgtccacttgctatgcagagttcgatgaacatatatctgaagcagaaatggacagcgtaattgactcatataaagatttttatagcgaacaagactttgttgatgtcacagacagtgctccgcaaaccaaacaaacattaggcaataatagatgcttagtctacccagtagtccacaaagaaacacgaaaacttatcgttatatcatgtatagataacttagttaaaggtgctgcaggcgcagctgtgcagaatatgaatttaatgagtggcttccctgaaacgatggcgttagaagggctagcagtgtatccataa

SEQ ID NO: 215760 - DNA, 1009 bp, Unknown
  Bacterial polypeptide expressing nucleotide sequence isolated from the Sargasso Sea
actgcgcagcgctgtcttaggtgctgccggctatagcggcgccgaactggccgttatgttggcacggaacccgtattttgagttgagttacgcttttgcttccgctggccgcgctgctgaacctttttcgaatttatatccacgttatcaaaacgttgttgatatccaggtgcagccttggacggacgatttagtggaagagttagcaggcaaactggatgtagcctttttagctttacctcatgaagtcagtgaagcggtcacgcctttgttattggccaaaggaatagctgtgtttgatttatccggcgctttccgcttaaaagatccggctttgtatcctaaatattatggctatgagcatcagcatcctgaactcttgggtcaagctgtgtattcattaatggaatggctggataagcctttaccacagcttgtttcagtgccaggttgttacccaacggcttgttcgctggctttattacctttgttaaaagcaggtttagtggccgatggctgcattcctgtgattaatgccaccagtggtgtgtcaggggctggccgtaaagcggcgttaaacacctcattttgtgaagtaggcttaaatgcttatggcttttttaaacacagacacagaccagaaattgagcagaacttaggccgtaaagtggtatttacgccacatttaggcaactttaaacgtggcattcttgccaccagcgtggtgactttaaaatcaggcgtgactgcagagcaagtatctgccgctttccagcaagcttatgcaactaagccattggtgcgtttagtcaaacattcgcccaatgtggctgatgtggcaggcacaccattttgtgatatccactggcaacaggatgctgagcagctggtgattgtgtccgctattgataacttactcaaaggggctgcggctcaggcgatgcaggccgccaatatcaaatttggtgctcctgaaactgcaggtttatttgcaggagcagcagaatga

SEQ ID NO: 215761 - DNA, 712 bp, Unknown
  Bacterial polypeptide expressing nucleotide sequence isolated from the Sargasso Sea
aaagaatgtagatgtatggaaggaatggtatggctctccccatcttcaagaagaacttctgctcgaatcagtttatggattaacagaactgaatcaagacaagataaaatcagcaagactaatagctgttcctggatgctaccctactgctagccttttgggagttcttccatttctaaacgaaggagttcaaatagaatctatcataattgatgctaaatcaggaataagtggcgccggtagaaaaacagtagagaatggtttatctgtcgagataaatgagaattttaaagcttatgggatacagggtcataggcatttacctgaaataactgagatagtagagcttgtttcaggctatccaataagtataaattttttacctcatcttatacctgccatgagaggtatttattcaacaatctatgtgcagttaaaagatttagaaaacttagatatccagaatttgtacgattctttttatgtggattcaccaaatgtaagaattatgaacacagaagaagtgccagacataaaatctatagcgaatacaaacaattgtaatatctctgttaataaatcaaatattgagaaccaagttattgttatttcatccattgataatttagtaaagggggctgctggtcaggctgtagaatgctacaatttaatgtatggttttaatcaaagtacaggtctagataatggttga

SEQ ID NO: 215762 - DNA, 1045 bp, Unknown
  Bacterial polypeptide expressing nucleotide sequence isolated from the Sargasso Sea
gttgatcaaagtcggaatagtcggtggaactggttatacaggtgtcgaattgctgcgccttctgagccagagagacgatatagagctttgctgcgttacctcgcgggagctggatggacagaccgtttgttcccgttttccaaatctgcgaggaaaggttgatttatgcttcagcaatccagattcgtctgacttaaaaaattgtgagatagttttctttgctaccccccatgcggtcgccatgcactcagtaccggaattgattgactgcggtataaaagtgattgacttgtctgctgatttcagaatgaacaacatagagatttgggaaacctggtaccaaacaccgcatacctgtccagagttggttgaaatggcagtttatggtttgccggaggtaaacagagatgagattaagcaagcacaattgatagcggttccgggctgttatcccactgcaatccaacttgggtttttacctcttcttgaaatgaacgttgttgatacaatgtctctaatcgcagacgcgaagtcaggcgtgagtggtgcgggcagaaaagccgcggatccgtatatactttgtgaagccacagagtcgcttaaagcatacggaatggcaggtcatcgacatcatcccgaaatctgtcagcaacttaaaatagcaagtaattccgaagttggattgacctttattccgcatcttgcaccaatgagcagaggcatattcgccactctttacgcaaaaccgacaagtgatgaaaatttgtctgggcatgttctacgagagatttatcaaaagcgatatgccggggagccttttgtagatatcttggaaaaggcagaagcgcccgcgacaagggacgttagaggtgcgaacaattgtaaaatctcggttacgcacatcgaacattccaatacagtcgtagttctgtctgtgattgataatttggtaaagggtgcttctggtcaagctattcagtgcatgaatttattgctcggcattgacgaaactcggggattagagggaatagcgttgactccgtaa

SEQ ID NO: 215763 - DNA, 1009 bp, Unknown
  Bacterial polypeptide expressing nucleotide sequence isolated from the Sargasso Sea
atgaccaaagttggaattataggaggatcgggttttgctggtgaagagctaataaaactcttatctctgcatgactcaagctctatagtagctattagctcaagagagcttaaaaacactcctgtgtcagacttatttcaaggtactgatttaaattttgtagatccggaagatcagatattttttcaatgtgatgtcgttttctttgctactcctcatggaactgcaatgaataaagcagactcttttattcagaaaggaataaaagtcattgatctatctgcagattttcgactaaaagatccgtcaatctggaaagaatggtatggctcaaaccataaagatttagaaaacttaaagaattctatttacggtttaactgaaattaatgctgagttgatcgaaacaggcactcttatagccgtacctggttgttatcctactgcatctattcttgggttgcttcctttagttagcaaaaagcttccgatagattcaattatcattgatgcaaagtcaggaattagtggtgcaggcaggactaaagttaacgaaagtttaaaagatgacattcaggaaaattttaaagcatatgctactggtggacatcgacatctccctgaaataatcgaagtccttgaaggaattcatggatcatctttaaagattaattttttgcctcacctaattcccgccatgagaggaatttactcaactatgtatgttaatttcgaggatactcagtatcaatctatagaagatatttatagagatttttatcaagactcacttaacattgaattaacgttagatggtcaggttcctgaaattctgaaagttgctgaaacaaataattgtcagataggtgtttatcaatcagccattgaaaatcaagttgtgatcatttcggccattgataatttagttaaaggagccgcaggtcaggcgatagaatgctacaatcttatgactggtaattatcaattggaaggtatacataatggttgaa

SEQ ID NO: 215764 - DNA, 625 bp, Unknown
  Bacterial polypeptide expressing nucleotide sequence isolated from the Sargasso Sea
attttccgtaacgagcttaaagacgcgaaagccgtggctgtgccaggttgttacccgacctcagcaattcttgctctaaagccctttgtcgacgctggtcaaatcctcacccacggcggaattgtcgtcgatgcggcgtccggagttagtggagctggccgggcaccgaaacctaatacgaccttcgctactgttgatgagaacttcagcgcttacggtttgctgacgcatcgacacacccctgagatagaacaagaaacaggctgtcaggtgctctttacgcctcacttagcgcccatggtcagaggtattttgtcgacgtgttatgcgcgtccggcaaactcggggttctcgacggaagatgcacttgagctactttgtaactactactttgaggaaccgttcgtcgtcgtagacgaggcatcgccgtctaccaaagcgacgcttggcgccaatacggttcacttgaccgccagggttgatcaacgaactgggtggctaattatcatcagcgcattagataatctcgtcaagggggcctccggtggtgcgatccagtgcgccaatatcgccatgggtattgacgagagtgcggggctgcccgtgagcggattaatgccgtgat

SEQ ID NO: 215765 - DNA, 982 bp, Unknown
  Bacterial polypeptide expressing nucleotide sequence isolated from the Sargasso Sea
tatgaaaaacatcgccattatcggtgccagtggttacacaggcgcacaactaacagctttagtccatgcggagtctgaattatcgattcaaggtctgtatgtctctgaaaatagtttagataaaggtagagctttagcagatttgtaccctgtctacagccacattgacttagctctgtcaccactgactgaagcagcaaaggcgaagatcgtcgccgaggcggatgccgtagtgttagcgaccgagcactcggtgagtttgcatttagcggcttggttctacaaccaaggtttagccgtgtttgacttaagcggtgcctatcgtttcagcgatgtggcgcagtaccctaagtggtacggttttgagcacgaatatcccgaagtgttggccaaggcagtctatggtctagccgagtggaatgccaaagaagtcgccgcgactaagatgattgctgtgccaggttgttacccaacagcatcattaacggcattgaaaccattaaagaatttactgacgtcagcctatccagtgatcaatgcggttagtggtgtgacgggcgcgggtcgtaaggcacagctgcataccagtttttgcgaagtgagcctcacaccctacggcgtattaggccacagacatcaacccgaaattgccactcaactggggcaagaggtgatcttcacgccgcaccttggcaacttcaagcgcggcattttagcgaccatcacggttcagctaaaaccgggcaccaccaccgccgatgtggctgcggcatacagtgtttatgaccaagctccgctggtgacggtgaaacagaaccagttcccgaaagtggatgatgtggtgttgactccgaattgccacttaggttggaagtttgatgagaacagtggctacttagtggttgccagtgcgatcgacaatttgatgaaaggcgcggcaagccaagccctgcaatgcataaagattcactttaacctttaa

SEQ ID NO: 215766 - DNA, 916 bp, Unknown
  Bacterial polypeptide expressing nucleotide sequence isolated from the Sargasso Sea
gctcccgttttccaatcttcgagggcaagttgatttaagttttagtaatccagattcatctaacttaaaagactgcgagattgtttttttcgccacgcctcatgccgtcgccatgcattcggtgccagagttgattgatcatggtgtaaaagtgattgatttgtcggctgatttcagaattaaagacctagagctatgggaaacttggtataaaacaaggcattcctgtcctgaattgctgagcatggcggtttacggtttaccagagacaaatagagacgagataaagcgggcaaggttgattgctgttcccggatgttatcctacagctattcaattggggtttttacctcttcttgaaaataacctgatcgaaccagaaaaactgattgcggacgctaaatcaggggtaagtggggcaggccgaaaagctgcagatgcctacctgctttgcgaagctactgagtcactgaaagcctatggaatatctgggcatcggcatcaccctgaaatctgccaacagctgaatttggcaagtagatccgaagttaatttaacttttattcctcatcttgtgccgatgagcaggggcatacttgcgacactatacggaacgctgagactaaaggagggtgcctcagatgagtctctacaaatgctttatcagaatcgttacgttaatgaacctttcatagatattttagtgaacggagagacaccggagacaaaaaacgtaagaggggcaaacaactgccaaatttcggtcaattacgtcgcaagtacaaacacaatcgtagtgctttccgtaattgataatctagtaaaaggtgcttctgggcaagctattcaaaatatgaatttaatgcttggtattgaggaaactaaaggtttggagggggttgctttaactccttaa

SEQ ID NO: 215767 - DNA, 1027 bp, Unknown
  Bacterial polypeptide expressing nucleotide sequence isolated from the Sargasso Sea
tatgggcaagaaaaatgttcttatatgcggtgctactgggtatataggattacaactaactaaactcttatgtacacataaaaaaataagtattaaatatttgtgtggaagtacttctgtaggaaaaaaaatagattactatgaaaaagaattaaaaaaatataaattaccaaaaatatcaaaatttaaaaaagaatatttattagatgtggatataatttttacagcattgccaaatggtgaggcacaatctatttcaaaatttttaaataaaaataatttactaatagatctagcagctgattttagacttaataataaaaaagattatgaaaaatggtataaaattaaacacaaagcattaaatcaaatcaaaaaaagtatttattctatacctgaaattagtggtcaattaattaaaaaatttccaatagtatcttgtcctgggtgctaccctacatctgtattaattccattaatcccattaataaaaaaaaacttaattaataatcaaacaattattattgattcaaaatctggttattcaggagcaggtagaggagtacataaaaaatataaagataaaaatttatatgagtctttgagtgcttatggattagcaaatcatagacataattctgaaattcaacaagagcttgatcttaaaactggcaaaaaaaataaatttcattttacacctcatcttacaccgatgtttagaggaattttaagtactatttacgttgatttaaaaaagggtattaacataaacaaaattattaaggctctaaatatccaatataagaatcaaaaatttataaaaatttgtaaaataaatactttcttaagcacgaacgatgtgattaacaccaataattgcttaatttcagtatgtaaaagcaaatataaagataaaataatattattgtctgcaattgataatttgattaaaggtggtggaggacaagctgtacaaaacatgaataattattatggctttaatgagagcgaaggtctaaatgtttaa

SEQ ID NO: 215768 - DNA, 1078 bp, Unknown
  Bacterial polypeptide expressing nucleotide sequence isolated from the Sargasso Sea
atgaaagacaaaaatttaactattagaattgcagttttaggtgcaagtggttatacaggttcggaactaattaaactagcattgttacatccttttattgagatagtctttttgtcatcagaaagacacatcggaaaaagaattgatgacattttcccgcatttcagtggttccaatcttcctaatttttcaaaaatagataacctttttaaacaggaccttggtttagattttatattttgttgtttgcctcactctacttctcaagcaattattaaaaggatttttgaagaaaaaaattttaaaaataaaattaaagttattgacctatctgctgattttaggatttctgaccctgaaaattatgaaaaaatttatggtaaaaagcatatagccttagatttacagcagaaggcaatatatggtttaactgagataaacaggagtaagattaaaaattcagatttagttgcttgtccaggttgttacccaacttcagtcttgcttcctcttattcccttgattcaaggacaattagtggatataaataatatcttaattgacgctaaatcgggagttacaggagctggtcgtactctcactgaaggtaatctgttttctgaaatctcagaaggtatgaaaccatacggtttacctcaacacagacatcaaccagaaatcgagcaagagttatctcttaataattctaaaaatatatcaattaactttgtgcctcatttaatacctattaatagaggaattattgcttcaatatacttaaattgttcagagaactcatctccggatatgataagaaataaaataattaatcaatataaagaggatgaatttgttgaggtttgtgagaaaggattttttccaagcacatcaaatgtaaggggttcaaataaatgtatgatcagtatctttgataatccaaaagataataaagttataattttttcagttattgataaccttcttaaaggagcttctgggcaagcaatacagaatatgaatttaatgacaaaaataccagaatctactggcttaaatttcattcctttattcccttgat

SEQ ID NO: 215769 - DNA, 1006 bp, Unknown
  Bacterial polypeptide expressing nucleotide sequence isolated from the Sargasso Sea
gatgttgaatacgctgattgtgggcgccagtggctatgccggcgcagagcttgtgacctatgtaaatcgccatcctgatatgaccataaccgctttgaccgtctcagcgcaaagcaatgatgcaggaaaattaatctccgatttgcatccgcagttgaaaggcattgtcgatttaccgttgcagccaatgtcagatatcagcgagtttagcgcaggggtggatgttgtgttcctcgcaacggctcatgaggtgagtcatgacctggctccgcagtttttgcaggccggttgcgtggtgtttgacctttcgggcgcgtttcgcgtaaacgacggcgcgttctatgaaaaatattatggctttacgcatcagcatcctgagctgctggagcaggccgtttatgggctggcggagtggaacgcggataaactgaaagaagcgaatctgattgctgtgccaggttgttacccgacggcggcgcagctttcgctgaaaccgttgattgatgccgggctgctggatctcagccagtggccggtaattaatgcgaccagcggcgtgagcggcgcggggcgtaaagcggctatctccaacagcttttgtgaggtgagcctgcagccgtatggcgtgtttacccatcgtcatcagccggaaatcgccactcatctggggaaagaagtgattttcaccccgcatctgggtaacttcccgcgcggaattatggaaactatcacttgccgccttaaggcgggcgtaacccatgcacaggtggctcagacgctgcaacaggcgtatggcgataaaccgctggtgcgtctgtatgacaaaggggttccggcgctgaagaatgtggttggattaccgttctgcgatatcgggtttgccgtacagggtgaacacctgatcgtcgtggcgacggaagacaacttattgaaaggcgcggcggcacaggcgatgcagtgcgcaaatattcgttttggctttgcccaaacgcagtctcttatttaa

SEQ ID NO: 215770 - DNA, 1018 bp, Unknown
  Bacterial polypeptide expressing nucleotide sequence isolated from the Sargasso Sea
aatgatttctgtcggcatagtaggagcatcaggatttacaggtgaagagctcgtaaagctacttttgagacacccaaatgtttcgcttgatgtccttacttctagaacacatgctggtaaaaaagtgagtgactgtataaagcttgatacagatttggacaaaaaatttttagaaccttcagtagataatttgtcacattgtgacgtagtttttttcgcgtcacctaatggtgtagctatggatatggctagagatcttgtaaaaaacgatataagactaatagatatctctgctgattttagaatacctgatgctgaaatatgggagaagtggtatggtcaaaaacatacatctccagaactcattgaacagtctgtatatggtttgcctgagatgaaaaatcaaagagataaaataacaaatgcaaaaataattgccaatccgggttgttaccctacgtcgtcattattaagtctgttaccaatacttgatatgattgatgaacaaagaattatcatcaatgcaacttctggtataacaggagctggcaggaatcttaatcctgacaagttgtttgcacctgggactgaaaattatcaagcctacgcagtggcaaagcacaggcactatcctgaaatgttaaatcagatacagcatataaataaaaatgtagatgtactatttgtgccacacttaagttctattgaaagaggaatatactctactcattacctaacaataaaagatcttgacttagatcatctatatgatgtctataatgattattacaaagattctcagttcataaaaatcatcaatcggacctatcctaaacttggcgaagtcaacaccactaatgattgtttaatctcactattttcatcctcagatagaaacgatgattctaatctcgtcatcatgagtgcgattgataatctgatgaaaggagcctcaggacaagccgtacagaacatgaatattatgtttggacacaaagaatccactggattagtctaa

SEQ ID NO: 215771 - DNA, 1057 bp, Unknown
  Bacterial polypeptide expressing nucleotide sequence isolated from the Sargasso Sea
aatgaatgttgcaatagtaggtgctactggttacggcggtattcaagctgtaaatcttttaaagaaaataaaaaaatacaaaatttcatttttaggaggtaataaaacatctggatcaaagtggaatgataattttccttttatttatctagataatgatccctatatagaagaaatttccgtagataatatttcaaaaaatgcagatgttgctttgctttgcttaccaaatggtctatcttcaacattgacaaggaaattattagatcgaggacttaaagttattgatttatctgctgattacagatataagtctttagatgaatggaaaaatgtatattccaaagaagctgctatttataaaaggaatgatgatgatttatgtaaagaggcagtctatggtcttcccgaaattaataaggaagccatttcaaaaggaagattaattgcctgtccaggatgctatccaacatctgctcttattccattagttccttatctatcacaaggtattattgaaaatgaaggaatagttattgattctaaaagcggaacctctggaggaggtcgagaacctaaccaaaagctactcttatcagaatgtggtgaaggcttatcagcatatggattgataaaccatagacatacctcagagatcgagcaagtagcatctataatttctggaaataaaattgaactgctttttacacctcacttggttccaatttcaaggggtatgcattcgactatatatgggagattaagagatccaggattaacctctgatgattgcagaattcttttggataattattacagaaatttcaaaaatattaaagtattacctgtagataaatacccttcaactaaatgggttaaaaatacaaaccaaattttcctttctgttaaagttgatattcgaaatggaaggattattattttatctgcaattgataatttgttaaaaggtcagactgggcaagcaatccaaaatttaaatattattagtggattttcaatggatgaaggtcttgatttaactaataattttccctaa

SEQ ID NO: 215772 - DNA, 1024 bp, Unknown
  Bacterial polypeptide expressing nucleotide sequence isolated from the Sargasso Sea
atgcctaagcttaacgcattagttgctggatcaactggatatattggtgttcaattaattaaattattagttaaacacaaatatattaatattaaatacctttgtggaaactcttctgcgggtaaacacgttaaattttatgataaatctttatctaaatataaattaccaaaaattttaaaatttaataaaaaattattaaaagacgttcatgttatttttacagctcttccaaatggagaggcacaagatatatctaaacatataaataaaaatcatactttgatagatcttgctgcagattttagattagaaaaagcttctgattatttaaagtggtataaacaaaaacatcgcgcaactaatttaataaaaaaaagtatttatttactacctgaaataaatagaaaagagattaaaaaatataatattatttcatgtccaggatgttatccaacatcaatattgctacctctttttcctttatttaagaaaaatttaattaaattaaataatattataatcgattccaaatctggatattcaggcgctggtagaggagttcacaaaaaatataaagataaaaatctatatgagtctttgagtgcatatggggttggttttcatcgtcacaattctgaaatagaccaaatgttaagaaaatttactaagaaaaaatttcaatttagttttactcctcacttatcaccaatgttcagaggtattctaagtactatatatgttgatttagaaaataatatttcacaaactaaagtattaaaaacattaaataatttttataaaaaagagacatttgtaaaaatattaaagtctgactcattgttaagcaccaatgaagtaataaacactaataattgttatatttctgtgtgcaaatctaaatatagcaataaaataataattctatctgctattgataatttgattaagggtggagcaggtcaagctgtacaaaatatgaataataaatttaatttttctgaaaagactggtttaaaatgag

SEQ ID NO: 215773 - DNA, 1015 bp, Unknown
  Bacterial polypeptide expressing nucleotide sequence isolated from the Sargasso Sea
tatgtacagcgtttcgattattggtgccagtggttacacaggggcacaacttgttcagttagttattcagcaccctaaacttgcattagcggggacttacgtatctgagaatagtagcgatgcgagtaaaaatattgcagagcttcacggcaacttggctcacgttaatgccacactgacgcctatttcggatgcggcattaaaagaaatggctgacggtgtcgattttatctttcttgccactcctcacgaggcgagccacgactggatgcctgtcctatcttcgggcaaagccaaagtgctcgatttgtcgggtgcattcaggctaaaagacaccaatgtcttcgaacagttctacggctttccacatacgcaagagcaaagcttggctcaagctgtttacggccttgccgagtggcacgaagcgcaaattgcctctgccgacgttatcgctgtgccgggttgctatcccactgcgagccttagtgcacttaaacctcttgctcacaacaatttactagatgaaagcgtacgccctgtaattaacgctgtttccggcgtatcgggtgcaggtaggaaagccagcctaaccacaagcttttttgaagttagtctgcaggcatatggcgtgctaggtcaccgtcatacccctgaaattgaagcttacttgggtacccccgttatctttacgccgcacttaggtaattttaaaagaggaattttggcgaccgtaaccgttaaggttaaagctggtaccaccagcgcacaacttgaacaagcgtacactgacgcctatgctgataaacccattgtgcgtttgcgcaagagttttccaaaaattgatgacgttgctcataccccatttgttgatctgcattggaagttagatgaagcatctggatacgcagtgattaccgctgcaatcgacaacgtaatgaaaggtgctgcctctcaggcaatacagtgccttaacataatgacgaaacaaccagtagagacagggttagtactatga

SEQ ID NO: 215774 - DNA, 1048 bp, Unknown
  Bacterial polypeptide expressing nucleotide sequence isolated from the Sargasso Sea
aatgaatcaaaataagataaatatagctgttctcggtgcatcaggttatacaggtggcgatttaattaaaatattattaaatcatgattatgttaatatttctgctctaagcgctaactctaaattaggtatgaatccttctaatgttcatgcttcattatttaatgctcagttaccagattttgtaagtcttgatgaaatagattttactcaaattgatttggttatatcaggtttacctcataataatttacataatattatcaataatataccaaataaatgtaaagtaatagatatgtctgctgattttaggttttctgatgttaatatatacaaccagtattatgaaacttcacataattcatctgaattgcttagcgagaccgcatatggcttatcagaaatttttagggactctataaaagaatctagaattgttgcttgcccaggttgttatcctactgcagttctattatcaattttaccacttattaaagagaatattatttctctagaagatattattgttgatgctaagtctggtgtttcgggtgcaggtaggggaaataaagaagagctaatgttctcagagatctcagaaagtatgaaaccttacaatattgcaaaacatagacatacgcctgaaattgaacaaattattggtgatataagcggtaaagaaataaaaataaattttacaccacatttaattccaataaatagaggagaattggtaaccatatatttaaagacaattaatggatctaaagcaaaagaagcaatttcttgtttaaattcttattataaagaagattcttatgttcatatttcaaatcaaggtatcccatctgaaacctctaaggtgaggggttcaaacaattgtttgatttctatttttgacgatagaattgatggaagaattataatttcgacttcaatagataatttaataaaaggttcagcaggtcaagcaattcaaaatatgaatattatgttcgattttgatgaaagtgaaggcttaactagttttggtatgtacccataa

SEQ ID NO: 215775 - DNA, 664 bp, Unknown
  Bacterial polypeptide expressing nucleotide sequence isolated from the Sargasso Sea
aatgattcgtataggtattgttggtgctactggctatacaggcgccgaattgcttcgattactaacatttcatgaagaagttgaagttgttgctattacatcaaattcaaaaaaaggtgaagcattaactgatatatttccaacattaacagattatagtctaaattttgtcgcgcatgatagcgaatcgttgtatacatgcgaccttgtattttttgcaacacccaatgcggtggctatgaattatgttcctatactgctcgaacagggctgtcggattattgatctatcagctgattttagattacgaaactcaaatacgtggcagcagtggtataaaaggaaacattcttgtccaaatcttttagataaagcggtatatggactacctgaaattaatcgcgaatctatcagcaaagcaagtttaattgctaatcctggctgctatccaacctctgtaatacttggcctattacctgcagtaaaatatgggttgattgagacgaacagtataattgcaaacgcggtatctggaaaaagtggtgccggaagaaaagctgttttatctgaagcgtattctaattttaccgaatcatttaaagcatattcgccctttagtcacagacatttaccagagatagaacaagttttagaagattatgca

SEQ ID NO: 215776 - DNA, 859 bp, Unknown
  Bacterial polypeptide expressing nucleotide sequence isolated from the Sargasso Sea
aaaagattttttagaacctgttacagataatctattaacatgcgatgtggtgttctttgcttcacctaatggcgtggctatgaacatggcaaaagaacttatagaaaataatgtcaaaataattgatatatctgctgattttaggatacctgatgttgatatttgggagaaatggtacggacaaaaacatgcttgtccagaattgattaaagaatctgtatatggtcttcctgaaatgaaaaatcaaaaagaaaaaatatcaaaagctaatattattgctaaccctggatgctatccaactgcatcactcttaagtcttttacctattatcagtttaattaaacaacaaagaattattattaattcaacatcaggtatttcaggcgcaggaagaaatctaaatcctgaaaaattattttctgctggcaccgataactatcaagcttatgctgttgctaaacatagacactacccagagatgcttgctcaaataagtgatataaataaagatatagacttactttttgtcccacacttaagctctatagaaagaggaatctattcaacacattatgtaacgatggataatttaaatcttgaccaagtttatgatgtgtattatgaatactttcaaggctctgattttgtaaaaattataaatcaaacctatccaaaagtaggacaagttaacaatacgaataattgcattatttccttgtttgcatcctcagatacaaatcaaacttctaatctcgtgatcatgtgcgctatagataacctaatcaaaggagcttctgggcaggcaatacagaacatgaatatcatgttcaatctaaaagatacatttggtttagtataa

SEQ ID NO: 215777 - DNA, 892 bp, Unknown
  Bacterial polypeptide expressing nucleotide sequence isolated from the Sargasso Sea
tctgcgcggccattaccccgagctcgcgttcagcgtgccggatgtcgccaccttgggcgcctgtgatgtggtgttcttcgccaccccgcacggcgtggcccatgcgctggctggtgagttgctcgctgcgggcacgcgagtaatcgacctctccgctgacttccgtctgcaggacgccgaggagtgggccaagtggtacggccagccgcacggcgcccccgagctgctgagcgaggcggtgtatggtctgcccgaggtcaatcgtgaggcgatcaagactgcgcgcctgatcgctgtacccggctgctacccgaccgctactcagctggggctgatcccgctgctcgaagctggactggctgagaccggtagcctgatcgccgactgcaagagcggtgtcagcggtgccggtcgtggcgccagcgttggttcgcttttctgtgaggccggcgagagcatgaaagcttactcggtcaagggccaccgccacctgccggaaattcgccaggggctgcgccaggcagcaggtagcgatgtcggccttaccttcgtgccacacctgacgccgatgattcgtggcattcatgcgaccctctatgcgcgcgtggccgatacctcggtcgatctgcaggcactgttcgagaagcgttacgccggcgagcctttcgtcgatgtgatgccggcgggcagccatccggaaacccgcagcgtgcgcggaggcaacgtttgccgcatcgccgtgcaccgtccgcagggcggcgacctggtggtggtgctctcggtgatcgacaacctggtcaagggggcctccggccaggcggtgcagaacatgaacatcctcttcggtctcgacgagcgtctcgccctgtcgcacgcggccctgctgccgtga

SEQ ID NO: 215778 - DNA, 1057 bp, Unknown
  Bacterial polypeptide expressing nucleotide sequence isolated from the Sargasso Sea
atgaatgttgcaatagtaggtgctacaggttacggcggtattcaagcggtaaatcttttaaagaaaaataaaaaatacaaaatttcatttttaggaggtaataaaacatctggatcaaagtggaatgataatttcccttttatttatctagataatgatccttatatagaagaaatttcagttgataatatttcaaaaaatgcagatgttgctttgctttgcttaccaaatggcttatcttcaacattgacaaggaaattattagatagaggacttaaagttattgatttatctgctgattatagatataagtctttagatgaatggaaaaaagtatattccaaagaagctgctgtttataaaaggaatgatgatgatttatgtaaagaggcagtttacggtcttcctgaaataaataaagaagccatttcaaaaggaagattaattgcctgtccaggatgttatccaacatctgctcttattccattagctccttatctctctcaagggattatcgaaaatgaaggtatagttattgactctaaaagcggaacatctggaggtggtcgagaaccaaaccaaaagctactcttatcagaatgtggagaaggtttatcagcatatggattgataaaccatagacatacttcagagatcgagcaagtggcatcattaatttctggaaatcaaattgaactgctttttacacctcatttagtcccaatctcaaggggtatgcattcaactatatatgggagattaagagatccaggattaacatctgatgactgcagaattcttctggataattattatagaaattttaataatattaaagtcttacctgtagatacatttccatcaacaaaatgggttaaaaatacaaaccaaattttactttctgtgaaagttgataatcgaaatggaagaataattatattatctgtaattgataatttgttaaaaggtcagactgggcaagcaattcaaaatttaaatattatgagtggattttcaattgatgaaggtctcaatttaactaataattttccataaa

SEQ ID NO: 215779 - DNA, 1027 bp, Unknown
  Bacterial polypeptide expressing nucleotide sequence isolated from the Sargasso Sea
tatggccaagaaaaatgttcttatatgtggtgctactggatatataggattacaactaactaaacttctatgtacacataaaaaaataagtattaaatatctatgtggaagtacttctgttggaaaaaaaatagattcttatgaacaagaattaaaaaaatataaattgccaaaaatatcaaaatttaaaaaagaatatttattagatgtggatataatatttacagcattaccaaatggcgaggcacaatctatttcaaaatttctaaataaaaataatttactaatagatttagcagctgattttagacttaataataaaaaaaattatgaaaaatggtataaaattaagcacaaagcattaaatcaaatcaaaaaaagcatttactctatacctgaaattagtggcaaattaattaaaaaattttcaatagtatcttgtcctggatgctaccctacttctgtattaattccattaatcccgttaataaaaaaaaacttaattaataataaaacaattattattgactctaaatctggttattcaggagcaggtagaggagtacataaaaaatataaagataaaaatttatatgagtctttgagtgcttatggattagcaaatcatagacataattctgaaatacaacaagagcttgaccttaaaactggcaaaaaaaataaatttcattttacacctcatcttacaccaatgtttagaggaattttaagcactatttatgttgatttaaaaaagggcattaacataaacaaaataattaatgttctaaatgtccaatataaaaagcataaatttgtaaaaattagtaaaataaatactttcttaagtactaacgatgtgatcaacacaaataattgcttaatttctgtatgtaaaagcaaatataaagataaaataataatattgtctgcaattgataatttgattaaaggtggaggaggtcaagctgtacagaacatgaataattattataactttaatcagagtgaaggtctaaatgtttaa

SEQ ID NO: 215780 - DNA, 1009 bp, Unknown
  Bacterial polypeptide expressing nucleotide sequence isolated from the Sargasso Sea
gatgaataaagtaggaataattggtggttctggttttgcgggtgaagaattaattagattcttatcgtttcatgaatctacttctcttgtggctgttagctcaagagagcttaaaggtcagtcagttgctcaatttgtagaaggcagtgatctaatatttgtcgatcctgatgatgaaatcttttttagttgtgatgtggtcttctttgcaactccgcatggaatttctatggaaaaagctaaatactttgtccagcaaggcaccaaggttatagatctttctgctgatttcagaataaaagatttaactatatggaaggattggtataactccgatcacaaagatcctgaaggagtagaacagtctgtttacggtctaactgaactcaatgggagtctaattaagagcagtaatttaatagctgttccaggctgttatcctactgcatctatattaggcttattacctctacttgatggccgttccaaaatagactcaattacaattgatgctaagtcaggaattagcggcgcgggacgctcaaccgtaaacagctccttgctctctgatattaaagaaaattttaaagcttacgctaccttaggccacaggcatctacctgagataaaacaagttctcgaaggtgtttatggctcatctcttaaaataaattttttacctcatcttataccggccatgaggggtatatactcaactatgtatgttaatttagaagctaaaccttccggtccattaattgacttgtataagaatttctatatagaatcacctaacattcaattaatgggagaaggagaagttcctgaaatattgaaagtttgccaaacaaataactgtcaaataggtatctatccctctgctatagagaatcaggtagttattatttcggctatagataatttagttaagggagccgcaggccaggctgtagagtgttacaatttgctttgtggaaatagccaaatgcaaggtatagataatggttga

SEQ ID NO: 215781 - DNA, 796 bp, Unknown
  Bacterial polypeptide expressing nucleotide sequence isolated from the Sargasso Sea
attgccaaatggggaagctcaagttatttctaaacaattaaataaacataatacattaattgatttagcagctgattttagactcaacacatcaaaatcttatttaaactggtataaacaaaaacataaggcaatttttaatatcaagaaaagcatttatgctttacctgaaattacaggaagtaaagttaaaaattataaaattatttcttgcccagggtgttatccaacatcaattttaattccattattacccctaattaaaaaaaatttggttaatctaaaaaatataattatagactctaagtcaggatattctggcgcaggaagaagtgttcataaaaaatatattaataaaaatttatatgagtctttaagtgcttatggcgttggtttccatagacataattctgagattgaacaagaaattaaaaaaattactaataaaaaatttaattttacttttacaccacacttaacaccaatgtttagaggtattttaagcactatatatatagaaacaaaaaaaggtgtaacaataaataaaatttattcaaaacttagatcagtttataaaaataaaaattttgttaaaattctcaaaattaattcatatataagtactaatgatgtgattaatacaaataattgttatatatctatatgtaaaactaagtataaaaataaatatataattttatcagcaattgataatcttataaaaggcggcgcaggtcaggcagttcaaaatatgaatttaaaatttaatttttctgaaaaaaaaggattgttatga

SEQ ID NO: 215782 - DNA, 367 bp, Unknown
  Bacterial polypeptide expressing nucleotide sequence isolated from the Sargasso Sea
ctcatacaattctgatataaatggagaagttatcttcactcctcacctccttccggttaaccgcggaatattgtccacgatttatattcattttcaagaaacagtggacagagatcagatagtagagaaattttcagaattcgctgatacgcaaatatttgttaaatttttgggaatgtcccatttccctgatataaaaatgacatcccatacaaactgctgcatgataggtattgaatcagatcaaagcggacaaaacttggttattgtttccagtctggataatttgattaaaggtgcggcgggacaggcaattcaaaatatgaatataatgtttagacttgaggaaagactaggcttagaataa

SEQ ID NO: 215783 - DNA, 1075 bp, Unknown
  Bacterial polypeptide expressing nucleotide sequence isolated from the Sargasso Sea
atggcaacggtgaagggcggacgggttgctgtgatcggcgcctccggctacggcggcctgcagaccatccgtctgcttcagggccaccccggcctgtctgtgagttttcttggcggtgaacgcagtgctggccaacgctggagctccgtctgctccttcctgcccctgccggatgacccaacggtggaatcagcggatccggatcggattgcggcctgttccgattttgctgttctgagcctccccaacggcctggcctgtcagttggcaccgcaacttctggagcggggtgtgcgggtggtggacctctccgccgacttccgctaccgctccctggagcagtggctgcaggtgtacgccaaggaggccggctccctcaaccgtcaggacgctgagctctgcagcagtgccgtctacggcctgccggaatggaacggcccggccatcgctgacgcgaagcttgttgccgcaccggggtgcttccccaccgccagcctgctgcccctgctgccgttcctcaagcagggcctgatcgagaccagcggcatcatcattgatgccaagacgggcacctccggcggagggcgcgtgccgaaggaggcgatgctgctggcggaggcctcggaatccatcgcgccctacggcgtgatcggccatcgccacacgtctgagatcgagcagatggcgatggaggtggctggccaggaggtgcggcttcagttcacgccgcatctggtgccgatggtgcgtggtcttctgtccacggtgtatgcccgcctgcgcgaccccggtctcaccgccgaggattgcaccacggtgttggaggcgatctaccgccaccacccctgtgttcaggttctgccggtgggcacctatcccgccaccaagtgggcgcgccacaccaaccgtgctctgctgtcggttcaggtggacacccgcaccggccagctggtgttgatgagtgccatcgacaacctgatcaagggtcaggccgggcagggcgtgcagtgcctcaacctgatggcgggcctcgctccggagacggggctgcccttgcagtccttctatccctgac

SEQ ID NO: 215784 - DNA, 1021 bp, Unknown
  Bacterial polypeptide expressing nucleotide sequence isolated from the Sargasso Sea
atgattaatgatttaacaaaagttggaattattggcggatcaggctttactggtgaggagttattgagatttctttcaaatcatcctaatacagaagttatagctatcagttctagggcattgcttggtcaaagtacaaaccaaattgtggaagggtctgatttaatttttattgaaccagataatgatattttttatgactgcgaagtagttttctttgctactcctcacggagtctctatgaacttggttaatttatttattaataagaatataaaagtcatagacctttctgcagattttagactgaaagataaaggtatttgggaggaatggtacaacattcctcattctcaagaagagcttctatctgaatcagtttacggtttaacagaattaaattcgagtaagatagagtcagctagactggttgctgttcctggttgttatcctaccgcaagtcttttagccatccttccgcttttaagttctaaatttaaaattgaatcaataatcattgatgctaagtctggtataagcggcgcaggtaggcaaaaagttgagaatggtttatatgaagaggtaaaagaaaattttaaagcatacggattagagggacacagacacttacctgagataagagaaatcacagagcttgtttcaggttatccaataaatttaaatttcattccacatcttatacctgccatgaggggcatctactcaacaatatatattcaattagaagaaaccgtagatttaaatattcaagatttatatgaattattttacgaagattcaccaaatgtaaagattatgcaacctggacaggtgcctgatataaagtcgattacaaatacaaataattgcaatatttctgtcaataattcaaacatccccaatcaattggtgttgattgcatcgattgataatttagttaagggggctgctggacaagcggttgagtgctacaatttaatgagtggttttaatcaaagtacaggaataaaaaatggttgag

SEQ ID NO: 215785 - DNA, 982 bp, Unknown
  Bacterial polypeptide expressing nucleotide sequence isolated from the Sargasso Sea
tatgaaaaatatcgccattatcggcgccagtggttacacaggtgcacaactcactgctttagtccatgcggagtctgaattatcaattcaaggcctgtatgtctctgaaaatagtttagataaaggtagagctttagcagatttgtaccctgtctacagccacattgacttagctctgtcaccattgactgaagaagcgaagactaagatcgtcgccgaggcggatgcagtggtgttggcgaccgagcactcggtgagtttgcatttagcggcttggttctacaaccaaggtttagccgtgtttgacttaagcggtgcctatcgtttcagtgatgtggcgcagtaccctaagtggtacggttttgagcacgaatatcccgaggtgctagccaaggctgtttatggtcttgccgagtggaatgccaaagaagtcgccgcaactaagatgattgctgtgccaggttgttacccaacagcatcattaaccgctttgaaaccattaaagaatttactgacctccgcctatccggtgatcaatgcggtcagcggtgtgacgggcgcgggccgtaaggcacagctgcataccagtttttgcgaagtgagcctcacaccatacggcgtattaggccacagacatcaacccgaaattgccactcaattggggcaagaggtgatcttcacgccgcaccttggcaacttcaagcgcggcattttagcaaccatcacggtacagctaaaaccaggcaccaccactgccgatgtggctgcggcatacagtgtttatgaccaagctccgctggtgacggtgaaacagaaccagttcccgaaagtggatgatgtagtgctgactccgaattgccacttaggttggaagtttgatgagaacagtggctacttagtggttgccagtgccatcgacaatttgatgaaaggcgcggcgagccaagccctgcaatgcataaagattcactttaacctttaa

SEQ ID NO: 215786 - DNA, 1024 bp, Unknown
  Bacterial polypeptide expressing nucleotide sequence isolated from the Sargasso Sea
aatgcctaagcttaatgtattaattgctggatcaactggatatattggtgttcaattaattaaattgttaattaaacacaagaatatcaatataaagtatctatgtggtaattcctctgtgggaaaaaaaatctcatcatatgatacatcgttaaagtccaaaaagttaccaagaattactaagtataataaaaaatatttaagttatgttgatattatatttactgctctgccgaatggggaagctcaattaatttcaaaagatttattaaaaaaaaatactttaattgatttagctgctgattttagactaaataaagcttctgattatctaaaatggtataaacaaaagcataaagcgttaagtaatataaaaaatagtatttatgctttacctgaaataacaggaaaattagttaaaaaatttagcattattgggtgtccaggttgttaccctacatcaatacttttaccacttattccattagttaaagaaagatcgatcaatttaaagaatattattatagactccaaatctggatattctggagcgggtagaggagtgcacaaaaaattcaaaaacaaaaatttatacgaatctcttagtgcatatggtgtaggttttcatagacataattcagaaattgatcaagaactaaaaaataactcttcctctaaaatcaattttacttttacaccccatattattccaatgtttagaggtatattaagtacaatttatttggacttaaaacctggtactactttaaataaagtacaaaatattttgaaaatatttcataaaaagaataaatttgtaaagataaagagtattaactcttttttgagcacaaatgacgttatgaatactaattattgctttatttctgtctgtaaaaccaaatttaaagataaaataataattttatcggtcattgataatcttatcaaaggaggggcaggtcaagcagttcaaaatatgaatttgaagtttggttttaaaaataatgagggattaatatga

SEQ ID NO: 215787 - DNA, 685 bp, Unknown
  Bacterial polypeptide expressing nucleotide sequence isolated from the Sargasso Sea
tatggcagaagaacatttggctaaaaaattaattaacaaatctatctatgctatatctgaatttgcaaaggataaattaagaaaattcaaaataatcgcttgcccaggttgttatcctacttcaattcaattacctttaattccgttactaaagaaaaatttaattaataataaaaatattataattgactcaaaatctggatattctggtgcaggaaaaaatttaaaaaaaaaatttaagcataaaaatattttttcatcaattcatgcatatggtacctataagcatagacatataagcgaacttgatcaggagttaaataaagtctctaatacaaaaattaattatgtttttattcctcatcttatcccaacttttagaggaatgttatcatctatttacctagaattaaaacctggtgtcactgcaaaaaaagtgtttactgaattaaaaaactttcataaaaataattattttgtaaaaatcaacccatttaataaaaacattggtactgagaatgttttaaatacaaatttttgcgaaatttcgatatgtgaattaaaagaaaaaagaaaaatacttattttgtcagctattgataatttagttaaaggagcagcgggtcaagcaattcaaaatatgaatattatgaataattttaaggagaacgtcggcattaaatga

SEQ ID NO: 215788 - DNA, 673 bp, Unknown
  Bacterial polypeptide expressing nucleotide sequence isolated from the Sargasso Sea
accagaacttatagatcaagcaacatacgggcttccagagattcacagagatgatattaaaaaaagtaaattagtagccaaccctggatgctttcccactggagcaattctttcaatgtcccctgcagtaaaaaatgatttgattgaagatatgattattattgactcaaaaacaggtgtatctggtgcgggtagaacagcaaaagaagcatttggattttcagagcttaatgataattgcgctgcttatgggactaaaggacacaggcatcaacctgagatagcgcaagaactaaattttttgaccaataatgaaatcaatgtactttttacaccacatctcgtttcaatgacaagaggtattttaggaacaaactatggaatgttaaagaaaaatattacagaaaaagatgctgttgagctgtataaagaattttacaaaagcgaacctttcattaaaatagtagatgcacctcctgcaacaaagcatacatggggatcaaattatgtttacttgtatccttatgtaagagaagatactaacactttagtggttataagtgcattggataacctcgttaagggttctgcaggtgcagcaattcaaaacatgaatttgatgcaaggttttgaagaaacaatgggaataagcgctttacccgtttatccataa

SEQ ID NO: 215789 - DNA, 685 bp, Unknown
  Bacterial polypeptide expressing nucleotide sequence isolated from the Sargasso Sea
tgatgatttatgtaaagaggcagtttacggtcttcctgaaataaataaagaagccatttcaaaaggaagattaattgcctgtccaggatgttatccaacatctgctcttattccattagccccttatctctctcaaggaattattgaaaatgaaggtatagtaattgattctaaaagtggaacatctggaggtggtcgagaacctaaccaaaaactacttttatcagaatgtggagaaggtctatcagcatatggattgataaagcatagacatacctcagagatcgagcaagtagcatctttaatttctggaaataaaattgaactgctttttacacctcatttggttccaatttcaaggggtatgcattcgactatttatgggagattaagagatccaggattaacgtctgatgattgcagaattcttttggataattattatagaaatttcaaaaatattaaagtattacctgtagatacatacccttcaacaaaatgggttaaaaatacaaaccaaattttcctttctgttaaagttgatattcgaaatggaaggattattattttatctgcaattgataatttgttaaaaggtcagactgggcaagcaattcaaaatttaaacattatgagtggattttcaatggatgaaggtctcgatttaactaataattttccataa

SEQ ID NO: 215790 - DNA, 826 bp, Unknown
  Bacterial polypeptide expressing nucleotide sequence isolated from the Sargasso Sea
atcaaatgtggatataatatttacagcattgccaaatggtgaggcacaatctatttcaaaatttttaaataaaaataatttactaatagatctagcagctgattttagacttaataatcaaaaagattataaaaaatggtataaaattaaacacaaagcatcaaatcaaattaaaaaaagtatatattctatacctgaaattagtggacaattaattaaaaaatttcaaatagtatcttgtcctggatgctatcctacatctgtattaattccattaatcccgttaataaaaaaaaacttaattaataatcaaacaattattattgattcaaaatctggttattcaggggcaggtagaggagtacataaaaaatataaagataaaaatttatacgagtctttgagtgcttatggattagcaaatcataggcataattctgaaattcaacaagagcttgatcttaaaactggcaaaaaaaataaatttcattttacacctcatcttacaccgatgtttagaggtattttaagcactatttatgttgatttaaaaaagggcattaacataaacaaaataatcaatgtattagatgtccaatataagaatcaaaaatttataaaaatctgtaaaataaatacattcttaagcactaatgatgttatcaacaccaataattgctttatttctgtatgtaaaagcaaatataaagataaaataataatattgtctgcaattgataatttgattaaaggtggtggaggtcaagctgtacaaaatatgaataattattatggctttaatcagagcgaaggtctaaatgtttaa

SEQ ID NO: 215791 - DNA, 853 bp, Unknown
  Bacterial polypeptide expressing nucleotide sequence isolated from the Sargasso Sea
tcaataatttgtattaaatctggaaatgctgttatcttaagaggtggaacagacagtttctttacttctaataaattgcaggaaattattaatgattcttttaatgcagttggccttcctaaaaatgttgtgcaaatgattgattcaactgatagatctaatgttgatgaaatgattaaacttgataaatttattgatgtaattattccaagaggaggtaaggggctaattaaagctattaatgagaatagctctattcctgtcattaaacatcttgatggaatatgtcatatatttgttgaaaaagatgccaatcttgaaaaagctaaagatataattttaaacagtaaaatgagaagacctggaatttgtggtgctgtcgaaagtttattaattaatgaatcattatatgagcaaacattagaaatcttaaagcctttaataaatgcagggtgtgaaatccgaggagataaacttatttgtaaactaagccctgaatttaaattagcagataataatgattggggcactgaatatttagaaaaaataatatctgtcaaaattgttaaaaatgtagatgaagctattgatcacatcaatacatattcatcaggccacactgagtcaattattacagaagatatagaaaaatttaataagttttataaaaaaattaacagcgctataatattaaagaatgcctcaactcaatttgctgatggaggggaatttgggtttggaggagaaataggcatttcaacagataaattacatgtaagagggcctgtaggtgtagagcatttaacaagttttaagtatgttgttcaaggaaatggtcaggtgaggtcgtaat

SEQ ID NO: 215792 - DNA, 450 bp, Unknown
  Bacterial polypeptide expressing nucleotide sequence isolated from the Sargasso Sea
attcagcagaagatatttcatctgttttagataatttaaaatcacaaggatgtgaaattattggatgtagtcgactcaaagatatttattcaatcgatcgagatgcaacagaagaagattggtcaactgaatatctagataagaaaattacagtaaaactagttgataatgttgaagaatgtgtagaacatataaacaaatattctagtggacataccgagagttgtttaagtaacaatcaacaatctatagagtatttctttcaaaactgtaaaagtgccattttaatgaataatgcttccactcaatttgctgatggtggagaattcggatttggagcagaaataggtatttctactgacaagcttcatgtgagagggccagtaggagcaaaacacctaacaacatttaaatatcaagtaataggcaatcacaccactaggccttaat

SEQ ID NO: 215793 - DNA, 577 bp, Unknown
  Bacterial polypeptide expressing nucleotide sequence isolated from the Sargasso Sea
atggctaatatcttcgaagttcctcaaccaggtaatgatcttttaggaaaagctgaaaaagttcgtttggcatcaataaaaataagtcagactgaaaatcaaaatcgaattaaagccttaaattttatggctgattatctagaaaaaaattctaaagaaatattagaggctaatgacgcagattattcaagtgcaaaaaaaaaaggtatttctagggctttactttctagattaaagttatcaaaagaaaaattaaattcaggaattgaaggggtacgaaaagttggagacttggctgatcctgtaaatcaagttcaaataaaaagagagctttcaaagggattgattttagagagaaaaactgtgccaattggagtcttaggggttatttttgaatcaaggccagatgccgtgatgcagattagttcattagcaataagatcaggtaatggagtaatgctaaaaggtggtagtgaagctaatttaacaaatacttcaatagtgaaagcattgcaagaaggtttaaatgaatcaggcctcgataaaaatgcaatatgtttactaacaagcagaaaag

SEQ ID NO: 215794 - DNA, 580 bp, Unknown
  Bacterial polypeptide expressing nucleotide sequence isolated from the Sargasso Sea
gatggtatatgtcacgtctatatcgatctagattctgatcctgagaaatctatagatatagcttttaatgcaaagacatacaggtatggtatctgcggtgctatggaaacgttacttatccatgaagaagttgcttcaagaatactccctaaattactagataaatacaatgcagaaggtgttgaaataagaggatgtgaagttacccaaaagatcattaaagttaaagccgcaaatgacgaagactggattacagaatacttggctccagttttatcaataaaagttgttaaaggtttagaggaagctatagaacatattaatttatacggctctagccatactgattctatagttactgaaaatgacgaaaatgttgcaattttctttgataaagttgattccagttctgttatgcataatttgcctacctgctgggctgatggatttgaatacggtttaggagctgaagtaggaatatcaactgataaaatccatgcaagaggtccagttggactagaaggtctcacttcccagaagtttatagttaaaggtaattctcagcttagagggtcttgag

SEQ ID NO: 215795 - DNA, 211 bp, Unknown
  Bacterial polypeptide expressing nucleotide sequence isolated from the Sargasso Sea
caaagataagcagttaagctttaccaattcaatagatagcgccattgttatgattaatacctctacgcaatttgctgatggaggcgaattcggtcttggaggagaaataggaattgcaactggaaaatttcatgctagaggtccggtgggtataaaccagctcacaagctttaaatatattgttaggggagacggacacatcagagcctag

SEQ ID NO: 215796 - DNA, 547 bp, Unknown
  Bacterial polypeptide expressing nucleotide sequence isolated from the Sargasso Sea
atggataatatctttgaagttcctcaaccaggtaataatcttttagaaaaagctgataaagttcgtttggcatcaataaaaataagtcagaccgaaaatcaaaatcgaattaaagccttaaattttatggctgattatctagaaaaaaattctaaagaaatattagaagctaataatgcggattattcaagtgcagaaaaaaagggtatttctagggctttactttctagattaaagttatcaaaagcaaaattaaattcaggaattgaaggagtaagaaaagttggagacttggctgatcctgttaatcaagttcaaataaaaagagagctctcaaaaggattgattttagaaagaaaaactgtgtcaattggagtcttaggggttatttttgaatctaggccagatgccgtgatgcagattagttcattagcaataagatcaggtaatggagtaatgctaaaaggcggaagtgaggctagtttaacaaatacttcaatagtgaaagcgttgcaagaaggtttaactgaatcaggacttgataaaa

SEQ ID NO: 215797 - DNA, 274 bp, Unknown
  Bacterial polypeptide expressing nucleotide sequence isolated from the Sargasso Sea
atgaagtcatggagttgtatagaaaattgtggtgcttgttgtcatttagatttaactgatagagataacttatcaggtgtacttagtaataaagatatagcattaataaattccatgaaaagcaaagacggatggtgtaaatatcttgatagatcaagcagaaaatgcatgatttatgaatcaagaccacatttctgccgtgtaaataaattttctttatcattcaaaaagtatttaaaaaatggtgataaattgttaattaattgttgtacac

SEQ ID NO: 215798 - DNA, 436 bp, Unknown
  Bacterial polypeptide expressing nucleotide sequence isolated from the Sargasso Sea
aaagaaataataaatgcacttttaaaatcaggctgcgaagttagagctgataaaaaagttaacaaaatttttaacggaaaattaaaaaaaaccactgagagagattggaagacggaatacctcgatgcaattatctcagttaaaacagttaaaaatgtaaatgttgctatcgatcatattttaaaatatggcacgatgcacactgatagcataatcactaacaacaaaaagaatgctgagatttttgtaaatggagtaaatagttcaatagctatgcataatgtttcaactcaatttgctgatggtggtgaattcggtttcgggggtgaaataggtatttctaccaacaaacttccacctagaggtcctgtaggaataaaccaactaacttcatacaaatatgttgtttatggaaatggaattgttagatcataat

SEQ ID NO: 215799 - DNA, 555 bp, Unknown
  Bacterial polypeptide expressing nucleotide sequence isolated from the Sargasso Sea
aaactgcaaatataaaaatggcaaaagatttaatcattaacgcaaaaatgagaaggacaagtatttgtggagcagttgaaactcttttgatcgaagaaaaagctttaaattcacatgctgaagaaattataaaatctcttttaagttctggctgcgaagttagagctgatgaaaaaataaataaaattttcaaaggaaaacttaaaaaaaccatagaaagagattggaagacagaatatcttgatgcaattatttcagtcaaatcagtgaaaaatgtaaatgaagcagttgaacatattttaaagtacggaacaatgcatacagatagtattattactagtaacaaaaaatttgcagagatttttttaaatggagttaatagctcgatagcaatgcataacgtctcaacccaatttgccgatggtggagaatttggttttggtggtgaaattggcatttctactaacaaacttccacctaggggtcctgtgggaataaatcaattaacatcatacaaatatcttgtttctggaaatggaataattagaccatagt

SEQ ID NO: 215800 - DNA, 562 bp, Unknown
  Bacterial polypeptide expressing nucleotide sequence isolated from the Sargasso Sea
atggctaatatctttgaagttcctcaaccaagtaatgatcttctagaaaaagctgataaagttcgtttggcatcaataaaaataagtcagactgaaaatcaaaatcgaattaaagccttaaattttatggctgattatctagaaaaaaattctaaagaaatattaaatgctaataatgaggactatgaaagagcagaaaagagagggatttcatacgctttactctctagattaaagttatcaaaagaaaaattaaattcaggaattgaaggagtaagaaaagttggagacttggcggatcctataaatcaagttcaaataaaaagagagctttcaaagggattgatcttagaaagaaaaacagttccaattggagtcttaggggttatttttgaatcaaggccagatgcagtgatgcagattagttctttagcaataagatcaggtaatggagtaatgcttaaaggtggcagtgaagccaatctaacaaatactgcaatagttaatgccttacaacaggggttatataaatcaggtcttgataaaaatgcaataggtttat

SEQ ID NO: 215801 - DNA, 562 bp, Unknown
  Bacterial polypeptide expressing nucleotide sequence isolated from the Sargasso Sea
catgactgcgctccgcgccgcgggtgtcgaacttttcggcggtccgcgcggctccaaggagctcaacattccggaggcacctgcgcttcgtcacgaatacgggggattgcagtgcaccgtcgagctcgtgaattcgatggacaacgccatcgattacattcacgcgaacggttccgcgcacacggattgcatcatcacgtccaaccaaaagaccgccgacgagttcatcgcgcgagtcgacagcgcgtgcgtgttccacaacgcatccacgcgcttcagcgatggtttcagattcggtctcggtgcggaggttgggatctctacgtctcgcattcacgcccgtggcccggttggggtcgagggtttgctcaccacgcgatgcttgcttcgtggtaagggtcaaatctgcaataaggacaagggcgtggatttcacgcacaagaggctcccgctcccgaagcgcgagggtctcttcagagctggggctctgcaaaaggtagcgtccagcgtagccctcctagcgaacaccgtcgtggtttttagagcgatgatgaaaaagtaa

SEQ ID NO: 215802 - DNA, 781 bp, Unknown
  Bacterial polypeptide expressing nucleotide sequence isolated from the Sargasso Sea
aaggccgcttattgcccgtttaactttaaacaaagaaaaagtccgcggtatggctcaaggaattcgtagcgtggttgccttacccgatcctgtggggatcaaacaaaaatctatagaactagatgaaaatttgactctacatcaggtgagttgtcccataggggtcattggcgcaatttttgagtctcgacctgatgcagtgccacaaatttcttctctttgtctgaaatctgggaattctgtgattttgaagggagggcgtgaagcgcaaaactcaaataaagttctcgtagctttgttaacagaatccatcaaaaaggtaaccgatgttcctgaggcagcggtgcaaatgattgaaactcgatcagaagttcgggatatgctaaaggaggagaaaaatattaatttaatcgttccgcgaggtagcaacgattttgtaaaatatattcaagacaatacaaaaataccggttttagggcattccgagggaatttgtcacaactatatcgacaaggaagcagatttggataaagcactaaggatcgcactggattcaaagttgcagtacccggctgcctgtaatgcgatggaaaatcttcttgtccaccaggacgttgcgtccgaaattattccgcaattagtagaaaaattcctagaaaaaaatgttgtattgttaggttgcgaaaaatcttgtgtgatttctacggatctctcgccagtattaaaaaacgagtgggacaaggaatataacgacttaaaactttctattaaaattgttgaa

SEQ ID NO: 215803 - DNA, 643 bp, Unknown
  Bacterial polypeptide expressing nucleotide sequence isolated from the Sargasso Sea
ggaggaaaaaatcttattgaaaaaataaattcaaaaagttcaatacctgtaattaaacatcttgatggaatatgtcatgtcttcattgataaagaagcagatattgaaaaagcaaaaaaaattattttgaacagcaaaatgagaagacctgaaatatgtggagcaacagaaaccctactaattgataaaaaaataaaacaaagcacaactaatatattggaatcacttgttcaatctggatgtgaaataagaggagatgaatatatcaaatctttaaatgatgattttaaaatagctactgaggatgattgggggactgaatatcttgataaaatattatctgtaaaactagtagaagacgtaaagggtgctataaatcatattaataaatattcttcaggccatacagaagcgattgttactgaaaatgaagaaacatttaaaatgttttataataatattgatagtgcaataattttaaaaaatgcctctactcaatttgctgatggtggagaatttggttttggtgcagaaatcggaatttctacagataaattgcatgttagagggcctgttggacctcagcacttaacaagttttaaatatatagtccatggcaatggacatgaaaggtctaattgaa

SEQ ID NO: 215804 - DNA, 523 bp, Unknown
  Bacterial polypeptide expressing nucleotide sequence isolated from the Sargasso Sea
aatgctatcgaaactttattagttcataaagatatcgcatcagcttttttagaaaaggccatccccttgtttaattctaatgatgttaaattaattggagataggagatcagttgaattaggattaaaacatgaggctagtgcagaagattggcaaactgaatatttagatttaattctatctataaaaattgttgatgatcttgatgaagcaatcacacatattcaaaaatatagttcaaaacatacagatggaataataactgaaaattcaaatactgctaatagatttatgaatgtagttgatagtgcaggtgtttttcataattgctctacaaggtttgcagatggatttagatatggattcggtgcagaagttgggatatcaacgcaaactcttccaccaaggggacctgtaggtctagaaggtttggtaacctataaatattttctaaaaggtgatgggaatatagttgatgatttttcattaggaaaagctatttatacacataaagatctttaaa

SEQ ID NO: 215805 - DNA, 820 bp, Unknown
  Bacterial polypeptide expressing nucleotide sequence isolated from the Sargasso Sea
ttgtgcttcaaatctggaaattgtgtcattttaagagggggatcagaagcttattttaccaataaaattttagctaactatttccgaacttctctagctaaacacaaaatagataaaaattttgttcaatttattgaaaagaaagataggaaacttgtggattttatgctctcaaaaatgagtaaatatatcgatgtagtaataccaagaggaggtaaaaatttagtcaagaaagttcaagaattatctaatgttgctgtaataggtcatttggaaggtatttgtcatacttacatagataaggacgcaaatttaaatatggcaaaaaaaattgttaaaaatgcaaaaatgagaaacacaagtatttgtggcgccacagaaaccctattgatacacaagaataaactaaaaaatatcaacgaaatattagaagagttaacaaaaaatggttgtaagatttatggtgataaagctataaaaaaaaatttttctggaaaaacattaatagcaaataataaaacttggtctactgaacatttatcatcaaaaatatcagtcaaaattgttcaaaatattttagaagctattgaacatataaacaaatatggaacaatgcacacagatgctattattaccaataataacaaaacagcaaaattttttataaaaagtgtaaatagctctatagcaattcaaaattcttctacacaatttgcagacggaggtgaatttggatttggtggagaagttggaatttcaacaaacaaattgcctcctagagggcctgttggtctaaaccaacttataagttataaatacg

SEQ ID NO: 215806 - DNA, 382 bp, Unknown
  Bacterial polypeptide expressing nucleotide sequence isolated from the Sargasso Sea
atgagtattaaagacaacattttagaattaggtaaaaatgccaaaaaagcctctttggatatgaaattatgtaataacgatcaaaaaaatagagctttatcaaatttaataaaaaatattgcaaaaaataaagataaaattctagaagcaaacagtatcgatttagaaaatggtaaaaaaaaatcactatctaatcctcttataaataggttaactctcacaaacaaatctattgatggattaataaaaagtattgaagatataattactatacaagatccgattggattaactcttgaaaaatgggaacgacctaatggtttaaaatttagaaaaatatcaacaccattaggagttctaggtgtaatttatgaatcaagac

SEQ ID NO: 215807 - DNA, 613 bp, Unknown
  Bacterial polypeptide expressing nucleotide sequence isolated from the Sargasso Sea
atttcgaatgttcatgtaattggtcatttagagggactttgtcatatctacattgataaaactgctgatttaaagatggctgaaaaaatagttctaaattcaaaaatgagaagaactagtatatgtggtgctgtggaaacacttttgatagaagaaaaagcgttaaaatctcatgcagttgaaattataaattcattaaaaaagtctggatgtgaagtaagagtcgataaaaaaattaataaaatatttgaaggtaaattaaaacatgcgattgaaagagattggaaaacagaatatttagatgcaataatctcaattaaaacagtgaaaaatgttcaagaagcagttaggcatgttttaaaatacggtaccatgcacactgatagcataatcactagaaacagcagaaatgcaaaaattttcttaaataatgttaatagttcaatagctatgcataatgtttcgactcaatttgccgacggaggagaatttggttttggaggggagataggcatatcaactaacaaacttccaccaagaggtcctgtaggaattaatcaattaacatcttacaaatatgttgtttcgggtaaaggtattactagaccataat

SEQ ID NO: 215808 - DNA, 610 bp, Unknown
  Bacterial polypeptide expressing nucleotide sequence isolated from the Sargasso Sea
tttcaaagttaatgtgattggacatttagaaggtaattgccatgtttatgttgataaagatgcaaaccttaatatggcaaaaaaaattgtagttaattctaaaatgagaagaacttcaatttgtggtgctgcagaaacattgttaatagataaaaaatgtttaaagtcacatgctattcctatcatagaagaattgatttttttgggttgtgaaattattgcagataacaaaataaataaattatttggtggaaaacttaaattagctaaagaatcagattggaaaacagaatatcttaacccgaaaatagcagttaaagttgttgatggtgttaacgaagctatagagcacatattacgttatggaactatgcatacagactccatagttacaaataacaaaaaaactgcaagtctatttttaaatagaataaatagcgctattgcagtacataatgcatcaactcaatttgctgatggtggagaatttggttttggtggtgaaattggaatatcaactaataaattacctccaagaggccctgttggaattaatcagcttacttcatataagtatatacttgagggcaaaggaagcatcagatcataa

SEQ ID NO: 215809 - DNA, 441 bp, Unknown
  Bacterial polypeptide expressing nucleotide sequence isolated from the Sargasso Sea
attctgtcattttgagaggaggatctgaggcttttaatactaataaaattatttctaatttatttagaaagtctttaaaagtttgcggtgttaatcaaaattacgttcaatttgttaattcaaagaatagaaaaatagtagatattttactatctaaaatgaaaggaaaaattgatttaattatacctagagggggaaaatctttggtgaaaaaagtggatgatctatctacaataccttacattggtcatttggagggtatttgtcatacttatattgataagaaagcaaatcttaaaatggcaattgatattttagaaaatgcaaaaatgagaaatacaagcatttgtggagcaactgaaactgtattatttcacaaaagtattgcaaaaaaatttataaatcctgtgctaaaaaatttacaaaaaaacaggctgtaat

SEQ ID NO: 215810 - DNA, 596 bp, Unknown
  Bacterial polypeptide expressing nucleotide sequence isolated from the Sargasso Sea
tatggcagatatttttgaagttccgaaaccagggaatgatcttttagagaaagctgatcaagttcgtttagcatcaataaaaataagtcagactgaaaataataatagaattcgagccttgaatttcatggctgattatctagaaaagaatactaaagaaattttagaggctaataatgaagactatacaaaggcagaaaagaaaggtatttctaacgctttgctctctagattgaggttatcaaaagaaaaattaaatttaggcattgaaggagtcagaaaagttggcgacttggctgatcctgtggatcaagtccaaattaaaagagagctttccaaaggactgatcctagagaggaaaactgtacctataggtgtcctagggattatttttgaatctagaccggatgctgtcatgcagattagttccctagcaataagatcaggcaatggagttattcttaagggtggtagtgaagctaattcaacaaatactgcaatagtcaaagcattaaaagaaggattacatgaatcaggccttgatgaaaatgcaatatgcttacttacaagcaggaaagatagtatggcgatgttaa

SEQ ID NO: 215811 - DNA, 142 bp, Unknown
  Bacterial polypeptide expressing nucleotide sequence isolated from the Sargasso Sea
ccgttttacagatggtggacaatttggtcttggcggagaattagcgataagcactgataaattgcaccaaagaggcccaattggacttcaacatctcgtaaccaataaatggtacgtgtacggagaaggacaaattagatga

SEQ ID NO: 215812 - DNA, 424 bp, Unknown
  Bacterial polypeptide expressing nucleotide sequence isolated from the Sargasso Sea
agataggagatcagttgaattaggattaaaacatgaagctagtgctgaagattggcaaactgaatatttagatttaattctatctgtaaaaattgttgatgatcttgatgaagcaatcacacatattcaaaaatatagttcaaaacatacagatggaataattactgaaaattcaaatactgccaatagatttatgaatgtagttgatagtgcaggtgtttttcataattgctctacaaggtttgcagatggatttagatatggattcggtgcagaagttggaatatcaactcaaactcttccaccaaggggacctgtaggcctagaaggtttggtaacatataaatattttctaaaaggtgatgggaatatagttgatgatttttcattaggaaaagctatttatacacatgaagatctttaa

SEQ ID NO: 215813 - DNA, 731 bp, Unknown
  Bacterial polypeptide expressing nucleotide sequence isolated from the Sargasso Sea
tcttgtctgttttatcaaaaatactgatcgtagtttgttggaagagttgttaaaagctgaaggagatgtagatgtgattattcctcgtgggggaaaatcgttaattgaaacaatttctaaaaattcaaaagttcctacaattaaacatttggaaggtttgtgtcatactttttgggataaaggatatgataaagataaagccactgaggtcatcgcaaatgccaagctgagaagaccagagatttgtggtgcaacagagactttacttatacactctaataattcagcagcagatatttcatctgttttagataatttaaaatcacaaggatgtgaaattattggatgtagtcgcctcaaagatatttattcaatcgatcgagatgcaacagaagaagattggtcaactgaatatctagataagaaaattacagtaaaactagttgataatgttgaagaatgtgtagaacatataaacaaatattctagtggacataccgagagttgtttaagcaacaatcaacaatctatagagtatttctttcaaaactgtaaaagtgccattttaatgaataatgcttccactcaatttgctgatggtggagagtttggatttggagcagaaataggtatttctactgacaagcttcatgtgagagggccagtaggagcaaaacacttaacaacatttaaatatcaagtaataggcaatcacaccacaaggccttaat

SEQ ID NO: 215814 - DNA, 538 bp, Unknown
  Bacterial polypeptide expressing nucleotide sequence isolated from the Sargasso Sea
caattttctaggatttattttttatgaaaatagtccaaggaatgtaaataatgatttcttaaggacgattaatcaaacagattttaaagataaaaaaccagtatgtgtttatgtgaatgcatctgaggagtttgtcagagaaacttcatcatattttaaaaatcctcttctccaattccatggagatgagacaaatacattctgtaaattattcaaaaaagaattttggaaagttataagattcaaggatgttaattgtcttgataaaattcatatgtatccagatgcttcagggattttgttagaaaattatcaaaagggtgtgcatggaggcactggaaaatcatttaattggcagcttattccaaaaaaagtattaaaagagcataaaattattttatcaggtggcattaattcaaaaaatgttgataatgctataggtatagacccatggtgcattgatattaattcgggtgttgagtccacaaaaggcgtaaaagaaataaaactgattaaagagatttttaaaaatttttaa

SEQ ID NO: 215815 - DNA, 753 bp, Unknown
  Bacterial polypeptide expressing nucleotide sequence isolated from the Sargasso Sea
aatgtcatttaaagaagcacaacttcccagtgatatagcgcagatgattccttcaacagatagagaggcagttgattgtctattggcgatggataactatgtaaatgtaatcattccaaggggtggaaaaagcttgataaaaaaaataaatgacaaaagtagaatacctgtaatcaaacatttggaaggtctttgtcatatctatgtagataaggaggctaatttagattttgctaaaaaaattatttttaatagtaaattaagaaggccagaaatatgtggtgctgctgaaaccctgctaatagataacgctcttgaagataaagcccttgaattaattaaacctttatatgacgcaggttgtataattaaaggagataagtttattaaatctctcgatcctaattttgaaatggcaagcgatacagattggtcaacagaatatttagacaaaattataagtgtaaagattgttaaaggtgtaatgggtgctatagaacatataaataattattcttctaatcatacagagtcaattattacagagaatgaaaaaactttttctgatttttataataacattgacagtgcgataatattaaaaaatgcttctacacaatttgctgatggtggagagtttggctttggagctgaaattggtatttcaacagataaacttcatgtacgtggtcctgttggagctaaacattttacacatttaaatacattgttcatggtaacggacaatcaagg

SEQ ID NO: 215816 - DNA, 566 bp, Unknown
  Bacterial polypeptide expressing nucleotide sequence isolated from the Sargasso Sea
tcatacatacatgataaaaagtgctgatctcaatacttcgatatcagtggtaacgaatgcaaaaatgagacgacctgggatttgcggtgctctggaaactttgttgattcataaagatcaaagcgaacagttaaataatattctagatagcctgatagaagcaggatgtgaaattcgcggttgtgaaaaaaccttaaatcttgatgatcgagcaagcctagcaaatgatattgattgggattcagaatatttaagcccaatccttagtgtaaaaattgttgatgatatagatgaggcgattgagcacattcaaaaacatggcacgggtcatactgatgtgatcattagtgaagacaaaaattctcaagactattttattaatcaactggacagtgcgatattgatgatcaatgcgtcatctcagtttgccgatggtggtgaatttggcatgggtggagaaattggaattgctactggaaaatttcatgcccgtgggcctgtaagtcttgaacagctgacaagttttaaatatgtggtgcgcggctcaggacagactcgtagttaat

SEQ ID NO: 215817 - DNA, 235 bp, Unknown
  Bacterial polypeptide expressing nucleotide sequence isolated from the Sargasso Sea
tgaaacaatagttacagagaataagctcacagcagaaaagtttttaaatcacgttgatagtgcaattgttatgcataacgcctcaacccaatttgctgatgggggtgaatttggcatgggagcagaaataggcatttcaactgggagacttcatgccagagggcctgtagggtcagaacaattaacaagttttaaatatattgtcagaggaaccggccaaataaggaacatttaa

SEQ ID NO: 215818 - DNA, 350 bp, Unknown
  Bacterial polypeptide expressing nucleotide sequence isolated from the Sargasso Sea
agatgcaacagaagaagattggtcaactgaatatctagataagaaaattacagtaaaactagttgataatattgaagaatgtgtagagcatataaacaaatattctagtggacataccgagagttgtttaagtaacaatcaacaatctatagagtatttctttcaaaactgtaaaagtgccattttaatgaataatgcttccactcaatttgctgatggtggagaattcggatttggagcagaaataggtatttctactgacaagcttcatgtgagagggccagtaggagcaaaacacctaacaacatttaaatatcaagtaataggcaatcacaccactaggccttaat

SEQ ID NO: 215819 - DNA, 661 bp, Unknown
  Bacterial polypeptide expressing nucleotide sequence isolated from the Sargasso Sea
cgtaaatgttatcattccaagaggtggaaaaaatttaataaaaaaaataaatgacaaaagtagaatacctgtgatcaaacatctagaaggtctttgtcatatctatgtagataaggaggccaatttagatattgctaaaaaaattatttttaatagtaaattaagaagaccagaaatatgtggtgctgctgagaccctactaatagataacaccattaaagataaagctcttggattaattaaacctttatatgatgcaggatgtataattagaggagataattttattaaagcgcttgatcctaagtttgaaatggctactaatacagattggtcaacagagtatttagataagataataagtgtgaagattgttgatggtgtgaagggcgcaatagagcacataaatgattattcttctaatcatacagagtcaattattacggagaatgaaaaaactttttctgatttttacaataacattgatagtgcaataatattaaaaaatgcatctacacaatttgctgatggcggagaatttggctttggagctgagattggtatttcaacagacaaacttcatgtgcgtggacctgttggggctaaacatttaacaacttttaaatacattgttcatggaaatggacaatcaaggaattaa

SEQ ID NO: 215820 - DNA, 367 bp, Unknown
  Bacterial polypeptide expressing nucleotide sequence isolated from the Sargasso Sea
atttattctatcgatcgagatgcaacagaagaagattggtcaactgaatatctagataagaaaattacagtaaaactagttgataacgttgaagaatgtgtagagcatataaacaaatattctagtggacataccgagagttgtttaagtaacaatcaacagtctatagagtatttctttcaaaactgtaagagtgccattttaatgaataatgcttccactcaatttgctgatggaggagaattcggatttggtgcagagataggtatttctactgacaagcttcatgtgagagggccagtaggagcaaagcacctaacaacatttaaatatcaagtaataggcaatcataccactaggccttaat

SEQ ID NO: 215821 - DNA, 574 bp, Unknown
  Bacterial polypeptide expressing nucleotide sequence isolated from the Sargasso Sea
ttgtcatacttatatagataaagatgctgatttaaaaatggctattaaagtagttcataacgcaaaattaagaaatactagtatctgtggagctacagaaactatattaatgcataaaagtattgttaaaaagttttgtaatccaattttaaataaattaaccgaaagtaattgtgaaataattgctgacaaggtaataagggaagcttttaaaggtccatcaaaaaaatctaataaaaaaagttggtctaccgaatatctatctccaaaagtttcagttaaaacagtgaacaacatcgatgaagcaatctatcatattaataagtttggaaccatgcatacagacagtatcataagtaaaaataaaaaaagtgcagattactttttaaataaaattaaaagttcgatagctatgcataatacttcaacacaatttgcagatggaggagaatttggtttcggtggagaagttggtatttcaacaaatactctgccgcctagaggtccggttggattaaatcaattgacatcttttaaatactttgttttaggcaatggtcaaattagaaaataa

SEQ ID NO: 215822 - DNA, 395 bp, Unknown
  Bacterial polypeptide expressing nucleotide sequence isolated from the Sargasso Sea
aatgagtaaaactttagaaaaaattggttcaaatgcaaaaattgcttttcaaaacaaaataagtaataaaagaaaaaatcaagtattaaattattatattcaactcattttaaaaaaccaaaataaaattttggtcgaaaacgcaaaagatataaaagttgccaaatctaaaaaacttaaagagaatttaattaaaagacttgctcttaataatgataaaataagagcaattattaagtcaattaaaactatttcaaaatttaaggatccagtagatgttgatatagaaacctggaaaagaccaaacggcttaaaactaaagaaggtatcaattccaattggtattattggtgtagtttatgaaagtagaccaaatgttacttcagatgtatcca

SEQ ID NO: 215823 - DNA, 595 bp, Unknown
  Bacterial polypeptide expressing nucleotide sequence isolated from the Sargasso Sea
attgggcatttgggaaggaaactgccatgtatatgttgataaggatgctgatcttaatatggcaaaaaaagttgttttaaattcaaaaatgcgaagaacttctatttgtggcgcagcagaaactttattgattcatgataaatgtttaaagtctcactcgcttccaattattagagaactaatcttaaaaggatgtgatgtattagtggataaaaagattaataaatatttcaaaaataaattaaaatttgcaaatgagaatgattggagaactgaatatttatcacctaaaatatctataaagagtgtaaatggagttaatgacgctattgcccatatattaaaatatggaactatgcatactgatgctattataactcgaaatattaaaacagcaaaaatatttttaaatggaataaacagttctattgctgttcataatgcttcaactcaatttgcagatggaggtgagtttggatttggtggagaaatcggtatatctacaaataaattacctccaagaggtcctgttgggataaatcaacttacttcttacaaatatatggtcacaggaaaaggaacgatcagaccgtag

SEQ ID NO: 215824 - DNA, 630 bp, Unknown
  Bacterial polypeptide expressing nucleotide sequence isolated from the Sargasso Sea
taaaaaaagttcaaaatttatctaaagttcctataatcggacacttagaaggaatttgtcatacctatattgataaagatgctgatttaaaaatggctgttaaaattgttcataatgcaaaattaagaaatactagcatttgtggagccacagaaactatattaatgcacaaaaaaattgttaagaaattctgtaatcctgttttaagtaaattaactgaaaataaatgtgaagtaatttgtgataaaataataagacaaaattttaaaggtccatcaaaaaaatcaaatttaaaaagttggtctactgaatacttgtcttcaaaagtttcagtaaaaacagtaaataacattgatgatgcaattaaccatattaataagtttggaactatgcatacagatagtatcataagcaaaaataaaaaaagggcagaatattttttaaaaaatattaagagttctatagctatgcataatacttcaacacaatttgcagatggaggagaattcggttttggtggagaagtaggtatttcaacaaatattctgccaccaagaggtcctgttggattaaatcagctaacttcttttaaatatgtagttttaggcaatggccaaattagaaaataga

SEQ ID NO: 215825 - DNA, 185 bp, Unknown
  Bacterial polypeptide expressing nucleotide sequence isolated from the Sargasso Sea
aaatattaaaagttcaatagctatgcataatacctcaactcaatttgcagatggtggagaatttggttttgggggagaagtaggtatttcaacaaatactttgcctcctcggggtcctgttggattaaatcaattaacttcatttaaatatgcagttttaggcaatggtcaaattagaaaataaa

SEQ ID NO: 215826 - DNA, 346 bp, Unknown
  Bacterial polypeptide expressing nucleotide sequence isolated from the Sargasso Sea
atggattctttaggttcattggccaaggacgcgtcaaggattctcgctcaggcttctgaagaacaaaaaaatgaagctttgttaaatataggtaagacaattgatttaaaacgacaagatattctaaatgagaacataaaagatttagctgaagctaagaaaaaacagataggagatgctttggttgatcggctggaattgactgaagagagaatagactccatgatttcaggcttaaaggtagtatctgatttacccgatccagtgggagaaattactgatttaaaacctactccttcagggatcgatgtaagcaaaatgagagttccgttaggagttgtaggta

SEQ ID NO: 215827 - DNA, 775 bp, Unknown
  Bacterial polypeptide expressing nucleotide sequence isolated from the Sargasso Sea
cttaaaaaaaataagattaatcccaatgctgttcaatatttaaaagatccagacagaaaatatattaatgaaatgttaagcatggacgaatatatagatttggttataccaaggggcggtaaagaacttgtaaataatgtttcaaaaaatgcaaaaatgcgagccatttttggtggaataggagtaagtcatttatttgtagatgagaaaattgacgaaaaatctctccttccaattttagaaaatgcaaaaactcaggcaccaagtgtttgtaatgcattagacacaatcttgcttcatgaaaagcaacaaaataaattgcttcccaaaataattaatcactttgttgggcttggaattgaaatgagaattcaaccaaagttatttcaaagcgcaaaaaaaataaattcatctagattaataaaaaaggcatcagataatgactggggacaagaatatctaaatttaatagtttccttaaagacggtttcttctattgaagaggctataaaacatattgataaacatagttatggtcatactgacgggataatttcagacatagcaaaaaatcaaaaaatatttactgaaaaagtaaattcttcagccgtaaccgtaaatgcatcgaccagatttaatgatggcggagaattggggcttggggctgaaattgcaattagcaccactaaagtttctcctagaggacctttgggactaagtgaaattacatcatataaatggataattacagggaaaggtcatatcagatcctagt

SEQ ID NO: 215828 - DNA, 601 bp, Unknown
  Bacterial polypeptide expressing nucleotide sequence isolated from the Sargasso Sea
aatgcctgtcctcaaacatttttctggaaactgtcatctttatgttgataaagatgccgacctcaacatggcacggtcgattactgtcaatgcaaagtgtcaacgcatgggagtttgcaatgcagccgagtctctcatcgtccacaaggagatctctgctgccttccttccggagtgctccaatgaacttgcagcccagggaattgaaatccgtgcagatgaatctgcacgggtgcttataccatctgcaaccaaggcctcagagtccgattatgcaactgaatatctgggtccaaaaatctctgtcgttgtcgttgattcacttgattctgcaatacgtcatatcaatcagtatggctcacgccatactgatgcgatcatctccaacaatcaaaacgccatagataggtttactaattgtgttgatactgctgctgtcatggtgaatacaagcacccgattcaatgacggcggagaacttggccttggagccgagatcggaatatcaaccgacaagcttcatgcccgtgggccctgtgggataaaggaactcaccacatacaaatacgttgtcaccggaacagggcaggttcgaacatga

SEQ ID NO: 215829 - DNA, 346 bp, Unknown
  Bacterial polypeptide expressing nucleotide sequence isolated from the Sargasso Sea
atggattctttaggttcattggccaaggacgcgtcaaggattctcgctcagacttctgaagaacaaaaaaatgaagccttattaaatatagctaagacaattgatttaaaacgacaagatattctaaatgagaacataaaagatttagctgaagctaagaaaaagcagataggagatgctttgattgatcggttggaattgactgaagagagaatagactccatgatttcaggtttaaaggtagtatctgatttacctgatccagtgggagaaattactgatttagaacctactccttcagggatcgatgtaagcaaaatgagagttccgttaggagttgtaggta

SEQ ID NO: 215830 - DNA, 476 bp, Unknown
  Bacterial polypeptide expressing nucleotide sequence isolated from the Sargasso Sea
tgaaacaatacttattaatgaacagatcacttcttcttttatgcctaaacttgtagcctctctatctgatgctgagtgtgaaataagatgttgtgataaaactattggttttgatgatagagcctcgctcgcttcagaggatgattggtttacagaatacctggcaccaattgtcagcgtaaaatctgtcacaggaattgatgaggccatcacccatattgaaaaatatggaacaggtcataccgagtctattataagtgaaaacaaggaagctcaattaaaatttactcattcgattgatagtgcaattgtaatgattaatgcatcaactcaatttgctgatggtggtgagtttggtcttggcggagaaataggcattgcaacaggaaaattccatgcaagaggcccagttggtgttgatcaacttacaagttttaagtatatcgtctcaggtgatggccagataagggattgag

SEQ ID NO: 215831 - DNA, 375 bp, Unknown
  Bacterial polypeptide expressing nucleotide sequence isolated from the Sargasso Sea
cacaaaaattatcaacaattgcagttgcagcaaacgcagaggactggagcacagagtatcttcttccaatagtgagtgtaaaaattgttaaagacattgaagaggcaattcaacatattgaacatttttcaactggtcatactgaatcaattattactgagaatcttaaccatgcatcaatatttcaaaaaagtcttgatagcgcaatagttatgcataacgcatcaacacaatttgctgatggtggtgaatttgggttaggtggtgagattggcatagcaactggtaagtttcatgcaagaggtcctgtaggtgtagatcaattaacaagttttaaatatcttgttaatggtgacggacacactagaccataat

SEQ ID NO: 215832 - DNA, 1330 bp, Unknown
  Bacterial polypeptide expressing nucleotide sequence isolated from the Sargasso Sea
atggatatcaaaacagcgttagacaccgcatttaatgccagtactcaatttcattcgtttgaaaagctctcgtcatttttagacccgtctattattgatgaagcctttgtcgaagcaggtgttgcaaccgttagaaagcgccgcttaccgcttgaatcggtaatgtggtgtgtcatgggaatgagtctttttaggcaagaatcagtgtggaatatcgctactaagatggatatcgctttgcccggcaaagcaccgctggtagcgccaagcgctatggttcaagcgcgacagcgcttgggaactgaggccgttgaacagtcttttaaaaagatggcgaaacattggtatcaacaaaatgaattcgaaacatggaacggcctgaatttacttggtgtcgatggtgtcgtttggcgaacggctgatactgcagagaaccgtgaaaaatatggttctggcagcacacaatatggcgatacagcctttcctcagattcgcatggtctgccagatggaactgacaagtcatcaacttgtaaacagtgcgttcgataaatataagtctaacgaaatggtgctagccgagcagctaattgaagacacgcctaatcactcgctcactatgtttgaccgtggtttttattcgttgggcttactccaccaatggcatagcgagggacaagaaagacactggatgatacccgccagaaaagggctccagcttgatgtattagagagctatagccgcgttgataagcgggtgaaactaacaaccacacctcaagcgagaaagaaattccccacgcttcccgatgagattgaagcgcgactcattacgaagaaaattagaggaaaagagtgtcgaattctcacatctcttaccgatgtcatgtgttatcccagtgacgagattgtagacttatacagtcatcgctgggaaattgaattagggtaccgagagatgaagcagacgctgctgaatagtgaatacacgcttcgaagtaagcggcctgacatggttgagcaggagttatggggattactactggcttataacctgatacgagtggcaatgactgaagctgcactacgtaaaggcatctggcctaatcaactaagcttcagtggatgttctagcgcagtggttgcattccttcttacaacagcgcttacgagccccgggaagctgcccgtgttatatgaaaaccttatcaatcagctgacttactacgagctaccgacacggcgagaagacagattatatccacgatgtgttaaacccaaaccgagtaagtaccccgctaaaaagaaaaatgccagtcagcttaactgac

SEQ ID NO: 215833 - DNA, 499 bp, Unknown
  Bacterial polypeptide expressing nucleotide sequence isolated from the Sargasso Sea
atggctaatatctttgaagtccctcagccagataatgatcttctagaaaaaactgagaaagttcgtttggcatcaataaaaataagtcagactgaaaatcaaaatcgaattaaagccttaaattttatggctgattatctagaaaaaaattctaaagaaatattagaggctaataatgcggattatttaaatgcagaaaaaaagggtatttctagtgctttactttctagattaaagttatcaaaatcaaaattaaattcaggaattgaaggggtaagaaaagttggtgaattggctgatcctgtaaatcaagttcaaataaaaagagagctttcaaaggggttgatcttagagagaaaaactgtgccaattggagttttaggggttatttttgaatcaaggccagatgccgtgatgcagattagttctttagcaataagatcaggtaatggagtaatgctaaaaggtggtagtgaagcttatttaacaaatgcttcaa

SEQ ID NO: 215834 - DNA, 205 bp, Unknown
  Bacterial polypeptide expressing nucleotide sequence isolated from the Sargasso Sea
tgcagtgagatttcaaaagatatagatagcgcaatagttatgcataatacatctacacaatttgcagatggtggtgaatttggtttgggtggtgagataggaatagctacaggaaaatttcatgcaagaggtcctgtcggtgtagatcaattaactagttttaaatacttagttaatggaagtggacacattagaggtaaataaa

SEQ ID NO: 215835 - DNA, 890 bp, Unknown
  Bacterial polypeptide expressing nucleotide sequence isolated from the Sargasso Sea
agtagacctaatgttaccatcggatgtttcaagtttatgttttaaatcgggcaacgtagtaattttaagaggtggctcagaagcatacaactctaatagaatccttgctaatttatttagaaatgcactaaaaataaataatattgaccagaactacgttcaaatattaaaaaataaaaatagaaaatctgtagattatttactatctaaaatggaaaaatttattgatgttattattccgagaggtggcaaaaacttagttaaaaaagtaaaagatttatcgtcagttccaataattggacatctagaaggaatttgtcatacttatattgataaagatgcagatttaaatatggcaataaaagttgttcataatgcaaaattaagaaatgccagtatatgtggtgcaacagaaacaatattgatgcataataaaattataaaaaaattttgcaatccagtgctagaaaaattaacaaaaaataattgtaaaatatttgctgatagaactgttagaaaaaactttaatggtaaatctaatcttgcaaaagaaaaaaattggtcaactgaatatttgtctgcaaaagtatcggtcaaatcagtaaataatattttagaagctgttaaccatattaataaatacggtacaatgcacacggatagtataattacaaaaaataaaaaaaatgcagatttctttttaaaaaatattaaaagttcaatagtaatgcataatacttcaacacaatttgctgatggtggagagtttggattcggaggagaagtaggaatttcaactaataaacttccacctagaggaccagtgggtttaaatcaattaatttcatataaatatgaagttcttggaaaaggacaaataagaaattaaa

SEQ ID NO: 215836 - DNA, 316 bp, Unknown
  Bacterial polypeptide expressing nucleotide sequence isolated from the Sargasso Sea
gctcccattctctccataaaagttgttgaagatatgagcgaagccatagatcatattcaaaagtacggatcacaacatacagattcaatagtcactgaagacaaaaataaagctgaatacttttttaaaaacgtggactcaagttctgttatgcataacttgcccacatgctgggctgatgggtttgagtatggactaggagctgaagttggaatttctactgataagattcatgcaaggggtcccgtgggcttagagggactaacgtcacaaaagtttattgtgaaaggtaattcaaacttaagaggagtttaaa

SEQ ID NO: 215837 - DNA, 918 bp, Unknown
  Bacterial polypeptide expressing nucleotide sequence isolated from the Sargasso Sea
tgaggtaaaaaataaagtcttaaatgattatgcaaaattcattaagaatgaaaaaaaattaattattagtcaaaatttaaaagatattaattacgcaagaaaaaaagggttaaaagagaacttaattaaaagacttcatttaaatgaaaataaattaaatggaattataaattctattttaaaaatagccaaattaagggatcctatagacatcactttagaaaaatggaaaagaccaaacggtttgcatataaaaagagtatcaataccaattggagttattggtgttatttatgaaagtagaccaaatgtaacttcagatgttgctagtctttgttttaaatctggaaatgtagtgattttgaaaggaggctctgaagccataaattcaaataaagttttagctaagttttttagaaaagcgcttaaaaaaaataaagttgatgaaaactttattcaatttatcgattcaaaacaaagaaaactcgtagatataatgctttctaaaatgaaaaaatatatcgatgtaatcatacctcgtggtggaaaaaatttggttaaaaaagttttagaattatccaaagtgcctataattggacacttagaggggctttgtcatacttatatagataaagatgcagaattaaaaatggctaaagaagttgtctataacgctaaattaagaaatacaagtatttgtggtgcaactgaaactattcttattcataaaaatatagtcaaaaaatttagtaatcctattttgcaggaacttgaaaatagtggttgtaaaataattggcgataagattttgaaaagttattacaaaggtcaagtatatcctgcaaaagaaaaagattggtcaactgaatatttgacatcaattgtatctgttaaagttgttaaaaattctgaagaagc

SEQ ID NO: 215838 - DNA, 748 bp, Unknown
  Bacterial polypeptide expressing nucleotide sequence isolated from the Sargasso Sea
atgaatatcttagaaacaataaacgaattaagtataaaagctaaagatgcatctattaaaattagagtattacaaaaagaaaaaaaaatggcggcttatgaatgtttagaaaaaaatattgaaaagagtgctgaccttatcttatcttcaaataaattggatattgaaaatgctataaaaaatgatttatcaaaaccactaatcaatcgtttaaaagttacggaagaatccatattgggtataattaaaagtataaatgaaattaaaaaccaaccagatccaattggaagagttttagagaactgggaacaaccaaatggacttaaattttcaaaaatatcagtacctttaggtgtattaggagtaatctatgaatcaagaccaaatgtgacagtagatgcctcgtgcctcgcattaaaatctaataatgcactaatcctaagaggcggaagtgatagctatcatacttcaaaacaattagttaatattatacaagagtcttttatagaggctaatcttccagaaaatataattcaaatgataccgacaactgatagagaggctgttgatcatctattagcgatgaaagattatgttaatgttataattcctaggggaggaaaaagtttaattaaaaaaattaatgaaaagagtaaaatacctgtaattaaacacttagaaggtttgtgtcatgtgtatgttgataaagaaaaagatattgaaattgcaaagaatattatttttaata

SEQ ID NO: 215839 - DNA, 393 bp, Unknown
  Bacterial polypeptide expressing nucleotide sequence isolated from the Sargasso Sea
catggcagctagatcactttctaatattcagcgggtaatgattatcaaaaaaattattaataatttaaaaaataataataaaataatcatcaagaaaaactcaatagatattaaattagcaaagcaaaataatctatcagatgcgcttatagatagacttcttatcaatagtgatagagttaaaactatgataaatggactcgaagaaataaatacaataccagacacgctttataaaaaaattaataaatctaaacaatctagcggaataactgtcgaacaaatgagagtacctttgggcgttattgctatggtctacgaatcacgaccaaatgttacaatcgacgcggcaggcttatcattaaaatctggtaatagcattattctaagagg

SEQ ID NO: 215840 - DNA, 555 bp, Unknown
  Bacterial polypeptide expressing nucleotide sequence isolated from the Sargasso Sea
tatgaatttaattggaataaaagctcgaaaagctagtgagtataaagttacaactgaagtaaaaaataaagtcttaaatgattacgctaaattaattaagaatgaaaaaaaatttattattaatcaaaattcaaaagacattaattacgcaaaaaaaaaggggttaaaagagaacttaatcaaaagacttcatttaaatgaaaataaattaaatggaattataaattctattttaaaaatagctaaattaagggatcctattgacaacactttagacaaatggaaaagaccaaatggtttgagcataaaaagagtatcaataccaattggagttattggtgttatttatgaaagtagaccaaatgtaacttcagatgttgctagtctttgttttaaatctggaaatgtagtgattttgaaaggaggctctgaggccataaattcaaataaagctttagctaacttgtttagaaaagcacttaaaaaaaataaagttgatgaaaactttattcaatttatcgactcaaaacaaagaaaattagtagatataatgct

SEQ ID NO: 215841 - DNA, 889 bp, Unknown
  Bacterial polypeptide expressing nucleotide sequence isolated from the Sargasso Sea
atagatagcactttagaaaaatggaaaagaccaaatggtttgaatattaaaagagtgtcaataccaattggagttattggggttatttatgaaagtagaccaaatgtaacttcagatgttgctagtctttgttttaaatctggaaatgtagtgattttgaaaggaggctctgaggccataaattcaaataaagctttagctaagttgtttagaaaagcacttaaaaaaaataaagttaatgaaaactttatacaatttattgattcaacacaaaggaggcttgtggatattatgctttctaagatgaaaaaatatatcgatgtcatcatacctcgtggtggaaaaaatttagttaaaaaagttttagaattatccaaagtacctataattgggcacttagaggggctttgtcatacttatatagataaagatgcagaattaaaaatggctaaagaagttgtctataacgctaaattaagaaatacaagtatttgtggtgcgactgaaactattcttattcataaaaatatagtcaaaaaatttagtaatcctattttgcagaaacttgaaaatagtggttgtaaaataattggcgataagattttgaaaagttactacaatggtcaaatatatcccgcaaaagaaaaagattggtcaactgaatatttatcatccattgtatctgttaaagttgttaaaaattctgaagaggcaattaagcatattaacaaatacggaactatgcacactgactccatcattacaaaaaataaaaagacagcaaaatatttcctaaaaaatgttaaaagctcaattgcaatgcataatacctcaactcaatttgctgatggtggtgaatttggatttggtggagaagttggaatttcta

SEQ ID NO: 215842 - DNA, 816 bp, Unknown
  Bacterial polypeptide expressing nucleotide sequence isolated from the Sargasso Sea
aatgagaaattatttacttaaactaggtgtacaagctaaaaaggcttcaattgaagcaattaaagcagataagaaacaaaaagttttaaaagattattgcaatttactattaaaaaatcaatcaaagattatttctgcaaataaaaaagatttaaaaaaggcaataaagaaaaaacttaaagaaaatcttattaatagacttttaatagataaaaaaaatatattacaaattataagctcaattaaaactattataaaatttaaagatccagttggccaaactttagaaaaatggaaaagaccaaatggattaaaaattgcaaaaacgacaactccgatcggtgtagttgcagtaatttatgaaagtagaccaaatgttacatctgatgttgcatctttatgtttcaaatctggtaatccagtaattttaaaaggaggatcagaagcatataattctaataaagtttttgtgaatttatttagaaaagctcttcaaaaaaacaaattaaataagaactatgtacaatttattgaattaaaaaatagaaaagttgttgattttttattaactaaaatgactaaatccatagatgtagttataccaagaggtggtaaaagtttagtaaataaagtacaaaaattttcaaaaatacctacgattggccatctcgagggtgtatgtcatacttatattgataaaaatgcaaatttattaatggcaaaaaaaattactttaaatgctaaactaagaaatactgcaatatgtggagcaaccgaaactattctaatccataatgatttattaaaaaaattttg

SEQ ID NO: 215843 - DNA, 652 bp, Unknown
  Bacterial polypeptide expressing nucleotide sequence isolated from the Sargasso Sea
atgaacgccctcaacgtcgctgaatacacgcactctctcggtctccaggcaaaaacggcctctgcgctgatggccaaagcgccggcagctatcaaaaacaaagcgctcaaggcgctcgcccggttgctgcgcgagaacgtggcccagctccagatcgacaatgccaaagacctggagcgcgccgtggccaatgggttggcgggcccgatggtggaccggctcaagctcacccccaaggtgctggagacttgtgccgagggctgcgagcagctggccgccatgcccgacatcattggcgagatcctgggcatgaagcagcagcccagcggcatccgcgtgggccagatgcgggtgccgatcggcgtgttcggcatgatttacgagagccgtcccaacgtcaccattgaggcggccagcctcagcatcaagagcggcaacgcctgcatcttgcgtggcggctccgaggcgattgattcaaacaaggcactggccaagctggtgcagcaggcgctggccgaggcggggctgccgcaagacgcggtgcaactggtgcagaccaccgaccgcgaggccgtgggccagctcattgcaatgccgcagttttgtggacgtgatcatcccgcgcggtggcaaggggctgatcgaacgcatc

SEQ ID NO: 215844 - DNA, 738 bp, Unknown
  Bacterial polypeptide expressing nucleotide sequence isolated from the Sargasso Sea
tttgataaaaatagtaaaaaattcaagaatagcttttgaaagtaaagttagttcaattaaaaaagataaagcattaaaagaattttcaaaacttattttaaaaaataaaaaaagaattttgaaagaaaattataaagatataaattatgctagaaaaaaaaagctaaacgagaatttaatcaaaaggttagaattaaatgaaaaaaaaattaattctataattcagtctattaatcaaataagaaaaataaaagatccaacagataaagtcttagaaaaatggaaaaggccaaatggattaataataaaaaaagttactataccgataggtattataagtgtgatttatgaaagtagaccaaacgtaacatctgatgtagctagtctatgctttaaatcaggaaacgctgttatattgaaaggtggttctgaggcttttaatacaaataaaattatttctaatttatttagagcctctttaaaaagctgtagaataaatcaaaattatgtgcaatttatacaaactaaaaatagaaagatagtagatataatactttctaaaatgaaaggttacattgatttagtaattccacgtggtggcaaatcgttagtgaaaaaggtagatcaattatcgacaattccatatataggacatttggagggaatttgtcatacatacattgataagaaagcaaatctcaaaatggcaattaaggtcttagaaaatgcaaagatgag

SEQ ID NO: 215845 - DNA, 733 bp, Unknown
  Bacterial polypeptide expressing nucleotide sequence isolated from the Sargasso Sea
ttcaaaagtaacaaccccaataggggtgataagtgttatttatgaaagcagacctaatgttacttctgatgtggccgctttatgttttaaatctggaaatcctgttattttaaaaggtggatcagaagcttattattccaataaaattctatccaatctttttagaaaagctcttgaaaaaaataaagtaaataagaactatgttcagtttgttaatcataaaaatcgtaaagttgttgattttatattatctaaaatgaataagttcatagatgtaataattccaagaggtggaaaaagtttagtaaaaaaagttcaagatttatctggaataccagtaattggacatttagagggagtttgtcatacctatgttgattttgaagcagacctaaaacttgccaacaatgttgttataaatgcaaaattaagaaacactgctatttgtggagctacagaaactattttagtacataaaaagatattaaaaaaattttgtaatttagttttattaaatcttaaaaataatggatgtaaaattattgcagatagtaaaattaaaaaaaattttataggaaaaattatttctgcaaaagaaagtgattggtcaaaagaataccttgcgcctattgtatcagttaaaactgtaagtaatgttgaagaagcaataaaacatataaataaatatggaacaatgcatacagatgctatcattacaaaaaattcaaaagtt

SEQ ID NO: 215846 - DNA, 349 bp, Unknown
  Bacterial polypeptide expressing nucleotide sequence isolated from the Sargasso Sea
ttctataaaaactgtcaaatctgcagaagaagcagtagaacacatcagcaaatttggatccaaacatacagaagcaattataactgaagattctggccttgcagagtggttcatgaaaactgttgatgcggcaggagtattctggaatgcatcaacccgttttgctgacggttttcgttatggtttaggagcagaggtaggggtaagtactggaaaaacccatgcccgtggtcctgtaggacttgaggggcttgtaatttacaaatacaaattatatggtaatggccatgtcgcccgcaattacgctgaaggcaaaaaagattttatacatacagaaattaaaatgtaa

SEQ ID NO: 215847 - DNA, 622 bp, Unknown
  Bacterial polypeptide expressing nucleotide sequence isolated from the Sargasso Sea
atgagcgactattttcaagaaattttaaaccattcgaagagggcatcgagtgctatgtccaaactatctgcagaggatagaagtagaattttaatgaatattagtggttttctattatctaataaaaatgaaattctaaaagctaatcaagcagatgtagaaagagctaaatcaaataatatttctgcacctatgattaatagattagttttgacttcagagaaaatagatcaactttctcgtgacgttgagaaaatagctcaaatgcaagatccccttgatcaaactttagaaagttggaccaatgccactaatgggttacaatttacaaaagtttcagtgcctattggtgtgattggtattatttatgagtctcgacctaatgtcacaatagatgctgcatgtctttgccttagatctggaaatatttctattcttagaggaggctctgagtgtatcgaaactaataaaaaactttatgagtgcattcaagaggctttaaaagatttaaattttgatactcatcttgtctgtttcattcaaaatactgatcgtagttttgttgaagagttgttaaaagctgaaggagatatagatgtgattattcctcgtgggggaaaat

SEQ ID NO: 215848 - DNA, 577 bp, Unknown
  Bacterial polypeptide expressing nucleotide sequence isolated from the Sargasso Sea
atgaagtatttaaaaaaaataggcataaatgcaagaaaggcttttgaagaactaagagaagtaaaccataataaaattaaatcaacactaaatacttataactccaccattttaaaaaataaaaaaaagataataaaagagaatttaaaagatgttagaaatgtaaaaagaaaacatttaactgatagattaatcttaaatgataaaaggattgagggaattagacattctattaatgaaatagccaaatttaaaaatcctgtaggtcgtattttagaaaaatgggaaagaccaaataaacttaaaattcaaaaagtttctactcctattggagttataggtgtaatttatgagagtagacctaatgttacagctgatgttgcagctttaagtttgaaatctggaaattgttgtattttaagaggagggacagaagcctacaactcgaacaagttgctcacaaacttatttcgacaatcattaagtaaaaataatattaatcaaaactgtgttcaatttatagaaaaaaaggaaagaaaaattgttgatgcccttctttctaaaatgtctaattata

SEQ ID NO: 215849 - DNA, 397 bp, Unknown
  Bacterial polypeptide expressing nucleotide sequence isolated from the Sargasso Sea
atgaaaaattatcttatcaaattagggaaaaaggcaaaaaaggcttctattaaatctgtaacatctaaaaaaaaagataaagtccttcaagattattacaatttaatatttaaaaatcagtcaagcattattaaagaaaataaaaaagacataaagcaagctaaaaataaaagattaaaagaaaatcttattaaaaggcttctaattgataaaaaaaaaattttacaaattttaaaatcaataagaatgattaaaagatttaaagatccagttaaccaagtattagaaagctggaaaagatctaatggtcttaaaatatctaaagtaacaacttcaataggagttatagctgtaatttatgaaagcagacctaatgttacctcggacgttgcctcgt

SEQ ID NO: 215850 - DNA, 900 bp, Unknown
  Bacterial polypeptide expressing nucleotide sequence isolated from the Sargasso Sea
aatttcaaaaatatcaattccgataggagttataggcgtaatttatgaaagtagaccaaatgtaaccactgatgtagcgtcattatgttttaaatctggaaatccagttattttgaaaggtggttctgaagctttttattctaataaaattttatcaaatctatttagaaaagccctgaagattaataaagttaatcaaaactttgttcaattcatcgatataaagaatagaagagtggtagattttttactcactaaaatgattaactttattgatgtaatcataccaagggggggcagaaatttagttaaaaaagtgcaaaacatttctaaaattccaactatcggtcacttagaaggtgtttgtcattcatatgttgacaaagacgcagatcccaaaattgcaaccaaagtattagtaaacgctaaattaagaaatacagcgatttgtggagcaactgaaacaattttgcttaatgagcgtataatcaaaaagtttggaactcatatattaaagattttagaagaaaaaggttgccgaattattggtgataataaaattcgaaaaatttataaaggtaaaatcaggaaagcatcaatcaaagattggtcaaaagaatatttatctgctagcgtttctgtaaaatcagtcaaaaacttgcaagaggctatttctcatattaataaatatggaactatgcatactgactgcattattactaaaaacaaaaaatctgctaaaaaatttttaatgggagtcaaaagttcaatagcaatgcacaacacatctacacaatttgcagatggtggtgaatttggatttggtggtgaggttggaatttcaacaaatgttcttccaccaagaggccctgtgggacttgagcagctaatttcctacaa

SEQ ID NO: 215851 - DNA, 430 bp, Unknown
  Bacterial polypeptide expressing nucleotide sequence isolated from the Sargasso Sea
catgagtattaaaaataacattattgaattaggcaaaagagcaaaaactgcctctctaaatatgaaggtttgcagcagcaatcaaaaaaatcttgctttaacaaaactcacaaaaaatttagataaaaacagagataaaatccttgaggctaataagatggatttagaaaatggggaaaaaaaatctttaagtaaacctttaatgaatagacttagattaacagaaaaatctattgatggattgattacatccattgaagctataattgaaataccagatcctattggtattacactagaaagatgggaaagacctaatggattgaagtttcgtaaaatttcaacaccgcttggtgtattaggtgtaatttatgaatccagaccgaacgtcactgttgatgcttcttgtctttctataaaatctggtaat

SEQ ID NO: 215852 - DNA, 394 bp, Unknown
  Bacterial polypeptide expressing nucleotide sequence isolated from the Sargasso Sea
aatgttaagaaaattaaaaaaaattgcaatagactccagaaaagcttttgaaaaaaagattgatcctgccacaaaagataaagtattaaaaaaatttgcagctttactattagctaatagaaaaaaaataattatagaaaatattaaagatataaaaattgcaaagaaaaagaaaataaaagaaaatttaattaaaagactagaaataaatgaaaaaaaaataaatggtataattaaatctataaatcaaataatcaaaattaaagatcctacaaataaaattttggaacattggaaaaggccaaatggattacatattaaaaaagttactgttccaattggagttatagctgtaatatacgaaagtagaccaaatgtaacttcggggatgtag

SEQ ID NO: 215853 - DNA, 883 bp, Unknown
  Bacterial polypeptide expressing nucleotide sequence isolated from the Sargasso Sea
ggtaatgaaaaaaaattaatacttaagcaaaacttaaaagatgtaaattacgccagaaaaataggtattaaaaataatttaattaatagacttttaataaatgaatctaagttaaaagatattcaaaattcaattattaaaattgcaaaattaaaagatccagttggaaatactttagaaaaatggaaaaggcctaatggcttaaatattagtaaaatatcaatacctataggagtaattggagttatttatgagagtaggcctaacgttacctcggatgtagctagtctatgctttaaatctggaaatccagtaattttgaaaggtggctcagaagcaataaatactaataggattttagcaaagatttttcgaaaagcacttaaagttaataaagttgacgaaaactttattcaattcattgacacaaaacagagaagagtggtggatattatgctatcaggtatgaaaaaatatattgatgtaattattccaagaggtggaaaaaatttagtaaaaagagttcaggatttatctagtgtacccattattggtcaccttgaaggactttgtcatacatatgttgataaagatgcaaatttaactatggcaaaaaaagttgtttataatgcaaaattaagaaatacaagtatttgtggtgcaacagaaaccattctgattcataaaaaagttgcaaaagacttttgtaatccaattttgaacgagctacaaaataaaaattgtaaaatatatggagataggtttttaaaaaagtattacagaggaaaaatattaccagctaaagaaaaaaattggtctacggaatatttagcgcctgcagtatcagtaaaaattataaataatcttgaagaaaagtattgat

SEQ ID NO: 215854 - DNA, 900 bp, Unknown
  Bacterial polypeptide expressing nucleotide sequence isolated from the Sargasso Sea
acaaatattattttagaaaagtggaaaagaccaaatggtttacagatatcaaagatttcaattccaattggaattattggcataatctatgaaagcagacctaatgttacatctgatgttgcgtctttgtgttttaaatctggaaatgcagtaattttaaaaggtggaaaagaagcattttactcaaatagaattttgtcaaaactatttagaaaatctttaaaaaaaaataatattgatgaaaactttgtccaatttattgataatagaaatagaaatgttgtaaatttcttgttaacaaaaatgaacaagtatattgatgttatcattccaagaggtggaaaaaatctagtaaagaaagttcaaaatttagctaatttaccaataattggacatttagaaggaatttgtcacacttttattgataaagatgcaaaccctaagattgcaaaaaaaattattattaatgcaaaacttagaaataccgcaatatgtggtgcaacagaaacaattttaatgcacgaaaaaattttaaaaaaatcatgtaactttatcttaaaaggcttagaaaataatggttgtaaaatatttggagatagaaatattagaaaattttataaaggaaaaatatttaaagctaccaacaaagactggtctaaagaatacttatcaccaattgtttctgtgaaatcagtaaaaaatttaaatgaagctgttatgcatataaataaatatggcacaatgcatacagactcgattattacccaaaataaaaaaaacgcaaaaatatttttatcaaatgtaaaaagttcaatagctatgcataatacatctacacaatttgctgatggtggtgaattcggttttgggggtgaagttggtatttccaccaatgtgctt

SEQ ID NO: 215855 - DNA, 435 bp, Unknown
  Bacterial polypeptide expressing nucleotide sequence isolated from the Sargasso Sea
aatgactaaacatatgaatttaattggcataaaagctcgaaaagcaagtgagtttaaagttacaactaaggtaaaaaataaagttttaaacgattatgcaaaattaattaggaatgaaaaaaaattaattattagtcaaaatttaaaagatattagttacgcaagaaaaaaagggttaaaagagaacttaatcaaaagacttcatctaaatgaaaacaagttaaatgggattataaattctattttaaaaatagctaaattaaaagaccctataaacaacactttagaaaaatggaaaagaccaaatggtttgaatatacaaagagtgtcaataccaattggagttattggtgttatttatgaaagtagaccaaatgtaacctcggatgttgctagtctatgttttaaatctggaaatgtagtgattttgaaagg

SEQ ID NO: 215856 - DNA, 379 bp, Unknown
  Bacterial polypeptide expressing nucleotide sequence isolated from the Sargasso Sea
tatgaatttaattggtattaaaagtagaaaagcagcagaaaaaaaaattaatacttatactaaaaacaaagtattaaatacttatgctctattaatagataaagaaaaaaaatctattctaagacaaaataaaaaagatattaaatttgctgagagtaaaaaattaaaacaaaatcttattaatagactttatattaatgaattaaaactaagagatattagagactctattaaaaaaatttcaaaactaaaagaccctgtaaatgtaacattgaaaaaatggagtagacctaacggattaaatattaaaaaagtatcaataccaataggtgtaataggagttatttacgaaagcagaccaaatgtaacttcagatgtt

SEQ ID NO: 215857 - DNA, 820 bp, Unknown
  Bacterial polypeptide expressing nucleotide sequence isolated from the Sargasso Sea
ttaactctaaaacaaaaaaataaagttttaaaagattatcatcaacttattgaaaaaaataagaaccttatagttcatgcaaataaaaaagatattaaaaatgctcaaaaaaaaggaataaaacatcaccttgttcaacggctaattctaaatgataaaaagattctagaaataattaattcaataaaaataattataagactaaaagatccaactaatgttattttagaaaagtggagaagaccaaacggtttaaatatttccaagatatcaataccgataggtgtaattggggtaatttatgagagcagacctaacgttacttctgatgtggcctctctttgttttaaatccggaaattctgtaattttaaagggaggttcagaagcctttaattcaaatcttattctctcaaaattatttagaaaatcattaaaaaaaaataagattaatgaaaattttgtacaatttattaatgtaaaaaaaagaaaagttgttgattttatgttaactaaaatgaacaagtttattgatgtagtcataccaagaggtggcaaaaatttagttaaaaaaattcaaaacttgtcttcaatccctacaatcggtcatttagaaggtatttgtcattcatacgttgataaagatgctaatccaaagattgccaaaaagattattcataatgctaaattgaggaatacagctatttgtggagcgactgaaactatactattgcatgaaaaaataattaaaaaatttggttatgaaattttaaaaaacttacaagaaaatggatgtaaaattattggagatttcaaaatta

SEQ ID NO: 215858 - DNA, 210 bp, Unknown
  Bacterial polypeptide expressing nucleotide sequence isolated from the Sargasso Sea
tctggaacgcatcgacccggtttgccgatggcttccgttacggacttggtgcggaagtaggtgtcagtacctgtaaaacccatgcccgcggaccggtcggactggagggaatggtgatctacaaatacaagctctatggaaacggccagggagtgggaagttacagcaaaggggaaaggaaattcatgcatcagcccctggaaacctgaa

SEQ ID NO: 215859 - DNA, 753 bp, Unknown
  Bacterial polypeptide expressing nucleotide sequence isolated from the Sargasso Sea
aaaaagcaggcttacccaaggaatctgttcagctcgtagaaacaactgatagagaagcggttaggactttactacatttagataaatttttagatgtggtcatacctcgaggtggcaaaggtctggttcagcttatatctgatgaatctcgagttccagtgataaaacatttagatgggatttgccacgtatatatagataaagatgctgattttaaaaaagccgaagatattgcttttaatgcaaagacttataggtatgggatttgtggagcaatggaaaccttattagttcataaattagtagctgaatctttgcttccaaagttaatgaagagatttactgagaaaggagttgaggtaagggggtgccaaagaacactacaaataattgatgcacttgaagccgacgaagttgattggatgacagaataccttgcaccaatattatcaataaaagttgttgaaggtatgggtgatgccatagatcacatacaaaagtatggatctcaacacactgattcaattgttacggaagatctaacaaaagcagagttctttttcaaaaatgtagactcaagctctgttatgcataatttacctacttgctgggcagatggatttgaatacgggttgggtgctgaagttggaatttcaaccgacaaaattcatgccagaggaccagtagggttagaaggtttaacttcacaaaaatttatagtgaaaggtaattcaaatttgagaggagtgtaaa

SEQ ID NO: 215860 - DNA, 202 bp, Unknown
  Bacterial polypeptide expressing nucleotide sequence isolated from the Sargasso Sea
aaaaatctatttctaagaaaagtcgactctagttccgtaatgcataatttaccaacctgttttgcagatggttttgaatacggtttaggtgcagaagtaggaatatcaactgataaacttcatgctagaggtcctgtaggactcgaaggattaacaagtgaaaaatacatcgttgaaggtaatggtcagttacgagcttagt

SEQ ID NO: 215861 - DNA, 396 bp, Unknown
  Bacterial polypeptide expressing nucleotide sequence isolated from the Sargasso Sea
tatgtttcaaaaatttaataaaatagaactcatttgtaaaaaagctaaagatgcttcatataaattagcaatctcttctaataaagagagaaatgttgctttaaagttaattgcaagtcaaatatcaaaatctacaaaaaaaataatagcagctaataaaaaagattatatgaatgcaaagaaaaataaaattcctttacaccttcttgatagactcttattgaatgaggaaagaatcaagaacatgactaaagatattattaatattactaaactagaagaccctataggaaaagagctcattaaaaaaataagacctaatggtttaaaaattacaaaagtatcagtaccactaggagtaattgcagtaatatttgaatcaagaccaaatgttac

SEQ ID NO: 215862 - DNA, 628 bp, Unknown
  Bacterial polypeptide expressing nucleotide sequence isolated from the Sargasso Sea
gttaaactcatctctgaagaatccagggtacctgttattaaacatttggacggtatatgtcatgtgtatatagaccaagattctgagttggaaaaagctattgatatagcatttaatgcaaagacatatagatatggtatttgcggtgcaatggagactttgctcgttcataaagatgtagcttccaaggttctgcccaagctcttagaaaaatatagttctgaaggcgttgagttaagaggctgtaaagctactcaagaaattattgaagtgaaaactgctaacgaagaagattggctcacggaatacttagctcctattttgtctataaaggtcgtagaaggcatagaaaaagctatagaacatatcaataaatatggttcaaaccatactgattctatagttacagaaaataatgaaaaagttaaaattttctttgatcaagttgactcaagttcagtaatgcacaacttgcctacttgttgggcagatggttttgagtatggtttaggtgcagaagtaggaatatctactgataagatacacgctagagggcctgtagggttggaaggcctaacttcccagaagtttatagtaaaaggcaattctcaacttagaggatcttgag

SEQ ID NO: 215863 - DNA, 633 bp, Unknown
  Bacterial polypeptide expressing nucleotide sequence isolated from the Sargasso Sea
tgctaggccatgccgatggaatttgtcatttgtttatagatatggaggcaaatctagaaatggctttgtcagtcgctttggatagcaaaattcaatatcctgcagcatgtaatgctatcgaaactttattagtccataaagatatcgcaccagcttttttagaaaaggccatccctttgtttaattctaataatgttaaattagtcggagataaaagatcagttgaattagggttaaactatgaagctagtctagaagattggcaaactgaatatttagatttaatcttatcgataaaaattgttgacgatcttgaggaggcaatcacacatattcaaaaatatagttcaaaacatacagatggaataattactgaaaattcaaatactgccaataaatttatgaatgtagttgatagtgcaggtgtttttcataattgctctactaggtttgcagatgggtttagatatggattcggtgctgaagttggtatatctactcaaactcttcccccaagaggccctgtaggtctagagggcttagtaacttacaaatattttctaaaaggagatgggaatatagttgatgagttttcatcaggtaaggctatctatacacataaagatctttaaa

SEQ ID NO: 215864 - DNA, 307 bp, Unknown
  Bacterial polypeptide expressing nucleotide sequence isolated from the Sargasso Sea
ttgtctataagaatagttgaaggattagatgaagcaatagatcacattaataaattcggatctcaccatactgatgtgatttgtacatcaagttttgaaaattcgcggaaattcatcagaaatgtcgattctgcgtcagttatggtcaattcttcttctcaatttgcagatgggttcgaatatggtctaggcgcagaaataggaatttcgaccgataaaattcacgcgcgaggtccagtcggcttagagggcttaacgactgaaaaatatgtagtctttgggaatggcgagattcgaaaaagataaa

SEQ ID NO: 215865 - DNA, 571 bp, Unknown
  Bacterial polypeptide expressing nucleotide sequence isolated from the Sargasso Sea
atgaaaaaattattatttaatattggaaaaaaatcaaaaaaggcatttgctcataaattaagttcaaaaaaaaaagacatagttttaagaaatttttatcaactaattgataaaaatagaaaattaataataaatgaaaataaaaaagatattaaaaatgctattagaaaaaaaataaagaataatttaatacaaagacttatcttagatgataagaaaatttcgaatatgattaattcgataaaaagaattataaaattaaaagaccctacaaatattacattagaaaaatggaaaaggccaaatggtttgaatatttcaaaaatctcgactcctataggtgttataggtgtgatttatgagagtagacctaatgttacatcagatgtagcttctctatgttttaaatcaggaaacacagtaatattaaggggtgggactgaagcattttattcaaattatattctttcaagattatttagaaaatctttacaaaaaaattgtttggatgaaaactttgttcaatttataaatataaaaaatagaaaagttgttgattttatattaactg

SEQ ID NO: 215866 - DNA, 718 bp, Unknown
  Bacterial polypeptide expressing nucleotide sequence isolated from the Sargasso Sea
catgaattttggtcgaaataagaatctatccgactcgatgctagatcgactttatattgatgatactaggcttaacgggatcattggaagcttagagcaaataatagctcttcctgatcctgtcggaatggaaattgaagaattctcacggccaaatggcttaacaataaaaaaagtgagaacgccactcggtgtaattggagtcatttttgaaagcaggccaaacgtttttgttgatgctggagctttatgctttaagtcgggaaattcaagtattttgagatgtggttctgaaagttacaatacttcaagggcattagaatcttgttttgtgtctagctttcgtgaggtgggaattactgaattttgtacacaactagttccgaccaaggagcgcgctgctgttgaagaaatgcttaaaatgaataaatatttagatgtaataattcctcgtggtggaaaaggtttagtcggattagttcaagaaaaagcacgtgttcccatttttgctcacttagagggtattgtgcatatatatgtccatgctgatgctgacccagataaggcaaggaaggtcattttaaattcaaagttaagaagacccggaatttgtggtgcagtcgaatgcttgcttctagatcagcaatttgtaaaaaaatatggaacttcaatactctctgatcttattgcttctggggtcagtgttaaggtttcaagt

SEQ ID NO: 215867 - DNA, 827 bp, Unknown
  Bacterial polypeptide expressing nucleotide sequence isolated from the Sargasso Sea
aatgggaattataaagtccataaatataataactaagcttaaggatcctataaatagaattttattaaaatggaaaagacctaatggtttaattattaagagagtaacaattcctttaggtgttctagccgcaatttatgaaagtagacctaatgtaacttcagatatttcatgcttgtgttttaaatctggaaatagtgtgattttaaaaggtggttctgaagctttctatacaaataaaatattagccaatttgtttagaaaatctttaaaagaaaataaagttaatccaaattttgttcaattaattaatacaaaaaatagaaaagtggttgatattttgttatcaagaatgtctaaatttatagatatggtaatacctcgtggaggaaaaaatttagtaaaaaaagtccaaaaactatctaaagtacctattattggacatttggaaggcatttgtcacacttatgttgataaatttgcaaatcttaaaatggctattaacattattcacaatgctaaattgagaaatactagtatttgtggcgcaactgaaacaatattaattaatgaaaaagtattaaaaaaatttacaaatccaattttacacaaacttcaaaaatacggatgcaaggtaattgctgataaaaaagttaagtctatttttaagggaaaatcaaaactttcaactgaaatagattggaaaaccgagtatttatcagcaaaggtttcggttaaatcagttaaagatttaaatgatgcaattaatcatataaataaatatggaacaatgcataccgatgcaataattactaataacaaaaaaa

SEQ ID NO: 215868 - DNA, 586 bp, Unknown
  Bacterial polypeptide expressing nucleotide sequence isolated from the Sargasso Sea
ataaaaaataagcttaactcagctaaaattgatagattatctttaaatgaagaaagaataaaagatattcaagatagtttaaatgaaatcattaattttgaagatcctataaataaaattatcgaaagacgaagtagaccatcaggaattaaaatcaaaaaaatatcaactccaattggacttataggaattatctatgaaagtagaccaaatgttacaatagatgcagcagctttgtgcataaaatcaagtaattcagcaattttaagacctggatcagagagttaccagtcctgcttagcattatttaattgcataaacgaaggactagttgaaactggtttaccagaacatttgatccaaataattccaactacaaatagaattgcagttaaaaagctcattcaaatgacagaatacatagacgttataataccaagagggggtaaaaacttggtaaaattaattcaagacacagcaaaagtaccagtatttgcacacttagaaggtatagttcatacctacatccacaaagatgctgatccaaaaatggttgaaaatcttattttaaattcaaaattgagaa

SEQ ID NO: 215869 - DNA, 390 bp, Unknown
  Bacterial polypeptide expressing nucleotide sequence isolated from the Sargasso Sea
aatgagtgtgaaaatttctaaaatacttaatgagataggtattaaggcaaaatctgccagcgcaattctgaacaccgcaagcagtgaccaaaaaaataaattttttgactttgctgttaaggcaatccaagaaaatgcagatctcattctggaagctaataaaattgatatcaaagaagcaagaatcaatatgaaagatgaggcttttattgaccgtttagctttggacaaagccagacttcagggaatatgtgataccttggctgaaataaaatcattccaagatccagttggcagagtgcttgcttcctgggacagacccaacggtttaaatatttctagagtttcaactcctttaggagtaataggtttaatttttgaaagcaggcc

SEQ ID NO: 215870 - DNA, 843 bp, Unknown
  Bacterial polypeptide expressing nucleotide sequence isolated from the Sargasso Sea
agtcttaaatgattacgcgaaattaattaagaatgaaaaaaaatatattataaatcaaaattcaaaagatattaattacgcaagaaaaagaaggttaaaagaaaacttaataaaaagacttcatttagatgaaattaaattgaatggaattataaattctattttaaaaatagctaaattaagggatcctataaataacactttagaaaaatggaaaaggccaaatggtttaaatataaaaagagtatcaataccaattggagttattggtgttatctatgaaagtagaccaaatgtaacttcagatgttgctagtctttgttttaaatctggaaatgtagtgattttgaaaggaggctctgaggccataaattcaaataaagctttagctaagttgtttagaaaagcacttaaaaaaaataaagttgatgaaaactttatacaatttatcgattcaaaacaaaggaggattgtggatattatgctttctaaaatgaaaaaatatatcgatgtcataatacctcgtggtggaaaaaatttagttaaaaaagttttagaattatccaaagtacctataattgggcacttagagggactttgtcatacttatatagataaggatgcagaattaaaaatggctaaagaaattgtttataacgctaaattaagaaatacaagtatttgtggtgcaactgaaactattcttattcataaaaatatagtcaaaaaatttagcaatcctattttgcaggcacttgaaaataatggttgtaaaataattggtgataagattttgaagagttattacaaaggtcaagtatatcctgcaaaagaaaaagattg

SEQ ID NO: 215871 - DNA, 550 bp, Unknown
  Bacterial polypeptide expressing nucleotide sequence isolated from the Sargasso Sea
agcaaaattcaatatcctgcagcatgtaatgcaatcgaaactttattagtccataaagatatcgcaccagcttttttagaaaaggccatccctttgtttaattctaatgaagtcaagttaattggagataagagatcagttgaattagggttaaagtataaggcttgtctagaagattgggaaactgaatatttggatttaattttgtcgataaaaattgttgatgatcttcaggaagcaatcacacatattcaaaaatatagttcaaaacatacagatggaataattactgaaaattcaaatactgccaaaaaatttatgaatgaagttgatagtgcaggtgtttttcataattgctctactaggtttgcagatgggtttagatatggattcggagctgaagttggtatatctactcaaactcttccaccaaggggaccagtaggtcttgaaggtttagtaacttataaatatttcctacaaggtgatggaaatatagttgatgatttttcatcaggaaaggccatctatacccataaagatctttaaa

SEQ ID NO: 215872 - DNA, 592 bp, Unknown
  Bacterial polypeptide expressing nucleotide sequence isolated from the Sargasso Sea
atgaaaaattatttaagaaaaattggagttaaatcgcaaaaagcattaaagcagcaaataagcgaaaaaatcaaaaacaaagttctttataaatttgaaaaaattttaaaaaaaaatgaaaaatcaatattactagagaataaaaaagatcaaaacaaagccaaaaagcttggaataaagcttcatatgctaaaaaggcttgagttagataaaaaaaaattctaccaaattttatctacaattaaaaagattagaaaaatgaaagatccaacttataaagtattagaaaaatggaaaagaccaaatggtcttactataaaaaaagttacaatacctttaggggtcatcgctgttatttatgaaagtagaccaaacgttacggtagatgtttcgtgtttatgttttaaagctggaaattcagttattttaaagggtggaaaagagtctttttatacaaacaaactactttcatcattttttaaaaaatcacttaaagaccttaaagtagatgaaaattatgttcaatttatagaaaataaaaatagaaaagttgttgataatattctttctgatatgactaaatatgtagatg

SEQ ID NO: 215873 - DNA, 466 bp, Unknown
  Bacterial polypeptide expressing nucleotide sequence isolated from the Sargasso Sea
tttgattgataaatcaatttataaagaatattttccaaaaatattgtcaaagctatcgagtatgggttgcgagataagaggaaacgctcagataaaagacatttttccacaaacagagaatgtatctgagtctgactgggcaactgaatatctggatgcaattatatctgtaaaagtagttaaagacattgatcaggcaatttcacatattaaagaatacggtactgggcatacagaagcaatcattactgaggatggtaaaatagctgagtatttttttaatcaagtaaatagttctattatactactaaatgcatcgacacagtttgctgatggtggtgaatttggatttggagcagagattggtatttcaacgggaaaaatgcatgcgcgaggtcctattgggcttgagcagctaactacgttcaagtacacagtttatggaaatggacagacaaggccttga

SEQ ID NO: 215874 - DNA, 625 bp, Unknown
  Bacterial polypeptide expressing nucleotide sequence isolated from the Sargasso Sea
agttaatgaaaatgctaaaatgccttctatcacaggaggggttggagtatgtcatacttatgtagatagtaaaattgatactgaacttgcgcttagtgttttagacaatgcaaaaactcaaaatacttctgtttgcaacgcaatggatacagtactaattcataaagattcagtcgatttgatccaacctttatttagtcttttattagaaaaaaacgttgatataagagcagataaagaatcttatgataatttcaataataagtccaaaatcaaattagcatcatcatcagattttggagaagaatttcttgatttaatagtaagtgttaagactgttgaaaatattgatgaggctataaaacatatagaaaaatatggatcaaagcactcggaggcaattattactgaagatcataatgtagcaaaatatttcttaaataaagttgatgcatctgcagttttccataatacatctacaagatttaatgatggttttgaacttggattaggtgctgaagttgcagtttcaactgataaacttcatgctagaggcccgatgggtattaatgacttaatgacatacaaatgggtagtttctggaaaaggtcaactcaggaaataa

SEQ ID NO: 215875 - DNA, 808 bp, Unknown
  Bacterial polypeptide expressing nucleotide sequence isolated from the Sargasso Sea
ttctaaagaaatattagaggctaataatgcggattatttaaatgcagagaaaaagggtatttctagggctttactttctagattaaagttatcaaaatcaaaattaaattcaggaattgaaggggtaagaaaagttggagacttggctgatcccgtaaatcaagttcaaataaaaagagagctttcaaaggggttgatcttagagagaaaaactgtgccaattggagttttaggggttatttttgaatcacggccagatgctgtgatgcagattagttctttagcaataagatcaggtaatggagtaatactaaaaggtggtagtgaagccaatttaacaaatacttcaatagtaaaagcattgcaagaaggtttaaatgaatccggccttgataaaaatgcaatatgtttattaacaagcagaaaagatagtatggcgatgttaaatcttgagaaatatattaatttaataattccaagaggtagcaatgaattagttaaatttattcaggagaatacaagaattcctgtgctaggccatgctgatggaatttgtcacttgtttatagatattgaggcaaatctagagatggctttatcagttgctttggacagcaaaattcaatatcctgcagcatgtaatgctatcgaaactttattagtccataaagatatcgcaccagattttttagaaaaggccatccctctttttaattctaatgatgttaaattaatcggagataagagatcagttgaattagggttgaattatgaggctagcctagaagattgggaaactgaatatttg

SEQ ID NO: 215876 - DNA, 884 bp, Unknown
  Bacterial polypeptide expressing nucleotide sequence isolated from the Sargasso Sea
ggtcagaatgcaaaaaaagcctttgaaactaaaattagttctaaattaaagaacaaggttttaattgattacataaaattaattaggaaaaataaaaaaaaaataattaatgaaaattggaaagacttaagagctgcacaatcaaaaaagctcaaagaaaacttaattaaaagattaactcttgacgacaaaaaaattgattccataataaaatccattgaaacaatagtaaaaattaaagatccagttgataaagttttagttcaatggaagagaccaaatggattgagaattaaaagagttaccataccaataggggttatagctgttatttatgaaagtagaccaaatgtaacttctgatatttctacactatgttttaaatcgggaaattgtgtagttttaagaggtggttctgaagcatttaatagtaacaaacttttagcaaatctatttaggatgtctttgcataaaaacaaaattaataaaaattatgtgcaatttattcaagataaaaatagaaaattagtagattatttgctttcaaaaatgagtaagtttttagatgttataataccaaggggaggaaaaggattagttaaaaaagtccaagatttatcttctgtaccagtaattggtcatcttgaaggaatttgtcatacatatatagatgaagatgctaatgataaaatgtctttaaaagttacgttaaatgcaaaattaagaaatacaagtatttgtggtgcgactgaaaccttattaatacacaaaaaaaaatctggtttagtaaactctattcttaaggaactagaaaaaaataaatgtgaaatcgtagcagataaaaaagtaaaaaaaatttataaaggcaagtcaaagctagctaa

SEQ ID NO: 215877 - DNA, 598 bp, Unknown
  Bacterial polypeptide expressing nucleotide sequence isolated from the Sargasso Sea
atgaagaaatatttagaaaaaatcggctcaaatgcaaaaaatgcttttgagaaaaaaataagtaataaaaaaaaaaataaagtattaaattattacacccaattaataaaaagaaataaaagaaaaattttaagtgaaaatgcgaaagatgtaaaaattgcaaagtccaaaaaactaagagaaaatttgattaaaagacttactcttgatcaaaataaaataaattcgattattaaatcaataaaaaccattgctaattttaaagatccagtagacttaaatttagatacatggaaaagaccaaacggcttaaagatcagaaaagtgtcaattccaataggtattattggtgtaatttacgagagtagaccaaatgtaacctcggatgtttcaactctttgttttaaagcaggaaattgtgttattttaagaggaggctctgaggcttatttcagtaataaaattttggcagaactttttagaaaatcattagaaaaaaataaaataaacaaaaactttgtacaattcattgaaaataaaaatagaaagcttgttgattacatgctgtcaaaaatgtcaaaatttattgatgtaatta

SEQ ID NO: 215878 - DNA, 680 bp, Unknown
  Bacterial polypeptide expressing nucleotide sequence isolated from the Sargasso Sea
aaaacaggatgaatacatcgatgtgcttgttccccggggtggtagaggcctgattgaaactgtatctaagaatgccaatatgccagtgataaagcatttagatggcgtttgccatgtatttgtagattcttccgcagatttatccaaggccctcgatgttgtagtcaattccaagacccaccgctttggtacttgtaacgccatggaaacacttttggtaagccaaacaatagcagaagcattttgctctaccttatatccaaaacttattgagatgggggttgagatccggggttgccctagggcaattcagtttgataaaagagtcaagaccgcctcaaatgctgattggtacgaagaatacttggctccaattttatcagtaaagattgttgattctctggatgaagcaatcgcgcatattgaaaaatatgggtcgaagcataccgactgtatcgtgaccgaagattattctcaagcgagatattttcttaaaatggtcgattctagttctgtcatgattaacacctctactcgctttgctgatggatatgaatatggtctgggtgctgaggttgggattagtacagataaaattcatgctagaggtcccgttgggctagaaggtttaaccagcgaaaagtgggtagtctttggtgatggtcatgttcgaagctagc

SEQ ID NO: 215879 - DNA, 764 bp, Unknown
  Bacterial polypeptide expressing nucleotide sequence isolated from the Sargasso Sea
aatgaagaaaatattgattaatattggcacaagatcaaaagaagcattttctcaaccaataaatactaataaaaaaaataaagttttgaaggattatcttaaattgataaagaaaaatcagtatctaattcttaaagaaaataaaaaagatataaatcaggctattaaaataaaactaaaagataatttaataaaccgactaattttaaatgaaaaaaaaattttaagtataattaattcaattaaagaattaattaagttaaaagacccaacaaataatatcattgagaagtggaagagaccaaatgggcttgaattttcaaaaatatcaattccaataggagtgattggagtaatttatgaaagtagaccaaacgtgacttctgatattgcatcattatgttttaaatctggaaatccagttattttaaaaggtggttctgaggctttttattctaataaaatcttatcaaatttatttagaaaagctttgaaaaataacaatgttaatcaaaattttattcaatttatcaatataaaaaatagaaaagtagttgattatttactaactaaaatgggtaaatttgttgatgtaatcataccaagaggggggaaaagtttagttaaaaaagtgcaaagcatatctaaaattccaactattggtcatctagaaggtgtttgtcattcgtacgttgacaaagatgccgaccctaaaattgctactaaagtaataattaatgcaaaattaagaaatacggcaattt

SEQ ID NO: 215880 - DNA, 640 bp, Unknown
  Bacterial polypeptide expressing nucleotide sequence isolated from the Sargasso Sea
aatgaatgatttattaaaaaatatttgcaaaaaatcaagaaaagcattttctattcaattagatactaaaaaaaaagacaaagttcttgaagattacctccgtttaatattaaaaaataaagatttaattttgagtgaaaatttaaaagatattaaaattgctaacaaaaaaagattaaaagataatttagtaaaaagattagttttaaataacaaaaagattttagatattactaaatcaattaaaagtataattaaattaaaagatccaacaaacattgttttaaaaaaatggaaacggcctaatggtttaaatatttcaaaagtatcaattcctataggagttattggtgtgatttatgaaagtagacccaacgttacctcagatgttgcctcattatgttttaagtctggtaattcagtaattttaaaaggtggttctgaagcattttattcaaatcgcatactttcaaaattatttagaaagtctcttaaaaaaaataaggtggatgaaaattttgttcaatttatagattttaaaaataggaaggtagttgatttacttttaactaaaatgaatgattttattgatgtaataattccaagagggggtaaaagcttagtaaggaaagttcaaaaa

SEQ ID NO: 215881 - DNA, 841 bp, Unknown
  Bacterial polypeptide expressing nucleotide sequence isolated from the Sargasso Sea
aattaattcaataaaaaatattattaaattaaaagatcctacaaatatagtttttgaaaaatggagaagaccaaatggtttaaatatttcaaagatatcaatccctattggtattataggtgtgatttatgaaagtagacccaatgtgacttctgatgtagcctcactatgttttaaatctggtaacacagtaatactaaaaggtggtacagaagcatttaattctaattttattctttcaaaattatttagaaagtctttgcaaaaaaataatttagatgagaactttgttcagtttgtaaatgtaaaaaatagaaaagttgttgattttctgttaacaaggatgaataatttcattgatataatcatccctcgaggaggaaaaagtttggtaaaaaaggttcaagatctttctacagtgcctataattggccatttagagggaatttgtcattcttatgtcgacaaagatgcaaatcctaaaattgcagataaaattattcataatgccaagttaagaaacacagcaatttgtggggccacagaaacaattctgttacatgaaaagataattaaaaaatttggaaatagaattttaaaaaatttagaaaaaaatggatgtaaaattataggtgataataaaattagaaagacttatggtaaaaaaatcaaaaaagccacaaacaaagattggtcaaaagaatacttatcaccaatcgtctcagttaaatctgtgaaaaatataaatgaagcaataaaccatataaataaatatggaactatgcatacagattgtattattacgcaaaataaaaagtctgctaaaaaatttttgaatgag

SEQ ID NO: 215882 - DNA, 718 bp, Unknown
  Bacterial polypeptide expressing nucleotide sequence isolated from the Sargasso Sea
gagctttcaaaggggttgatcttagagagaaaaactgtaccaattggagttttaggggttatttttgaatcaaggccagatgctgtgatgcagattagttctttagcaataagatcaggtaatggagtaatactaaaaggtggtagtgaagccaatttaacaaatacttcaatagtgaaagcattgcaagaaggtttaaatgaatcaggtcttgataaaaatgcaatatgtttattaacaagtagaaaagatagcatgtcgatgttaaatcttgagaaatatattaatttaataattccaagaggaagtaatgaattagttaaatttattcaggagaatacacgaattcctgtgcttggccatgctgatggaatttgtcacttatttatagatattgaggcaaatctcgagatggctttatcagttgctttggacagcaaaattcaatatcctgcagcatgtaatgctatcgaaaccttattagtccataaagatatcgcaccagcttttttagaaaaggcaatccctttatttaattctaatgatgttaaattaattggcgataagagatcagttgaattagggataaagtatgaggctagtctagaagattggaaaactgaatatttggatttaattttatcgataaaaattgttgatgatctcgaggaggcaatcacacatattcaaaaatatagttcaaaacatacagatggaa

SEQ ID NO: 215883 - DNA, 451 bp, Unknown
  Bacterial polypeptide expressing nucleotide sequence isolated from the Sargasso Sea
atgaatttaattggaagaaaagctcgtaaagctagtgagtataaagttacaactgaagtaaaaaataaagtcttaaatgattacgcgaaattaattaagaatgaaaaaaaatttattatttatcaaaatttaaaagatattaattatgcaagaaaaagagggttaaaagagaacttaataaaaaggcttcatttaaatgaagataaattgaatggaattataaattctattttaaaaatagctaaattaagggatcctatagacaacactttagacaaatggaaaagaccaaatggtttgaaaataaaaagagtatcaataccaattggagttattggtgttatttatgaaagtagaccaaatgtaacttcagatgttgctagtctttgttttaaatctggaaatgtagtgattatgaaaggaggctctgaggccataaattcaaataaag

SEQ ID NO: 215884 - DNA, 403 bp, Unknown
  Bacterial polypeptide expressing nucleotide sequence isolated from the Sargasso Sea
tatgattagcaattacttaaaaaatataggattaaaatctaagattgctgttaaaaatctcgttaagattgacgctaaaaaaagaaacaaaattcttgaaacttatagcagagaacttttcaaaaataaaaaaaaaattatcagagaaaataccaaagatgttaagacttgtaaaagaggcgatctaattgacagattgattcttgatgaaaaaaaaatagaaagtattagaaattcaataaatcaaattgcaaaatttaaagatcctttaggtaaagtaataaaaaaatggaaaagaccaaataaacttattataaaaaaagttacagttcctataggggttataggtataatttatgagagtagacctaatgttacatgtgatgtttcgtctttatgttaa

SEQ ID NO: 215885 - DNA, 499 bp, Unknown
  Bacterial polypeptide expressing nucleotide sequence isolated from the Sargasso Sea
atgagtattgaaagtaatattattgaattaggtaaaagagcaaaaactgcctcccttaatatgaaagtttgtaacagtgagaaaaaaaatttagctttaataaaactcaatgaaaatttagataaaaacagaaataaaattcttcaagctaataaaatagatttaaagattggcgaaaaaaaatctttaactaagcctttattaaatagacttacattaacagaaaaatctatagatggattgattacatcaattgaagatataattcaaataccagatccaattggcattacattagaaaaatgggaaaggcctaatggtttgcagtttcgtaaaatttcaacaccgcttggtgtattaggtgtaatttatgagtcaagaccaaacgtaactgttgatgcatcttgtctttcaataaaatctggaaattgcataattttaagaggtggaagtgatagtttccattcttctaaggaattagtaaataatataacaaacg

SEQ ID NO: 215886 - DNA, 911 bp, Unknown
  Bacterial polypeptide expressing nucleotide sequence isolated from the Sargasso Sea
tattataaaaaaagtgtctataccaataggtgtaattggaataatttatgaaagtaggtcaaatgttacatcggatgtttctgctttatgcttcaaaagcgggaatgtagtaatattacgtggaggctcagaagcatttcattccaataaaattttagccaaactttttagaaaggctttaaaaaagaaaaaatgcaatgaaaattgtgttcaatttgttcaaagcaaaaagagacatcacgttgattacctattatccagtatgaaaaactacgtagatttgatcatccctagaggaggtaaaagtcttgttaaaaaagttctaaaaaaatctgcagtttcaattgttggacactacgaaggtttgtgccatgtttttgtagataaagaagcagatttaaacacagcaataaaagttgtaaaaaactcaaaaatgagaaacgtcagtatttgtggagcagctgaaactttattgatagataaaaagtgcttaaaaactcattgtaaaccaatattagaccacttaactgagttaggatgcaaaatcataggagataaaataataagaaaatttatttctagaaaaattaaaattgcaacagaaaaagattggaaaatggaatatctttctccaataatttcagtaaaaagcgtaaatggagtcgaggatgcaataaatcatataaataaatatggatcttcacatacagactctatagtaaccaaaaataaacaaaccgccaaaaaatttctatcaaacattaatagttctatcgctattcacaatgcttcaacacaatttgctgatggaggagaatttggattcggtgctgaagttggcatatcaacgaacaagcttcatccgcgtggtccaatcggtcttgatcaactcactacttataagtacattt

SEQ ID NO: 215887 - DNA, 519 bp, Unknown
  Bacterial polypeptide expressing nucleotide sequence isolated from the Sargasso Sea
aatgttaattaatattggaacaagatcaaggttagcatttgataaacaaataaatactaataaaaaaaataaagttttaaataaatacgtcaaattaattgagaaaaataaaaacttaattcttaaagaaaataaaaaagatataaatcaagctattaagaaaaagctaagagacaacttgataaatcgactaattttaaatgaaaaaaaaatttcaagtattataagttcaattaaaaaaataattaagttaaaggacccaactaataacgttattgaaaaatggaaaagacctaatggactagtatttacaaaaatgtcaattccaataggagttataggagtaatttatgaaagtagaccaaacgtaacctcggatgttgcgtcattgtgttttaaatctggaaatccagttattttgaaaggtggtactgaggctttttattctaataaaattttatcaaatttatttagaaaagcattaaagattaataaagttgatcaaaattttgttcaatt

SEQ ID NO: 215888 - DNA, 796 bp, Unknown
  Bacterial polypeptide expressing nucleotide sequence isolated from the Sargasso Sea
gaagtaatttcattcaaagatcccactcacaaagtcattgcgaaatggaaacgtcccaataatctaatcataaatcgtgttacaatgcctattggagttttaggtgttatatatgaggcgcgtcctaacgttacttctgacgtagcaatattaagttttaaatctggaaattctgcaatacttcggggcggcaaagaagccttgcagtcaaacattattatttcaaatttgtttagatcgagtttaaaaagaaataatataaatcaagactgtatacaattggtgaacaatactgacagaaaaattgttgatttaatgttatctaaaatgtcagactatatcgatattatcattccaagaggtggtaaaagtcttgttaaaaaagtattagaattatctaaagtgcctaccataggccacttggaaggattgtgtcatgtttatttggacaatcaatacaattacgatatagctgaaaaattaattttaaattctaagttgagaagaacaagtatttgcggagctgcggaaactttacttataaataaatccgttaaaaaaaatgatgtttacaaaattttacaaaaattaaacattaaaggctgcaaaataattggggataataaaactaaaaagatattcgaaaaaactattttagctaaagagaatgattggtctacagagtacttggactctaaaatatccgtaaaaattgtaaatgatttaaaagaagctatacaacatattaaaaaatacggaactaatcatactgaatgtattatttccaaaaaataaa

SEQ ID NO: 215889 - DNA, 568 bp, Unknown
  Bacterial polypeptide expressing nucleotide sequence isolated from the Sargasso Sea
atgtccattaaaattgaaaacttagtaaaacaacttggaaaaaaaggtagaaatgcatgcctattaatgtcaaatatatcttcttataaaaaaaataaaacattggaaaatatttccaaaatgattgaaaaaaataaaaacttaattctaaaagcaaataaaatagatttaagtaatgccacaaaaaataagcttaattctgctaaaattgatcgattatctttaaatgaagaaagaataaaagatattcaaggtagtttgcatgatatcattaatttcgaagatcccataaataaaattattgaaaaacgaagtagaccatcaggaataaaaattaaaaaaatttcaacaccaattggtcttataggaattatctatgaaagtagaccaaatgtaacaatagatgcagcagctttgtgcataaaatctagtaattcagcaattttaagacctggatcagagagttatcagtcctgcttagcattatttaattgtataaacgaaggactaattaaaactggtttaccagaacatctaattcaaataattccaactacaaatagaattg

SEQ ID NO: 215890 - DNA, 691 bp, Unknown
  Bacterial polypeptide expressing nucleotide sequence isolated from the Sargasso Sea
gaccctatagacaaaactttagacaaatggaaaagaccaaatggtttggatataaaaagagtatcaataccaattggagttattggggttatttatgaaagtagaccaaatgtaacctcggatgttgctagtctttgttttaaatctggaaatgtagtgattttgaaaggaggctctgaagctataaattctaataaagctttagctaagttgtttagaaaagcacttaaaaaaaataaagttgatgaaaactttatacagtttatcgattcaaaacaaaagaggcttgtagatattatgctttctaggatgaaaaaatatatcgatgtcatcatacctcgtggtggaaaaaatttagttaaaaaagttttagaattgtccaaaatacctataattgggcacctagagggactttgtcatacttatatagataaagatgcagaattaaaaatggctaaagaagtcgtctacaacgctaaattaagaaatacaagtatatgcggtgcaactgaaactattcttattcataaaaatatagtcaaaaaatttagtaatcctattttgcaggaacttgaaaatagtggttgtaaaataattggcgataagattttgaagaattattacaaaggtcaagtgtatcctgcaaaagaaaaggattggtcaactgaatatttatcatcaattgtatccg

SEQ ID NO: 215891 - DNA, 781 bp, Unknown
  Bacterial polypeptide expressing nucleotide sequence isolated from the Sargasso Sea
aaaagctgataaagtgcgtttggcatcaataaaaataagtcagactgaaaatcaaaatcgaattaaagccttaaattttatggctgattatctagaaaaaaatactgaagaaatattaaaggctaatagtgaggactatgaaagagcagaaaaaaaaggaatttcaaacgctttactctctagattgaagttatcaaaagaaaaattaaattcaggaattgaaggagtaagaaaagttggagaattgtctgatcccataaatcaagttcaaataaaaagagagctttcagggggattgatcttagaaagaaaaactgtgccaattggagtcttaggggttatttttgaatcaagaccagatgccgtgatgcagattagttcattagcaataagatcaggtaatggagtaatgctaaaaggtggcagtgaagctaatttaacaaatacttcaatagtgaaagcattgcaagaaggtttaaatgaatcaggccttgataaaaatgcaatatgtttactaacaagcagaaaagatagcatggcgatgttaaatcttgagagatacgttaatttaataattccaagaggaagtaatgaattagttaagtttattcaggagaatacaagaattcctgtgctaggtcatgctgatggaatttgtcatttgtttatagataatgaggcaaatctagagatggctttatcagtagctttggacagcaaaattcaatatcctgcagcatgtaatgctatcgaaactttattagtccataaagatatcgca

SEQ ID NO: 215892 - DNA, 928 bp, Unknown
  Bacterial polypeptide expressing nucleotide sequence isolated from the Sargasso Sea
ctagaaaaaaattctaaagaaatactagaggctaataatgcggattatttaagtgcagaaaaaaagggtatttctagggctttactttctagattaaagttatcaaaatcaaaattaaattcaggaattgaaggagtaagaaaagttggagacttggctgaccctgtgaatcaagttcaaataaaaagagaactttcgaaggggttgatcttagagagaaaaactgtaccaattggcgttttgggggttatttttgaatcaaggccagatgccgttatgcagattagttctttagcaataagatcaggtaatggagtaatgctaaaaggtggcagtgaagccaatttaacaaatacttcaatagtgaaagcattgcaagaaggtttaaatgaatcaggtcttgataaaaatgcaatatgtttactaacaagcagaaaagatagtatggcgatgttaaatcttgagaaatatattaatttaataattccaagaggaagtaatgaattagttaaattcattcaggagaatacaaaaattcctgtgctaggtcatgctgatggaatttgtcacttgtttatagatattgaggcaaatctagagatggctttatcagtcgctttggacagcaaaattcaatatcctgcagcatgtaatgctatcgaaactttattagtccataaagatatcgcaccagcttttttagaaaaggccatcccactgtttaattctaatgatgttaaattaatcggagataagagatcagttgaattagggttaaagtatgaggctaaaatagaagattggaaaactgaatatttggatttaattctatcgataaaaattgttgatgatcttgaggcagcaatcaaacatattcaaaaatatagttcaaaacatacagatggaataattactgaaaattcaaata

SEQ ID NO: 215893 - DNA, 436 bp, Unknown
  Bacterial polypeptide expressing nucleotide sequence isolated from the Sargasso Sea
atgaaaaactatttatttaaactaggcttacaagctaaaaaagcttcaaataaaactataaaatctaaaaagaaagaacaggttttaaaagactattgcaatttactattaaaaaaccagttaaaaattatttctgaaaataaaaaagaccttaaaaaagcaaaagaaaaaaaattaaaagaaaatcttattaatagacttaaaatagaccacaagaaaattttacaaataataaactcaacaaaaacaatcataaaatttaaggatcctgtgggtcaaatattagaaagatggaaaagatcaaatggactaaaaatcacaaaagtaacaattcctatcggtgtagttgcagtaatttatgaaagtagaccaaatgttacatctgatgttgcatctttgtgttttaaatctggtaatccagtaattatgaaaggag

SEQ ID NO: 215894 - DNA, 856 bp, Unknown
  Bacterial polypeptide expressing nucleotide sequence isolated from the Sargasso Sea
aatgctaaaaggtggtagtgaagctaatttaacaaatacagcaatagtcaaggcattgcaacaaggtttaaatgaatcaggtcttgataaaaatgcaatatgtttactaacaagcagaaaagatagcatggcgatgttaaatcttgagaaatatattaatttaataattccaagaggaagtaatgaattagttaaatttattcaggagaatacaagaattcctgtgctaggccatgctgatggcatttgtcatttgtttatagatattgaagcaaatctagagatggctttatcagtcgctttggacagcaaaattcaatatcctgcagcatgtaacgcaattgaaactttattagtccataaagatatcgcaccagcttttttagaaaaggccatccctttgtttaattctaatgatgttaaattaattggagataagagatcagttgaattagggttaaagtatgaggctagtctagaagattggaaaactgaatatttggatttaattttatcgataaaaattgttgatgatctcgaggaagcaatcacgcatattcaaaaatatagttcaaaacatacagatggaatagttactgaaaattcaaatactgctaataaatttatgaatgtagttgatagtgcaggtgtttttcataattgctctactaggtttgcagatgggtttagatatggattcggagctgaagttggtatctctactcaaactcttccaccaaggggacctgtaggtctagaaggtttggtaacttataaatatttcctaaaaggtgatgggaatatagttgatgatttttcattaggaaaggctatctatacacataaagatctttaa

SEQ ID NO: 215895 - DNA, 773 bp, Unknown
  Bacterial polypeptide expressing nucleotide sequence isolated from the Sargasso Sea
agtcaaatccggaaacgcggtaatcctcaagggaggaagggaagccgtccattccaatcgtgttcttgcggaaatcctccgtcaaaccgcagatgattttgaagaaatgccggtcaatgccttgagcctggtggaatctcgtgacgaggtttcacaactggtccagatgagtgaagaactggatctgatcatcccgcgcggaagcaacgaattggttcagtcgattcaggcccgcgcccaggttccggtacttgggcatgcggatggaatctgtcatgtcttcatcgacgcaaacgcggaccccgtaaaagcgaggaaggtggttttggattccaaaacagattatcctgcggtctgcaatgccctggaaaccctgttggtggaccgtgagcttagctccgaacttctaaaaaagatcatggaagatcttgttcaggcaggagttgaaatcagggcctgtccggatactcagaagaaacttgaaggtcattcccaacttgaaatgggaaatgcttcagaagaagactggaaaaccgaacacctggaaatggtcctttctgtaaaaacggttgcaggaatggaagaagcgattcagcacatcaatcgttacggttccaaccataccgattccattgtcaccgaatctcatgaaactgccgaaaggttcatgaacgaagttgattctgcagggtgttttctggaacgcctcgacccggtttgccgacggcttccgttacggacttggtgcggaagtaggcgtcagtacctgtaaa

SEQ ID NO: 215896 - DNA, 103 bp, Unknown
  Bacterial polypeptide expressing nucleotide sequence isolated from the Sargasso Sea
tatgcacaatacttcaacccaatttgctgacggaggtgaatttggtttaggtgctgaaataggaattgctactggcaaattgcacgcccgagggccagttgga

SEQ ID NO: 215897 - DNA, 193 bp, Unknown
  Bacterial polypeptide expressing nucleotide sequence isolated from the Sargasso Sea
gttcctgaacggcatcaacagcgccatcgcactgcacaacacctctacccaattcgctgacggcggcgagttcggcatgggcgctgaaatcggaatcgccaccggcaagctccatgcacgcgggcccgtgggcgtggaacagctcacaacctttaagtatgtcgtccggggctctggccagtcccggccgtag

SEQ ID NO: 215898 - DNA, 472 bp, Unknown
  Bacterial polypeptide expressing nucleotide sequence isolated from the Sargasso Sea
atgagcattattacagagttagcacaacaggcaaaaaaagctgcacgtacactggctattttaagcgaaagccagaaaaacgcggtgttaactgatatggccgcggcaattcgtgcaaataaaagcaaaattattgaagtaaacgaaaaggaagtagcgcgcgctaaagaaaataacttagacgcagcaatggttgaccgcttaatcctaaacgatgaacgcattgaatcaatggctgaaggcatcgaagttattgttgaattagacgatccagtaggtaaagagcgcgttatcggtacacgtccaaacggtattgagattaagaaaatgcgtataccgcttggcgttgtgtgcatgatatatgaagcacgacctaatgttactgccgacgctggcgcgctgtgcttcaaatcgggtaacgctgtgattttacgtggtggtaaagaagcattggataccagcttagcgattt

SEQ ID NO: 215899 - DNA, 693 bp, Unknown
  Bacterial polypeptide expressing nucleotide sequence isolated from the Sargasso Sea
tatgaaaaaatatttaaataaaattggaaaaaatgcacaaaaggcttttttaaaaaaattagatacaaaattaaaaaataaagtattaactaaatttgcaaaattaattaaaaaaaataaaaataaaataataaaagaaaacattaaagatataaattttgctaaaaaaaaaaaaataaaagaaaatataattaaaagacttgaactaaataacgaaaaaataaatcaaataattaaatcagttattaaaattagcaaatttaaagatcctataaacataacgctagagaactggagaaggcctaacggacttaagattaaaaaagttacaattcctattggtattgtgggggtaatatatgaaagcaggcctaatgttacttctgatgtctcgagtttatgttttaaatcaggaaattgtgtaattttaaaaggtggatctgaagcatattttagcaataaaattattgcaaaattgttcagagaatcgcttgaaattaataaagttaacaaaaactatgttcaatttgttgagtcaagagatagaagtgtagtagatttaattctttccaaaatggatagatatattgatgttataatacctagaggtggaaaaaacttagttaaaaaagttcaaaatttatcatcggttccaacaattggtcatttggaaagaatttgtcatacatatgt

SEQ ID NO: 215900 - DNA, 453 bp, Unknown
  Bacterial polypeptide expressing nucleotide sequence isolated from the Sargasso Sea
aatgaaaaattatttaatcaaactgggaagacaagcaaaaaaggctttagttactcctgtatcatcaaaaaaaaaagataaagttttaaaagattattgtaatttaatatcaaacaaccaattaaatataattagagaaaataaaaaagatttaaggcaagctaagaacaaaaaattaaaagaaaatctcattaaaagacttattattgataaaaaaaaaattttgcaaattataaattctgtaaaaataattagaaaatttaaagatcctgttaaccaagtgatggaaagctgggagagaccaaatggccttagaatatcaaaagtaactacctcaattggtgttgttgctgtgatttatgaaagtagacccaatgtaacatctgatgttgcatcattatgttttaaatctggaaatcctgttattttaaaaggaggatctgaggcatacta

SEQ ID NO: 215901 - DNA, 400 bp, Unknown
  Bacterial polypeptide expressing nucleotide sequence isolated from the Sargasso Sea
gatgagtgactattttcaagagattttaaaccattcaaagagggcatcgagtgccatgtctaaactatctgcagaggatagaagtagaattttaatgaatattagtggttttctattatctaataaaaatgaaattctaaaagctaatcaagcagatgtagaaagagctaaatcaaataatatttctgcacctatgattaatagattagttttgacttcagagaaaatagatcaactttctcgtgacgttgagaaaatagcccaaatgcaagatccccttgatcaaactttagaaagttggaccaatgccactaatgggttgcaatttacaaaagtctcagtgcctattggtgtgattggtattatttatgagtctcgacctaatgtcacaatagatgct

SEQ ID NO: 215902 - DNA, 699 bp, Unknown
  Bacterial polypeptide expressing nucleotide sequence isolated from the Sargasso Sea
tatgaaaaaattattaattaatataggtaaaaaatctaaaagtgctttttctaatcaagtaaaatccaaaaagaaagaccaagttttaaaaaattaccatcaattaataaaaaaaaataaaaaaataattataaaagaaaataaaaaagacattaaaaatgcttacaaaaaaaaattaaaagataatttaataaaaagacttattttaaatgatgagaagattctagatattattagatcgataaaaaaaatcataaaattaaaagatccgactaacatcgtcttagagaaatggaaaagacctaatggattaaatatttctagaatctcaattcctataggtgtgattggagttatatatgaaagcagacctaatgttacatcagatgtagcctctctatgttttaaatcgggtaataccgtaattttaaaaggtggctctgaggcattttattcaaataaaattttatccaaactatttagagactctcttaaaaaaaacaaaataaatcaaaattttgtacaatttatagatattaaaaaaagaaatgttgttgattttatgctgactaaaatgagcaaatttattgatgtaattattccaagaggaggaaaaaacttaattaaaaaaattcaaaaccaatcatctataccaactattggccatcttgaaggtgtctgtcattcatatgttgataa

SEQ ID NO: 215903 - DNA, 193 bp, Unknown
  Bacterial polypeptide expressing nucleotide sequence isolated from the Sargasso Sea
tttttaaataccgtgggtagcgcaatcgttatgcataacacctcgacccaatttgctgacggaggtgaatttggcttaggtgctgaaataggaattgctaccggcaaattgcacgcccgagggccagttggattagaagggctgacaacttataaatatatagtgagaggaaatggacaggttagaccgtaaa

SEQ ID NO: 215904 - DNA, 859 bp, Unknown
  Bacterial polypeptide expressing nucleotide sequence isolated from the Sargasso Sea
tatgaaagtaggccaaatgttacagctgatgtatcttgtctttgctttaaatcaggaaattcagttattctacggggtggttctgaatcatatttcagcaataaaataatatcaaatctttttaggaaggctttgttagcatacaaggtagacaaaaattttgtacagtttattgatgtaaaaaaaagatcagctgttaattttatgctttctaaaatggataaatttattgacataataatccctaggggtggtaaaaaattggttagcactgttaaaaaattatcgactgttccaactataggacatcttgaaggtgtttgtcacacttatatagataaaaacgcagatttgaaaatgtcagaaaatataattttaaatgctaagatgagaaatacaagtatttgtggtgctacagaaactctactaatgcatgaaaaaattttgaaaaaatttgtaaatccaattttaaacagacttgaaaagtctaaatgtaaaatttatgcagataataagattaaaaaaatctttaagggaaaagctttgaaggcaaaaaaaaataattggggtaaagaatacttgtcgtcaaagatatctgttaaatcagttaaagatattaaagaagctgttgaccatgttaatagatacggaactatgcatacagatgctataattacaaaaaataaaaaaaacgctaatttttttttaaaaaatgtaaaaagttcaattgcaattcataattcatcaacgcaattcgcagatggtggagaatttggtttcgggggagaggtgggaatttctaccaacaaaatacctccaagaggacctgttggattagagcaattaatcagttataaat

SEQ ID NO: 215905 - DNA, 865 bp, Unknown
  Bacterial polypeptide expressing nucleotide sequence isolated from the Sargasso Sea
atgaattcaattggcactaaagctcaaaaagcaataaaacaaaaaattaattcaaataaaaaaaataaagtattaatagattacgcaaaattattggataaagaaaaaaaaattattattaatcaaaatttaaaagatattaaatttgctaaaaaaataggattaagcgaaaatttaattgatagactcaaattaaatcaaaaaaaaatagatagtattaaagattctattattaaaattgctaagttaaaagacccagttgataatactctaagtaaatggaagagacctaatggactaagcatcagcagaatatcaatacccataggagttatcggagttatttacgaaagtagaccaaatgttacatcagatgtggcaagcctatgtttcaaatctggaaatgcagtaattttaaaaggtggttcagaggcaataaatacaaacaaagttttagctaggttgtttagagcatcacttaaaaaaaacaaagtggatgaaaattttgtacaatttattgactctaaacaaagaaaacttgttgatattatgctatctaaaatgaaaacttatattgatgttattattccacgcggtggaaaaaaattagtaaaaagaattcaggaagtttctactatcccaataattggtcatctcgaaggactttgtcatacttatatagataaagatgcagaactaaagatggctagagaagttgtttataatgctaaattaagaaatactagtatttgtggtgccactgaaacaataataattcataaaaacattattaacaaatttattaatccaattttgcaaaaactggaaagcaatggctgtaaaatttatggagataagatttgaa

SEQ ID NO: 215906 - DNA, 370 bp, Unknown
  Bacterial polypeptide expressing nucleotide sequence isolated from the Sargasso Sea
agctgctgacaagcgagttaaaaatgcgtctgaatcagactggagcaccgaatatttggactctattatatcaataaaacaagttaccggtgttgacgatgctatcatgcacataaataggtatggaagcgagcacactgacgcaatagtgacaaatgatgaaaatatagctgaggaatttctttcaggcgttaatagcgctatagtattacacaatgcatcaactcagtttgcagatggtggagaatttggaatgggtgcagaaatcggaattgccaccggaaaattgcacgcacgtggaccaatcggactcgaacaactgactactttcaaatatgttgtcaggggcaatggtcaggtgagaccataa

SEQ ID NO: 215907 - DNA, 931 bp, Unknown
  Bacterial polypeptide expressing nucleotide sequence isolated from the Sargasso Sea
aaatttcaaaaaatatctgttcctttaggtgtattaggtgtgatttatgaatcaagaccaaatgttactattgatgcatcatgcctctcacttaagtctaataattctctaatattaagagggggtagtgatagttttcatacatcttttgaacttgtaaagatagtaactgattcatttaataaagctgggcttccaaaaaatattattcaaatgataccaactactaaaagagaagctgttgatcatcttttatcaatgaatcattacgtcaatgtaataattccaagaggtggaaaaagtttaataaaaaaaattaatgaaaaaagtaaaataccagtaattaagcacttagaaggattatgtcatatatttgtggataaagaagcaaacattgaattagctaaaaaagttatttttaatagtaaattgagaagacctgaaatttgtggtgcaacagaaactttactaatagattcagaaataaaagaaaaagcatatcaattattgcttccattacatgaagctgggtgtgaaataaaaggtgatgagtttattcaaacattagataaaaattttaattcagctactgaagaggattggtcaatagagtatttagataaaattatttctgtaaaaattgttaacggtgtaaagggagcaattgaacatattaataagtactcatctaatcatactgagtcaataattactgaaaatgaacaaaagtttatagaattttataataatatagacagtgcgataatacttaaaaatgcatcaacacagtatgctgatggaggagaatttggctttggtgcggaaattggtatttctactgataagcttcatgtgaggggtccagtaggtgcaaaacatttaacaacatttaaatatgttgttcatggaagtgggcagattagaccataaa

SEQ ID NO: 215908 - DNA, 679 bp, Unknown
  Bacterial polypeptide expressing nucleotide sequence isolated from the Sargasso Sea
aatgtcggattacatagatgttattgtccctagagggggaaaaggcttggtaggcaaagtaaaaaaattttctaaagttagtgtaatcgggcatctagaaggaaattgtcatgtttatgttgataagaattcaagtcttcaaatggcaaaaaaaattgttttaaattctaagatgcgaaggacctcagtttgtggagcagctgaaactttgttaatagataaaaaatgtttaaaatcgcatggtattccaattataaatgaattaattttttcaggctgtgaagttattgcagataagaaaataaataaattatttggaaatactctaaaaactgcaaaagaaagtgattgggaaacagagtatcttaattcaaaaatatctgcaaaagtagttaatggtgttgaagaagcagtagatcatatcttgcgctacggcactatgcatactgactcaatagtaactaataataaaaaaactgcacaaatatttttaaacggaattaatagttcaattgcagttcataatgcatctacccaatttgcagatggtggggagtttggttttggtggtgaaattggtatatccacaaataaaatgccgccgagaggtccagtcggtattgatcaattaacttcctacaaatacatagtaactggcaaaggaagtatcagatcataa

SEQ ID NO: 215909 - DNA, 599 bp, Unknown
  Bacterial polypeptide expressing nucleotide sequence isolated from the Sargasso Sea
catgagtattgaaaataatattattgaattaggcaaaagagcaaaaactgcttctttaaatatgaagatttgcagcagcgatcaaaaaaatcttgctttaacaaaactcactaaaaatttagataaaaacagagataaaattcttgaggctaataagatagatttagaaaatggagaaaaaaaatctttagcaaaacctttaatgaatagacttacattaacagaaaaatcaattgatggattgattacatcaattgaagatataattgaaataccagatcctattggtattacactagaaaaatgggaaagacctaatggattgcagtttcgtaaaatttcaacaccgcttggtgtattaggtgtaatttatgaatccagaccaaacgttactgttgatgcttcttgtctttccataaaatctggtaattgtataattttaaggggtggtagtgatagttttcattcctctaaagaattggtaaataatattacaaatgctttcacggaagctggcctccctgaacattgtgttcaaatgattaatacacctgaaagagaagcggttgatcatttacttagtatgagagattatgttg

SEQ ID NO: 215910 - DNA, 373 bp, Unknown
  Bacterial polypeptide expressing nucleotide sequence isolated from the Sargasso Sea
atgaataaaaaagacatcaaaaaatatgttctacgtgtttgttcatcatcttatgaggcatctaaggttgcaagaacgctttctaacgcccagagaaacaagataatcagcagcattattgcttctctcaggaaagataaaaatactatttttaaaaagaacgaaattgatataaaagcagccaagataaaaaagatgtcagaatccctaatagataggttattgataaacgataaaagaatttcatccatgattgatgggcttaaaaaaattaagtccataccagactccttattcaagaaagtcaataaaactattcagccaagtggaatcactgtcgaacaaatgagagtacctctaggtgtcattggta

SEQ ID NO: 215911 - DNA, 639 bp, Unknown
  Bacterial polypeptide expressing nucleotide sequence isolated from the Sargasso Sea
gaaagggattagtgaagctaatttctgaagaatccagagtccctgtaattaagcatctagatggtatatgtcatgtttatatagatgaagactcagatgcaaaaaaatctattgatattgcctttaatgcaaagacttacaggtatggtatttgtggagctatggaaactttacttgttcatagagaagtagctaaaaatatacttcctcagttgtcagagagatattcttcagaaggagttgaattaagaggttgtaaggaaacaaaagagattattaaggttaaaactgctaatgaggaagattggtctactgaatacttggcccctattctgtcagtaaagatagtaggaggaatagaggaagccataaagcatattaatttattcggttcgagtcatactgattcgatagttacagagaataatgagaaagttgcaattttctttgatcaagtagactccagctctgtaatgcataatttacctacatgctgggctgatggttttgagtatggccttggtgccgaggttggaatatctacagacaaaattcatgcaagaggaccagtaggattagagggcctcacttcgcagaagttcatagtaaagggtaattctcaacttagaggatcttgag

SEQ ID NO: 215912 - DNA, 935 bp, Unknown
  Bacterial polypeptide expressing nucleotide sequence isolated from the Sargasso Sea
aaaaaattctaaagaaatattagaggctaataatgctgattatttaagtgcagaaaaaaaaggtatttctagtgctttactttcaagattaaagttatcaaaagcaaaattaaatgcaggaattgaaggagtaagaaaagttggagaattggctgatcctgtaaatcaagttcaaataaaaagagagctttcaaagggattgatcttagagagaaaaacagtacctattggagtcttaggggttatttttgaatcaaggccagatgccgtgatgcagattagttcattagcaataagatcaggtaatggagtaatgctaaaaggtggaagtgaagcaaatttaacaaatacttcaatagtgaaagcattgcaagaaggtttaaatgaatcaggtcttgataaaaatgcaatatgtttactaacaagcagaaaagatagcatggcgatgttaaatcttgagaaatatattaatttaataattccgagaggaagtaatgaattagttaaatttattcaggagaatacaagaattcctgtactaggacatgctgatggaatttgtcatttgtttatagataatgaggcaaatctaaagatggctttatcagtcgctttggacagtaaaattcaatatcctgcagcatgtaatgctatcgaaactttattagttcataaagatatcgcatcagcttttttagaaaaggccatccctttgtttaactctaacgatgttaaattaattggagataagagatcagttgaattagggttaaagtatgaggctagtctagaagattggaaaactgaatatttggatttaattttatcgataaaaattgttgatgatctcgaggaagcaatcacacatattcaaaaatatagttcaaagcatacagatgggataattactgaaaatttaaatattgcccaataaa

SEQ ID NO: 215913 - DNA, 583 bp, Unknown
  Bacterial polypeptide expressing nucleotide sequence isolated from the Sargasso Sea
tatggcgaatatctttgaagtgcctcaaccaggaaatgatcttctagaaaaagctgatcatgttcgtttggcatcaataaaaataagtcagactgaaaatcaagatagaattaaagcattaaattttatggctgattatcttgaaaaaaatactaaagaaattttagatgccaataatgttgactatcaaagtgcagaaaaaaaaggcatctcaagggctttgctctctagattaaagttatcaaaagaaaaattaaattctggaattgagggtgtaagaaaagttggagatttggctgatcctgtaaatcaagttcaaattaaaagagaactttcaaaaggattgatcttagaaagaaaaactgtgccaattggagtcttgggagttatttttgaatcaaggccagatgccgtgatgcagattagttctttagcaataagatcaggtaatggagtaatcctaagaggtggtagtgaagccaatttaacaaatactgcgatagtcaaagcattgcaagaaggtttaaatgaatcaggtcttgataaaaatgccatttgtttacttacaagcaggaaagatagc

SEQ ID NO: 215914 - DNA, 448 bp, Unknown
  Bacterial polypeptide expressing nucleotide sequence isolated from the Sargasso Sea
tatcgcaaatgaatttttgccactgattttcgatgagtttaaaaaatacgaagttgaattgaggggatgtgaaaagactaatgaaattataaatataaacctagcaatcgaagaagattggaaaactgaatatcttgagccgattctttctataaaagttgtggacggtattagtgaagctatcagccatataaatcattttggttctgggcatacagattgcatcgttaccgaagatgattctgcaaaaaaaatatttttgactaatgttgattctagttctgtaatgcataatttacctacttgttatgccgacgggtttgagtatggtttaggggctgaagtaggtatatctacagacaaacttcatgcaaggggtccagtaggtcttgagggccttacaagtcaaaaattcattgttgaaggatccggtcaattaagaaaataa

SEQ ID NO: 215915 - DNA, 766 bp, Unknown
  Bacterial polypeptide expressing nucleotide sequence isolated from the Sargasso Sea
atggaaaagaaagaattattaaatctcgcaaaaaaaacaaaagaagcttcaagagagctttctattctaactaatgatcagaaaaacaacatattagacaaaatatcaataaacctaaaaaagtactcaagtaatatattagaaaataatatcatagatattgaaaatgctaaaaaaaacaaaaaagattattcatttattgacagactgacactaagtgacaaaaaaatcgaaaatatggcacatgctatacaagaaattattaacctcaaaaatccggtaggtgaaattttagaagaaagaactctaagcggtgaaatgaatcttaaaaaaatctctgtcccattaggtgtaataggtgtgatatatgaaagcagaccagaaataaccactgatataggttgccttggaattaaatcaggaaatgccgtaattcttaaaggtggaaaagaatcaattaatacaaatattatattagaaaaaataataaaagactcttctaaagaagttgggtgtaatccaaatattgtgaatgtaattaaatctactgaccgtaaaattaccgaagaattcctgctcttagatgaatatattgatctaatgataccaagaggaggagagtcattagtcaatatggttggggaaaaagctaaaatgccatctatatcgggaggtgtaggtgtgtctcatatatatgtagatgaacatgctgattttgaaaaagctataaaaataacatttaatgcaaaagtatcaaaacctagtg

SEQ ID NO: 215916 - DNA, 571 bp, Unknown
  Bacterial polypeptide expressing nucleotide sequence isolated from the Sargasso Sea
ggctttatcagtctctttggacagtaaaattcaatatcctgcagcatgtaatgcaattgaaactttattagtgcataaagatattgctccagtttttctagaaaatgcaatacctttatttaatgctaatgatgttaaattaattggagataaaagatctgttgaattagggctaatttataaggctagtctagaagattggcaaactgaatatttagatttaattttatcaataaaaattgttgagaatcttgatgaggcaatcactcatattcaaaaatttagttcaaaacatacagatggaataatcactgaaaatttaagtactgctaataaatttatgaatgtagttgatagtgcaggtgtttttcataattgctctactaggtttgcagatgggtttagatatggattcggagctgaagttgggatatctactcaaactttgcccccaagaggacctgtaggcctagagggtctggttacatataaatatttcctaaaaggaaatgggaatatagttgatgatttttcatctggcaaagctatctatactcataaggatctttaa

SEQ ID NO: 215917 - DNA, 518 bp, Unknown
  Bacterial polypeptide expressing nucleotide sequence isolated from the Sargasso Sea
aatgaaaaaatatttaacatctattggaaaaaattctaataaagcattaagttataaaattaattttaaaacaaaaaataaagttttaaaaaaattttcagaattaataaaaaaaaataaattaaaaattatcaaacagaataaaaaagatattaaatttgctgaaaaaaagaaattaagaaagaatttaatagatagacttcagctaaatgatataaaaataagtgaaattattaaatccgttaataatataattaaactaaaggatccaactaatataaccttagctaaatggaaacgtccaaatggattaataattaaaaaagtaacaattccaataggagtgataggtgtaatttatgaaagtagaccaaatgtaacagctgatgtttcaagcttgtgttttaaatctggaaattgtgttattttaagaggtggctcagaatcttatttttcaaataaaattcttgctcatttatttagaaaagctcttaaattcaacaaagttgatcaaaatt

SEQ ID NO: 215918 - DNA, 437 bp, Unknown
  Bacterial polypeptide expressing nucleotide sequence isolated from the Sargasso Sea
tctaagcataatactagatgagttatttaaatataatgtgaaattaaggggctgcaaaaatatattaaatatgaatactaatattaaccctgcgtctgaagatgattggtatacagagtatcttgctcctattattgctattaagattgttaaaaatattgatgaggcaattcatcatatctctaaatatggttcctcacatacagatgcaatagtttcctcagataaaaaatctattgaccaatttaagaaaagagtgaattctagttctataatgataaatacctcaacaagatttgctgatggttttgagtatgggttaggggcagaaattggaattagtacagataaattacatgctagaggccctgttggtttaacaggattgactaacctaaagtatatagtagacagtaaaggaaaaattagaaattaaa

SEQ ID NO: 215919 - DNA, 472 bp, Unknown
  Bacterial polypeptide expressing nucleotide sequence isolated from the Sargasso Sea
gatgattaaacaaaaaataaaaaattatgttttaagtgtctgtcgtgcgtctcacgaagcttctaagctatctaggactctatcaaatactgagaggaataaaatattaaatgccataatagatcagcttagtgatcataaagaccatattttcaaaagaaattctcttgatgtaaagattgctatcaaaaataaaatgtcagatgcactgatagataggttattgataaatgataaaagaatttcttctatgattgagggacttaagaaaataaaatcaattcctgatacacttttcaaaaaaattaacaaaacaattcaaccaagtggaatttcggttgaacaaatgagagtgcctataggcgtgatagggatgatatatgaatctaggccgaatgttacaattgacgctgcagggctatcaataaaatcaggaaatagtatcatactcagaggtggtagcgaatccatt

SEQ ID NO: 215920 - DNA, 478 bp, Unknown
  Bacterial polypeptide expressing nucleotide sequence isolated from the Sargasso Sea
atgattgagaaattaaatagtgtagaactcatttgtaagaaagctaaagatgcctcatataaattagcaatttcttcaaataaagaaagaaatattgctttaaaactaattgctaatcaaatattaaaatctataaataaaataactgcagcaaataaaaaagactacatagctgcaaagaaaaataaaattccttcgcctcttctagatagattactactaaatgaagaacgcattaaaaacatggctaaagatgttctcaatatatctaaactcgaagaccccattggaaaggaacttatcaaaaaattaagacctaatggtttaaaaataactaaagtatcagttccgttaggagtaatcgctgtaatatttgaatcaagaccaaatgttgcgtgtgatgtagcctgcttatgtataaaatctggtaatgctgtaatattaaaaggaggaaaagaagctaaacatacaagatgag

SEQ ID NO: 215921 - DNA, 388 bp, Unknown
  Bacterial polypeptide expressing nucleotide sequence isolated from the Sargasso Sea
atgaattatattaaaaatattggagaaaaatctttaaaagcatttgagaacttaaagaatgtggaacattcaaaaattaaaagagctctaaaagaatacgcgtcccttgtgaagaaaaataagtttaaaattttaagggaaaactcaaaggatataaaaaaagcaaaaagaaaaaaacttatagacagattaatcttaaatagcgcaaagattaaccagattgtatcaagtataaaaacaattgaaaaatttaagaaccctgttggtcaagttttatccaaatggaaaagatcaaataaactaaaaattgagaaagtatcaattccaataggcgttatatctgttatatatgagagtagaccaaatgttactgcggacgttgcatcgc

SEQ ID NO: 215922 - DNA, 409 bp, Unknown
  Bacterial polypeptide expressing nucleotide sequence isolated from the Sargasso Sea
atgactgacttatctgtctacatagagcatttaacgaaggaagctagacaagcttccttcgcaatgtctatcgcttctagcgaggctaaatcatttgcactaaacgctatagctgctcgacttgatgcttcacgggaccaattaaaatctgccaacgctaaggatttagaaagatcttcggatgctggtcttgaacaggctttgatagacagattgaagctggatgatatagctattgaccaaatggttgaggggattgcacaagttgatcgtctagcagatcctattggagagataacggacttaagttttcgaccaagtggaatacaagtaggacgaatgcgggtgcccttaggaactattggcattatatacgaatcgcgacctaatgttactgctgatgcggcag

SEQ ID NO: 215923 - DNA, 892 bp, Unknown
  Bacterial polypeptide expressing nucleotide sequence isolated from the Sargasso Sea
tgaaagtagacccaatgttacctctgatgtatccagtctttgctttaaatctggtaattgtgttattttgagaggcgggtcagaagcttattttacaaataaaatattagtaaatttattcagaaaatctcttaaaaaaaataaagtagatgaaaattatgtacaatttattgatacaaaaaacagaaaagctgttgattttatgctttctaaaatgaaaaactatatcgatataattatacctagaggaggaaaaaatttagtcaaaaaagtacaaaagctttcaaatgtgcctgttataggacatttggaaggaatttgtcatacttacatagataaggatgcaaatttgaaaatgacaataaaagttttaataaatgcaaaattacgcaatacggctatatgtggggcaaccgaaacaattttattgcataaaaaaattattaaaaaatttgctaaaccaataataaaaactttagaaatcaataactgtcaagtttttgcagatagaaatataagaaaaacatttaaaggaaaatcaaaattagcttctaaaaaggattggtcaacagaatatctttcttcaaaagtatctataaaaacagttaataacattcaagaagctataaatcatattaatgaatatggaaccatgcatacagatgcaataattactaaaaataaaaataatgcagaaatatttctaaatgatgtaaaaagctctatagcaattcataatgcatcaacacagtttgcagatggtggagaacttggatttggtggtgaagtgggaatttctactaataaaatgcctccaagaggccctgtaggattaaaccaacttgtatcatataaatataaaatagtaggaacaggtcaaataagaaaataa

SEQ ID NO: 215924 - DNA, 625 bp, Unknown
  Bacterial polypeptide expressing nucleotide sequence isolated from the Sargasso Sea
cttcatcgacgcaaaagcggaccccgaaaaagcgacgaagctagttttggattctaaaacagattaccccgcggtctgtaatgccctggaaaccctgttggtggatcgtgagcttagctccgaacttctaaaaaagatcatggaagatcttgttcaggctggagttgaaatcagggcctgtccggatacacagaagaaacttgaaggtcactcccaacttaaaatgggaaatgcttcagaagaagactggaaaaccgaataccttgaaatggttctttctgtaaaaacggttgcaggactggaagaagcgattcagcacatcaaccgttatggttccaatcataccgattctattgtcaccgaatctcatgaggctgccgaaaggttcatgaacgaagttgattctgccggtgtattctggaacgcctccacgcggtttgccgatggattccgttatggacttggtgcggaggttggtgtcagtacctgtaaaacccatgcccgcggaccggtcggactggagggaatggtgatctacaaatacaagctctatggaagcggccagggagcgggaagttacagcaaaggggaaaggaaattcatgcaccaacccctggaaacctga

SEQ ID NO: 215925 - DNA, 832 bp, Unknown
  Bacterial polypeptide expressing nucleotide sequence isolated from the Sargasso Sea
catgctgcaaaatgtgaaactggcacgtgatgccagccttacaatggcaaatatagaaacctcgcagaaaaataaaattctacatgatctggcagaagcactgcgagcaaattacgataggattttagttgaaaacaccaaggacatgaatattgccaacaaaatgcttgaaagtggcgagcttacgtatagtgcatgcaggcgtgtgatgctcaacaaagtcaaaattgaccagatggcaaataattgtgaatgtgttgctgacttgccagaccctgccggcaaaacggtgaaggtaacacgtctcgatgatggacttgatcttcactgtgtttcatgtcctatcggagttataatggtgatctttgaatcacgtccagatgtggttgttcagatttctgctcttgccctcaaatcaggcaattcagtaattctgaaaggaggaaaagaatccaaaaattcaaatcgtgtgttggcaggaataattcgaaacactttagcaaaaagtgattctgcactcgaaaatgttgtcatcttagtggaaactcgggatgaagtgactgagctagtaaaaatcggttccggaattgatttaattatacccagaggcagttacgaattagtcagacatatacaggaaaatgcgcgtgcacctgtgcttggacatggtgatggaatctgtcatgtgtatcttcatagtgatgcggaacaaggaaaaagcctagatgtctcccttgatgcaaagctagattatccagctgtctgtaatgctctagaaaccctgcttgttcatcaaaatatccagacagttggcttgcgaacatattgctaa

SEQ ID NO: 215926 - DNA, 370 bp, Unknown
  Bacterial polypeptide expressing nucleotide sequence isolated from the Sargasso Sea
aatgaaaaattatttaaataatattggcattagatctaaaaatgcatttaaaaatttaggttatgtagacctaaagagaagaaataatgtgttaaagacttatataaaatctttaaaaagtaataaaaataaaattattaaagaaaatttaaaagatataaaactttgtaagcgtgaagagttaatagatagactaattattgataataaaaaaattgagaatatgagaagctcaatttatgaaatcgtaaaatttaaagatcctttaggaaaagtgcttgaaaaatggaaaagaccaaacaatttgttaattaaaaaagttactgtaccaattggtgtaataggaattatttatgaaagtagacctgat

SEQ ID NO: 215927 - DNA, 374 bp, Unknown
  Bacterial polypeptide expressing nucleotide sequence isolated from the Sargasso Sea
tatgaaagaattaattacaataggaaagaacgcaaggatagcttctcaaacaaaaattgataaaaaaactaaaaataatgtattagaaaaatttttatttttaattgaaaaaaataaaaacgagattctattagctaataataaagatatctcctctgcttccaaaaaaaatattcctgaaaattttataagtagattaagattagataaacaaaaaatagagagtattcaaaaatcaataaaaaaaattaaacaattagatgatccaacaaataaaataattgaaaagtggaaaagacctaatggtttaataattagtaaaatttctactcctattggggtgataggtattatttatgaaagtaggccaaatg

SEQ ID NO: 215928 - DNA, 814 bp, Unknown
  Bacterial polypeptide expressing nucleotide sequence isolated from the Sargasso Sea
atgaaaaactttatgtataaaataggtctaaatgcaataagtgcatctaaaaataaaattaattctaaattgaaaaataggattttatacaaatatatttatttaattaaaaaaaataatcaacttattattaaagaaaataaaagagatattaaactggctctccaaaaaaaaattagaaataatttaattaatagattaattattgataaaaaaaaattaaataacatttgcaattcaataaagggaattattaagttaaaagaccccgttgatgtaactattaaaaaatggaaaagaccaaacaatttatttattaaaaaagtttcaatacctttgggtaccattggagttatattcgaaagtagaccaaatgtagcttgtgatgtttctagtttatgttttaaatcaggaaattcagtaatcttaagaggcggcagtgaagccttaaattcaaacaaaatattagtaaaattattcagaaaagctttaaaaataaataaagttgatcctaactttgttcaattaattgaaaaaaaaagccgaagctatgtaaattttatgctatcaaatatgagcaaatatattgatgtaattattccaagaggaggaaaaggtttagtaaaaaaagttcaaaaattgtcaaaagttccaactattggtcatttagagggtatttgtcatacatacatagacaaagaagctgacctccaaatggcaattaaaattgtacataatgcaaaattaagaaatacaagtatatgtggagcaacagaaacattacttttacataaaaaaattgctaaaaaatttt

SEQ ID NO: 215929 - DNA, 443 bp, Unknown
  Bacterial polypeptide expressing nucleotide sequence isolated from the Sargasso Sea
aacggcatgccccaatgttgtaaagggcctccttgatagcggttgtgaagtgcggggtgattctgcaacacagttgctcgacgatcgggtgctcgccgccacggcggaggactgggatacagagtatctggctcctatcgtatcgattaaggttgtagacgggttgcaggatgcaattctgcatgtagggaagcatgggtctcatcatacagacagtatcattactgaagacaaccgctcggcggaggaattcatgaagcgggtggatagtggcattgtcctccataatgcgtccactcagtttgctgatggaggagagtttggaatgggtgcagaaataggtatttcaactggaaagctgcacgctcgaggtccggtgggtgtggagcagcttaccagctacaaatatttagtccgcggggaaggccaggtgcggccctgag

SEQ ID NO: 215930 - DNA, 424 bp, Unknown
  Bacterial polypeptide expressing nucleotide sequence isolated from the Sargasso Sea
atgagtaaagagctttcaacattgcttaacgagataggaatcaaggcaaaaagtgccagtgcaatactaaacactgcaaccagtgatcaaaaaaataaattttttgactttgctgttgcatcaattcaagagaatgctgatgtcattcttgctgccaacaaacttgatatcaaggcagcagaaaacaataaaaaagatgaagcttttattgatcgtttagcattagataagagcagactccaaggaatatgcgataccttgactgaaattaaatcattcaatgatcctgttggtagagttcttgcttcctgggacagacctaatggcttaaatatttcgagagttgcaacgcctctaggagtcatagggctaatttttgaaagcaggcctaatgttgctgctgatgctggaggtttatgtctaa

SEQ ID NO: 215931 - DNA, 520 bp, Unknown
  Bacterial polypeptide expressing nucleotide sequence isolated from the Sargasso Sea
gctggatgccggcaagctccgcggtgccatcgatggggtgcgcaaactggcctcactgcgtgatccgcttggtaaacggcagatgcatcgggagctggatcaaggcttggtgctggagcgcatcgccgtgccccttggcgtggtgggggtaatcttcgaggcccgtccggatgttgtggtgcagattgcctcgctggccatccgctccggcaatggcgccatgctcaaaggcggcagcgaagcgcgttgcaccaatgaagcggtgatggaggccctcaagctgggcctgggtagcagtgccgtggcaccggatgcgttgacgctgttaaccacccgccaggaaagcctggcgttgctgcggctggatggcctggtggatctgatcattccccggggtagcaacgagctggtgcgattcattcaggacaacacccgcattcctgtgctgggtcatgcagatggcatctgccatctctatgtggatgcagctgctgacgttgatcaggcggtacgcatcgcc

SEQ ID NO: 215932 - DNA, 220 bp, Unknown
  Bacterial polypeptide expressing nucleotide sequence isolated from the Sargasso Sea
cttcggaggagctgctgctaaaagatttgctgctcgggtcgataccgcggtcgttctcgtcaatgcaagcactcgcttcaatgatggtggcgaacttgggcttggtgcagagattggaatttcaacagacaagctccatgcgcgtggcccatgtggcccacgggaattgaccacatacaaatatgtcgttacgggaaatggacagaccaaagggtcgtga

SEQ ID NO: 215933 - DNA, 856 bp, Unknown
  Bacterial polypeptide expressing nucleotide sequence isolated from the Sargasso Sea
tatgaatttaattggaataaaagctcgaaaagctagtgagtataaagttacaactgaagtaaaaaataaagtcttaaatgattacgcgaaattaattaagaatgaaaaaaaatttattattaatcaaaattcaaaagatattaattacgcaagaaaaaaagggttaaaagaaaacttaatcaaaagacttcatttaaatgaaaataaattagatggaattataaattctattttaaaaatagttaaattaagggatcctataggtagcactttagaaaaatggaaaagaccgaatggtttaaatattaaaagagtttcaataccaattggagttattggagttatttatgaaagtagaccaaatgtaacttcagatgttgctagtctttgttttaaatctggaaatgtagtgattttgaaaggaggctctgaggccataaattcaaataaagctttagctaagctgtttagaaaagcacttaaaaaaaataaagttgatgaaaactttattcaatttatcgactcaaaacaaagaaaacttgtggatattatgctttctaagatgaaaaaatatatcgatgtaattatacctcggggcggaaaaaatttagttaaaaaagttttagaattatccaaagtacctataattggacacttagaggggctttgtcacacctatatagataaagatgcagaattaaaaatagccaaaaaagttgtatataacgctaaattgagaaatacaagcatttgtggtgcgactgaaactattcttattcataaaaatatagttaaaaaatttagtaatcctattttgcaaaaacttgaaaatagtggttgtaaaattgtggagata

SEQ ID NO: 215934 - DNA, 721 bp, Unknown
  Bacterial polypeptide expressing nucleotide sequence isolated from the Sargasso Sea
tgttaatcttgagaaatacattaatttaatagttccaagaggaagtaatgaattagttaaatttattcaggagaatacaagaattcctgtgttaggccatgctgatggaatttgtcacttgtttatagatattgaggcaaatctagagatggctttatcagtcgctttggacagcaaaattcaatatcctgcagcatgtaatgctatcgaaactttattagtccataaagatatcgcaccagcttttttagaaaaggccatccctttatttagttctaatgatgttaaattaattggagataagagatcagttgaattggggttaaagtatgaagctagtctagaagattggaaaactgaatatttggatttaattttagcgataaaaattgttgatgatctcgatgaggcaatcacacatattcaaaaatatagttcaaaacatacagatggaataattactgaaaattcacatactgccaataaatttatgaatgtggttgatagtgcaggtgtttttcataattgctctactaggtttgcagatggctttagatatggattgggagctgaagttggtatatctactcaaactcttccaccaaggggacctgtaggactagagggtttggtaacttataaatattttctaaagggtgatggaaatatagttgatgatttttcatcaggaaaggctatctatacacatgaagatctttaa

SEQ ID NO: 215935 - DNA, 124 bp, Unknown
  Bacterial polypeptide expressing nucleotide sequence isolated from the Sargasso Sea
ggtctaggagcagaaataggaatttcgaccgataaaattcatgcgcgaggtccagtcggcttagaaggcttaacgactgaaaaatatgtagtctttgggaatggcgagatccgaaaaagataaa

SEQ ID NO: 215936 - DNA, 1108 bp, Unknown
  Bacterial polypeptide expressing nucleotide sequence isolated from the Sargasso Sea
atgaacataagagaaactataattgatttgggtaaaaaagcaaaaattgcatctcaagaaatgagattaataaaaaataaagaaaaaaatttagctttagaaaaccttattaaaaatataaatttaaattcagaacaaataataactgcaaatgaaaaggatgtagaactcgcattaaaaaaaaatttatcttcacctcttattaaccgtctaaaaatatcaagtaataatattaaaaatttaacaaaaagtataaatgaaataattactcaaccagatccaataggaataactttagaaaaatggtctcaaccaaatggtttaaaatttaaaaaaataactattcccttaggtgttttaggagtaatttatgaatcaagaccaaatgttacggttgatgcgtcatgcatttcattaaaatcaggaaattcaattatccttagaggaggaagtgacagttttaatacttctcaaattctcgttaaaataatttctaattcatttaatgatgttggcattcccaaaaacatagttcaaatgatcccgtttgctgatagagaatcagtagatcatcttttgaatatgacaaattatgttgatgtaattattcctagaggtggaaaaagtttaattgaaaaaattaaatctacaagcaaaatacctgtcataaaacatcttgaaggtatatgtcatgtatatgtagattttgaagctaatataaatatagctaaaaaaataatactaaatagtaagttaagaagacctgagatttgtggtgcaacagagacacttttaattgacgaaagaataaaagacagggcgatagatttgttattacctctacatgatcaaggttgtgaaattagaggtgatgattttgttaaatccctaaataataattttaagaaagcaaaagaaattgattggtctactgaatatttagaaaaaatactatctgtaaaagttgttaatggagtagaagatgctatcaatcatataaatgaatattcatctggacacactgattgcattgtaactgaaaatgaagatacatttcaaaaattttataataatattgatagtgctataattcttaaaaatgcttcaa

SEQ ID NO: 215937 - DNA, 1131 bp, Unknown
  Bacterial polypeptide expressing nucleotide sequence isolated from the Sargasso Sea
tatgataaaaagatattttgaaataattggaagaagatctaaaaaggcttttgaaaataaggttaaaaatgagttgaagaataaagtcttaaatcattatgcacattcgattcaaaaaaacgtaaaatctatattatcacaaaataaaaaagatattagttacgcaaaaaaaattggattaaaagataattttatttccagattagaattagatacaaaaaaacttagagccattataagttcgatcaattcaatatcaaaattaaaagatccaactgatagaatactagaacagtggaggagaccaaatggtttaaaaattaaaaaagtttcagttccaataggtgtaataggggtgatttatgaaagtagaccaaatgttacctcagatgtttcgtgcctgtgttttaaatcaggtaattctgttattttaaaaggaggctctgaagcatactttaccaataaaattttatctaacctatttagaagatctttaaaatttcataaaattgatcctaatttcgttcaatttgtagacatgagaggtagaaaggttgtagatcacatgctttctaaaatgacaaaatatattgatataataattccaagaggagggaaaagtttagttaaaaaggttcaagatacctctaaattgccagttataggtcatctagagggcttgtgtcatacgtacattgacagtagtgcgaatttaaaaatggctttaaaagtcgttttaaatgctaagctgagaaatactgcaatttgtggtgcaacagaaactattctattaaatgataagttaattaaaaaattttctaaattattaattacaaaattggaaaataatggctgtgtggtttatacagataataaaattagaaaagtttataagggaaacagttttttagcgtctgaaaaagactggatgactgaatatttaaattcaaagatatctattaaatcagttaaaaatgtaattgaagctataaatcatataaataaatatggaacacaacacactgacgcaattatttgcaagaacaaaaaaacgtctaaaatttttttaaaaaatgttaaaagttcaatagctaagcataatacatcaactcaatttgcagatggtgggga

SEQ ID NO: 215938 - DNA, 769 bp, Unknown
  Bacterial polypeptide expressing nucleotide sequence isolated from the Sargasso Sea
aatgaaaaattatttaaaaaatattggaataaaatcaaattatgcatttaaaacaaaaattaaagaaaataaaaaaaatgaagttttaaaaaaatttatttttttattaaaactaaatcaaaataaaataattagacaaaacaaaagagatttagttaaagctaaaaaaaaaaatattaaatataatttgatccagagacttgaaattaacaaaataaagattcatcaaatgatagaatctataaaaaagataataaagttaaaagaccctacaaataaagtaatagaaaaatggaaacgtccaaacggacttattattaaaaaagttacagtgcctattggaattattgcagtaatttatgaaagtagacctaatgtaacatctgatatagcatctttatgtttcaaagcaggcagttgtgtaattttgaggggaggatctgaagcttatttcacaaataaaataatttctgacttgttcagaaaagccctaaaaattaataaagtaaatttaaactttgttcaatttatagaaaagacagatagagatcttgtgaatgatttattatctaaaatggaaaattatattgatattataatccctagaggtgggaaaaacctagtagaaaaagttaagaaattatcatcggtaccgtttattggtcacttagctggagtttgtcatacgtacattgataaagatgcagatttaaaaaaatcaataaggattgtttttaatgctaagttaagaaatactgctatatgtggg

SEQ ID NO: 215939 - DNA, 766 bp, Unknown
  Bacterial polypeptide expressing nucleotide sequence isolated from the Sargasso Sea
tatgaatttaattggaataaaagctcgaaaagctagtgagtataaagttacaactgaagtaaaaaataaagtcttaaatgattacgcgaaattaattaagaatgaaaaaaaatttattattaatcaaaattcaaaagatattaattacgcaagaaaaaaagggttaaaagagaacttaatcaaaagacttcatttaaatgaaaataaattaaatggaattataaattctattttaaaaatagctaaattaagagaccctatagacaacactttagaaaaatggaaaagaccaaatggtttgaatataaaaagagtatcaataccaattggagttattggtgttatttatgaaagtagaccaaatgtaacttcagatgttgctagtctttgttttaaatctggaaatgtagtgattttgaaaggaggctctgaggccataaattcaaataaagctttagctaagttgtttagaaaagcacttaaaaaaaataaagttgatgaaaactttattcaatttatcgactcaaaacaaagaaggcttgtagatattatgctttctaagatgaaaaaatatatcgatgtaatcatacctcgtggtggaaaaaatttagttaaaaaagttttagaattatccaaagtacctataattgggcacttagagggactttgtcatacttatatagataaagatgcagaattaaaaatggctaaagaagttgtctataatgctaaattaagaaatacaagtatttgtggtgctactgaa

SEQ ID NO: 215940 - DNA, 1141 bp, Unknown
  Bacterial polypeptide expressing nucleotide sequence isolated from the Sargasso Sea
aatgaataaatttatgaatttaataggtacaaaaagtagaaaagcatctgaaagaaaaattaatactgaaaccaaaaataaagtattaattttatatgctcaattaattgataaagaaaaaaaatctattctaagagaaaatatcaaagatattgcatttgctaaaaataaaggacttaaagaaaatctaattaatagactaagaattgatgacataaaattaagagcaatcaaagactcaataaatcaaatttcaaaactaaaggatcctgtaaatgttacgttaaaaaaatggagcagaccaaatggactgaatataaaaagagtaacaataccaattggtgttattggagtaatttatgaaagcagaccaaatgtgacctcagatgtagctagtttatgttttaaatctggaaattcagtaattctaaaaggtggatctgaagctttaaacactaatagaattttggcaaaattatttagacaagctcttaaaaaaaataaagttaatgaaaattatattcaatttgtagactctaaagatagaaaaatggtggacataatgctttcaaagatgaaaaaatatattgatgtaataattcctagaggaggaaaaaatttagttaaaagagtacaagaattttcaaaagttcctattattggacacttagaaggtatttgtcatacatttgtagataaagatgcagaattaaatatggcatcaaaagtcatttataatgcaaagttaagaaatactagtatttgtggagcaactgaaactattctgcttcataaaaaaatagttaaaaacttttgtaaccccatcttaaaaaaactagaagataaaaattgtaaaatatatggagataatctcttaagaaaatattataaaggtaaagtatatccagctaaagaaaaagattggtctacagaatatttgaaagctgcggtatcagttaaagttgttaaaaattctgaagaagcaattaatcatataaataaatatggaactatgcatacagattcgattattactaaaaacaagaaaacagctaaaagatttttaaaaaatgttaaaagttctattgcaatgcataatacttcaacacagtttgctgatggtggtgaatttggttttggt

SEQ ID NO: 215941 - DNA, 949 bp, Unknown
  Bacterial polypeptide expressing nucleotide sequence isolated from the Sargasso Sea
atgaatttaattggaataaaagctcgaaaagctagtgagtataaagttacaactaaagtaaaaaataaagtcttaaatgattacgcaaaattaattaagaatgaaaaaaaatttattattaatcaaaattcaaaagatattaattacgcaagaaaaaaagggttaaaagagaacttaatcaaaagacttcatttaaatgaaaataaattagatggaattataaattctattttaaaaatagctaaattaaaggaccctatagatagcactttagaaaaatggaaaagaccaaatggtttgaatattaaaagagtgtcaataccaattggagttattggggttatttatgaaagtagaccaaatgtaacttcagatgttgctagtctttgttttaaatctgggaatgtagtgattttgaaaggaggctctgaagccataaattcaaataaagctttggctaagttgtttagaaaagcacttaaaaaaaataaagttaatgaaaactttattcaatttatcaactcaaaacaaagaaaactcgtagatattatgctttctaagatgaaaaaatatatcgatgtaatcatacctcgtggtggaaaaaatctagttaaaaaagttttagaattatccaaagtacctataattgggcacttagaggggctttgtcatacttatatagataaagatgcagaattaaaaattgctaaagaagttgtctataacgctaaattaagaaatacaagtatttgtggtgcgactgaaactattattattcataaaaatatagtgaaaaaatttagcaatcctattttgcagccacttgaggatagtggttgtaaaataattggtgataagattttgaagagttattacaaaggtcaaatatatcctgcaaaaaaaaaggattggtcaactgaatatttggcatcaaattgtatctgttaaa

SEQ ID NO: 215942 - DNA, 1183 bp, Unknown
  Bacterial polypeptide expressing nucleotide sequence isolated from the Sargasso Sea
gttgaagaataaagttttaaatcattatgcactttcaattaaaaaaaacaaaaaatctatattattacaaaataaaaaagatattaattatgcgaaaaaaattggattaaaatataattttatctccagattagaattagatacaaaaaaacttggaaatattataagttcgattaattcaatatcaaaattaaaagatccaactgatagaatattagagcagtggaaaaggccaaacggtttaaaaatcaaaaaagtttcagttccaataggagtaataggagtgatttatgaaagtagaccaaatgttacctcggatgtttcttgcttgtgttttaaatcaggcaattctgttattttaaaaggaggctctgaagcttattttaccaataaaattttatctaacttatttagaagatctttaaaatttcataaaattgatcctaattttgttcaatttgtagacttgaggagtagaaaggctgtagatcacatgctttctaaaatgacaaaatatattgatataataatcccaagaggtgggaaaagcttagttaaaaaagttcaagatacttcaaaattgccagttattggtcacctagaggggttgtgtcatacctacattgacagtagtgcgaatttaaatatggccttaaaagtagttttaaatgctaaactgagaaatactgcaatttgtggtgcaacagaaacaattttattaaatgaaaagttaattaaaaaattttctaaatcattaatcaccaaattagaaaataatggatgtgtagtttatacagataataaaattagaaaagtttataagggaaacagctttttagcatctgaaaaagactggatgactgaatatttagcttcaaagatatctattaaatcagttaaaaatgtaattgaggctataaatcatataaacaaatatggaacacaacatactgatgcaattatttgcaagaataaaaaaacttctaaaatttttttaaaaaatgtaaaaagttcaatagctatgcataatacatcaactcaatttgctgacggtggtgaatttggttttggagcagaggtaggaatttctacaaataacttgccgccaagaggtccagttggattaggtcagctagtatcgtataaatatgaagttattggatcgggacaaataagaaagtaa

SEQ ID NO: 215943 - DNA, 603 bp, Unknown
  Bacterial polypeptide expressing nucleotide sequence isolated from the Sargasso Sea
gcattccggttattcagcactttaagggcgtgtgtcatttatatgtggataaagacgccaatcaagatatcgccttaaatttgctgctcaatggcaaaacccaacgcacaggcgtatgcaacgccctcgaaggcttgttagtgcataaggatatcgcgccgcgattcttgccccgcgtcgccaaagcactggccgagcatcaagttaaaatcaatgcctgtcctcagtccgccgcgtatttcgacgcctgcacttatatgacagaagaggattttggccaagaatacttggacttagaaatcgccattcgccaagtcgacagttttgaggtcgccacccaacatatcgctaagtttggcagccaccataccgaagtgatttgcaccgacaatgaactcaccgccgcccgctttcaacgcgcagtgaatgcctcggtcgttatggtgaatgcttcatcgcgcttttccgatggcagcgaactcggcctcggcgccgaaatcggcatagccaccactaagctacatgcctacggccccatgggactcgaagccttaaccactgaaaaatatctggtatcaggcacaggacagattagagcttagc

SEQ ID NO: 215944 - DNA, 571 bp, Unknown
  Bacterial polypeptide expressing nucleotide sequence isolated from the Sargasso Sea
ggctttgtcagttgctttggacagcaaaattcaatatcctgcagcatgtaatgctatcgaaactttattagtccataaagatatcgcaccagcttttttagaaaaggccatccctctttttaatgctaatgatgttaaattaatcggagataagagatcagttgaattagggttgaattatgaggctagcctagaagattgggaaactgaatatttggatttaattctatcgataaaaattgttgatgatcttgaggcggcaattatacatattcaaaaatatagttcaaaacatacagatggaataattactgaaaattcaaatactgccaatagatttatgaatgtagttgatagtgcaggtgtttttcataattgctctactaggtttgcagatgggtttagatatggattcggagctgaagttggtatatctactcaaactcttccacctaggggacctgtaggtcttgaaggtttggtaacttataaatattttctaaaaggtgatgggaatatcgttgatgatttttcatcaggaaaagctatatatacacataaagatctttaa

SEQ ID NO: 215945 - DNA, 757 bp, Unknown
  Bacterial polypeptide expressing nucleotide sequence isolated from the Sargasso Sea
ggtttcacaactggtccagatgagtgaagaactggatctgatcctcccgcgcggaagcaacgagttggtccagtcgattcaggcccgtgcccaggttccagtactcgggcatgcggatggaatctgtcatgtcttcatcgacgcaaacgcggaccccgaaaaagcgaggaaggtggttttggattccaaaacagattaccccgcggtctgtaatgccctggaaaccttgttagtggatcgtgaacttaaccccgaacttctaaaaaagatcatggaagatcttgttcaggcaggagttgaaatcagggcctgtccggatattcagaagaaacttgaaggtcactcccaacttaaaattggaaatgcttcagaagaagactggaaaaccgaacatctcgaaatggttctttctgtaaaaacggttgcaggactggaagaagcgattcagcacatcaaccgttacggttccaatcataccgattccattgtcaccgaatctcatgaagttgccgaaaggttcatgaacgaagttgattctgccggtgttttctggaacgcatcgacccgctttgctgacggctttcgttatggacttggtgcggaggtaggtgtcagtacctgtaaaacccatgcccgcggaccagtgggactggagggaatggtgatctacaaatacaaactctatggaagtggccagggagcgggaagttacagcaaaggggagagagaattcatgcatcggcccctggaaacctga

SEQ ID NO: 215946 - DNA, 694 bp, Unknown
  Bacterial polypeptide expressing nucleotide sequence isolated from the Sargasso Sea
gttggtccagtcgattcaggcccgcgcccaggttccggtactcgggcatgcggatggaatctgccatgtcttcatcgacgcaaacgcagacccggaaaaagcggggaaggtggttttggattccaaaacagattatcccgcggtctgtaatgccctggaaaccctgttggtggatcgtgaatttaaccccgaatttctaaaaaagatcgtggaagatcttgctcaggcaggagttgaaatcagggcctgtccggatactcagaagaaacttgaaggtcactctcaacttgaaataggaaatgcttcagaagaagactggaaaaccgaacacctggaaatggtcctttctgtaaaaacggttgcaggactggaagatgcgattcagcacatcaaccgttacggttccaatcataccgattccattgtcaccgaatctcatgaaactgccgaaaggttcatgaacgaagttgattctgccggtgttttctggaacgcctcgacccggtttgccgacggcttccgttacggacttggtgcggaagttggtgtcagtacctgtaaaacccatgcccgcggaccggtcggactggagggaatggtgatctacaaatacaaactctttggaagcggccagggagtgggaagttacagcaaaggggaaaggaaattcatgcatcagcccctgaaaacctga

SEQ ID NO: 215947 - DNA, 1180 bp, Unknown
  Bacterial polypeptide expressing nucleotide sequence isolated from the Sargasso Sea
aatgagagaattaattaatattggaaaaaatgctaaaaaggctttttctagctcgatatcctcaaataaaaaaaatcaagtactagatgattaccaaaaattaatacttataaatcaatcgaaaattatttatgaaaataaaaaagatttaaattttgcaatacaaaaaaaactgaaagaaaacttgattaaaaggctttctttaaataaagaaaagatttctttgattattaaatctattaaatcaattaaaaactttaaagatccagttaataatgtattagaaaaatggcaaagacctaatggtttaaaaatttcaaaagttacaacaccaataggagttataggtgttatttatgaaagtagacctaatgttacatcagatgttgcttctttatgctttaaatctggaaatcctgttattttaaaaggtggatctgaagcttattattcaaataaaattttatctaatttatttagaaaagctcttaaaaaaaataaaattaatctaaattatgttcaatttattgaacaaaaaaaccataaaattgtagattttatattatctaaaatgagtaaatatatagacgtaataattccaagaggaggaaaaaatttagttaaaaaagttcagagtttatctcgaatacctgtaatcggacacttagagggagtttgtcatacttatatcgacttaaatgcaaatataaaacttgcccaaaaagttgtttcaaacgcaaaattaagaaatactgcaatttgtggcgctactgaaacaattttagttcataaaaaaatattaaaaaaattttgtgataaaattttaattaatcttcaaaataaaggttgtaaaattattgcagaaaaaaagattaaaaaatattttaaaggaaaatttattgttgccaaaaaaaaagattggtcaaaagaatatttagcaccaattgtttcagttaaaatagtgaataatttcaaagatgcaataaaacatatcaatcaatatggcactatgcataccgatgctataattacaaaaaatacaagtgttgctaaaatatttttgaaagaagtcaaaagctcaattgcaatgcaaaacacctcaactcaatacgctgatggtggtgaatttggatttgggggagaggtaggaatatctactaacactttaccacctagagga

SEQ ID NO: 215948 - DNA, 1240 bp, Unknown
  Bacterial polypeptide expressing nucleotide sequence isolated from the Sargasso Sea
tatgaatttaattggaagaaaagctcgcaaagctagtgagtataaagttacaactgaagtaaaaaataaagtcttaaatgattacgcgaaattaattaagaatgaaaaaaaatttattattaatcaaaattcaaaagatattaattacgcaagaaaaagagggttaaaagagaacttaatcaaaaggcttcatttaaatgaaaataaattgaatggaattataaattctattttaaaaatagctaaattgagggatcctatagacaacactttagacaaatggaaaagaccaaatggtttgaacataaaaagagtatcaataccaattggagttattggtgttatttatgaaagtagaccaaatgtaacttcagatgttgctagtctttgttttaaatctggaaatgtagtgattttgaaaggaggctctgaggccataaattcaaataaagctttagctaagttgtttagaaaagcacttaaaaaaaataaagttgatgaaaactttattcaatttatcgactcaaaacaaagaaaactagtagatataatgctttctaaaatgaaaaaatatatcgatgtcatcatacctcgtggtggaaaaaatttagttaaaaaagttttagaattatccaaagtacctataattgggcacttagagggactttgtcatacttatatagataaagatgcagaattaaaaatggctaaagaagttgtttataacgctaaattaagaaatacaagtatttgtggtgcgactgaaactattcttattcataaaaatatagtcaaaaaatttagtaatcctattttgcaggcacttgaaaataatggttgtaaaataattggtgataaaattttgaagagttattacaaaggtcaagtatatcctgcaaaagaaaaagattggtcaactgaatatttggcatcaattgtatcggttaaagttgttaaaaattctgaagaggcaattaagcatattaataaatatggcactatgcacactgactccataattacaaaaaataaaaaaacagcaaaatatttcttaaaaaatgttaaaagctcaattgcaatgcataatacctcaactcaatttgctgatggcggtgaatttggatttggtggagaagttgggatttctaccaatacactaccaccaagaggtcctgtaggtttaaatcaattgatttcatataaatatgaaatcactagtaatggtaaaataagaaattaa

SEQ ID NO: 215949 - DNA, 1240 bp, Unknown
  Bacterial polypeptide expressing nucleotide sequence isolated from the Sargasso Sea
atgaatttagttggagcaaaagcaaggaaagcttgtgagcatgaggttaatacaatagttaaaaataaagtattaaacaaatacgcacaattattacaaaaagaaaaaaaattaatccttaagcagaacttaaaagatattggttatgcaagaaaaataggtcttaaagataatttagtaaatagactgttaattaacgaaactaaactaaaagatatacaaaattcaattattaaaatttcaaaattaaaagacccaataaataatactttggagaaatggaaaagatctaatggtttgaatattagcaaagtatctataccaatcggagtaattggagttatttatgaaagtagacctaacgttacatcagatgtagctagtctatgctttaaatctggtaatccagtaattttaaaaggtggctcagaagcaataaatactaatagaattttagcaaaaatttttagaaaagctcttaaggttaataaagttgatgaaaactttattcaattcattgatacaaaacagagaagagttgtagatatcatgctgtcagatatgaaaaaatatattgatgtaattattccaagaggagggaaaaacttagtaaaaagagttcaagaattatctaaggtccctattattggacatcttgagggactttgtcatacctatgttgataaagatgcaaacttaaacatggcaaaaaaagttgtttataatgcaaagttaagaaacacaagtatttgtggagcaacagaaacaattcttattcataaaaaagttgtaaaggatttttgtaatccaattttaagcgagctcgaaaataaaagttgcaaaatatatggagatagatttttaaaaaaatattacaaaggaaaaatatttccagctaaagaaaaaaattggtccactgaatatttggcaccagcagtatccgtaaaaactgtaaataatcttaatgaagctattgatcacataaacaagtatggaactatgcatactgactccataatcacaagtaataaaaaaacagcaaaaaattttttgagaaatgttaaaagctcaattgctatgcataatacctcaacacaatttgctgatggtggagagttcggttttggtggagaggttggaatttctactaatactttgccgccaagagggcctgtgggattaaatcaattagtttcatataaatatgaaatcacaagtagtggtaaaataagaaaataaa

SEQ ID NO: 215950 - DNA, 1246 bp, Unknown
  Bacterial polypeptide expressing nucleotide sequence isolated from the Sargasso Sea
atgaatattttagaaacaattaatgagttaggtaataaagcaaaaactgcctctacaaaaattagagtgttaaaacctaaagagaaaaaaattgcttatgaatttttagaaaataatcttaaagataatataaaaaaaatactagatgcaaataaattagatatagataatgctataaaaaataatctctctccaccacttataaacagattaaaggttactgaagagtcaatattaggtataattcaaagtgtaagtgatattaaaaatttaccagaaccaattggtaatatacttgaaagttgggagcagcctaacggtctaaaattttcaaaaatatcggtacctttaggggtgctaggtgtaatttatgaatcaagaccaaatgttacaattgatgcttcatgtttagccctaaaatctaataatgctcttatattgagaggaggaagtgatagtttccattcatcttttgagcttgttaaaataataactaattcatttgataaagcaggacttccaaaaaatataatacaaatgatacccacaactgaaagagaggccgtagatcacctattggcaatgaataatcatataaatgtaattattccaagaggtggaaaaagtttaataaaaaaaattaatgaaaaaagtaaaatcccagtaatcaaacacttagaaggattatgccatgtttatgttgataaagaagcaaatattgaagtagctaaaaaagttatttttaatagtaaactaagaaggcctgagatatgtggtgctacagaaactcttttaatagattattcaataaaagaaagatcatctgaattattgtttccattatatgaagcaggatgtgaaataaagggtgatgagtttattcaatccctagataaaaactttaatccagcaacagaacaagattggtcgattgaatatttagacaaaattctatctgttaaaattgttaatggtgtacaaggagcaattgaccacataaatgagtactcatctaatcatactgaatcaataataactgaaaatgatgaaacatttaaagaattttataataatattgatagtgcaataatccttaaaaacgcatctacacaatatgctgatggaggagaatttggttttggtgcagagataggaatttctacagataaacttcatgtaagaggtccagttggagcaaaacatttaacaacatttaaatatattgttaatggaagtgggcaaatta

SEQ ID NO: 215951 - DNA, 871 bp, Unknown
  Bacterial polypeptide expressing nucleotide sequence isolated from the Sargasso Sea
tatgaatttaattggaataaaagctcgaaaagctagtgagtataaagttacaactgaagtaaaaaataaagtcttaaatgattacgcgaaattaattaagaatgaaaaaaaatttattattaatcaaaattcaaaagatattaattacgcaagaaaaaaagggttaaaagaaaacttaatcaaaagacttcatttaaatgaaaataaattagatggaattataaattctattttaaaaatagctaaattaagggatcctatagatagcactttagaaaaatggaaaagaccgaatggtttgaatattaaaagagtttcaataccaattggagttattggggttatttatgaaagtagaccaaatgtaacttcagatgttgctagtctttgttttaaatctggaaatgtagtgattttgaaaggaggctctgaggccataaattcaaataaagctttagctaagctgtttagaaaagcacttaaaaaaaataaagttaatgaaaactttatacaatttattgattcaaaacaaaggacgcttgtggatattatgctttctaagatgaaaaaatatatcgatgtcatcatacctcgtggtggaaaaaatttagttaaaaaagttttagaattatccaaagtacctataattggccacttagaggggctttgtcatacttatatagataaagatgcagaattaaaaatggctaaagaagttgtctataacgctaaattaagaaatacaagtatttgtggcgcgactgaaactattcttattcataaaaatatagtcaaaaaatttagtaatcctattttgcaggcacttgaaaatagtggttgtaaaataattggcgataagattttgaagagt

SEQ ID NO: 215952 - DNA, 1240 bp, Unknown
  Bacterial polypeptide expressing nucleotide sequence isolated from the Sargasso Sea
tatgaatttaattggagcaaaagcaaggaaagcttgtgagcataaggttaatacaatagttaaaaataaagttttaaacaaatatgcacaattgttagaaaaagaaaaaaaattaattcttaagcagaacttaaaagatattgattatgcaaaaaaaataggtcttaaagataatttagttaaaagactcttaattaacgaaactaaactaaaagatatacaaaattcaattattaaaatttcaaaattaaaagaccctataaataatactttggagaaatggaaaagatctaatggtttaaatattagcaaagtatctataccaattggagtaattggagttatttatgaaagtagacctaacgttacatcagatgtggctagtctatgctttaaatctggtaatccagtaattttaaaaggtggctcagaagcaataaacactaatagaattttagcaaaaatttttagaaaagcgcttaagattaataaagttgatgaaaactttattcaattcattgatacaaaacaaagaagagttgtggatatcatgctgtcagatatgaaaaaatatattgatgtgattattccaagaggagggaaaaacttagtaaaaagagttcaagaattatcaaaggtacctattattggacatcttgagggactttgtcatacttatgttgataaagatgcaaacttaaacatggcaaaaaaagttgtttataatgcaaagttaagaaataccagtatttgtggagcgacagaaacaattcttattcataaaaaagttgtaaaaaatttttgtaatccaattttaagtaagcttgaaaataaaaattgcaaaatatatggagatagatttttaaaaaaatatttcaaaggaaaaatatttccagctaaagaaaaaaattggtccactgaatatttggcaccagcagtatccgtaaaaactgtaaataatcttgatgaagctattgatcacataaacaaatatggaactatgcatactgactccataatcacaagtaataaaaaaacagcaaaaagttttttgagaaatgttaaaagctcaattgctatgcataatacctcaacacaatttgctgatggtggagagttcggttttggtggagaggttggaatttctactaatactttacctccaagagggcctgtgggattaaatcaattagtttcgtataaatatgaaatcacaagtagcggtaaaataagaaaataa

SEQ ID NO: 215953 - DNA, 662 bp, Unknown
  Bacterial polypeptide expressing nucleotide sequence isolated from the Sargasso Sea
tttggcagctgaagagctaaaaacaatcgatacagatactaaaaataaagtattaaatgacatggcgtcagaactaatcaatgatgctgacgaaatcattgaggcaaataaaattgatttagaaaatgctaagcaattagagttaactgctgctttaaccgatagattaactttaaataaagaaagaattcaaggtatgtcagatggattaaaaaagataatacctcttgaagatccagttggtaaggtaacagaatcttggacatccgatgatggattgaacataaataaagtacggtcaccttttggagtaatagggattatctatgaagcaagaccaaatgtaacaagtgatgtctcaggtctatgtttaaaatcaggaaatgcatctatccttcgtggctcaagttattgtttggattcaaatctaaaaatattaaatacattacaaaaagcattagaaaaaaataatttgtcaaagaattgcatacagcttatagagagcaaagacagagaagatacaatcgaattcatgaatatgactaagtatattgatttgatggttccacgaggtggtagaggattaattgatacattggtaaataactcaaaaagttcatttattttagatggtgatgggaaacgtgcatctttatatacat

SEQ ID NO: 215954 - DNA, 985 bp, Unknown
  Bacterial polypeptide expressing nucleotide sequence isolated from the Sargasso Sea
aatgaatataggaaaaaaatccaaaagggcattccttaaaaaattaaattcaaaaaaaaaaaataaagttttaaatgattattgtcatttaatagataaaaatagaggattaataatcaatgaaaataaaaaagatattaaaaatgctatcaaaaaaaaattaaaaaaaaatttaattcaaagactccttttagatgataaaaaaatttcaagtataactaattcagtaaaaaaaataattaaattgagagatccaacaggtataattttagaaaaatggaaaagaccaaatgggttaaatatttcgaaaatatcaatacctatcggagtaataggagttatttatgaaagtagacccaatgttacatcggacgtatcatcattatgttttaaatctgggaatacggtaatattaaagggtggttctgaggcattttactctaatcttattctttcaaagctatttagaaaatctttaaaaaaaaatggtgtagatgaaaattttgttcaatttataaattttaagaataaaaaagtagttgattttttactgacaagtatgagtaaatttattgatgtaattataccaaggggaggaaaaaatttagtaaagaaagttcaagaactttcaaatgtgccaacaattggccatttagaaggtgtttgccattcatatatagataaagatgcaaatctaaaaactgcaaataaaattatttataatgctaaattaagaaatactgcaatctgtggggcaactgagacaatactattacatgaaaaaattattaaaaatataggaaatcaagttttaaaaaacttagaaaacaatgggtgtaaaattattggtgataaaaaaataagaaaaatttatagcaatagaattaaaaaggcttcaattaaagattggtcaaaagaatatttagcaccaatagtgtctgtaaagtcagtaaaaaacatagatgaagcaattgaacatgtaaat

SEQ ID NO: 215955 - DNA, 469 bp, Unknown
  Bacterial polypeptide expressing nucleotide sequence isolated from the Sargasso Sea
atgaaaaattatttaaataatattggtattaaatctaaaaatgcgtttaaaaatttaggttatgtagacctaaagaaaagaaataatgtgttagagacttatttaaaatctttaaaaagtaataaaaataaaattattaaagaaaatttaaaagacataaaactttgtaagcgtgaagagttaatagatagactaattattgataataaaaaaattgagaatatgagaagctcaatttatgaaatcgtaaaatttaaagatcctttaggaaaagtacttgaaaaatggaaaagaccaaacaatttgttaattaaaaaagttactgtaccaattggcgtaataggaattatttatgaaagtagacctgatgtaaccagtgacgtatcatctttatgtcttaaatctggtaatgttgcgatttttagaggtggttcggagtcttttgattcgaatagaattctagctaatc

SEQ ID NO: 215956 - DNA, 1252 bp, Unknown
  Bacterial polypeptide expressing nucleotide sequence isolated from the Sargasso Sea
gatgaataaatttatgaatttaattggagtaaaggctagaaaagcttctgagataaaaatagatactaaaatcaagaataaagttttaaacgactatgctttgttacttgataaagaaaaaaaaaacattctaattgagaataaaaaagatgttaattttgcaaagaaaagcaggattaaagaaaatttgataaatagattaagtatcgatctaatcaaattgaaaggtattaaagactcaattaaaaaaatttcaaaattaaaagatccagttaatgtaactttagaaaaatggagaagacctaatggactaaatattaaaagagtatcagttccaataggtgtcattggagttatatatgaaagtagaccaaatgttacgtcagatgtagctagcttatgttttaaatctggaaatccagtaattcttaaaggtggatctgaagctataaatactaatagaattttagcaaatctatttcgtaaagctctaaagaaaaataaagtaaatgaaaattatattcaatttattgattctaaagatagaaaaatggtcgacataatgctttctaaaatggataaatttattgatgtaataattcctaggggaggaaaaaatttagttaaaagagttcaagatttttctaaagttcctattatcggtcatttggaaggtttgtgtcatacatacattgataaagaagcagaattaaaaatggctacaaatatcgtttataatgcgaaattaagaaatacaagtatttgtggtgcaacagaaacaattctaatgcatgaaaagattgttaaaaaattttgtaatccaatattaaaaaagctagaggataacaattgtaaaatttatggagataattttataaaaaaaaattactcaggaacattatatccagctaaagaaaaagactggtctactgaatatttaactgcagccgtatctgttaaagttgtaaaaaatttaaaacaagcaattaaccacataaatcgatatgggactatgcacacagattctattgttacaaaaaataaaaaaactgctgcacaatttatgacaaatattaaaagttctattgcaatgcataatacttctactcaatttgctgatggcggtgaatttggttttggaggtgaagttggtatatcaacaaatactttgccaccaagaggtcctgtcggcctagaacaattaatttcttataaatatgaaatttcaagtcaaggaaagataagagattag

SEQ ID NO: 215957 - DNA, 496 bp, Unknown
  Bacterial polypeptide expressing nucleotide sequence isolated from the Sargasso Sea
tatgaaaaatatattaataattggaaaaaaatcaaaaaaagcgttcgaaaatttgaaaaaagttaatcataatagaattaacaaaactttagatgattatattaaatttattttaaaaaataaaaaaaaaataattaaagaaaatgctaaagatgtaaaaaaacttaaaagaaagaacatattagataggcttatattggatgaaaaaaaaattcaagatatagtcaaatcaataactgaaataaaaaagtttcctaatccaattggtaaaacgttagcaagttggacaggaaaaaacaaacttaatattaagagaatgactacaccaatcggagtaataggtgtaatatatgaaagtagacctaatgtaactgcagatgtagcagcgctatgccttaaatctagtaactgttcaattctaagaggtggaagtgaggctttttattcaaataagattctttctgatttatttcgtaaatcactaagaaaaaatgaa

SEQ ID NO: 215958 - DNA, 466 bp, Unknown
  Bacterial polypeptide expressing nucleotide sequence isolated from the Sargasso Sea
tatgatcagtaaatatcttaagaagataggcgaaagatcaaaggttgcagcgctaaacattgttaaagttgatataaaaaaaaggaacaaagttcttgatgtgtttagtaaagaaatttcaagaaataaaaaaaaaatcattaacgagaatattaaagatattaaaacttgtaaaagagaggagttaattgacaggttgctccttgatgaaaaaaaaattaataatattcgagatactattggtcaaattatcaagtttaaggatccgctaggaaaaataattgaaaaatggaataggccaaacaaacttactataaaaaagataactgtaccaattggtgttataggagttatttatgagagcagacctaatgttacatgtgatgtttcatcactctgcttaaaatctggtaatgttgctatacttagaggcgggtctgagtcatttaattcaaataaaattttt

SEQ ID NO: 215959 - DNA, 580 bp, Unknown
  Bacterial polypeptide expressing nucleotide sequence isolated from the Sargasso Sea
atgcttaagcaaacaggaatacaggcaaaagaggctgcaggggagattgcagttttaagcactgataaaaaaaataaaattttacagagcatggctgatgaattgcttaaaaactcaaaaaaaattataaatgctaataaggttgatctaaaaaattccaaagaccttgatttaactccagctttaatagatagattaactttaaatgaagaacgtattaatggtatggcaaatggcctgcttaaaataattcctttagaagacccagtgggcaatgtaactgaaagttggaaaactgatgaaggattagatattaaaaaaattcgttcaccatttggggttataggagttatatatgaagcgagacccaacgttaccagtgatgtctctggactttgtctaaagtctggtaatgcagtaattttaagaggatctagctattgtcttgactcaaatattgccattcttgaagttcttcaaaattcactaattttaaataattgtaataaaaatatttttcagataatagaaagtaaagatcgtcaagacaccattgaatttatgaatcttacagaatttg

SEQ ID NO: 215960 - DNA, 488 bp, Unknown
  Bacterial polypeptide expressing nucleotide sequence isolated from the Sargasso Sea
aatgaaaaaatatttacaaaaattaggccaaaattctgttaaagcaagtttagaaaaagtggatacaaacacaaaaaataaggttttattgaaatttagtgatttaataaaaaaaaatttaaataaaatacttaaacaaaacaaaaaagatattaagtatgccaaaataaaaaatattgataaaaatttagttgcaagactcgagttagataaattaaagcttagttcgataactaaaacaataattgaaataactaaattaagggacccaattggggttattttagataaatggaaaaggccaaacggtctaaaaattaaaaaaatatctattccaattggtgtcattggtgtgatttatgagagtaggcccaatgtaactgtagatctatcttgtctttgttttaaatcaggtaattcagtgatcctcaagggtggttcagaagctttttttactaataaaatatttgtaaaactatttagaaaat

SEQ ID NO: 215961 - DNA, 747 bp, Unknown
  Bacterial polypeptide expressing nucleotide sequence isolated from the Sargasso Sea
caagcagaaaagatagcatggcgatgttaaatcttgagaaatatattaatttaataattccaagaggaagcaatgaattggttaaatttattcaggagaatacaagaattcctgtgctaggccatgctgatggaatttgtcacttatttatagatattgaggcaaatctagagatggctttatcagttgctttggacagcaaaattcaatatcctgcagcatgtaatgctatcgaaactttattagtccataaagatatcgcaccagcttttttagaaaaggctatccctctttttaattctaatgatgttaaattaatcggagataagagatcagttgaattagggttgaattatgaggctagcctagaagattgggaaactgaatatttggatttaattctatcgataaaaattgttgatgatcttgaggaagcaatcaaacatgttcaaaaatatagttcaaaacatacagatggaataattactgaaaattcagatactgccaataaatttatgaatgaagttgatagtgcaggtgtttttcataattgctctactaggtttgcagatgggtttagatatggattcggcgctgaagttggcatatctactcaaactcttccaccaaggggacctgtaggtctagaaggtttggtaacttataaatatttcctaaaaggtgatgggaatatagttgatgatttttcatcaggaaaggctatctatacgcatatagatctttaaa

SEQ ID NO: 215962 - DNA, 281 bp, Unknown
  Bacterial polypeptide expressing nucleotide sequence isolated from the Sargasso Sea
tttagacgttgccatatcacatatcaataaatatggctcaatgcatacggatgcaattatatctgatgatgataaggcaatcgataagtttaaattagaagtaaattcaagttctgttatggtaaatacttcaacgagatttgctgatggatatgagtatgggttgggcgcggaaatcggaataagtactgataaaattcatgcacgaggccccgtaggtcttgaaggtttaacaaatctaaaatatatagtaaatagtaagggaaaaatcaaacattaat

SEQ ID NO: 215963 - DNA, 1252 bp, Unknown
  Bacterial polypeptide expressing nucleotide sequence isolated from the Sargasso Sea
aatgagaaagatattaattactattggagaaagatcaaaaaaagcgtttgctcaaccaataaatacttataaaaaaaataaagttttaggtgattatcttaaaatgataagaaaaaataagcatttaattcttaaagaaaataaaaaagatgtagattgggctatcaaaataaagctaagagataatttaataaatagactaattttaaatgaaaaaaaaatcttgggtattattaattcaatccaaaaaataattaagttaaaggatccagttcataatgttattgaaagatggaaaagacctaatggacttgtattttcaaaaatatcaatcccgataggagtaataggtgtaatttatgaaagtagaccaaatgtaacctcggatgtagcatcattatgttttaaatctggaaatccagttattttgaaaggtggttctgaggccttttattctaataaaattttatcaaatttatttagaaaagctttgaagattaataaagttaatcaaaactttgttcaattcatcgatataaagaatagaaaagtggtagattttttactcactaaaatgactaattttattgatgtaatcataccaagagggggtagaaatttagttaaaaaagtacaaaacatttctaaaattccaactattggtcacttagaaggtgtttgtcattcatatgtagataaagatgcggatcccaaaattgctaccaaagtaatagtaaatgcaaaattaagaaatacagcgatttgtggagcaactgaaacaattttgcttaatgagcgtataatcaaaaagtttggagctcatatattaaagatattagaggaaaaaggttgtcaaattattggtgataataaaatacgaaaaatttataaaggtaaaatcaaaaaagcatcaatcaaagattggtcaaaagaatatttatctgctaccgtttctgtaaaatcagtcaaaaacttacaagaggctatttctcatattaataaatatggaactatgcatactgattgtattattactaaaaacaaaaaaactgctaaaaaatttttaatgggagttaaaagttcaatagcaatgcacaatacatctacacaatttgcagatggtggtgaatttggatttggtggtgaggttggaatttcgacaaatgttcttccaccaagaggccctgtaggacttggacaactaatttcctacaaatatcaagtaacaagtaatggtaaaattagaaagtaa

SEQ ID NO: 215964 - DNA, 364 bp, Unknown
  Bacterial polypeptide expressing nucleotide sequence isolated from the Sargasso Sea
tcaagccaagcacttgaagcctcagaagaggattggtctaccgaatatttggatgctgttatttcaatgaagattgtgaaagatcatgatgaagcaatttctcatatttctgaatatggctcaggacatacggatagtattgtgactgaggacgatgaaatcgctgataaatttatcaaggaagtagacagtgcaatagtaatgcataacacttcgactcaatttgccgatggtggagagtttggaatgggagcagagataggtattgccacaggacgaattcatgccagaggtcctgttggtgcaatgcaacttactagctataaatacgccgtaagagggaatggtcaagtcagatcttgat

SEQ ID NO: 215965 - DNA, 1240 bp, Unknown
  Bacterial polypeptide expressing nucleotide sequence isolated from the Sargasso Sea
atgaatttagttggaagaaaagcaagaaaagcttttaaaaagaaaattgatacaaaaatcaaaaataaagtattaaataaatacgcagaattattaagtaatgaaaaaaaattaatacttaagcaaaacttaaaagatgtaaattacgccaaaaaaataggtattaaaaataatttaattagtagacttttaataaatgaaactaaattaaaagatattcaaaactcaattattaaaattgcaaaattaaaagatccagttggaaatactttagaaaaatggaaaaggcctaatggtttgaatattagtaaaatatcaatacctataggagtaattggagttatttacgagagtaggccaaacgttacctctgatgtagctagtctatgctttaaatcaggaaatccagtaattttgaaaggtggctcagaagcaataaatactaataaacttttagcaaagatttttcgaaaagcacttaaagttaataaagttgacgaaaactttattcaattcattgatacaaaacagagaagagtagtggatattatgctatcaggtatgaaaaaatatattgatgtaattattccacgaggtggaaaaaatttagtaaaaagagttcaagatttatctagtgtacctattatcgggcaccttgaaggactttgtcacacatatgttgataaagatgcaactttaactatggcaaaaaaagttgtttataatgcaaaattaagaaatacaagtatttgcggtgcaacagaaactattctgattcataaaaaagttgcaaaagccttctgtaatccaattttgaacgagctacaaaataaaaattgcaaaatatatggagatagatttttaaaaaagtattacagagggaaaatattaccagctaaagaaaaaaattggtctacagaatatttagcacctgcagtatcagtaaaaattgtaaataatcttgaagaaagtattgaacatataaacaaatatggaacaatgcatacagattgtataattacaaataataaaaaaacagccaaaaactttttaagaaatattaaaagctcaattgctatgcataatacatcaactcaatttgctgacggtggagaatttggattcggtggagaggtaggaatttctacaaatacattgcctcctagagggcctgtaggattaaatcaactagtttcttataaatatgaaattacgagtaaaggaaaaataagaaaataaa

SEQ ID NO: 215966 - DNA, 664 bp, Unknown
  Bacterial polypeptide expressing nucleotide sequence isolated from the Sargasso Sea
tatgaatattttagaaacaataaacgacttaggtaaaaaagccaaagatgcgtctattaaaattagagtattggaaaaagaaaaaaaaatggcggcttatcaatttttagaaaaaaatattgaaaagaatgcagacctaatcttaagtgcaaataaattggatattgaaaatgctataacaaataatttatcaaaaccactaatcaatcgattaaaagttacggaagaatctatatcaggtataattaaaagtataactgaaattaaaaatcaacctgatccaattggaagagttttagaaaaatgggaacagccaaatgggcttaaattttcaaaaatatcagtacctttaggtgtattaggagtaatctatgaatcaagaccaaatgtaacagtagatgcatcttgcctcgcattaaaatctaataacgcactaatcctaaggggtggaagtgatagctaccatacttcaaaacaattagtgcatatcataacagagtcttttatagaggccaatcttccagaaaatataattcaaatgataccaacaactgatagagaggctgttgatcatctcttagcgatgaaggattatgttaatgttataattcctagaggaggaaaaagtttaataaaaaaaattaatgaaaagagtaaaatacca

SEQ ID NO: 215967 - DNA, 559 bp, Unknown
  Bacterial polypeptide expressing nucleotide sequence isolated from the Sargasso Sea
atgcaaaagctactaactgatatcggaaaaaaatcaaaaaaagctattaataaaaggttaagtacaaaaaaaaaggacaaagttttaaaagattatcgtcttctaatcttaaagaacaaaaaattaataattaatgaaaataaaaaagatattaagaatgcctacaaaaaaggtattaaaaataatttaatccaaagattaatattaaatgacaaaaaaataattgcgataaccaattctataaaaaaaattattagtttaagggatcctataaatgtcattttagaaaaatggaaaaggccaaatggtttggtaatatcaaaagtatctatacctattggtgtaattggcgttatatacgaaagtagacccaatgttacagcagatgttgcatcgttatgttttaagtctgggaatgccgtcattttaaaaggtggatctgaagcttattattctaatcttattctcacaaaattctttagaaaatcactaaagaaaaataatgttgatgaaaattttgttcagtttttaaaacttaaaaaaagaagtgttgttgatt

SEQ ID NO: 215968 - DNA, 733 bp, Unknown
  Bacterial polypeptide expressing nucleotide sequence isolated from the Sargasso Sea
atgattaaacaaaaaataaaaaattatgttttaggtgtctgtcgtgcgtctcacgaagcatctaagctatccagaaccttatcaaatactcagaggaataaaattttgaatagcataataaatcagcttagtgatcaaaaaaagcatatcttcaaaagaaactctcttgatgtagagcttgctatcaaaaataaaatgtctgatgcactgatagataggttactaataaatgataaaagaatttcctccatggtggagggactcaaaaaaataaaatcaattcctgatacacttttcaaaaaaattaacaaaacaattcaaccaagtggaatttcggttgaacaaatgagagtgccaataggtgtaatagggatgatatacgagtctaggccaaatgttacaattgacgctgccggtttatctatcaaatctgggaatagtattatcctgagaggtggcagcgaatccattaattctaatatagctctatcaagcattataaaagaatcgctccgtaagtgtaaaatgcctatcaatatggttcagttaatcaatactcctgataggttagctgtgagtgagcttttaaaactagaacaatatgttgatgtaataattccaaggggagggaaaagtcttattaaaaaaatatcgactgagtcaaaaattccagttattaaacatctagacggaaattgccatatctacatcgatagagaagctgattttaaag

SEQ ID NO: 215969 - DNA, 920 bp, Unknown
  Bacterial polypeptide expressing nucleotide sequence isolated from the Sargasso Sea
tatgaatttaatatcaatttgcaagtctgcaagagaatgcactaaagaaataggctcattgtctaactttaaaagaaatcagatactaaaagacatatctgaaaatttaaatagccaagaaagcctgattcttagagctaataaaaaagatctggccaataatacaaggctacctattgagataaaggaaaggttaattttaaatcctaaaaaattaagaaatattattacttctataaataatatcaggaagctaaaggaccctcttttaagtaatgaggaattcactagaaatgatggcttagtgataaagaaacaacccgtaccaattggtgttattgcagctatatatgaaagtaggccaaatgtgactatagatattgcttgcctgtctataaaatcaggaaatgtagctattctgagaggcgggaaagagtctttaaacacaaatttatcacttactaaaattataaaagaggctcttaaaaaaaataatgttagttataattgtattcaatatttaaaagatccgaacagaaaatatattaatgaaatgctaggcatgaatgaatatatagatttagttataccaagaggcgggaaagaacttgtaaataatgtttcaagaaatgcaaagatgagggctatttttggaggaattggagtaagccatttatttatagatgaaaaaatagatgaagaatcacttttaccaattttagaaaatgcaaaaacacaagccccgagtgtttgtaatgccttagatacaatcttgcttcatgaaaaacaacaaaataaattattgccaaaaataattaatcattttgtagggcttggaattgaaataagaattcagccaaaattatttcaaaaggcaaaaaaaataaatccttcgaaattaataagaaggcatcagaaaa

SEQ ID NO: 215970 - DNA, 1261 bp, Unknown
  Bacterial polypeptide expressing nucleotide sequence isolated from the Sargasso Sea
aatgagtaatattaaatatctaataaagattggtgaaaaagcaaaaatagcttccacacaactttctcaacttgataataaagaaaaaaataaagttttatctgattttttaaaatgtattaaatcaaataaaagtaaaattcttaaagctaataaagttgatattgataagagtaaaaaaaataaaatcaaagaaaatttaattgatagaactatgcttaacgaagatagaataaattctatctgcacgtctattgaagaagtaatatcatttaaagacccaacaaacaaaatgttatcatcgtggaaaaggccaaatggtttaataattcaaagagtaactatgcctataggtgtgattgcagttatttacgaggctagaccaaatgtaactgctgatgtatctgtgctttgttttaaatctggtaatgccgctatattgagaggcggcaaagaagcttttcatacaaatattgttttatcaaatttatttagaaaatgtttagaaaaaaataaaattaatccaaattgtgtacaattaattaattctacaaatagaattttagtagattatatcctttcaaaaatggcaaattacgttgacgtgattatacctcgaggaggcaaaagccttgttgaaaaggtattaaatctatcaacagtccctactataggacaccttgaaggtttgtgtcatatatatcttgataaaagtttcaacttcaacctagcaaataaaattttaattaattccaaattaagaaggacgagtatttgtggtgctgctgaaacattattagtgaataatcaaattaataaaaaagacatttttcaacttttaataaatttaagcgaggcaggttgtaaaataattgcagataaaaatattaagaaaatatttccagattctatattagcaaaaagcaaagattggaaaacggaatatcttgaagctaagatttctgtaaaaggtgttaaaaatttagatgaagcgataaatcatataaaaatttatggcactaatcataccgaatgtattatctctaataataaaaaaaatgttgctaaattttttagagaagtaccaagttcaattgttatgcataatgcctctacacaatttgcagatggctatgaatttggactaggttctgaggtcggtatatcaacaagtaagttacatcctaggggacctgttggtttggaacagttagttacttacaaatttgtagtcaaaggtaaaggacaagtaagaagttga

SEQ ID NO: 215971 - DNA, 145 bp, Unknown
  Bacterial polypeptide expressing nucleotide sequence isolated from the Sargasso Sea
aagatttgcagacggatttgaatatgggctcggtgctgaaatcggaattagtacagataaaattcatgctcgcggtccagtgggtcttgagggattgacaaatttgaagtatgtggtcacaagtagaggagtaattagaaattaa

SEQ ID NO: 215972 - DNA, 400 bp, Unknown
  Bacterial polypeptide expressing nucleotide sequence isolated from the Sargasso Sea
atgcaaaagctactaactgatatcggaaaaaaatcaaaaaaggctattaataataggctaagtacaaaaaaaaaagacgaagttctaaaagattatcgttttctaatcttaaaaaacaaaaaattgataattaatgaaaataaaaaggatattaagaaagcctataaaaaaggtattaaaaataatttaatccaaaggttgatattaaatgacaaaaaaataattgctataaccaattctataagaaaaattattagtttaaaggatcctacaaatgtcattttagaaaaatggaaaaggccaaatggtttggtaatatcaaaaatatctatacctattggtgttattggtgttatatacgaaagtagacccaatgttacagcagatgttgcatcgttat

SEQ ID NO: 215973 - DNA, 465 bp, Unknown
  Bacterial polypeptide expressing nucleotide sequence isolated from the Sargasso Sea
aatgagttatttagaaacagtcggcaaaaatgcaaaaaaagcctttgaagatctaaagggtgtaaaacataaaaaaataaaaaaagttttagataattacaatcaatcgcttttaaaaaatactaataaaataatcaaagaaaatttgagagatgttaaaaatgttaaaagaaagcatctggttgatagacttattttaaataaaagaagaattgaaggtataagacattcgataaatgaaatatcaaagtttaaagatccggttggaagagttttagaaacatggcgtaggccaaacaaattgacaataaaaaaagtgacaaccccgattggtgttataggtgtaatttacgaaagcagacctaacgtgactgctgatgttgcagcattatgtttaaaatcaggaaattgttctattttaagaggtgggactgaggccttcaactcaaacagattattagctaa

SEQ ID NO: 215974 - DNA, 250 bp, Unknown
  Bacterial polypeptide expressing nucleotide sequence isolated from the Sargasso Sea
atggatcaggtcatacagagagtattatttcctgaagataaagagaaagttgaaaagtttttaaataccgtaggtagtgcaattgttatgcataacacctcaacccaatttgcagatggaggtgaatttggtttaggtgctgaaataggaattgctaccggcaaattgcacgccagagggccagttggattagaagggctgacaacttataaatatatagtgagaggaaatggacaggttagaccgtaaa

SEQ ID NO: 215975 - DNA, 745 bp, Unknown
  Bacterial polypeptide expressing nucleotide sequence isolated from the Sargasso Sea
atttctgagcatgctattcaaattgtaagcaatacagacagagaagtggttaaattaatgcttaatggattagataaatcaatagatgtaattgttcctagaggtggtaaaagtttagtatcaatggttgaaacagaagcaaaagttcctgtgtttggacatttagaggggatatgtcatatatatgtagatgaagaagctaatagtgagaaagcattaaacgtatgccttaatgcaaaaatgcgaagaccaggtatatgtggggccgtggaaacaattcttattcatcaaagtatcgcatctgaatttgttccaactttatgcaatgcattatcagctcaagcatgtgaaattagaggatgctcaaatacacaaaaaatatcaacaattgtagttgcagcaaacgaagaggactggagcacagaatatcttcttccaatagtgagtataaaaattgttaaagacattgaagaggcaattcaacatattgaagatttttcaactggtcatactgaatcaattattactgagaatcttaaccatgcatcaatatttcaaaagagtcttgatagcgcaatagttatgcataacgcatcaactcaatttgctgatggtggtgaatttggattaggtggtgaaattggcatagcaactggtaagtttcatgcaagaggtcctgtaggtgtagatcaattaacaagttttaaatatcttgttaatggtgacggacacattagaccataat

SEQ ID NO: 215976 - DNA, 877 bp, Unknown
  Bacterial polypeptide expressing nucleotide sequence isolated from the Sargasso Sea
accaaatgttacaagtgatgtctcaggtctatgtttaaaatcaggaaatgcatctatccttcgtggctcaagttattgtttggattcaaatctaaaaatattaaatacgttacaaaaagctttagaaaaaaataatttgtccaagaattgcatacagcttatagagagcaaagacagagaagatacaatcgaatttatgaatatgactgagtatattgatttgattgttccacgaggcggtagaggattaattgatacattggtaaataactcaaaagttccatttattttagatggtgatggaaacgtacacctttatatacatgaagatgcaaaagaagagtatatggttcctatagttatcaattcaaaggtccaaagaccaggagtttgtaatgctttagaaactttaatattgcataaggatgtttataacaaaaatggtgaagtgattataaatgcccttaaagaaaattcggttgaagtttttatcgatgaaaaagccagcaatgattttccagatttagaaattgctaatgatgagcattattctaccgaatttttggatctcaaaatagcaataaaaatagttgaaaatgaagatgaggcaataaagcatgtcaataaattttcttctggccatacagagggtgttcttactgaatctgaacaaatagccgaaaaattctctagctcaattgattcatctgtgatatttataaatgcctcgacaagatttacagatggagaaatgtttggttttggagctgagataggaataagtactcaaaaattacatgtaagaggacctatgggcttagaagcattgacaacagaaagatacgtaattaatggaaaaggaactgtcagaggatga

SEQ ID NO: 215977 - DNA, 893 bp, Unknown
  Bacterial polypeptide expressing nucleotide sequence isolated from the Sargasso Sea
tatgtcagagcagcttattgaggatactgacttgatacttaaatcaaataaaaaagatcttgataatgctaaagaactcgatttatcatccgccttagttgatcgattaactttaacaaaagagagaatcgaaggaatgagtaatggtttgaaaaagattattccacttaaagaccctgttggtgaagtaacaaaatcttggacaacagatgatggacttaaaattaacaaagtgaggtctccatttggagttattgggattatttatgaagcaagaccgaatgttacgagtgacgtgtcagccctatgtattaaatcaggaaatgctgctgttctaaaaggatctagttattgtgtagattcgaattctgaaatattgaattcattacaaaaatcccttgagaaaaataaaataaataaggatgctattcagcttattaaaagtaaggaaagagaagatgcaataaaatttatgaaactaactgaatacattgacttgattgtcccaagaggagggaagggattaattgacacattagtagaaaatgcaaaggtcccttttattttagatggagatgggaacgtacatctttatgtgcacaaagatgccaatacagaatatgtaattgacataattattaattcaaaagtacaaagaccaggagtttgtaacgcactagagactttgatattaaataagtcaatatatcaaaaaatgggtaaagaaattattaatgagttacttaagaatgaggtagaaatttttgtagatgaagttatagctaatgacatatctgatcttgaaatagctaaagatgagcactacatgacagaatttcatgatttaaagttagcaattaaaattgttgatgatatagatcaagctataaatc

SEQ ID NO: 215978 - DNA, 754 bp, Unknown
  Bacterial polypeptide expressing nucleotide sequence isolated from the Sargasso Sea
atctataaataattgtaataagaatatttttcagatattagaaagtaaagatcgtcaagacactattgaatttatgaatctcacagagtttgttgatctcattgttccaagagggggaaaggggttaatacaaacactagtagacaactccaaagtgccatttatcctagatggagatggaaatgtacatttatacatacatcaggatgcaaaaaaagaacatattattgatatagttattaattctaaagtgcagagaccgggtgtatgtaacgctcttgaaaccttgctaattaatagtcagatttaccaagatatgggtagtttgataattgaaaaattattagaaaatgaagttgaactttttgtagatgaaacaataaaagaagactttccaaatttaaatcttgctaacgaatcacactatgagactgaatttttagatttgaaactggcagtaaaagtcgtcgacagtgttgacgaggcaattgagcacattaaaatctactcatctggacatacagaagcaattttgactgaatcaaaggaagttgcagacacttttgctaaatctatagattcttcagttatatttattaattcatctacaagatttactgacggtgaaatgtttggttttggttctgaaattggaattagtactcaaaaattacacgttcgaggcccaatggggttagaggcattaacaaatgaaagatatgtagttacgggtgagggtacagtaagaggatga

SEQ ID NO: 215979 - DNA, 916 bp, Unknown
  Bacterial polypeptide expressing nucleotide sequence isolated from the Sargasso Sea
cttaatagctaatgaaattgaaaataatgaggaatatattctatccgaaaataaaaaagatatacaaattgcaaaatcaaagaatttatctgaggcaatgattgataggctttcactcaatgatcttggaataaagaatattgcctcaagcataagagatattgcgaaacttaatgaccccgtcggaaacgaattagaaagctgggatcgaccaaatggcttgcacataaagaaagttagtatcccaattggtgttataggcattatatatgagagcagaccaaatgtaactgctgacgccgcaagtttatgtctaaagtcagggaatgcctcaatcttaagaagtggctctgatagttacttttcgagttatgcaatttacgagtcaatcaaagaaggtctgaataagacatcccttgacagtaactcaatacaacttgttccaacgaaggatagggatgcagttggccttatgcttgaagggcttaactcaaacattgatattattgtaccgagaggtggaaaaagtctcgtatcgagagtgcagactgaagcaaagattccagtattcggtcatctagagggcatttgccatgtctatgtgaatgaaaaagcagatatcacaaaagcaattgacgttactttcaatgcaaaaatgaggaggacttcaatctgtggtgcagcagaaacccttttgattgataaatcaatttataaagaatatttgccaagaatattatcaaagctatcgagtgtgggttgcgagataagaggaagcgctcagataaaagatatttttcctcaaacagagaatgtatctgattctgactgggcaactgaatatcttgatgcaattatttccgtaaaagtagtcaaaggcattgatgaggcaatttcacacattaaagaatacggt

SEQ ID NO: 215980 - DNA, 805 bp, Unknown
  Bacterial polypeptide expressing nucleotide sequence isolated from the Sargasso Sea
attgacatcgatagagctaagtcaaataatatttctacaccaatgatcaatagactagtgctgacttccgagaaaatagatcagctatcacgtgatgtggagaaaatagctcaaatggaagatcccctcaatcaaactttagaaaattggaccaatccctcaaatggattacagtttacaaaagtctctgttgctattggtgtgattggaattatttatgagtctcgacctaatgttacaatagacggtgcatgtctttgtcttagatctggaaatgtttctattctaagagggggttctgaatgtattgaaactaataaaaaactttatgaatgtattcaagaagctctagaagatttgcaatttgatccttatcttgtctgtttcattcagaacactgatcgtagttttgttgaggaactattaaatgccgaggcagatattgatgtcatcattccacgaggaggaaaatctttaatcgaaacaatctctcagaattctcgtgttccaacaattaaacatttagaaggtctatgccatacttattgggatattgactatgacaaagagaaagccgctgagatagttgcaaatgccaaactgagaaggcctgaaatttgtggtgcaacagaaacattactcatacattctggtaattcagcagaggatatttctcatgtcttagataacttaaggtcacaaggatgtgaaatcataggatgtactcgactcaaagagatgtactcaattgaccgtgctgctacagaagatgattggtctacagaatatttagataagaaaataa

SEQ ID NO: 215981 - DNA, 967 bp, Unknown
  Bacterial polypeptide expressing nucleotide sequence isolated from the Sargasso Sea
agaaagttggaccggaaaaaataaacttaatattaagagagttacaacacctattggtgtaataggtataatttatgagagcagaccgaatgtaactgctgatgttgcagctttatgtcttaaatcaagtaattgcgcaattcttagaggtggaagtgaagcttactattctaataaaattctctcgcatttatttagacaatccttaaaaaaaaataaaataaatcagaattgtcttcaatttattgaaaataaaaatagaaaagttgtagattttttattatctaagatgaataggtatatagacgtgatagttcctaggggtggtaaaggcctagtagccaaagttcagaaatattcaaatattcacgtaatcggtcacttagaaggtttatgccacatttatttggacaaagagagtaatctaaataatgcaataaaggtaatattaaatgcaaaaatgagaaggacaagtatttgtggagctttagaaacgcttttaattaatgaaaaaattttaaaagtaaaaggtgtaaaagtaataaattcacttataaaaaacggttgtaaagttgtagttgataaaaagattaataaatttttcaataacaatttaaaattagcaaaagaattagattggcaaacagaatatcttgatgcaaaactatcaattaaaagtgtaaaagacgtaaaagaagcagtctctcacgttattaaatatggaacaatgcacacagattgtattatttctaataataaaaagaatactgagttttttttaaataatgtgaatagcgcaatagcaatgcacaacgtatctactcaatttgccgatggaggtgaatttggttttggtggggaaataggaatttcaacgaataaacttccaccacgagggcctgtaggtttaaatcaattaacttcgtataaatatatagttaaaggcaacagcgttactagaccataa

SEQ ID NO: 215982 - DNA, 541 bp, Unknown
  Bacterial polypeptide expressing nucleotide sequence isolated from the Sargasso Sea
atgaaaaagtatttagataaaattggtaaaaattcaaaaaaagcatctattaaatcggtaacaacaattaagaaaaacaaagttttgatcgattttgcaaatctaataaaaaaaaatagaacaaaaataatatatcaaaataaaaaagatcaaaagtatgcgataaaaaaaggtattaaaaataatatgatcgaaagattaattttaaactcaacaagattaaaacaaatcgaaaaatcagttgttaaaattgcgaatttaaaggatcctgtagataaaactcttttgatgtggaaaagacctaatggacttaaaataaaaaaagttacaatacctatcggtgttataggaataatttatgaaagtaggcccaatgtcacttctgacgtttcaagtctttgttttaaatctggtaatccagtcattcttaaaggtggatctgaagcatttaatagtaacaaaatattagtctatttatttaaagaagctttaaagagaaatggtgttgatcctaattatgttcaactaattgaaaataaaa

SEQ ID NO: 215983 - DNA, 601 bp, Unknown
  Bacterial polypeptide expressing nucleotide sequence isolated from the Sargasso Sea
attcctgtgataggtcacttagatggaatttgtcatatatatgttgatgagacttcagatccatcaactgcaagtaaaattgttacgaatgcgaagttaagaagaacaagtatttgtggcgctgctgaaacagttttaattgacgaaaaatgcttagattctcatctgccaacaattatcaatggccttaaatctgggggatgtgaaattcgtggcgatgaaagatgtaaagaaaaatttaatgaagtcattttagcgtctgatgatgactggaaaacagaatatttagatgcaattatttcaattagagttgttaatggagttaaagatgccattgatcatatagaaaaatatggttcgggacatactgaaagtattgtttcagaaaataaagataatgtagaacaatttctcaactctgtaggcagtgctattgttatgcataatgcatctactcaatttgctgatggtggtgaatttggattaggagcagaaataggaattgccacaggcaaacttcacgcaagaggtccggttggtctcgaaggattaacaacctataaatatatagtcagaggaaacggtcaaataagaccataaa

SEQ ID NO: 215984 - DNA, 684 bp, Unknown
  Bacterial polypeptide expressing nucleotide sequence isolated from the Sargasso Sea
ttcttagaatgtctgactatgtggatgtaattgtacctcgaggtgggaaaggattgatcgagcgagtcagcgcagaagcaaagatgccggtcataaaacatctggatggaatttgccatgtctatattgatgatgatgccgatatggaaaaagcaattaatattgcctataacgctaagacacaacggtatggtacatgcaacacaatggaatgtttattagttgctaaatctctagcaaaaactgtgttggagaaactagaaccaatgtatagaaaagaaaatgttgaaatccgaggctgcaaagcatcaaaagaaatactggctgacataaacatagcaaccgatgaggattatgcaactgagtatctagctccaatactatcgctaaagatagttagtaatattgatgaagcgatgagccatattgataaatttgggtctaaacataccgatacaattgttactgaaaatcaatcaaaagcagatcgtttcctccgagaggttgactccagttcggtcatgcataatgcctcgactcgttttgctgatggttatgaatatggtcttggtgctgagattggtattagtacggataaatttcatgcacgtggtccggtaggacttgagggactgacatcacaaaaatatgttgtattaggcgatggaaatattcgtacttaaa

SEQ ID NO: 215985 - DNA, 703 bp, Unknown
  Bacterial polypeptide expressing nucleotide sequence isolated from the Sargasso Sea
aatgagaaacttattaacaaatattggtaagaaatcaaaaaaagcttttttaaaaaaattaagttcaaataaaaaagacaaagtattaaaagattattatctgttaattacaaaaaataaaaaattaataataaatgaaaataaaaaagatattaaaaatgcttataaaaaaaaaataaaagataatttagtacaaagattaatattaaataataaaaaaattttagaaataactaattcgataaaaaaaattattagattgaaagatcctacaaatattgtcttagaaaaatggaagagaccaaatggtttagttatttcaaaagtatcaatacccttaggtgtaattgggataatatatgagagtagacctaatgttacagcggatgtggcctcattgtgttttaagtcaggaaacgcggttattttaaaaggtggatctgaagcatattactctaatcttattctttcaaaattatttagaaaatcattaaaaaaaaatggtgtagatgaaaactttgttcaatttttaagtataaaaaaaagaagtgtagtagattttcttcttactaaaatgagtaaatttattgatgtgataataccaagaggtggaaaaagtttggtcaaaaaagtgcaaaaattatcctcaatcccaacaattggtcatttagaaggtgtttgtcattcttatattgataaaagt

SEQ ID NO: 215986 - DNA, 586 bp, Unknown
  Bacterial polypeptide expressing nucleotide sequence isolated from the Sargasso Sea
tttgaattcaagtattagtccaaaaaaaaagaataaagttttaaaagattttgtaaaattaattgagattaataagaataaaattattagtgaaaataagaaagatattttttatgcaagaggaaaaaaattaaaagaaaacttaattcaaagactcactcttaataataataaattaaaaagtataattgactctgttaaaactattgcttcttttaaagatccagttaatcaagtaacttccaaatggaaaaggccaaatggacttgaaattagaagagttacaataccaataggagttataggtgtaatatttgaaagtagacccaatgttacttcggatgtatcagcactatgttttaaatctggaaatgctgttatattaagaggtggttccgaagcctataatagtaatagaattttagtaaatttatttaggaaagctctaaaaaaaaataaattaaacgaaaattacgtccagtttataaacaataagagcagaaaactcgtcgactatctattatcaaaaatggaaaactccattgatgttgtaataccacgcaggtggaaaaaatctagtaaaaaa

SEQ ID NO: 215987 - DNA, 958 bp, Unknown
  Bacterial polypeptide expressing nucleotide sequence isolated from the Sargasso Sea
gaaagaccaaacgggtttaattataaaaaaagtatccataccaattggtgtgattggcataatttatgaaagtaggccaaatgttacatcggatgtttcagctctatgtttcaaaagtggcaatgtagtgatattacgtggaggttctgaggcatttcattccaataaaattttggctaagctttttagaaaagctcttaaaaagaaaaaatgtaatgaaaattgcgttcagtttgtttctagtaaagacagacgccacgttgattatcttttgtctggtatgaaaaattatgtagatttaatcatccctagaggaggtaaaagtcttgttaaaaaagttgtaaaaaaatcttcagtttcaattattggacattatgaaggtttatgtcatgtctatgtagatagagaagcagatttaaacacagcaataaaagttgtaaaaaattcaaaaatgagaaatgttagtatttgtggagctgctgaaactttgttgatagacaaaatgtgtctaaaaacacattgtaaacccatactagatcaactaagcgtgctaggatgcaaaatcataggagataaaataataagaaaatttacttctaaaaaaataaaaattgcaacagagaaagattggaaaacggaatatctttctcctatgatttcggtaaaaagtgtaaacggagttaaagatgccataaatcatataaacaaatatggatcttcgcatacagactctatagtaactaaaaataaaaaaactgctaaaaaatttttggcaagtattaatagctctatcgctgttcacaatgcttcaacacagtttgctgatggtggagaatttggttttggtgctgaggttggaatatcaacaagtaaacttcatccgcgaggtccaatcggacttgatcaactcactacatataagtacattttggaaggcaaaggtcaaataaggaaataa

SEQ ID NO: 215988 - DNA, 922 bp, Unknown
  Bacterial polypeptide expressing nucleotide sequence isolated from the Sargasso Sea
tcttttgaagatccagttggcaaagtccttgcaacttgggatcgaccaaatggattaaatatctctagaattgctaccccccttggcgtgatagggttaatttttgaaagcagaccaaatgttgctgccgatgcaggaggtttatgccttaaatcaggaaatgcagtgattctaagaagtggaaaagatggtcttagatctgctgaagcgatcgtcgcctctcttcaagcagcattagtatctgctgatcttccaaaagaatgcattcagatagtcccatccgaaagcagagatgctgcaaccctcatgttagaaggacttaatggctcaattgatgtgatagtgccaagaggaggcaaaagccttgttgcagaggttgaaagatctgcaaaagttccagtttttggtcatttagagggcatatgtcatatttatatagatgagcatgcagatgaagagaaagctttagcagtctgcttaaacgctaaaatgcgtagaaccggaatttgtggggccgtagaaacaatactcgttaacgataagattgcagagtcttttgtgcctaaaattgttgcatcattatcagaattaaactgcgagataagatgctgtgagaaaacaattgattttgatggaagatcagtaccagcaactgaagaagattggtcaacagagtaccttgctccaattgtaagtttaaagtctgtcttaaatgttgatgaagcaattaatcatattgcgcaatacgggacaggacatactgaatcaataattagtgagaataaagacaatcaaactaagtttacacattctattgatagtgcaattgttatgatcaatgcttcaactcaatttgctgatggtggtgaatttggtcttggtggtgagataggtatcgcaactggaaaatttcatgccagag

SEQ ID NO: 215989 - DNA, 949 bp, Unknown
  Bacterial polypeptide expressing nucleotide sequence isolated from the Sargasso Sea
aaaaaagctgcccatgaattagtaaatatcgatagtaagaaaaaaaatgattcttttcttgctttaaagaatgcaattctagactctgaaaaagatttaatagaaatcaataaaaaagatattgataatgctattaattctaaactttcatctgcaatgatagatcgtttaactttaaaccatgaaagaatttttgctatggctaatggtttagatgaaataatcaaattaaaagatcctgttggtgagattgttaaagaatggcaaaggcctaataaattaaattttaaaaaaattactgttccaattggtgttattggaatgatatacgaatctagaccaaatgtaactatagatgcttctacaattgctgttaaagctggtaatgcggtaatcttgagaggtggtaaagatagttttcatagctcttcgaaactttatgaactaattaaattggctttttcatcatgcggacttcctgagaatactgtacaaatgatacctgttactgatagggcggctgtagattgtatgctaaatttaaatacttatatagatattataattcctagagggggaaaaggattaataaaaaatataaaagagaaaagctcaattccagtgataaaacatttagatggaatttgtcatgtttatgtagatagagatgcagatatatcaattgcaaaaaaagttattttaaatagtaaaatgaggaggccgggaatatgtggtgcggcagaaacattattgattgatgaaaagataaaaaatctttcattaaattttttagaagaattaaaaaatgctaattgtgaaattagaggagataaatttatagaatcattgcataatgaattcaaaaacgcaaaagaagaggattggggaacagaatatttagataaaataatttcagtaaaaatagttgatggtgttgagggagctattg

SEQ ID NO: 215990 - DNA, 901 bp, Unknown
  Bacterial polypeptide expressing nucleotide sequence isolated from the Sargasso Sea
gataaaaatagaaataaaatttctgaagcaaataaaatagatttagaaaatggtgaaaaaaaatctttagctaagcctttaataaatagacttacattaactgaaaaatctattgatggattgattacatcaattgaagatataatcgaaataccagatccaattggcattacattagaagaatgggaaaggcctaatggtttacagtttcgtaaaatttcaacaccacttggtgtattaggtgtgatttatgaatccagaccgaacgtcactgttgatgcgtcttgtctttccataaaatctggcaattgtataattttaagaggtggtagcgatagtttttattcctctaaagagttagtaaataatattacaaatgctttcatggaagctggcctcccagaacattgtgtccaaatgattaatacacctgaaagagaagcggttgatcatttactaagcatgagagattatgttgacgtcattattcctagaggtggaaaaggtttgattgaaaaaattaattcagcaagcaaaatacccgttatcaaacatttagatggtatatgtcatgtgtatgtagataaagatgctgatttaagcattgcagaaaaagtagtttttaatagtaaaatgaggcgtcctgaaatttgtggtgctgcagaaacacttttaattgatgaaaaaattaaagacgaagcaatgaaaatattaaaacctctaaaagaagtaaactgtgaaattcgaggcgatgaatatattcagtctttagatagtgattttaaaactgcaagtgaagaagattggtctttagaatatttagataaaattttatcagtaaaaattgtttcaggagttgatgaagcggttaagcatataaatgattattcttctggtcata

SEQ ID NO: 215991 - DNA, 950 bp, Unknown
  Bacterial polypeptide expressing nucleotide sequence isolated from the Sargasso Sea
aatttatcagaggcacttatagataggctccatataaatagtagtcgagttaaatctatgataaacggtcttgaagcgataaatatgataccagatacgctctacaaaaaaatgaacaaatctaaacagcctagcggaataaccgtcgagcaaatgagagtaccgcttggagttattgcaatgatttatgaatcaagaccaaatgttacaattgatgccgcaggcctatcattaaaatctggcaatagtattattctcagaggtggaagcgaagctatcaacagtaatttgatattatctaatcttatcaaaaaggcacttcgtgagagcaatgtatcaacagatatggttcaaatcgttaaaacaacagatagaactgctgtaagtgagcttttaaaaatggactccttcgtagatgtaataatacctcgtggcggtaaagggctaattaaaaaaatatcacaggaatctaagataccaatcattaagcatcttgatggtaattgtcatgtatatattgataaggatgctgacttcaaaacagctatgtcatgtacaattaattctaaaactcaaaggtatggtgtgtgcaatgcagccgaatcattgctgattcacaagagttttccaaaagcttatataaaagaaattctttcatcgctagaaaaatgtgatgtcgaaattagaggatgtagccaaacaaagaaaatatattcaaaagtgaaactggcaaaagagtcggattggtatgaagaatatttaaaaccaataatatctgtaaaaattatcaataatatagatgacgctatattacatattgaaaagtatggtagtaagcatacagaagctataatctccatggataaaaatgctcaaaataaatttctaagaggagtagattctagctccgtgatggtaataccctcactagatttgcagatggttttgaa

SEQ ID NO: 215992 - DNA, 868 bp, Unknown
  Bacterial polypeptide expressing nucleotide sequence isolated from the Sargasso Sea
tcccgcggatgccgccggactttgcctgaagtcgggcaatgcggcgatcctgcgcgggggttctgaggcgctccactcaaacggcgcgattggcgattgccttgcgaagggacttacggatgccggtttgccgcagggcgtcatccaggtgctgaagaccaccgaccgatcggcagtgagcgcgatgctggatagccctcactatctcgatgtcattgtgccgcgcggcggtcggggtcttatcgagaaagtcagcgcggaatcgcaggtgccggtgatccgtcacttagacggcaattgtcatgtctttgtcgatgactacgctgatctcgataaggccgtcgagatcgccttcaacgctaaatgtcggcgctatggcgtctgtggcgcgatggaaaccctgctgttggcgagctctgtcgcttctgcggtacttgagcggctggtgccccgctaccgggaggccggtgtggaactgcgcggatgcggccagacctgtgagattgtcccggagtgtactggcgctaccgaatcggactgggagaccgagtttctcgcaccggttctcgcggtacggatcgtcgatagtctggatgaggccatcgcgcatatcggccgttatggttcgggacacacggacgctattgtgaccaacgatctttcacgtagccaacgatttgttcgtgaggtggattccagttcagtgatggtgaatgcctcaacgcagttcgctgatggattcgaatatgggctcggagccgaaatcgggatcagtacggacaaactccatgtacgcgggccggtggggcttgagggtctcacgattcaaaagtacatcgtctatggcgacggaacgacccgtccttga

SEQ ID NO: 215993 - DNA, 825 bp, Unknown
  Bacterial polypeptide expressing nucleotide sequence isolated from the Sargasso Sea
caccgggtccttgcggaaatcctccgtcaaaccgcagatgattttgaagaaatgccgatcaatgccttgagcctggtggaatcccgggacgaggtttcacaactggtccagatgagtgaagaactggatctgatcatcccgcgtggaagtaacgagttggtccagtcgattcaggcccgcgcccaggttccggtactcgggcatgcggatggaatctgccatgtcttcatcgacgcaaatgcagaccccgaaaaagctcggaaggtggttttggattctaaaacagattatcccgcggtttgtaatgccctggaaaccctgttggtggaccgtgagcttagctccgaacttctaaaaaagatcattgaagatcttgtttgggcaggagttgaaatcagggcttgtccggatactcagaagaaacttgaaggtcactcccaacttgaaatgggaaatgcttcagaagaagactggaaaaccgaacatctggaaatgattctttctgtaaaaacggttgcaggaccggaagaagcgattcagcacatcaatcgttacggttccaatcataccgattccattgtcaccgaatctcttgaggctgccgaaaggttcatgaacgaagttgattctgccggtgttttctggaacgcctcgacccggtttgctgacggcttccgttacggacttggtgcggaagtaggcgtcagtacctgtaaaacccacgcccgcggacccgtcggactggagggaatggtgatctacaaatacaaactctatggaaacggccagggagcgggaagttacagcaaaggggaaaaaaaattc

SEQ ID NO: 215994 - DNA, 562 bp, Unknown
  Bacterial polypeptide expressing nucleotide sequence isolated from the Sargasso Sea
tgtcgacgtcgctgccgatctcgacaaggccatccgcgtctgcgacaacgccaagactcagcgctactcgccgtgcaacgccatggagaccctgctggtgcaccaggccatcgccgcgcgtgtgctgccgccgttggccgccatctaccgtgacaagggcgtggagctacgtggcgatgccgcgacccgcgaactgctcggcagcgacgtgctggaggcgagcgaggacgactggttcgccgagtacaacgcgccgatcctggcgattcgtatcgtcgactcgctggatgcggccatcgaacacatcaaccactacggctcgcagcacaccgattcgatcatcaccgagaacttcagcgatgctcgtcgcttcctcaccgaggtggattccgcttcggtgatggtcaatgcctcgacccgctttgccgatggtttcgaatatggcctgggcgcggagatcggcatctccaccgacaagctgcacgcccgtggcccggttggcctggaggggctgaccagcgagaagtacgtggtcttcggcgatggacacattcgcacataa

SEQ ID NO: 215995 - DNA, 786 bp, Unknown
  Bacterial polypeptide expressing nucleotide sequence isolated from the Sargasso Sea
tttgggagtaatttatgaatcaagaccgaatgtaacagttgatgcatcatgtttatcaattaaatctggaaattgtataatactaagaggaggcagtgatagtttttatagctctaaagaacttgttgaaaatattacgttatcttttaatgaagcaggtcttccaaacaactgtgttcaaatgatagatactccagaaagagaagcggtagattatttacttagtatgcaaaactatatagatgtaataattccccgaggaggaaaaagtcttatagaaaaaataaattctgtaagcaaaatacctgtaattaaacatttagatggtatttgtcatatatatgtagataaagatgctaatttagaaatcgcagaaaaagtagttttcaatagtaaaatgagaagacctgaaatttgtggtgctgctgaaactctgttgatagatgatagctttaaagataaagcgatgaaaattttagcaccactaaaagaagtaaattgtgaaattagaggagatgaatttattgaatctttagacaaagattttaaaaaagctaaagaagaagattggtcactagaatacttagacaaaattttatcagttaaaattgtttctggagttgaagaggcaatcaatcatataaatgagtattcctcaggtcatacagagtcaataattacgaataataatgatacctttaaaaaattttataataaaattgacagtgcaatcattctaaaaaatgcctctactcaatttgcagatgggggagaatttggttttgg

SEQ ID NO: 215996 - DNA, 710 bp, Unknown
  Bacterial polypeptide expressing nucleotide sequence isolated from the Sargasso Sea
ggagttattaggtgtaatttatgaaagtaggccaaatgttacatcagatgttgcgggtttatgtttcaaatcaggtaatgcagtaatcttaagaggaggttctgaagcaataaattcaaatagagttttgtcaaaactttttagaaaagcgctcaaaaaaaataaagtcgatgaaaactttatacaatttatagattctaaaaacagaaagatggttgatgtaatgctttccaaaatgaaagaatatattgatgtgataattccacgaggtggaaaaaatcttgtaagaaaagttcaagaactttctaaaattcctataattggtcatcttgagggtatttgtcatacatatgtcgacaaagacgctgaactaaagatggcaaatagcgttgtagttaacgcaaaattaagaaacaccagcatatgtggggcgactgaaaccattattctacataaaaatattgttaaaaaatttagcaatacaatcctgggcaatttggaaaaaaatggttgtaaaatttatggagaaaagactttggctaaattttacaaaggtaaactttttaaagttactgaaaaagattggtctaaagaatatttaagctcaatagtttcagttaaaatagtaaacaacctcaatgaagctataagtcatattaataagtatggaacaatgcatacagactcaataattacaaaaaacaaaaaaa

SEQ ID NO: 215997 - DNA, 813 bp, Unknown
  Bacterial polypeptide expressing nucleotide sequence isolated from the Sargasso Sea
gcgcttcaggcgatggcggatgccttggcggagcgggctgaggtgatcgttgccgccaaccgtaaagatctggagcgttccgcggctgaggggctggccccggcactgatggcccggttgaagctggatgccggcaagctccgcggtgccatcgatggggtgcgaaaactggcctctctgcccgatccgcttggcagacggcagctgcatcgagagctggatcaaggcctggtgttggagcgcatcaccgttcctcttggcgtggtgggggtgatcttcgaagcccgcccggatgctgtggtgcagattgcctcgctcgccatccgctccggcaatggcgccatgctcaaaggcggcagcgaagcgcgttgcaccaatgaagcggtgatggaggccctcaagctgggcctgggtcgcagtgccgtggcaccggatgcgttgacgctgttgaccacccgccaggaaagcctggcgttgctgcggctggatggcctggtggatctgatcatcccccggggcagcaacgaactggtgcgattcattcaggacaacacccgcattcctgtgctgggtcatgcggacggcatctgccatctctacgtggatgcggctgctgacgtggaccaggcggtacgcatcgccatcgacagcaagacccagtacccggccgcctgcaatgcgatcgagaccctgctggtgcatgcctcgattgcaccggcgtttctggcgtctgccgtgccggcctttcaagctgccggagtcaccctgcggggcgatgaactcagccgccagcacggcatcagtgacgctgcc

SEQ ID NO: 215998 - DNA, 694 bp, Unknown
  Bacterial polypeptide expressing nucleotide sequence isolated from the Sargasso Sea
gatgaacaaattattaaataaaattggaaaaaattctaaaatagcatttagaaataaaattaattcaagaaagaaaaataaagtattaaatgatttttgtagtttgataattaaaaatgaacaaaaaattatctctgagaacaaaaaagatattaaatttgcaaaatcaaaaaaattaaaagaaaatttaattaagaggctttctttaaattctgaaaaaattaaatctataattaaatcaattaatacagtaattaaacttaagaatcctgttgatattgaattaagtaagtggaaaaggccaaatggtcttaaaataaaaagagtaactataccaataggtattattggaataatatatgaaagcagacctaatgttactgctgatgtctctactttatgttttaaatctggaaattgtgtaattttgagaggtggttcagaggcgtattttagtaataaaattttagcaaatctatttaggcaatcattaaaaaaaaataatataaatatgaattatgtgcaatttgttgagagcaaagatagaaaattggtagattacatgctttcaaaaatgaataaatatattgatataataattccaagaggaggaaaaaacttggtgaaaaaagtgcaaaacctatcttcagtaccagtaattggtcatcttgaaggaatatgtcatacatacata

SEQ ID NO: 215999 - DNA, 607 bp, Unknown
  Bacterial polypeptide expressing nucleotide sequence isolated from the Sargasso Sea
cctgcaaaatagcttcattgacagacttgagctgaatgaaaagagagtagattcaattattgatggcctcaataaggtcataaacctaaaagatcctattggagaattagaaggaatgaatccttcaccttcaggattcaaagttagcaagatgagagtgccgttaggcactataggtattatctatgaatcaagaccaaatgtgacagctgatgcctcggctctttgcattaaatcaggaaacgcatcaatcttaagaggggggtctgaggcggttcgttcaaataatcacattgttacacaagtaagaaaaggccttacaaaagctaatttgccagaagacagtgttcagttaattcaaaatcaagatcgagacttggttaaagaattcatcaaatttgatgactgcattgatttaattattccgcgtgggggatctagcttggtgagacttattgccgcagagtcaaaagttccaatacttaaacattttgagggattgtgtcatgtattcgttgactcagaagctgatgttgagctggctcaaagagttgtaagcaatgcaaaatcttatagatatggcatatgcggagctatggaaaccctt

SEQ ID NO: 216000 - DNA, 444 bp, Unknown
  Bacterial polypeptide expressing nucleotide sequence isolated from the Sargasso Sea
tatgacaaatgatataagtaaactcatgatcgaactcggagagtcagccagactttctgcagaatatttagcaagaacacctaatcaacagagaaatgaagcaatatcatgtattgcacaatctattcaaaaaaataccaataaaattcttaaggcaaatgcaattgatatagaagcagccaaagaaaagggtcttccagaatctatgattgatcgcctgatgttagataagggtcgaattgattcaatggcaagcagcatgaatattattacccaaattgaagatcccattaacaaaataacagaagaatggtcaagacccaatggaatgattattcagagggtgtctgttcctcttggtgtcattggaattatttatgagagccggccaaatgttactgctgatgcagctgcattgtgtataaaatcaggaaattcagttat

SEQ ID NO: 216001 - DNA, 829 bp, Unknown
  Bacterial polypeptide expressing nucleotide sequence isolated from the Sargasso Sea
actgcgatattaagaggtggctcagactcaatacacacttcaaaagtattggtaaaatgtctacaagagggtttagtttctgcaaaccttcctgctgatactgttcaaatgatacaaattacagacagagaagctgtaacagctatgttaaagtcatcgggtgaaattgatgtaattatacctcgtggaggtaaatctctagttgaaacagttcaaaaagaagctagggtaccagtttttgctcatctagaaggcatatgtcatatttatgttgataaagatgccaatatagataaagcaactaaaattatcatcaattcaaaaatgagaagaacaggaatatgtggtgcattagaaacattattaatagacaaaaaaattagtaaagatgtaatccctacatttgttcaaaaattagtagaaaatggatgtcatgttaaaggagatcaagaaactgtgaatattgaaaatacagtagagttagcttcggataaagactggagcacagagtatcttgatgccatcttatctattaaaatagtagaaggtgtaacaggagcaattgatcatataaaaaaatattcatccaatcataccgattcaataattacagaaaacaaaaaaaccgctgaaacatttctatctcaaattgatagcgcaatagtaatgcataatgcatctactcaatttgctgatggaggagaatttggaatgggagcagaaataggtatctcaactggtagaatacatgctcgaggcccagttggcgcggctcaattgactagttttaaatatctagtaagaggtaaagatcaaatccgtgaataaa

SEQ ID NO: 216002 - DNA, 843 bp, Unknown
  Bacterial polypeptide expressing nucleotide sequence isolated from the Sargasso Sea
aaaataacaattcctattggagttattggtataatttatgaaagtaggcctaatgtaactgcggatgtttctagtttatgctttaaatcaggaaattgtataattttaaaaggaggttcagaggcaagactcagtaataaaattttagcaaatttatttagaaaagccttacaaagtcaaaagattgataaaaattttgtacaatttgttgatataaaagatagaaaagttgttaatttaattctatcaaaaatgaaaaaatatattgatgtaattattcctagaggtggaaaaaatttagtaaaaaaagttcaaaacctctcgactgtgccgattataggtcacttggaaggtatttgtcatacgtatgtagataaagaagctgatttaaatatgtcaaaaaaaataatttataacgcaaaaatgcgtaatactagtatatgtggagcgacagaaacaattttaattcatgaaaaatgtttaaaaaaatttataaatccaatacttaaaaaacttacagataaaaattgtattatttatgcagataaaaaagtaaaaaaatatttttttggaaaatcaaatttagtaaattctaataattggtccagggaatatttatcaaagaaagtatctgttaaatgtgtaaaaaatgttcaagaagctataaatcatattaataaatttggaacaatgcatactgatgcaataatttctaaaaatattaaaacagctaaatattttttaaaaaatgtaaaaagttctattgctattcataattcatcaactcaatttgcagatggtggtgaatttggatttggtggtgaagtagggatatcaacaaat

SEQ ID NO: 216003 - DNA, 559 bp, Unknown
  Bacterial polypeptide expressing nucleotide sequence isolated from the Sargasso Sea
gatggatataaaggcctatatggctgaattaggctcgaaagctaggacggcttctcgacatatagctaaagcaactacagctcagaaaaatgatgcactgcttaatattgctgacagaataagtcaaagccgagatacgctattggacgcaaatcaacaggatttggcggtaggtaaacaaaaaggattagaagctgctctactggatcgccttgagttaactgatgcgcgcgtcgatggcatgttaaagggtatcaaacaagtagcagcgcttgacgacccagttggcgaaatcagtggcttaaagtaccgcccaagcggcattcaggtaggtcggatgcgagttcctcttggtgtgattggcatcatctatgagtcaagaccaaacgtaacctgcgaagctgccagcttgtgtctcaaatcaggtaacgccacaatattacgtggcgggtctgaagctattcattcgaatagagcgatagcgaattgcataaattcgggcttagactcggcaggcatgagcgaaaatattgtgcaagttattgagagacagatcgag

SEQ ID NO: 216004 - DNA, 901 bp, Unknown
  Bacterial polypeptide expressing nucleotide sequence isolated from the Sargasso Sea
cgaaggctagctgttgcatctagtttgcaaaaaaaagatgctttaatttttggtgctgactcaatcagggaaaacactgcaaatatattagaacaaaataaaaaagacctagattttggagcgtccaaaggcttgtcaaatgctttgatggatcgattgcttttaaatgaagagcgaataggttcaatgattgatggtctgcaagcgattgccaatcaagacgatcctattggtgaaattatgcaggcatggagacgcccaaatggtcttgaaattaaaagagttcgtacgcccttaggggtaattggcgtaatatatgaaagtcgtccaaacgtaaccgctgacgcgggtgccctttgtttaaaagcaggaaatgcagtaattttgcgagggggttctgaaagctataacagttccattgccatacataattgtctgcaagaaggcttgtcaaaggcgaatttacctaagaactctattcagcttatcccaacgaaagaaagggctgcggttacgagccttctaaaattgactgagtatattgatgttattgtgcctagaggcggtaaaagtctggttgggctggtgcaatcggaggcaagagttccggtgtttgcgcacctagagggaattgttcacatatatcttgataaaactgcggatccaagaaaagcatttgatgtgattttgaactcaaaaacgaggcgcactggtatctgtggtgctgcagaatgcttattgatcaacaaagatatactaaacggcttgggttctgagatcgttaaaatgcttcttggttctggagtagaagtaagagctgacaaagaggtagctaaaatacccggaacagtcgcagctaataaagatgattggggtaatgaatttttagatagcaaaatag

SEQ ID NO: 216005 - DNA, 869 bp, Unknown
  Bacterial polypeptide expressing nucleotide sequence isolated from the Sargasso Sea
agaaaaaataaagttcttaaaagatatatttatttaatagaaaaaaaaagacattctattttgaaagaaaataaaaaagatataaaatttgcaaaaagaaaaaaattaaaggaaaattttatagaaagattatctttaaatcacaaaaagttaaattccataacaaaaacaattaagaatatcattcgtttaaaagaccctgttgataatattttagatcagtggaaaagaccaaatggcctagttattaaaagagtatcaataccaattgggataataggagttatttatgaaagtagaccaaatgttacatcagatgtatcaagcttgtgttttaaatcgggaaattgtgtaattttaagaggaggttctgaagctcttaatacaaataaaatattagcaaaattatttagaaaatctttaaaagataataaacttgatgccaattatatacaattcatagaaaaaaaagatagaaaattagttgattatatgctctcaaaaatgaaagataaaatcgacgtaataataccaagaggtggaaaaaatttagtaaaaaaagttcaaaaattatctaacgttcctgttattggtcaccttgaaggaatttgtcatacatatgtagataaaaatgctgacttagatatggcaattaaaattgtatataatgctaagttaagaaatactagtatctgcggtgcgactgaaacaattttattacataaaaaaatagtaaaaaaattttgtaacccaattttaaaaaaattggaggaaaataattgtaaaatttatggtgataattttttgaaaaaattctataaaggaaaaatttatacagcaaagaaaaaagattggtcgacagaatattt

SEQ ID NO: 216006 - DNA, 406 bp, Unknown
  Bacterial polypeptide expressing nucleotide sequence isolated from the Sargasso Sea
gggggctgtgaagtaagaggagataatgtatgtatgaatatctcagacaaagttctagaagcatccgaagaagattggagtacagaatatttagatgcaataatatctataaagactgttaaaggggtagatgaagcaatagagcacattgctaaatatgggtcaggtcatacagagagtattatttctgaagataaagataaagttgaaaagtttttaaataccgtgggtagcgcaatcgttatgcataatacctcgacccaatttgcagacggaggtgaatttggtttaggtgctgaaataggaattgctaccggcaaattgcacgccagaggaccagttggattagaggggctgacaacttataaatatgtagtgagaggaaatggacaggttagaccataaa

SEQ ID NO: 216007 - DNA, 687 bp, Unknown
  Bacterial polypeptide expressing nucleotide sequence isolated from the Sargasso Sea
aatgcttgatagtaaagacataaataaatacgtagaaggtctaggctcttcatcaaagaaagccagtgaggttcttgctagtataagtacaaaggataaaaactctgctataggatttatagctgacgaaattaatattagaaagaaagaaatcttaaaagctaacagtcaagaccttgttgaagcttctaaaaagggaataagtgactctttagttgaccgtttagagctaaacgacgaaagaatagacacaatccttcttggtttatcaagaatcaaagagttacctgatcctgtaggagaaattactacattacctcccaccccttctggtatcagagttagtcagatcagagttcctttaggagtaattggaattatttatgaatcaagacctaatgtaactgtagatgcatccgctttatgcttaaaagcaggtaatgcttgcatactcaaaggaggtgctgagtctattaaatctaatattgaactaatgaagtgtattaaagagggcttaagtaaagcagatattccagaagactctataaacttaatagaaactgttaatagaaaggctgtaaattaccttttatctttagaggatcacatagacctgataattccaagaggaggaaagagcttggtagagataataaataaaactacaaacatctctgttctaaagca

SEQ ID NO: 216008 - DNA, 832 bp, Unknown
  Bacterial polypeptide expressing nucleotide sequence isolated from the Sargasso Sea
ttgagagaatatgcatcccttgtgaagaaaaacaagttaaaaattttaaaggaaaactcaaaagatattaaaaaagcaaaaagaaagaagcttatagacagattaatattaaatagcgtaaaaattaatcagattatatcaagtataaaagcaatagaaaaatttaaaaatcctattggtcaagttttatccaaatggaaaagatcaaataaattgaaaattgagaaagtgtcaattccaataggtgttatatgtgtaatatatgagagtagacctaacgttactgcagacgtggctgcgctatgccttaaatctggcaatagtgtaatcttacgaggtggatcagatgcttattatacaaatagatttttagcgaatctttttagaaaagccctaagaaaaaataaaattgatgaaaattgtgtccaatttattgaaaaaaatgacagaaaaatagtcgactttattctttctaaaatgagcaattatattgatttggtcgttccaagaggtggtaaaaatttagttaaaaaagttcagaaattatccaaagtaaatgtaatcggacatcttgagggattatgtcatatttatttggataaaaactcaaatttggaaatggcaaaaaagattgtaattaatgctaaaatgagaagaacaagcatatgtggagcattagaaactcttttaataaatgaaaagattttatcatctcatggtaccaaaattattcatgctttaattagaatgggttgtgaagttagggtagacgataaaataaataaattatttaattttagattaaaaaaagcaatgaaaaggacggcaaacg

SEQ ID NO: 216009 - DNA, 574 bp, Unknown
  Bacterial polypeptide expressing nucleotide sequence isolated from the Sargasso Sea
aatgagacaaattttagaaattggaaaaaaatcaaaaaaggcctttgaaaacttaaaaaaagttgactcttttaagattaataaagctttagacgactacattaaattactgtctaaaaataaaaaaaagattattagagagaataaaaaagacgtgaagagtttaaaaagaaaaaatgtcctggacagacttattttagatgaaaaaaaaattgaaagtattataaaatcaatacatgagattaaaaagtttccaaatccaataggtaaaactttagaaaaatggacaggaaataacaatcttcagattaaaaaaattacaatacccattggcgttataggaataatttatgaaagtagaccaaacgttacagcggatgttgctgctttgtgtctaaaatcacaaaactgtgcaattttaagaggagggagtgaggcattttattctaataaaattttatcaggactttttagaatagcacttaggaaaaataagatagatcaaaataccttacaatttattgaaaaaaaaaatagaaatgtagttgatttcttgttgtcaggaatgagtaaa

SEQ ID NO: 216010 - DNA, 763 bp, Unknown
  Bacterial polypeptide expressing nucleotide sequence isolated from the Sargasso Sea
gaaaaaaaaattgatactaaaattaaaaataaagttttagacaaatttgcttatttaataaataaaaataaatttaaaataattaatcaaaataaaaaagatgttaattttgccaaaaaaaaaggtataaaagaaaatttattgagaagattaattttagatatagataaaattgaacaaataattaaatcaataaaaattattattaaattaaaagatccaatagacataactttatcccaatctaagcggcctaatggcttaagaatcaaaaaagttactattccccttggtgttatcggtataatttacgaaagtagacctaatgtaacttctgatgtttcaagtttatgttttaaatcaggcaattcaataattctgagagggggatctgaagcttatttttctaacaaaattttagctaatttatttcgtaaagcacttaaagataataaagttgatcccaattatgttcaatttattaaaagtcggaatagacgattagtagatattttactatctaaaatggaaaaatatatagatttagtgattccaagaggaggaaaaaatttagttaaaaaagttctaaaactctcttcagttccaataattggacatcttgagggtatttgtcatacctatattgataaagatgcaagtttaagttcagctgtaaaaataatttacaatgctaaacttagaaacacaagtatatgcgaagcaactgaaacaattttaattcatgaaaaatgcttaaaaaaat

SEQ ID NO: 216011 - DNA, 452 bp, Unknown
  Bacterial polypeptide expressing nucleotide sequence isolated from the Sargasso Sea
aatgtcacatagtaaagaaataatttcttatatgaatcgattaggatctgaagctaaggaagcttcatcggttcttgcgcaggcttcaatcgagcaaaggaatgcctcgctagatttcatcgctgaagccatagagttaaacagagataaaattctcagcacaaatcaaaaggaccttgagctagctaaacaaaagtcaattgggtctgcactaatcgatagattagaattgaatgacaacaggatagactctatgatttctggcctgaaaattgtatcagacttacctgatcctgttggagaaataaccgatctagatccaactccatcaggtatagaggtaaaaaaaatgagagttcctttgggtgtcgtaggaataatctatgaatcaagaccaaatgtaactgctgatgccgccgcactttgccttaaatctggaaattcttgccttc

SEQ ID NO: 216012 - DNA, 451 bp, Unknown
  Bacterial polypeptide expressing nucleotide sequence isolated from the Sargasso Sea
catgaagaaaataggtgaaaaagcaaaattggcttcattaagtttaactaatttaaatattagtaaaaaaaattctgttttgaaacaatttagtaaatatcttaaaactaatgaaaaattaattttaaaagcaaataaaaaagatttaattaacgcaaaatcaaaaaaaattagagaaagtatgattgatagacttaaactaaatagggaaaaaattaaacaaattagaaaatcaattgataaaatagtaaaatttaaagatccaataggaaaaactttatcttcttggaaaagacctaatggtttagttataaaaaaaatctcaataccaataggtataattggtgtaatttatgaaagtagaccaaatgttacttcggatgtatctgccttatgttttaaaagtggtaatgtagtaatattaagaggaggatcggaagcctttaattca

SEQ ID NO: 216013 - DNA, 502 bp, Unknown
  Bacterial polypeptide expressing nucleotide sequence isolated from the Sargasso Sea
aatgttaaaaaaattaataaatattggaataaaagcaaaaaaagccactaaaattaaagttgatagaaaaaataaaaataaagttttaaaaaaatatttgcaattgataaataaaaataaaaaaaaaattctcaaggaaaataataaagatatagagtttgcaatcaaaaataaccttcctgaaaacttaataagtagactggctttgaatgataaaaaaattacagaaataaagaattcaattagtaaaattataaaattaaacgatccaacaaataaagtaattgacaaatggaaaagaccaaatgggttaattattaaaaaggtttcaactccaattggtgtaattggtattatttatgagagcagaccaaatgttacatcagatgttgcaagcctatgctttaaatcaggcaatgtagtcattcttagaggaggatcagaagcatataattcaaatagaatccttgcaaatttattccgagatgctcttagaataaac

SEQ ID NO: 216014 - DNA, 735 bp, Unknown
  Bacterial polypeptide expressing nucleotide sequence isolated from the Sargasso Sea
aggatgctattcagcttattaaaagtaagaaaagagaagatgcaataaaatttatgaaactaactgaatacattgacttgattgtcccaagaggagggaagggattaattgacacattagtagaaaatgcaaaggtcccttttattttagatggagatgggaacgtacatctttatgtgcacaaagatgccaatacagaatatgtaattgacataattattaattcaaaagtacaaagaccaggagtttgtaacgcactagagactttgatattaaataagtcaatatatcaaaaaatgggtaaagaaattattaatgagttacttaagaatgaggtagaactttttgtagatgaagttatagctaatgacatatctgatcttgaaatagctaaagatgagcactacatgacagaatttcatgatttaaagttagcaattaaaattgttgatgatatagatcaagctatacatcacatccaacaatattcttccggacacactgaagctatccttacagagtctgaagaagcaaaaaataaattttcaaaatctttagattcttcagtaatttttataaatgcatctaccagattcactgatggtgaaatgtttggctttggtgcagaggtaggtattagcactcagaaacttcacgttaggggtccaatgggattagaatcattaacaaatgaaaggtatgttgttgaaggctcaggaacaataagacaatgaa

SEQ ID NO: 216015 - DNA, 854 bp, Unknown
  Bacterial polypeptide expressing nucleotide sequence isolated from the Sargasso Sea
aatgtctgaaaatttatatataaaaaatataggtaaaaaatcaaaaattgccgcattaagtttatccaatttaagcatagataaaaaaaattcagttttaaaaaaatttagttattatttagaaaaaaataagcaatcaatattaagagaaaataaaaaagatttatttaaagcaaaatctaaaaaaattaataataatttgattgatagattaaaactagataatgaaaaaataaaaaaaattataaattcaataggaaaaataattaaatttaaagatccaacaggcaaagttttatcttcctggaaaagaccaaacggtttgaaaataaaaaaaatatcaataccaattggtgtaataggtgtaatttatgaaagtaggccaaatgttacctcggatgtatcagcgctttgttttaaaagtggtaatgtagttatattacggggagggtcggaagcttattactctaataaaattttagctaaactttttagaaaagctcttaaagataaaaaatgtgatgaaaattgcgtgcagtttatagaaagcacaaatcgaactcatgttgattatcttttatcaaatatgaaagattatatagacctgattataccgagaggaggaaagagtttagttaaaaaagttttaaaaaaatctactgtttcaattgttggacattatgaaggtttatgccatgtatttgtagataaagattccgatttaaatacagccataagaattgtaaaaaattcaaaaatgagaaatgtaagcatatgtggagcagcagaaactttattaatagataaaaaatgtcttaagacacattgtaaacctatcttaaatagtttgatta

SEQ ID NO: 216016 - DNA, 901 bp, Unknown
  Bacterial polypeptide expressing nucleotide sequence isolated from the Sargasso Sea
agttatttacgaaagcaggccaaatgttacagcagatgttgctgctttaagccttaagtcaggaaattgctctattttaagaggaggatcagaagcttttaattcaaataaaatcttggccaatatttttagaggtgtgcttcaaaaaaataaaataaataaaaattgtattcaatttatagaaaaaaaagatagaaaaatagttgataatatgctctcaaagatgagcaaatatattgatgttattgttccaaggggtggcaaaggattggtgtcaaaagtacagaaattttccaatgtgcatgtaattggtcatctagagggcttgtgccatatattcgttgataaaagtgcaaatttagaaatggcaaaaaaaattattatcaatgcaaaaatgagaagaactagtatttgtggagcagtagaaacattattaattgaggaaaaagctttaaaatcacatgctaaagaaattgttaaatctctaatgaaatctggttgtgaagtaagagtagatgataagatcaataaaatttttaataacaaattaaaaaaagcaaaagataaagattggaaaactgaatacttagatgcaattatttcagttaaaactgtaaagaacgtatatgatggtgtgagtcatattttaaaatatgggacaatgcacactgatagtatcatctcaaataacagtaaaaacacaaaaatattcttagaaagagttaatagttcaatagccatgcataatgcttctactcaatttgctgacggcggagaatttggctttggaggtgaaattggaatttcaacaaacaaacttccgcctagaggaccggtcggcattaatcaattaacatcgtataaatatttagtttctggaaaaggaaacactcgaacataa

SEQ ID NO: 216017 - DNA, 595 bp, Unknown
  Bacterial polypeptide expressing nucleotide sequence isolated from the Sargasso Sea
aatgttaaaaaaattaataaatattggaataaaagcaaaaaaagcttccaaaattaaagtaaataaaaaaaataaaaataaagttttaaaaaaatatttacaattaataaataaaaataagaaaaatattcttagagaaaacaataaagatatagattttgcaatcaaaagtaatcttcctgaaaacttaataagtagactaactttaaatgataaaaaaatttctgagataaaggattcaattagtaaaattataaaattaaacgatccaacaaacaatgtaattgataaatggaaaagaccaaacgggctaatcattaaaaaagtttcaactccaattggtgtaattggtattatttatgagagcagaccaaatgttacatcggatgttgcaagcttatgctttaaatcaggtaatgtggtcattcttagaggtggatcagaagcatataattcaaacagaatcctagcaaacttatttcgagatgctcttagaataaacaatattgatcaaaattatgttcaaataataaaagataaaaaaagaaaatctgtagactacatgttgtcaaaaatgaaaaattttatcgcatgt

SEQ ID NO: 216018 - DNA, 948 bp, Unknown
  Bacterial polypeptide expressing nucleotide sequence isolated from the Sargasso Sea
aatgggtttagtaattcaaaaagttacagttccaattggtgtaatagcagttatttatgaaagtcgaccaaatgtaacttcggacattgcgagcttatgttttaaatcaggaaatgcggttattttaagaggtggctcagaagcattaaatacaaataaaataatttcaaatttatttagattatctctaaagaattgtggtgtagataagaattttgttcaattcattgattcaaaaaatagaaagatagtagataacttgctttcaaaaatgaaaggttatatcgacttagtgattccacgtgggggaaaatcattacttaaaaaagtagataaaatatctacaatcccatacattggccatttagaggggatttgccatacgtttattgataaaaaagcaaaatttaaaatggcaataaaagttttggaaaatgccaaaatgaggaatacaagtatttgtggtgcaactgaaacagtattatttcatagaagtttttctaaaaaatcaattaatctagtcttaaaaaatttacaaaaacaaggttgtaatatatatgcagataaatttataaggaagttatttgatggtaaatctaatatagctaaaacaaaaaactggtctacagaatatttatcatcgaatatatcggcaaaagtggttaatggtgtgagtgaggcagttaaacatattaatcaattcggcactatgcatactgatgcaattattacagaagataaaaaaactgcaaaatattttttaaaaaatgtaaaaagttcgatagcaattcacaattcttcaactcagtttgcagatggtggcgagttcggttttggtgctgaagttggtatttcaactaataatttaccgcccagaggtcctgttggactaggtcaacttgtaagttataaatatgaaatttatggcaaaggtcaaattagaaaata

SEQ ID NO: 216019 - DNA, 988 bp, Unknown
  Bacterial polypeptide expressing nucleotide sequence isolated from the Sargasso Sea
ttaatagatagattaatcttaaatgacagaagaattgatggaattagacattctataaatgaaatcgctaaattcaaaaatccgattgggcgtgttttagaaaaatggcaaagaccaaataaacttaaaataaaaaaaatttctactcctataggagttataggcgtaatatatgaaagtagacctaatgtaactgcagatgttgcggctttgtgtttaaaatctggaaattgttctattttaaggggtggatcagagtcttataattcaaataaattgttagcaaatctatttcgagactcactaggtagaaataatattgataaaaactgcgtccaattcatagaaaaaaaggaaagaaaaatagttgattcacttctctcaaaaatgagtaattacatagatgtaattgttccaagaggaggcaagggattggtagaaaaagttcaaaaattttcaaatattcacgtgattggccatctagaaggattatgtcatatctatttagataaaagcgcaaatttaactatggcaaaaaaaattattattaacgcaaaaatgagaaggacaagtatttgtggcgctctagaaactttgttaattgatgaaaaagcattaaattcccacggtaaaataattatagaatcactgatctcttctggttgtgaagtccgtgtggacagtaaaattaataagctttttaaaaataaactaaaacttgcaaaagagattgattggaaaacagaatatttagacgcaaaaatttccattaaaactgttaaaaacgttagggacgctgttaatcatattttgaaatatggaactatgcatactgatagcattattacaaataactcaaaaaattcaaaaatatttttagaaggagttaacagttctatagcaatgcataatgtttccactcagtttgcagatggaggcgaatttggatttggaggggagattggaatttcactaacaaacttcctcc

SEQ ID NO: 216020 - DNA, 456 bp, Unknown
  Bacterial polypeptide expressing nucleotide sequence isolated from the Sargasso Sea
catgacgagattaggagagaatgcctatgaagcgtcaagagacttatcttcattgtctacagatcagaagaataagacattaaagcttatggctgaatccttatcagataataagcatgatttattggaagcaaataaagaagacctctacatagcaaacaatacgggaattactgatgcgcttttagatagactagaacttaatgaagaaagaatagaatcaatgatctctggtctaatttctatatctaggcttccagaccctataggagagataaccaatctcaagcccactccatcaggaataaatgtaagtaagatgagagtacctttaggggtagtggggataatttatgaatcaaggcccaatgttacagctgatgcagctggcttatgtctaaaatctggaaatgcttgcatcttaagaggaggaagtgaggccataaattcaaattt

SEQ ID NO: 216021 - DNA, 690 bp, Unknown
  Bacterial polypeptide expressing nucleotide sequence isolated from the Sargasso Sea
gatgtactcgattggaaaaaaagctttgaatgctacaaaaaacaaagttaattcaaaattaaaaaataaagttttagataaatatatttctttaattataaaaaataaaaaattaataatcaaaaaaaactttaaggatattaagtttgctaaaaaaaaaaaacttagaaataatttaatcgaacgtttagcaattgatgaaaaaaaaataaatgatatttgttatgctataaaaaatgtgagaaagttaaaagatcctatagatgttactttatcaaaatggagaaggccaaataaactgttaataaaaaaagtttctgtgccaattggaataattggcgttatatttgaaagtagacctaacgtagcttcagacatatcttgtttgtgttttaaatctggcaatgctgttattttaagaggaggtagtgaagcacttaattcaaacaaaatattagtttcattatttagagaagctttaaaaaaatttaaaattgatccaaattatgttcaattaattgaaaaaaaagaaagaaattatgtaaattttttactatcaaatatgactaaatatattgatgtaattattcctagaggcggaaagggtttggtagcaaaagtgaaaaaattctccaaagtacctacaattggccatttggaaggaatatgccatacatatatagataaaga

SEQ ID NO: 216022 - DNA, 750 bp, Unknown
  Bacterial polypeptide expressing nucleotide sequence isolated from the Sargasso Sea
ttagataggctaatcttaaatgaaaaaaaaattgatggtataataaattctattaatgaaattaaaaaatttcctaatcctatcggtaaagtgctggaaagctggaagggaaaaaacaaactaaatattaaacgagttaccactcctattggtgtaataggtataatctacgaaagtcgaccgaatgtgacagcagatgttgcggctttatgtttgaaatcaagaaactgtgcaattctaagagggggaagtgaagcttttcactcgaataaaattctttcagatttattcagaaaatctttaaaaaagaataaaataaatcaaaattgtcttcagtttatagaaagtaaaaatagaaagattgtagactttttactttctaaaatgagtaaatatgtagatgtaatagttcctagaggtggaaaaagtttggttgctaaagttcaaaaatattcaaatatccatgtaattggtcacttagaaggtctttgccatatatatttggataaagatagcaatctcaataatgcgattaaagtaatattaaatgcgaaaatgagaagaacaagtatttgtggagctttagaaacacttttaatacatgaaaaaattataaggaccaaaggggttgaggttatcaattcgcttatcaataatgattgtgaggttatagttgataaaaaaataaataaattctttaataataatttaaaattagcaaaagaattagattggaaaacagagtatctt

SEQ ID NO: 216023 - DNA, 950 bp, Unknown
  Bacterial polypeptide expressing nucleotide sequence isolated from the Sargasso Sea
tcagattctatgatagatcgtttgcaattgaatgaagagaggattgatggaattattcaatcaattgaaactgtaatttctttacctgacccaatcggaaatattttatttactaatacaagaccaaatggaatgaaagtagaaagagtttctgtccctcttggagtagtaggaataatttatgaaagtagaccaaacgtaactgtagatgcaagtattctctgcctaaaatctggaaatagtgtaattctcagaggtggatcggagtcatttaattctaatttgcaactcgtaaaaacaatgcaaagggcttgcggtaatattggattagacaaaaatattattcaatttatagaaaccatagatagatcagctgtagactacatgttatctaaaatgtcagactatatagatgttgttgtcccacgaggtgggaaaggactagttaaaaaagttcaagagtctgccaaaattcctgtgatcggtcatttagatggaatttgtcatgtgtatgttgatgaaagttcggatcccgaagcagctagcaaaattgttacaaatgcaaaactcagaagaactagcatttgtggtgctgctgaaacagttttaattgatgaaaaatgtatagattctcacctacccaagattatcaaagacctgaaatctggtgggtgtgaaattcgtggagatgaaaggtgtaaaaataaatttgacgaagtggttttagcatctgatgaagattggaaaacagagtatttagaagctatcatttcaattaaaattgttagtggagttgaagatgctatagaccacatagagaaatatggctctggacatactgagagtattatttcagagaataaagatagtgtagaaaaatttcttaattctgtaggaagtgctatcgttatgcacaatacatctacacaatttgctgacggaggtgaatt

SEQ ID NO: 216024 - DNA, 891 bp, Unknown
  Bacterial polypeptide expressing nucleotide sequence isolated from the Sargasso Sea
agcaaataatcttgatttagaaaatggtaaaaaaaaattattatcaaaacctcttattaatagattaactctatccaataaatcgattgattctttggttaatagtattgaagatataattactatacctgatccaataggattaactctggaagaatgggagaggccaaatggtttaaaatttagaaaaatatcaacacccctaggcgttcttggtgtaatttatgaatcaaggccaaatgtaacggtagatgcatcatgcttatcgataaaatcaggtaatagtattatattaagaggaggcagcgacagtttttatagctcaaaagaacttgtaaagaatataacacaatcttttaatgatgcagggcttccaaatttttgtgtacaaatgattgatactccagagagagaagctgtagattatttattaaaactaagaaattatgttgatgtaattattcctagaggaggtaagggactgattgaaaaaataaatgccactagcaaaataccagtcattaaacatttagatggtatatgtcatgtatatgtagataaagaagctgatattaaaatagcagagaaagttgtatttaatagtaaaatgagacggcctgaaatttgtggagctgctgaaacacttttaattgatgaaaatattaaaagtgaagcaatgaaaatactaaatccattaaaagatgttaaatgtgaaattaggggagataattttattcaatctttggataaagattttaaagttgctacagaagaagattgggctttggagtatctagataagattttatctgttaaaattgtctctggagttgatgatgcaattgatcatatcaacaaatattcttctggccatacagagtctataattac

SEQ ID NO: 216025 - DNA, 826 bp, Unknown
  Bacterial polypeptide expressing nucleotide sequence isolated from the Sargasso Sea
cgtcaaacggcagatgattttgaagaaatgccgatcaatgccttgagcctggtggaatcccgggatgaggtttcacaactggtccagatgagtgaagaactggatctgatcatcccgcgcggaagcaacgaattggtccagtcgattcaggcccgcgcccagattccggtactcggacatgcggatggaatctgccatgtcttcatcgacgtagatgcggaccccgaaaaagcgaggaaggtggttttggattccaaaacagattaccccgcggtctgtaatgccctggaaacccttttggtggatcgtgaccttgacaccgaacttctaaaaaagatcatggaagatcttgctcaggcaggagttgaaatcagggcctgtccggatactaagaagaaaattgaaggtcactctcaacttgaaatgggaaatgcttcagaagaagactggaaaaccgaacacctggaaatggtcctttctgtaaaaacggttgcaggactggaagaagcgattcagcacatcaatcgttacggttccaatcataccgattccattgtcaccgaatctcataaaaatgccgaaaggttcatgaacgaagttgattctgccggtgttttctggaacgcctcgacccggtttgccgacggtttccgttacggacttggagcggaggtaggcgtcagtacctgtaaaacccatgcccgcggaccggtcggactggagggaatggtgatctacaaatacaaactctatggaagcggccagggagcgggtagttacagcaaaggggagagggaattcatgcatcagcccctggaaacttgaa

SEQ ID NO: 216026 - DNA, 658 bp, Unknown
  Bacterial polypeptide expressing nucleotide sequence isolated from the Sargasso Sea
ctgataataaaaaaaataacaattccaattggcgttattggtgttatttatgagagcaggcctaatgtaacatgtgatgtttcttctttatgtttgaagtcaggaaacgtagcaattcttaggggtggatcggaatcatttaattcaaacaaaattttagcaaatttatttagaaactctctgtcagaaaatagagtagataaaaattgtgtacaatttattgagaacaaaaaaagagaaatggttaattatcttttatcaaaaatgtctgattatattgatgtgattgtaccaaggggaggcaaaagtcttgtaaaaaaagtacagcaactttctaaggtaaatgtcattgggcatttagaaggtaattgtcatgtttatgtagacaaagattccgatttaaaaatggctaaaaatgtaattattaattcaaagatgagaagaacttcaatttgtggtgctgctgaaacattactaatagataaaagatgtattaaatcacatggtccagatattataaacagtttagttcgatcaggttgtgaaattgtggttgataaaaaaataaataatttctttggtaattcttttaagctagctaaagatatagattggagcacagaatacttgaggccaaaattatctataaaatctgtta

SEQ ID NO: 216027 - DNA, 532 bp, Unknown
  Bacterial polypeptide expressing nucleotide sequence isolated from the Sargasso Sea
tatggacatagaaaaggtagttctagaaatcggacaaagggcacgtaaagcttctgaagaactcggtaaagctgctagcacgactaagaatcagggattgattgaggccgctaatgcaattagatcccagtctaaacagattgtgtctgcaaatcataaagatttagaaattacttctggtaaaggcctttcaaaggcaatgattgataggctgaaactagatgatactggaatcgaagctatggccgttggcttggaggaaattgctaatttaaaggatccagtaggaaatattcttgattcatgggagcgcccaaatggactcgctatttcgcgtatcacagttcctttgggagtgataggtgtaatttatgaatcgagaccaaacgttacagccgacgcggggggattgtgcttgaaatctggtaacgctgtaatactaagaggaggatcggaaagttataattcttcgacagctatcctaaatgctctaagagatggactaagaaaagttgacctgcctttagaagca

SEQ ID NO: 216028 - DNA, 838 bp, Unknown
  Bacterial polypeptide expressing nucleotide sequence isolated from the Sargasso Sea
tataaaaaaaaaattattaaagaaaattcaaaagatttaaaaaattgtaaacgtcaagatttaattgatagattaatacttgatgaaaataaaattgaagatattagaaattctttgaacgaaataaaaaaatttaaaaatccattagaaaaggtaattacaaaatggaaaagacctagtggattaactataaaaaaggtaactattccaataggagttataggtattatttatgaaagcagacctgatgttacaccttatgtttcggccctttgtatcaaatctggaaatgttgcgatactaaaaggaggatctgaggcttatttttctaataaaatattttcaaatatatttagaagttctctaaaaaaaaataatattaatcaaaattgtgttcaatttatagattcaagaagcagaaaagttgtagattttatgttatcaaaaatgtcagattatatagacgttatggtacccagaggaggaaaaggtttagtaagtaaagttaaaaagctttctaaggtaaacgtaattggacatttggaaggtaattgtcacgtctatgtcgataaggatgcaaatcttgaaatggcaaaaaaaattgtcttgaattctaaaatgagaagaacctcgatttgtggagcagccgaaacacttttagtggataaaaaatgtttaaaatcacatgctatgccaataattgaagaattaattttttcagggtgcgaagttgttgcggacaaaaaaataaacaaattatttggaaattccttaaaaactgcaagagaaattgattggaaaacagaaatatctaaactcaaagatatctgtaaaagta

SEQ ID NO: 216029 - DNA, 940 bp, Unknown
  Bacterial polypeptide expressing nucleotide sequence isolated from the Sargasso Sea
tatactaacaaacgtccaaatggaatgttagttgaaagagtgtctgttcctcttggtgttattggaattatttatgaaagccgaccaaatgttacagttgatgcgacagttttatgtctaaaagctggcaatagcgtaatactaagaggagggtccgagtgttttaatactaactcagaaatggtaaaatcagtacaagcggctttaaggaacaattctgtaagcgaacatattgttcaatatgtaagcacaactgatagagcggcagttgattacatgcttgctaaaatgggaaaatatattgatgtagtagtacctagaggcggtaaaggtttagtaaaaaaagttcaagacaccgcaaaaatacctgttatcggacatctcgatggaatatgtcatttatatgttgatgaaacatcagatactgaaatagcaagcaaaattatagaaaatgcaaaaatgagaagaactggaatttgtggtgcggctgaaactatattgattgatgaaaaatgtgttgatactcatttaccaaaaattattactgatttaattaatgggggctgtgaagtaaggggagataatgcatgtatgaatatctcagacaaagttctagaagcatccgaagaagattggggtacagaatatttagatgcaataatatccataaagactgttaaaggggtagatgaagctatagagcatattgctaaatacggatcaggtcacacagagagtattatttctgaagataaaaagaaagttgaaaagtttttaaataccgtaggtagtgcaatcgttatgcataacacctcaacccaatttgcggatggaggtgaatttggtttaggtgctgaaataggaattgctactggcaaattgcacgccagaggtccagttggattagaggggctaacaacttataaatatgtagtgagag

SEQ ID NO: 216030 - DNA, 764 bp, Unknown
  Bacterial polypeptide expressing nucleotide sequence isolated from the Sargasso Sea
catgctcatcaaaaagatcagcacgcccattggcgtcattgcaatcatttacgaatcccggccaaacgtaaccatcgactgcgccgggctttgccttaagtcgggcaacgcgtccatcttgagaggtggcaaggaagccttccactccaaccgggccctggcctcggtcatcgagcaagggctggagcagtcttcgcttcccaaggactcggttcagctggttcccaccgtcgagcgggaggccctcaaccacatgcttaccctcgaagagctgatccactgcatcattccaagggggggagagggcctcatccggttcgtggccgagaacagtaggattccggtgatcaagcactacaagggggtatgcaaccttttcgtagatgcggaagccgacctcgagatggcccggcggatcgcggtatcttccaagtgcggccggccgggcgtgtgcaacgcgatcgagaacctggtggtggacgcggggatcgcagaggaattcctccccgcttgcgccaaggaattgtccgaaaacggctgcgagctcctcgtggacgaaagaagcgccgccatcttgggagacttgccaaccaagccggccggcgaggaagactaccacgaggaattcctcgatctgcgcatctccatcaagatcgtggactcgatggacgaggccatagccttcgtcaaccggttcggcagtggccacagtgagtccatcataacgaaaaacaaggacaacgcgaaccgcttcctgagggagg

SEQ ID NO: 216031 - DNA, 781 bp, Unknown
  Bacterial polypeptide expressing nucleotide sequence isolated from the Sargasso Sea
atggtcaacgatgcgattatacagcaatataaagatgaggccctaaagctaattggttctaccaaattagcttctctgagtctagcaaaagctaccactgaagataaagatatgcttttgaaagaaatatcaaatcaaatagaagaagatgagcaagcaatacttgaagctaataaaattgatattgataatgcaaaagacaaggaatattcatcagcgttcctagatagacttaagcttgacaaaagtagacttcaagaaattataaaaaatataaaagagataattaaattggatgaccctgtgggtaagagagagtttcttcataaaagacctaatggacttgatgtatacaagcagacaattccacttgggacaataggtattatttacgaatctagacctaatgttacttctgatgctgcagttttatgtttgaaatctggaaatgcaactattttaagaggaggttccgaatgttttgaaactaacaagtccctcgttcaatcaatacaaaaggcacttttaaagcaaggatttgattctaattgtgtgaacatgattcctcatactgacagggagattatgaagtatgttctaacattggatgaggatattgatttgataattccaagaggtggagaagggctaatacgttttgtttctgaaaattctagaataccagtaattaagcactataaaggtgtatgtcatgtatatgtagacgaatatgcagatttagacaaggctgtaaatatttcattaaactctaaagttcaaa

SEQ ID NO: 216032 - DNA, 481 bp, Unknown
  Bacterial polypeptide expressing nucleotide sequence isolated from the Sargasso Sea
aatgaattatttaaaaacagttggaaaaaatgcgaaaaaagcttttgaaaatttaaagaacgttaaacataaaaatattaaaaaagttttagaaaattacaatcaatctcttctaaaaaatacaaataagataattagagaaaatttaaaagatgtaaaaaatgttaaaagaaaacatttagttgacagacttattctaaataaaaaaagaatagagggtattagacactcaataaatgaaatagcaaagtttaaagatccgattggaagagttttagaaatatggcgcagaccaaataatttaactattaaaagagttacaactccgattggggtcataggcgtaatatatgaaagtagacctaatgtaactgctgatgttgcagcattatgtttgaaatctgggaactgttctattttaagaggtggatctgaagcttttaattcaaatagattattagctaattttgttcagagataa

SEQ ID NO: 216033 - DNA, 771 bp, Unknown
  Bacterial polypeptide expressing nucleotide sequence isolated from the Sargasso Sea
cgcctggcgctgacgccgaaggtgatcgacagcatgatcgaaggcctgcgccaggtggcgaccttgcctgacccgatcggcgagattcagggtatgcgctacctgccgtccggtatccaggtcggcaagatgcgtgtgccgctgggcgtgatcggcatcatctacgagtcgcggccgaacgtgaccatcgatgcggccagcctgtgcctgaagtccggcaacgccaccatcctgcgtggcggctccgaggccattcattccaaccaggcgattgcccgctgcatccagcagggcctggccgaagccgatctgccggcagctgccgtgcaggtggtggaaaccaccgaccgcgcggctgtcggtgagctgatcaccatgccggagttcgtcgacgtgatcgtgccgcgcggtggcaagggcctgatcgagcgcatcagtcgcgacgccaaggtgccggtgatcaagcacctggatggcgtctgccacgtttatatcgatatcgctgccgacctcgacaaggccattcgcgttgccgacaacgccaagacccagcgttattcgccgtgcaacgccatggaaaccctgctggtgcaccaggctatcgccgcgcgtgtgctgccgccgttggccgcgatctaccgcgataagggcgtggagctgcgtggcgatgccgcgacccgcgaactgctcggcagcgatgtgctggaagcgagcgaggacgactggttcgccgagtacaacgcgccgatcctggcgattcgcatcgtcgac

SEQ ID NO: 216034 - DNA, 841 bp, Unknown
  Bacterial polypeptide expressing nucleotide sequence isolated from the Sargasso Sea
gagcaaagccacaaatcaagcaataatggattctcttgataaggggttaagcaaatcaagtgtgggttcaggatccttgtctttgcttaatacacgtcaagaaagtttaggcttacttcgtttgaatcgatttgtgaatttgataatacctagaggtagtaatgagttagtccaatttattcaagaaaatacacgtatccctgttttggggcatgctgatggaatttgtcatctatttatagataattctgtagatattgataaggctataagcatcgctttagatagtaagattcaatatcctgctgcatgtaatgcaattgagacattattaattcatgaagatgttgcagagatgtttttgaaaaaaggcttggcaattttttctagtgcaggagttactcttaagggagatgcaaagagtcaatctttaggtgtaaaaaacaaggctgatgaagcagactggtctactgaatatcttgatttaattctttcaataaaaattgttcgtaatattgacgaagctattgaacatattcgtaaatatagctctcgtcatactgaggcgatagttactgatgacaaggaagttgctgaaaaatttttaagctcggttgatagtgcaggtgtttatcataattgttctactcgttttgctgatggtttccgatatgggtttggagctgaagttgggataagcactcagactcttccaccaaggggaccagttggattggaaggcttagttacctatcgctattatcttagaggtgatggtgatctcgttaaggacttcgcttctggagatagaagtttttctcatattgatttaccattatga

SEQ ID NO: 216035 - DNA, 535 bp, Unknown
  Bacterial polypeptide expressing nucleotide sequence isolated from the Sargasso Sea
atggattacctaaaggatataggagaatctgctaaaaaagcagctcgagcgttgtctacttcttctgctcagttaaggcatcaagctttaacaaatatttctaaacatttattagattcgcaaggtcaaatattagaaaaaaatattttggatattgaaaacgctaaaaactcaggacaatcagaagcttttattgatagattactattaactcctgaaagattagagaaaatagctaaagatacgattaatgttgcttccctgcctgaccctataggagaagatatagaaacgtatacgagacctaatggaattactctaactcgtaaaagggttccactaggagttataggagttatatatgaaagcaggccgaatattaccatagatatttcggcattatgtttaaaatcaggtaatgcggctatattaagaggtggtagcgaatcttttcattcaaataatattcttgcagagattgttcaagctgccatcactgaagtaggtttacctaaagaatgtgtgcagatttaaa

SEQ ID NO: 216036 - DNA, 832 bp, Unknown
  Bacterial polypeptide expressing nucleotide sequence isolated from the Sargasso Sea
gcttgatccaaaaaatttctctcctgctttctatgatagattaaaacttaatgacgaaagaattgaccagatgatacaaaatataaatgaagttattgatctagatgatcctgtcagaaaaaacagatttttatatgaaagaccaaatggattaaaagtattcaagcaatctataccattgggagtaatttgcataatatatgaatctagaccaaatgtaacttctgatgctgcttccttatgtcttaaatcaggaaattcagttttacttcgcggaggttcagaatgttttaatacaaataaaattttagttgatattatacaaaaatctttaattaagaataatataaataaagattgcgttaatcttgtgccctatacagaccgagaggttatgaaatatatacttaggaaagatgacgatgttgatctagttataccaaggggaggagaaggcttaataagatttgtttctgaaaactcgagtattccggtgataaagcattacaagggagtatgtcatgtatatttagattccgaagccgatttaaaaatagcgcatgatattgcaataaattcaaaaattcaaagacctggtgtttgtaatgcaatggaaactttaataattaataaaaatttacccaaagattttatttcaaatcttatgcatgaatttataaataataaagtcttgatttacgcagaagatgaactctcaaattatattactaatgatttgtttacaaaactaagacctaaagattatcataatgaatatttagatatgaagttaaatattaaaattgttagcgacattaaacaggccattaat

SEQ ID NO: 216037 - DNA, 703 bp, Unknown
  Bacterial polypeptide expressing nucleotide sequence isolated from the Sargasso Sea
aatgagtaaaaacttagaaaaaattggtacaaatgcgaaaattgcttttcaaaacaaaataagtaataaaaaaaaaaataaagtattaaattattacattcaacttattaaaaaaaaccaaaataaaattttagtcgaaaacacaaaagatataaaaatagccaaatctaaaaaacttaaagaaaatttaattaaaagacttgctctgaacaatgacaaaataagctcaattattaaatcaattgaagctattgcaaaatttaaggacccggtagatgttgatatagaaacctggaaaagaccaaacggtttaaaaataaagaaagtatcaattccgattggtattattggtgtaatttatgaaagtagaccaaatgtaacttcggatgtatctacactttgttttaaatctgggaactgcgtaatattaagaggaggatcagaggcttactttagtaataaaattttagctaacctttttagaaaatcactagaaaaatacaaaataaataagaattttgttcagtttatagagaataaaaatagaaaactggtcgactacatgctctcaaaaatgtcaaaatatatagatgttattattccaagaggtggaaagagtcttgtaaaaaaagttcaagatttttcctctgttcctgtaattggacaccttgaaggtatgtgtcatacatatattgataaagat

SEQ ID NO: 216038 - DNA, 543 bp, Unknown
  Bacterial polypeptide expressing nucleotide sequence isolated from the Sargasso Sea
tatgaagaatattttaataattggaaaaaaatcaaaaaaagcttttgaaaaccttaaaaaagtaaatcacgatagaattaataaaacactaaattattatgtaaaactaattattaaaaataaaaaaaaaattattagagaaaatataaaagatgttaaaaatttaaaaagaaaaaatgttttagatagattgattttaaatgaaaaaaaaattgataatattataaaatctattaatacaataaaaaaatttccaaatcctattggtagaaaattagatagctggagaggtaaaaataaacttaatataaagcgtattacaacacccattggagtcatcggtataatatatgagagcagaccaaatgtaactgcagatgtagctgctttatgcctaaaatcaagtaactgcgcaattctaagaggtggaagcgaagcttatcactctaataaaattctgtcagatttatttcgggtgtctttaaaaaaaaataaaattgatcataattgtcttcaatttatagagaataaaaatagaaaaat

SEQ ID NO: 216039 - DNA, 854 bp, Unknown
  Bacterial polypeptide expressing nucleotide sequence isolated from the Sargasso Sea
tataaagtctggaaacggcttggtcatgagaggtggtaaagattgtatattgacaaatttatatttgtttaagcttgtaagagaatccttatctgaatctggaattaatgaagatagtatgtattttattgattttacagatcgtaaagctgttgatttaattctttctatggatagatatattgacttacttattcctagaggctcagcttcattagtggatttagtaaataaaaatgccaaaatgccttcgataacaggtggtattggtgtttgccatacatatgtagataaagaagctgatatcgcacaagcaattaatatacttaataatgcaaaaactcaaaacccttcagtttgtaatgcaatggatacggtaatagtccataaagaaattttgaagaatcttctagatcctctatcaaaagtatatttagagaaaaatgtaaaaataaaggctgatcaagaagcttataaaataattggttctaataaaggtgttagccatgcaacagaagaagattttggatatgaattcttagatcttgtagtaagtataaaaacagtaaaaaatattgatttggcaataagtcacataactaaatatggttctaaacactctgaagccataataactaatgacgaaataaatgcaaaatattttcttgataaagtagatgcatctgcagtttttcataatacatctactagattcaatgatggttttgagttaggattaggagctgaagttgctgtttctactgacaagcttcatgcaaggggtccaatgggtataaatgatctaatgacttataagtgggtgattttagggcaagggcaagttagaacttaag

SEQ ID NO: 216040 - DNA, 903 bp, Unknown
  Bacterial polypeptide expressing nucleotide sequence isolated from the Sargasso Sea
aaaattaaaagagagctttcaaagggattgatcttagaaagaaaaactgtgccaatcggagtcttaggggttatttttgaatcaaggccagacgccgtgatgcagattagttcattagcaataagatcaggtaatggagtaattctaaaaggtggtagtgaagctaatttaacaaatacagcaattgtcaaggcattgcaggaaggtttaaatgaatcaggtcttgataaaaatgcaatatgcttgctaacaagcagaaaagatagcatggcgatgttaaatctagagaaatacattaatttaataattccaagaggaagtaatgaattagttaaatttattcaggagaatacaagaattcctgtgttaggccatgctgatggaatttgtcatttgtttatagatattgaggcaaatctagagatggctttatcagtcgctttggacagcaaaattcaatatcctgcagcatgtaatgctatcgaaactttattagtccataaagatatcgcaccagcttttttagaaaaagccatccctttatttaactctaatgatgttaaattaattggagataagagatcagttgaattagggttaaagtatgaggctagtttagaagattggagaactgaatatttggatttaattttatcgataaaaattgttgatgatctcgaggaggcaatcacacatattcaaaaatatagttcaaaacatacagatggaataattactgaaaattcacatactgccaataaatttatgaatgtagttgatagtgcaggtgtttttcataattgctctactaggtttgcagatggctttagatatggattcggagctgaagttggtatatctactcaaactcttccaccaaggggacctgtaggtctagaaggt

SEQ ID NO: 216041 - DNA, 811 bp, Unknown
  Bacterial polypeptide expressing nucleotide sequence isolated from the Sargasso Sea
cgattcttctatgttggaacggcttagattagacgattctgtaattgataggatgatcgaaggactcggtcagatagatttgctgcctgacccgataggacagatcagagaattgagttttcaaagttccggcattcaagttggtaagatgagggtgccgctaggcgtggtggcaatgatttatgagtcgcgtccgaacgtgactattgatgcggcaggacttgctattaaatctggcaatgcaatgattttgagaggcggatccgaatcgtttctttctaaccaagagctgggtaaatcgataaccagaggtttggtcgcggcaggattgccgaaaaaatgtgtgcaactcatcaaaactacggaccgagccgcggttggtgctttactagctttagatgactacgtcgatgtgatagtgcctcggggaggtaaagatttaatacaacgggtatcaagtgaaacaaaaattaatgtgataaagcacttggacggagtttgtcacgtatatgtggatgatccggttgacatggaaatggcggtttcggttgcatttaattccaaatcagaaaaatacggtgtgtgtaacgcgatggagacgttgctggttcaccaggaagttgctagagaattcctttctgctttagagcctctatttgttgagaagggggtagagctcagatgttgtcctcaggcgcatagtatttgttcatcttcattgttagcagaagattctgactggactgaggaatatcttggtccggtgttgtctataagaatagttgaaggattagatgcagcaatagaacac

SEQ ID NO: 216042 - DNA, 950 bp, Unknown
  Bacterial polypeptide expressing nucleotide sequence isolated from the Sargasso Sea
aatagagggtttaattaagagtattgaagatataattacaatacctgatcctattggattaacattagaagaatgggaaaggcctaatggtttaaaattcagaaaagtatcaactccacttggtgttctgggtgtaatttacgagtctagaccaaatgtaactgtagatgcatcatgcttatcaataaaatccggtaatagtataatcttacgaggtggtagtgatagtttttatagttctaaagaacttgtaaaaaacattacacaatctttcaatgcagcagggctgcctaatttttgtgtacaaatgatagatacacctgagagagaagctgtagaatatttacttagactaaaagactatgttgatgttattattcctcgaggtggaaaagggctaattgaaaaaataaatacctctagtaaaataccagttatcaaacatttagatggtatatgccatgtttatgttgataaagatgcaaatattgaaattgcggaaagagtagtatttaatagtaaaatgaggagaccagaaatttgtggtgcagctgaaacattgctaattgatgaaagtattaaagatcaaactatgaaaatattaaatccattaaaagaagtaaaatgtgaaataagaggagataattttattcaatcattggataatgattttaaaatagctaaggaagaagattggtctttagaatatttagataaaattatatcagttaaaattgtttctggagttgaagacgcaattgatcatatcaacaaatattcctctggtcatacagaatctataattactaataacgataaaacttttgaaaagttttataataaaattgatagtgcaataattttgaaaaatgcctctactcaatttgctgatggaggggagtttgggtttggtgctgaaattggcatatcaactgacaaaatacatgttc

SEQ ID NO: 216043 - DNA, 513 bp, Unknown
  Bacterial polypeptide expressing nucleotide sequence isolated from the Sargasso Sea
tatgaataatcatgaagaaatattaagcttaggaagcaaggcaaaaaaagcatctgctttgttatcattaataactaatgaacaaaaaaatgcagcactagaagaattaaaaacaaatttaaatctttattctgatgaaataattaaagaaaatgcaaaagatataaaaaatgcaaaaacaaataatctctcttctgctctaattgaccgactaactctaaataaagaaaggattgatggaataatttatagcctagatgaaattattaaacttaaagatcccattggtaaaattatttctgaatggaatagaccaaatggattaaatattcaaaaaatttcaattccaattggggttataggttttatttatgaatctagacctaatgttactgttgatgcttctgcaattgctataaaatcaggcaatgctattattcttagaggtggtaaagatagtttttattcatcccaaaaattaaaacaaattatagttctttcaatctcaaaagc

SEQ ID NO: 216044 - DNA, 894 bp, Unknown
  Bacterial polypeptide expressing nucleotide sequence isolated from the Sargasso Sea
attgtcatctaatgaatcaggaaaatattgtgcctctctcaaaaataaggttctaaagtcaatttcgaattatattattgatgacactaaaaaaattattactgcaaataatgtcgatattgataatgcaacaaaaaaaggtctaaaagatagcatgattgataggctgatcttaaatgaaaaacgtattatttctatgaaggatggtctggcgaaaataattagcataccagacacactgtataagacatccaaaggtgtaaagcagaaaaatgggatatcagttagtcaaatgagagtaccattgggtgtaattggcatgatttatgagtctaggcctaatgttactattgatgcggctggtttatgcattaaatccggcaatagtgtaatattgcgaggcggatcagaatcaattaatagtaataaagcattaatgaattgtattaaaaaagctcttaaagataataatattaacccatatatggttcaattgattgaaacaactgatcgtaaagccattgacaagcttcttactatgaatagctacattgacgtaattattccaagaggaggtaaaggtctcatagaaaaagttatgtcatcctcaaagattcccatgataaagcatcttgacggtaattgtcatgtctatattgatcaaaaggcagatctagatatggctttcaggatcagtataaattctaaaactcaacgatatggtgtatgtaatgcaatggagactcttttggttcataaaaaattttcaaaaaagtgcctaaacaaaatattagagacttatacagaaagcaatgttgagataaggggttgtaagaatattgtaaaaatatatcctaaagccaaacttgcaaaacaatatgattggagtcaaga

SEQ ID NO: 216045 - DNA, 780 bp, Unknown
  Bacterial polypeptide expressing nucleotide sequence isolated from the Sargasso Sea
aaatggacttgaaattagaagagttacaataccaataggagttataggtgtaatatttgagagtagacccaatgttacttcggatgtatcagcactttgttttaaatctggaaatgctgttatattaagaggtggttccgaagcctacaatagtaataaaattttagtaaatttatttaggaaagctctaaaaaaaaataaagtaaacgaaaattacgtccagtttataaacaataaaagcagaaaactcgtagattatttattatcaaaaatggaaagctccattgatgttgtaataccacgaggtggaaaaaatttagtaaaaaaagttaaacaactttcaaaggtgccagttattggtcatttggaaggaatttgtcatacatatattgataaagaggcagaagataatatggcaaacaaaatagtattaaatgctaagttgagaaatactagtatatgtggtgcaactgaaactctcttaatacataaaagtaaatcaaagtcagtaaatttaattttaaattcactagctaaaagtggttgtaaaattttagctgatagaaaaataagtaaattatttaaaggcaaaacatatcctgcaaataataatacttggtcaaaagaacatctttcaccgattatttcggttaaattagtgcatgatgtcaaagaagcagttgcccatatcaacaaatatggaactatgcatacagatgcaatagtaaccaaaaacaaaaatacagcaaaattctttattaagaatgtaaaaagctctat

SEQ ID NO: 216046 - DNA, 757 bp, Unknown
  Bacterial polypeptide expressing nucleotide sequence isolated from the Sargasso Sea
tatgaaagtaagtctagaaaaaatcacaaagaactctagagaggcttttaagaataaaattgaccccatcaaaaaaaataaagtattaaaaaaatttataattttattacaaaaaaataaaagaaaaattattaatgaaaatcagaaagatttaagatttgctaaaaagaaaaaaataaaagaaaacttggttaagaggcttgaaatagatgaacagaaaataaataatattattaaatctgtaaatcaaattattaaaataaaagatccaactaataaaattttggacatttggaaaagaccaaatggattaattattaaaaaggttactgttccaattggaataatagctgtaatttatgagagtagaccaaatgttacatcagatgttgctagtttatgttttaaatcaggaaatgctgtgattttaaggggtggttcagaagcttttaatactaataaaataatttctaatttgtttagattgtctttaaaaaaatgtggtgttgatgaaaattatattcaatttattgattctacaaatagaaagatggtagataaattgctttcaaaaatgaaaggttatattgatttaataattccgagaggcggaaaatcattagttaaaaaggtagatcaattatccactattccatacataggtcatctggaaggaatttgtcatacttttatagacaaaaaggcaaatataaatatggcaattaaggttctagaaaatgcaaaaatgagaaataca

SEQ ID NO: 216047 - DNA, 475 bp, Unknown
  Bacterial polypeptide expressing nucleotide sequence isolated from the Sargasso Sea
cgaacgctgctgatcgaccgcgcggccgccgacacattcgcgactccgctgatcgaggcgctggaggccaaaggctgcctggtgcgggtcgaccacgacatgatcgactatgcccggggccgcgatgaggcgagcgaggacgactggacgacggaatatctcgacgcaatcatcgcggtgaagctggtggacggcatctccggggcgatcgaacacataggaaaatattcctcgcaccacaccgaggcggtgatcgccgaggatccggaggtcgtcgcccgcttcttcaacgagatcgattctgcgatcctgctgcacaacgcctcgacccagttcgccgatggcggcgagttcggcatgggcgccgagatcggcattgccaccggcaagatgcatgcgcgcgggccggtcggcgtcgagcagctcacctcgttcaaatatctggtgcgcggcagcggccagacgcgggcctgac

SEQ ID NO: 216048 - DNA, 731 bp, Unknown
  Bacterial polypeptide expressing nucleotide sequence isolated from the Sargasso Sea
aatgaaatatttagaaaaaattggaaaaaatgcaagaaaagcttatgaaagtcttaaagtggtcaagcataaaaagataaaaacagttctagataattacaacaaatcgttatttaaaaataaaaaaagaataattaaagaaaatcagaaagatgttaaaaatgtaaaacgtaaacatcttattgacagacttatattaaatgaaaaaagaattgaaggaataaggcattctataaatgaaattgccaaatttaaaaatcctgtaggaaaaattttagaaagctgggaaagaccaaatcaattaaaaataaaaaaaatttcaacacctatcggagtgattggagtaatatatgagagcaggccaaacgtgactgccgatgtggcagctttaagtttaaaatcaggaaattgttcaatattaaggggtggttccgaagcttttaattctaataagttattagcaaatctttttagagaagtccttcaaaaaaataatattaataaaaattgtattcaatttattgataagaaagatagaaaaattgtagacaatttactttcaaaaatgagcaaatatattgatgtaattgtacctagaggtggtaaaggattagtagctaaagttcaaaaattttccaatatacatgttatcggccatttagaagggttgtgtcatatttttattgataaaagttctaatttaagaatggcaaaaaaaattgtatttaatg

SEQ ID NO: 216049 - DNA, 871 bp, Unknown
  Bacterial polypeptide expressing nucleotide sequence isolated from the Sargasso Sea
tgccgatgttgcagcattgtgtttaaaatcaggaaactgctctattttaagaggtggatctgaagcttttaattcaaatagattattagctaatttattcagagataatttgagaaaaaataatatcaatcaaaactgtgttcagtttatcgaacataaaaatagaaaaatagtagatcaattattatcgaaaatgagtgcatacattgatgtaattgtaccaagaggagggaaaggacttgtggcaaaagtgcaaaaattttctaacgttcatgtaattggtcatcttgaaggattgtgccacatttttgtagataagacagcaaatataaaaatggcaaaagatttaattattaatgcaaaaatgagaaggacaagtatttgtggcgcagttgaaactcttctgatcgaggaaaaagctttgaactcacatgctaaagaaataataaatgctcttttaaattcaggctgcgaagtgagagctgataaaaaaattaacaaaatttttaaaggaaaattgaaaaaaactactgagaaagattggaagacagaatacctggatgcaattatttcaattaaagcagttaaaaatgtaaaaggtgcagtcgaacatattttaaaatatggtacaatgcataccgatagtattattactaacaacaaaaaaaacgccaagatttttttaaacggagtaaacagctcaatagcaatgcataatgtttcgactcaatttgctgacggtggtgaattcggctttggtggtgaaattggtatctctacaaacaaacttccgcctagaggccctgtaggaataaatcaattgacttcatacaaatatcttgtttccggaaaaggaattattagaacataa

SEQ ID NO: 216050 - DNA, 838 bp, Unknown
  Bacterial polypeptide expressing nucleotide sequence isolated from the Sargasso Sea
cgaggccctgacgcagaatattcctgccattcttacggctaatgccaaagacgttgccgccgctaaggctgaaggcttgaatgatgcaatgatcgataggctgttgcttaacgagtcgcgtctggcagggattatcggtgatatcggtgatgtggtgcgtcttgcagatcccgttggcgaagagtttggcagccgagtgttggataatgggttaaggctcacgcgccgccgcgtaccgctgggggtaattggggttatctatgaggcgcggccgaatgtgacggtcgatattgctgtgttggcacttaaaaccggtaacgcagtgattttgcgtggcggaaaagagacgctcgaatccaataaactgattagtgaagtgatccgtggcgcgattgcgagccaaggtctgccagtcgatgcggtgcagctgattgattctcccgatagagccttagtcacaggtctactcaagctcgaccaatatgtcgatatgatcgtcccccgtggtggacaagcactgcagcggctttgcgccgagcaagcgacgattcctgtgatcttaggcggcattgggatctgccatctgtatgtcgataaacatgccgatcttgagcgcgcactcgaggtgattgccaacgcaaaagtgcaacgtcccacggtatgtaacgcgctggatactttgctggtggataacgcagttgccgagcgctttgtgccgcaaattgccgagtacttacatcgcttaggtgtgcgtttttcggtgtgtgaacaaagctatgcactgctcgatgggctggggtttgatatttcctcggcaactgagcaaagcttgcgacag

SEQ ID NO: 216051 - DNA, 724 bp, Unknown
  Bacterial polypeptide expressing nucleotide sequence isolated from the Sargasso Sea
aatgaataaatatgttaaacttatcggaaaaaaagcaaaaaaagtaattgaaaaaaaaattgatactaaaacaaaaaacaaagttcttaaaagtttcttaattttccttacaaaaaatgaaaaaaaaatcttaaaacaaaataaaaaagatattaaatttgccagaaaaaaaaaacttaaattaaatattattgagagattaactttaaactcaaaaaaattagattctattaaaaaatctgttaatgaaattattaaaattaaagaccctgtaaataaagttttagaaaattggaaaagacccaatggattaaatattaaaaaagtttcaactcctattggtgttattggtgttatttatgaaagtagaccaaatgttacctctgatatatctagcttgtgttttaaatcaggaaatgcagttattttaagaggtggttccgaagcaattaattcaaataaaatattagtagcattatttagaaaagccttagtagttaataatgtaaatcctgacttcgttcaatttataaataatagagatagaaaaatagtagacttcatgctgacaaaaatgacaaatgaaattgatgtgattataccgagaggtggtaaaagtttaattaaaaaagttcaagctatttctaagatgccaattattggtcacttagaaggaatttgtcatacttatatcgacaaagatgcagatttaaaaatggctaca

SEQ ID NO: 216052 - DNA, 736 bp, Unknown
  Bacterial polypeptide expressing nucleotide sequence isolated from the Sargasso Sea
atgaaaaaaataggagaaagagccaagcttgcttctgttaacttatctaatttaaatgtaaataaaaaaaattcagttttaaaacaatttaattattatttaaaaattaataaacaattaattttaaatgcaaacaaaaaggatttggctatcgttaaatctaaaaaaataaaaaatagcgtgattgcaagacttgaattaaataacgaaaaaatttctcaaataagaagttcaataaaaaaaataattaaatttaaagatcctgttggaaaaattctttattcttcacgaagaccgaacggattaatcataaaaaaactatccataccaattggagttattggaattatctatgaaagcagaccaaatgttacttcggatgtctctgctttatgttttaaaagtggaaatgttgtaattttgcgcggaggttcagaagcatttcactcaaataaaatattggctaaactttttaaacgagctctaaaaaataagaaatgtgatgaaaattgcgttcaatttatagaagataaaaatagaactcatgttgattaccttttatctcatatgcaaaactatattgatttaatcatacctagaggggggaaaagtctagttaaaaaggttttaaagaatacatcagttccatttgttggtcattatgagggtttgtgccacgtgttcgtagataaagatgcagatttaaatacagcaataaaagttgtaaaaaatcaaa

SEQ ID NO: 216053 - DNA, 810 bp, Unknown
  Bacterial polypeptide expressing nucleotide sequence isolated from the Sargasso Sea
aataaatgatataataaaatctattaaagaaattaaaaaatttccaaacccagttggaaggactctcgagagctggagggggaaaaataaacttaatataaaaaaagttacaacttctattggagtaattggaataatatatgaaagtagacctaatgtaaccgcagatgttgctgccctatgtattaaatctggtaactgcgcaattctaaaaggtggaagtgaagctataagatctaataaaatacttgctgatctttttaggaaatctttagaaaaaaataatattgatcgaaatgcccttcaacttattgaaagcaaaaatagaaaagtggtagattttttattatctaaaatgagcaattatattgacgtaattgttcctagaggtggaaggggattagtagaaaaagttcaaaaatattctaacgtacacgtaatagggcatctagagggattatgccatatctatttagataaagataataatcttaatcaagcacaaaaaataattcttaatgcaaaaatgagaagaacaagtatctgcggtgcgctcgagacgcttttaataaatgaaaacatcataaaatcaaaaattgaaaaaattatagactccctaatcgataaaaagtgtgaagtgatagttgatagaaaaataaataaattatttaaaaataaatttaaattagcaaaggaaaaagattggaaaaccgagtatcttgatgcaaaagtatctattaagagtgtgaaaaatgttaatgaagcagtgtctcatattttaaaatatggaactatgcatacggattgtat

SEQ ID NO: 216054 - DNA, 482 bp, Unknown
  Bacterial polypeptide expressing nucleotide sequence isolated from the Sargasso Sea
tatgtcagacagtaaagatataaatatttatatggattctttgggagtttcttctaagaaagcttcaactattcttgctcaagcttctgcagagcagaagaatgatgcgttattaagcatagccaagaaactagatataaagagacaagacatactaaaagagaacgtcaaagacttagaggaggcaaagaaaaagcaaataggagaagctctaattgatagattggaattaactgaagaacgaatagattcaatgatttctggattgaaagtagtttcagagctacctgatcctgtaggagaaataactaaattaaaacctactccttctgggatagatgtaagtcagatgagagttcctttaggggttgtaggaattatctatgaatcaagaccaaatgtgactgcggatgcagctgctctttgtttgaagtctggaaattcttgtattcttagaggcggatcagaagctattctttcaa

SEQ ID NO: 216055 - DNA, 885 bp, Unknown
  Bacterial polypeptide expressing nucleotide sequence isolated from the Sargasso Sea
tggatagattgatgctcaatgatgaaagaattgagtccatcgcacaagatacacgttctgttgctgcgctgccagatccggttggagaagaatttgattcaagaacaatggaaaatggacttaaaatatcaaaaaggagagtgccgcttggagttattgctaccatttatgagagtagacccaatgttaccgttgatatttcaactttagcaatcaaatcaggtaattcggcggttttgcgcgggggtaaagaggcaataaattccaatgtcgctatttctaacgtaattaaaggagcgattaaagattcttctttacctgacgggtgtgtcgaccttataggatcaactgataggaagatagtgtccgaaatgttaagttttcaaggcggtatagatttattaatacctcgaggcggtgctgatctaatacgtttcgtggcagaaaatgcatctgttccggtcgttacgggtggtgtaggagtctgccatatttatgtcgattctgaagtggatatagatagcgcagttagtatactggacaatgcgaaagttcagcggcctacagtttgtaatgccctcgatactattttaatccattcgaaaacggcccctcaaatcttgaatggtattcaaagaaagtggggagaatcgggtaccgtagaggttcacgcagatgaacgcgcgtacagtatgcttgatgaggatactaatttagtggttaagccagcaacttctgaggactggggaagagaatttctttctttaacggttgctgtaaaaattgttgattcaatagatgaagcactagtacatatagggcaacatggagatcattctgaagcaattttaacttataataaagagaatgctgaacgtttttgaa

SEQ ID NO: 216056 - DNA, 943 bp, Unknown
  Bacterial polypeptide expressing nucleotide sequence isolated from the Sargasso Sea
tataaaaataaaattaaaaaaaatttgattgagagattaaaattaaacttaaacaaaattaataatatttgtctatcaataaataaaatttctaatcttaaagatcctgttaacctgactattgataaatggaaaagaccaaatggtttaacaatcaaaaaggtctctacgcctattggagtaattggtataatttatgaaagtagaccaaatgtcacttcagatgtatcaagtttatgttttaaatctggaaatgcagttatattaagaggtggatctgaggcatataattcaaataaatttttggcttatttatttagagaagcgctaaaaaaatataacatagatccaaattttgttcagtttattaataatagaaatagaagttcagtaaattttatgctttcaaaaatggaaaaatttatagatgtagttataccaagaggtggcaaaagcttagttaaaaaagttcatgaaatttcaaaggtacctgttataggtcatttagaaggcatttgtcatacttatatcgatcaaaatgcagatttaaagatggcaattaaagttgttcataacgcaaaattaagaaatactagcatatgtggtgcaactgagactattttgttccataaaaaaataattaaaaaattttgtaatcctattctttcaaaattagaagaaaataaatgtgaaatttttgcagataaaacgataagaaaaaattttaaaggaaattcttttcttgctaaaaataaaaattggtccacagaatatttgtcatctaaagtttctgtaaaaagtgttaaaaatataacagaggctataaaacatattaataaatatggaacaatgcatactgatagtataattacaaaaaataaaaaaaatgctgccctgtttttaaataatattaaaagttcaattgttatgcataacacatcta

SEQ ID NO: 216057 - DNA, 700 bp, Unknown
  Bacterial polypeptide expressing nucleotide sequence isolated from the Sargasso Sea
cgggctttattgctggaactactgcagcaaaaagacagtgtcgatttagtgataccacgaggcggcgaaggtttaattcattttgtcagcgacaacagtaaaattccggttattcaacactacaaaggtgtctgtcatctgtacgtggataaagaggcagaccttgagaaggcaatcgctttacttataaatggtaaagtccaaagacccagtgcctgtaattcgctggaaaccttgctggtgcatcaggcggtagcccctgaatttttgcgcttggctgcagctgcattagcgccacatcaggtggaagtgtttgcctgcgagcaatcggctgcctatttcactaatgccgtggtcgcacaaccccaacagttcgataccgaatatctgcgtttggcgatttcacttaaaatagtagccagctacgatgacgccattgtacatatccaacagcacagctccaatcataccgaggtgatttgcactcaggatatcagcacagcacaacgctttttaaagcaaattaacagtgctgtagtgatggtgaatgcgtcctcacgattcagcgatgggggcgagctggggttaggggctgaaattggtatttcaacctccaaactacatgcctatggccctatggggttggagtctttgaccacagaaaaatacatagtgataggcgacggtcaaacccgctaaa

SEQ ID NO: 216058 - DNA, 823 bp, Unknown
  Bacterial polypeptide expressing nucleotide sequence isolated from the Sargasso Sea
agttttaaaagattttgtaaaattaattgagattattaagaataaaattattagtgaaaataataaagatattttttatgcaagaagaaaaaaattaaaagaaaacttaattcaaagactcgctcttaataataataaattaaaaagtataattgactctattaaaactattacttcttttaaagatccagttaatcaagtaacttccaaatggaaaagaccaaatggacttgaaattagaagagttacaataccaataggagttataggtgtaatatttgagagtagacccaatgttacttcagatgtatcagcactatgttttaaatctggaaatgctgttatattaagaggtggttcagaagcctacaatagtaataaaattttagtaaatttatttaggaaagctctaaaaaaaaataaagtaaacgaaaattacgtccagtttataaacaataaaagcagaaaactcgtagattatttattatcaaaaatggaaaactccattgatgttgtaataccacgaggcggaaaaaatttagtaaaaaaagttaaacaactttcaaaggtgccagttattggtcatttagaaggaatttgtcatacatatattgataaagaggcagaagataatatggcaaacaaaatagtattaaatgctaagttgagaaatactagtatatgtggtgcaactgaaactctcttaatacataaaaataaatcaaaatcagtaaatttaattttaaattcactagctgaaagtggttgtaaaattttagctgatagaaaaataagtaaattatttaaaggcaaaacatatcct

SEQ ID NO: 216059 - DNA, 176 bp, Unknown
  Bacterial polypeptide expressing nucleotide sequence isolated from the Sargasso Sea
ttcgggctcggtcatgcataacgcttccacgcgcttcgccgatggcttcgagtacggattgggtgcagagatcggcatctcaaccggcaagctccacgcccgaggtcccgtcggtcttgagggtctcacctcgcaaaaatacattgtgcgaggggatggccacattcgccagtgac

SEQ ID NO: 216060 - DNA, 829 bp, Unknown
  Bacterial polypeptide expressing nucleotide sequence isolated from the Sargasso Sea
accaaacgttacttctgatgtatcttgcttatgcttaaaatcaggaaatgttgctattctaagaggtggctcagaggcatatttttcaaataaaatacttgctgatttatttagaaactcactaaaaaaaaatggtttagatgaaaactgtattcagtttattaataagaaagatagaaatgtagttgattttttgttgtcaaatatgtccaactatatcgatgttattgttcctcgtggcggtaagaatttagttaaaaaagttcaagaattatctaatgtaaatgtaatcggacatttagagggtaattgtcatgtgtatattgataaggatgcaaaattagaaatggctaaaaaaattgtgataaatgcaaaaatgagaagaacgtctatttgtggttcggcagagactcttttgatacataaaaaatgtattaaaactcatggtgtaaaaataataaaagaattgatactttcaggttgtgaggttttggttgataaaaatataaataaattatttaatagtaaattaaagttagctaaggaagttgattggaaaacagaatatttagccccaaaaatctcagttaaactagtcaataatgttgaagaagcggtttcacatataaataaatatggaactatgcatacagattcgattgttacagaaaataaaaatacagctaaattttttcttactaaaacaaacagttcaatcgctattcataacgcttctacacaatttgcagacggaagtgaattcggctttggtggtgaaattggaatttctactaataaactaccaccaaggggccctgttggtataaat

SEQ ID NO: 216061 - DNA, 931 bp, Unknown
  Bacterial polypeptide expressing nucleotide sequence isolated from the Sargasso Sea
gattaaaagcatagaggcaattataaaacttccagacccaatcaacaaagttcttgatgagtggactcaaccaaatggattgatctttaaaaaaatttctattcctattggtgtcataggtgtaatttatgaatcacgaccaaatgttactatagatgctgcttgtattgcattaaaatctggaaactgtttaattttaagaggaggaaaagatagttttaacacatctaatacacttgtaaaaattattgctaaaacatttgaagaaaatggattgccaaaagatttcattcaaatggtaccgtttgtagatagagaaggtgtagatagtttaatacaaatgaaagactatgttgatgtaataattcctagaggtggaaaaaatctgattgaaaaaataaattcaaaaagttcaatacctgtaataaaacatctagatggaatatgtcatgtttttattgacaaagaagcagacattcaaaaagcaaaaaaaattattttaaatagcaaaatgagaagaccagaaatttgtggtgcaacggaaactctactaatcgacaaaaaaataaaacaaagtgcaacttctattttggaactgcttcttgaagctgggtgtgaaataagaggagatgaatttatagaatctctaaattctaatttcaaaaaagctaccgaaaaggattgggcaactgaatatctagataaaatattatctgtaaaactggtagatggtgtggtggatgctgtaaatcatataaataaattttcatcaggtcatacagaggcaattgttactgaaaatgaaaaaacatttaaacagttttataataatatcgatagtgcaataattttaaaaaatgcttctactcaatttgcggatggaggagaatttggttttggtgcagaaatcggaatctctacagataaatta

SEQ ID NO: 216062 - DNA, 716 bp, Unknown
  Bacterial polypeptide expressing nucleotide sequence isolated from the Sargasso Sea
tatgacaataaatctaaaaaaaattacaacaaactctagagtagcatttgaaaacaaggttgatccaattaaaaaaaatagagttttaaaaaaattttctgagttaatacatgaaaataaaagaagaattataaaggaaaattataaagatataaaattcgctagaaaaaagaaaattaaagagaatttaatcaatagactagagataaatgaaaaaaaaataaataatattataaaatcaataaatcaaattattaagttaaaagatcctacaaataaaatcttagaaaaatggaaaagaccaaatggattaattattaaaaaagtttcagttccaattggagtaatatctgtaatttatgagagtagaccaaatgtaacttcagatgttgcaagtctttgttttaaatcgggaaatgcagtaattttaaaaggtggatcagaagcattttacactaatagaattatttcaaatttatttagaatttcgttaaaaaaaaatggaattgatcaaaactacgttcaatttattgagtcaaaaaatagaaaaatagtagataaattactatcaaaaatgaaaggtcatattgatttaattattccaagaggagggaaatcattggttaaaaaagtagatgagttatctactataccttatataggacatttggaaggaatttgtcatacctttatagataaaaaagcaaaaataaaaa

SEQ ID NO: 216063 - DNA, 424 bp, Unknown
  Bacterial polypeptide expressing nucleotide sequence isolated from the Sargasso Sea
aatgtctaaaaaaataataaatattggaataaaagcaaaaaaagcttctaaatttaaaatcgatagtaaaaagaagaataaagttttaaaaaaatatttgcaattgataaatataaataagaaaaatattcttaaagaaaataataaagatataaattttgcaataaaaaataagctccctgaaaacttaataaatagattaactttaaataataaaaagttgatagatatacaggcttcaattcgtaaaattataaaattaaacgatccaacaaatcaagtgattgataaatggaaaagaccaaatggactaattattaaaaaagtttcaactccaattggtgtaattggtataatctatgagagtaggccaaatgttacatcagatgttgcaagcttatgttttaaatcaggtaacgttgtc

SEQ ID NO: 216064 - DNA, 508 bp, Unknown
  Bacterial polypeptide expressing nucleotide sequence isolated from the Sargasso Sea
atgagttatttagaatcaataggaaaaaacgcaaaaaaagcctttgaggatttaaaggacgtgaaacataaaaaaattaaaaaagttttagaaaattacaatcaatcacttttcaaaaatactaataaaataatcaaagaaaatttaaaagatgtaaaaaatgtaaaaagaaaacatttagttgatagactgattttaaataagaaaagaatagagggtattagacattcaataaatgaaatagcaaagtttaaaaatccggttggaagagttttagaaacatggcgtaggccaaataatttaacaattaaaaaagtaacaacttcaataggtgtgataggtataatatatgaaagtagacctaatgtaacagctgatgttgctgcattatgtttaaagtcaggtaattgctctattttaagaggtggatcggaagcttttaattcaaacagattattagcaaacttattcagagataatttgaaaaaaaacaatatcaatcaaaact

SEQ ID NO: 216065 - DNA, 544 bp, Unknown
  Bacterial polypeptide expressing nucleotide sequence isolated from the Sargasso Sea
aatgataaaaaatttttatatgcaaaaaatgggagaacaagctaagattgcttcttcatatttatctagcgtcgatataaataaaaaaaacgctgttttaaaaaaatttaatcaatatttaaaagccaatacacgcataattttaaaagaaaataaaaaagacttactttatgctaaatccaaaaaaattaaagaaagtatgattgaaagactaaaattaaataataaaaaaattgaacaaatgcgtagttcaataaaaaaaataataaaatttaaggaccctataggaaaaacattatcttcatggaaaagaccaaatggcttaattataaaaaaaatatctataccaataggtgtaataggtgtaatttatgaaagtaggccaaatgttacttctgatgtttctgctctatgttttaaatctggcaatgtagtgattttgagaggaggatctgaagctttctatactaataaaatactagttaaattttttaaacgtgcacttaaaaataagaattgtaataaaaattgtatccaatttatt

SEQ ID NO: 216066 - DNA, 590 bp, Unknown
  Bacterial polypeptide expressing nucleotide sequence isolated from the Sargasso Sea
ctttgcccatctcgaaggcatcgtgcatatctatatcgacaaggcggccgatcctgaaaaggccctgcgcgtggtgatgaatgccaagacgcggcgcaccgggatttgcggcgcggcggaatgtcttttgatccacaaggacgtggtcgataccatcggtcagggtgtgatccgcgcgcttatggatgtcggggtcgaggtgcgtgccgacgagaccctgcaagtgatcgaaggtacacaggccgccagcgatagcgattggggctgtgaatacctcgacaagatcatcgccgcgcgggttgtgggcgatatcgacgcggccatcgaccatatccgcacgcatcattcgcagcacaccgattgcatcatcaccgaagatgacgccgccgccgatcagttctttgcccggctcgacagtgccatcctgatgcgcaatgcctcgacccagtttgccgatggcggcgaattcggcatgggcgccgagatcgggatcgcgaccggcaagatgcatgcgcgcggcccggtgggggcggcgcaattgaccagcttcaagtacctggtcgagggcgacggcgcggtccggggctaaa

SEQ ID NO: 216067 - DNA, 771 bp, Unknown
  Bacterial polypeptide expressing nucleotide sequence isolated from the Sargasso Sea
aatggagaaaaaaataaacgacatcagaaattctattattagtattattagatttaaagatcccattaatcatgttctagaaaagtggaaaagacccaatggattaaatattagtagagtatcaattccaataggagttattggagtaatttatgaaagtaggccaaatgttacatcagatgttgcgggtttatgtttcaaatcaggtaatgctgtaatcttaagaggaggttctgaggcaatcaattcaaatagaattttatcaaaactttttagaaaagcgctcaaaaaaaataaagtagatcaaaactttatacaatttatagattctaaaaacagaaagatggttgatgtaatgctttccaaaatgaaagaatatattgatgttataattccacgtggtggaaaaaatcttgtaagaaaagttcaagaactttctaaggttcctataattggtcatcttgagggtatttgtcatacatatgtcgacaaagacgctgaattaaagatggcaaatagagttgttgctaacgcaaaattaagaaacaccagcatatgtggggcgaccgaaaccattattctacataaaaatattgttaaaaaatttagcaatacaatcctgggcaatttagaaaaaaatggttgtaaaatatatggagaaaagactttggctaaaatttataagggtaaaatttttaaagctactgaaaaagattggtctacagaatatttaagctcagcagtttccgttaaaatagtaaacaacctcaa

SEQ ID NO: 216068 - DNA, 817 bp, Unknown
  Bacterial polypeptide expressing nucleotide sequence isolated from the Sargasso Sea
aacttaataagtcgactgactttaaatgataaaaaacttctagaaatagaagcttcaattaataaaattataaaattaaacgatccaacaaataaagtaattgataaatggaaaagaccaaatggattaattattaaaaaagtttcaactccaattggagtaattggtattatttatgagagcagaccaaatgttacatcagatgttgcaagcttatgttttaaatcaggtaatgtagtaattcttagaggtggatcggaagcatataattcaaacaaaatcttcgctagattatttcgagatgctcttagaaaaaacaatattgatcaaaattacgttcaaataataaaagataaaaatagaaaatctgtagactacatgttgtcaaaaatgaaaaattttattgatgttataattccaagaggtggaaaaaacttagttagaaaagtacaaaacttatcctctgttccaataattggacatttagaaggaatttgtcatacttatattgataaagatgcagatttaaatatggcaatagaagttgttcataatgcaaaattaagaaatacaagtatttgtggtgctacagaaacaattttgatgcataaaaaaatcttaaaaaaattttgtaatcctatattagaaaaattaagtaaaaataattgtgagatatttgctgataatactattagaaaaaattttattggtaaatctaaaaaggcaacagattcagattggtctaaagaatatttgtctgcaaaagtttcagttaagtctgtaaataatattgttgaagcaatcaatcatatcaata

SEQ ID NO: 216069 - DNA, 652 bp, Unknown
  Bacterial polypeptide expressing nucleotide sequence isolated from the Sargasso Sea
ttggagagacaagttgacagtgatactaaaaataaagtccttaaaagctttttattttttttagagaaaaataaaaaaaaaatcttaaatcaaaataaaaaagatataaaatttgctgaacaaaaaaatcttaaattaaatttgattgatcgtttgttattaacaaacaaaaaattagaagctataaaaaaatcagttagagatataattaaactcgaagatccagtgaataaagttttggaaaaatggagaagacctaatggattatttattaaaaaagtttctacacctataggtgtaattggtgttatttacgaaagtagaccaaatgttacttcagatatatctagcttatgctttaaatcaggtaatgccgttattttaagaggtggttcggaagcaatgaatacaaataaaattctggcctcattatttagaaaagctttaaaattaaacaaggtaaatcctgactttgtacaatttataaatactagaaatagaaaaatcgtagactatatgttatcaaaaatgaccagccatattgatgtaattgttccaagaggagggaagagtttaattaaaagagttaaagctatatctaaattaccaattattggtcatttagagggtatttgccatacctacatgacaa

SEQ ID NO: 216070 - DNA, 832 bp, Unknown
  Bacterial polypeptide expressing nucleotide sequence isolated from the Sargasso Sea
attgaccctggatgaggggcgtatcgaggccatggcgaaaggcttggacgatatcatcgccctgcccgatccggtgggcgtgatcacggatgtctgggaccggccaaacggcttgcaaatcgaacgccggcgcacgcccttgggtgtcatcggcgtcatttacgaaagccgacccaacgtcacggtagacgcgggcgcgctctgcctgaaagcgggtaacgcggcgatcctgcgcgggggatcagagagcttccattcgtcagacgccattctggaatgcctagccgaaggcctgcaggacgccggcctgccagccgcggccattcaacgagtgccaacccgagaccgtgcagccgtaggtgagatgctgaccatggtcaaccatatcgacgtgatcgtgccacgcggcggcaaatcgctcattgaacgggtctcgacggagagccaggtgcccctgttcaaacaccttgaagggatctgccatacctacgtgacggcagatgccgaccccgagatggccgaaagcatcgtcctcaacgccaagatgcggcgcaccggcatttgcggagcgacggaaaccctgcttatcgaccgcggcgcactttcccttctgacccgtatcgtcgacaagttggcggacgccggttgcgaggtccgtggcgatgccgacgcacaggaaaccgataagcggatcctacctgcctctgacgaagactggaacacagaatacctggattccatcatttctgtgcgcaccgtggacggcctgaccgccgccgtcgaccacatcgccgaatacggctctaaccacacggaggcgatcatcacggaa

SEQ ID NO: 216071 - DNA, 786 bp, Unknown
  Bacterial polypeptide expressing nucleotide sequence isolated from the Sargasso Sea
aaacttaaaataaaaaaagtttctacccctataggagttataggtgtaatttacgaaagtagacccaatgttacagcagatgttgcagctttatgtttaaaatctggaaactgttctattttaagaggaggatcagaatcttacaactcgaataaattactcgcaaacctatttcgtgaatcactagataaaaataacattgataaaaactgtgtccaatttatagaaaaaaaggaaagaaaaattgttgatgtgcttctctcaaaaatgagtaattatattgacgtaattgttccaagaggaggcaaaggattggtgaaaaaagttcaaaaattttcaaatattcatgtcattggtcacctcgaaggactatgtcatatctatgtagataaaagtgcaaatttaactatggcaaaaaaaattgttatcaatgcaaaaatgcgaagaacaagtatttgtggcgcattagaaactttattaattgatgaaaaagcattaaattcccacggaaaaataataataaagtcattgatctcttctggttgtgaagtccgtgtagacagaaaaattaacaaactctttaaaaataaactgaaaaatgcaaaagaaattgattggaaaacagaatatttagatacaaagatatcgataaaaactgttaaaaacgttaaggacgctgttaatcatattttgaaatatggaactatgcatactgatagtattattacgaataactccaaaaatgcaaaaatatttttagaaggagtcaacagctctatagcaatg

SEQ ID NO: 216072 - DNA, 733 bp, Unknown
  Bacterial polypeptide expressing nucleotide sequence isolated from the Sargasso Sea
atgagtattgaaagtgatattatagagttggggaaaaacgcaaaaaaagcatcctcaaatatgaagctttgtaatagcgatcaaaaaaaccaggcattaaaaaatcttattaaaaatttagatgatagtagggaaaaaattttaaatgctaataaaattgatttagaaaatggtataaaaaaatcattatcaaatccgctgattaacagattaactttatctaataaatcaatagatcaacttattaaatcaatagaagatacaatagaaataccagaccctataggtatcactcttgaaaaatgggaaaggccaaacggattaagctttagaaaaatctctacccctttaggcgttctaggtgtaatatatgaatctaggccaaacgttactgtagatgcttcatgtctttcaattaaatcagggaattgtataattttaagaggcggaagtgatagttttcattcgtctaaagaacttgttaatagtatcacacattcttttaaacaagcaggtttacctaatcattgtgttcaaatgatcaattcatccaaaagagaagctgtggatcacttgcttaagatgaaagattatattgatgttataattccacgaggtggtaaaggattgattgaaaaaataaattcaaccagcaaaatacctgtaattaagcatttagatggcatctgccatatatatgttgataaagaagctgatttaaaaatgcagaaaa

SEQ ID NO: 216073 - DNA, 868 bp, Unknown
  Bacterial polypeptide expressing nucleotide sequence isolated from the Sargasso Sea
ttacagtcaataggtagaaatgcaaaaaaggcatttgaggaattaaagaacgttaagcataaaaaaataaaaaaagttttagaaaattacaatcaatctcttcttaaaaatacaaataagataattagagaaaatttaaaagatgtaaaaaatattaaaagaaaaaatttagttgatagacttattttaaataaaataagaatagaaggaataagacattcaataaatgaaatagcaaagtttaaagatccggttggaagagttttagaaacatggcgcaggccaaataatttgactataaaaaaagtaactactccaattggagttataggtgtgatatacgaaagcaggcctaatgtaactgctgatgttgcagcattatgtttaaaatcaggaaactgttctattttaagaggcggatctgaagcttttaattcaaatagactattagctaatttattcagagataatttacgaaaaaataatattaatcaaaactgtgttcagtttattgaaaataaaaatagaaaaatagtagatcaattattatcaaaaatgagttcatacattgatgtaatagtaccaagaggaggcaaaggtcttgtagcgaaagtacaaaaattttctaacgttcatgtgattggtcatcttgaagggttatgccacatctatgtggataaaactgcaaatataaaaatggcgaaagatttaattattaatgcaaaaatgagaagaacgagtatttgcggtgcagttgaaactcttctgattgaagaaaaagctttgaactcacatgctaaagaaataatagatgctcttttaaattcaggctgtgaagtgagagctgataaaaaagttaacaaaattt

SEQ ID NO: 216074 - DNA, 795 bp, Unknown
  Bacterial polypeptide expressing nucleotide sequence isolated from the Sargasso Sea
aatgtacaaaattggaagaaatgcagtaaatgcatctcaaactaaaattagtacaaaattaaaaaataaagttttaatcacctatattgatttaattaagaaaaaaaaaaaatccataatcaaacaaaataataaagacataaaacaagcaataaaaaaaaatttaaaaaaaaatttaattgaaaggttaaaaattaatcaaaaaaaaataaataatatttgtttagctataaaaaatgtaagaaaattaaaagatccagtagatataactattaataaatggaaaagaccaaacaatttattaattaaaaaagtttcaattccattggggattattggagtaatattcgaaagtaggccaaatgtatcttcagatgtatctagtttatgctttaaatctggaaatgctgttatcttaagagggggatcagaggcattaaattcaaataggatattagtttcactatttagaaaagctttaaaaaaaaataaagtaaaccaaaactatgttcagttaattgaaaaaagagagagaaaatatgtagattttatgctctctcatatgtcaaactatattgacgtaatcattccaagaggtgggaagggattggtatcaaaagttcaaaaattttctaaagttcccactattggacacctggaaggaatttgtcatacttatatagataaagaggctgatttaaaaatggcaataaaagttacacataatgcgaaacttagaaatacaagtatatgtggagcaaccgaaactattcttataaataaaaaagttgttaa

SEQ ID NO: 216075 - DNA, 818 bp, Unknown
  Bacterial polypeptide expressing nucleotide sequence isolated from the Sargasso Sea
aatgaaaaaatatttagaatctatcggaaataattcatgtaaagcttttacttgtaaaattagaaataaaacaaaaaataaagttttaataaaatttgcagacttgataaaaaaaaataaatcaaaaattatcaaacaaaataaaaaagatattaattttgcaaaaagaaagagtttaaaaaaaaatttaattgatagacttcaactaaacgacaacaaaataaatgaaattattaagtcaataaaaaatataattaaattaaaagatccaacaaatataactctaagtaagtggaaacgtccaaatggtttaataataaaaagagtaacaattccaataggtgtgataggagtaatttacgaaagtagaccgaatgtaacctctgacatttcaagtttatgctttaaatctgggaattgtgttattttaagaggtggatctgaagcatatttttcaaataaaattatttccaatttatttagaaaagcgctgaaagataacaaagtcaatcaaaattacgttcaatttattgaaagcaaaaatagaaaattagtaaatttaatgctttcaaatatgaaaaaatatattgatgtaattatcccaagaggtggaaaaaacttagtcaaaaaagtacaaaatattagttctgttccaattattggtcaccttgaaggaatttgtcatacttatatagataaagatgcaaatttaaattttgctaaaaaaattgttcacaatgctaaattaagaaatactagtatttgtggggcaacagaaaccatcttatttcatgaaaaagctttaaaaaaatatgtaa

SEQ ID NO: 216076 - DNA, 304 bp, Unknown
  Bacterial polypeptide expressing nucleotide sequence isolated from the Sargasso Sea
ttagccgtgcgaatagtcgaagacttagtagaggcgattaaccatatagaagagtatggttcaagacatactgattcgattgtaacggaagatttgtccaatgccaggaagtttttgtcggaggtcgattcaagttctgtcatggtcaacgcgtcaactagatttgctgacggttacgagtatgggctgggtgcagaaatagggattagtacagataaattccatgccaggggaccggtaggcttagaaggcttgacttcgcaaaaatgggtggtattcggcgatggacagattcgtctttagt

SEQ ID NO: 216077 - DNA, 852 bp, Unknown
  Bacterial polypeptide expressing nucleotide sequence isolated from the Sargasso Sea
attttttttgcctacaaaaaaaaactaaaagagaatcttattaaaagacttattttagatgatcaaaaaattttagaaattcaaaattcaataaaaaaaataataaaattaaaagatccaaccaatattattttagaaaaatggaaaagacccaatggattgaatatttcaaaagtttccataccaataggtgtaattggaataatttatgaaagtagacctaatgtaacctctgatgttgcttctctttgttttaaatctggaaatacagttattttaaaaggtggttctgaagcatttcattcaaattttattcttacaaatttatttagaaaatcattgaaaaaaaataaagttgatgaaaattttgttcagttcattaatattaaaaataaaaatttggttgattttctcttaaccagaatgggtaaatttattgatgtaatcataccaagaggaggaaaaagtttagtaaaaaaagttcaaaatttatcaaatattccaataattggacatctagaaggtatttgtcacacttatgtcgacaaagacgcaaatataaatattgctgaaaaagttattttgaatgctaagttaagaaatactgcaatttgtggtgctacagaaacaattttattacacaacaaaattttaaaaaaaattggaattagagttttaaagagtcttgaaaaaaacggatgtaaaatcataggagatgataaaattaaaaaattttattatggcaaagtaaaaaaggcatcaataaaagattggtcgaaagaatatttatcatcaactgtatctgtaaaatgtgtaaaaaatttagatgatgccatattacatataaataaa

SEQ ID NO: 216078 - DNA, 829 bp, Unknown
  Bacterial polypeptide expressing nucleotide sequence isolated from the Sargasso Sea
taaaaaccttagtggttttaatgtaaatagaagaaataaagtgttggatcaatttattagagatttaaaaaataataaaaaatcaatcctaagagaaaatattaaggatattaaattatgtaaacgaaaagaattagtagacagacttgttattaatgaaaaaaaaatagaaaatttaagaaactcaattgatcagattagaaaatttaacgatccactaggcaaaattcttctaaaatggaaaagacccaatggtctttttataaaaaaaattacaattccaattggtgtcattggtataatttatgaaagtagacctgatgtaacatgtgatgtttcatcattatgtttaaaatcaggcaatgttgctattttaagaggtggttcagaagcttttaatactaataaaatttttgcaaatttatttagaaactctttaaaaaaaaataaaattgataaaaattgcattcaatttgttgaaaaaaaggaacgaagattggtagattttatgctatcaaaaatgtctaaacatatagatgtgatcgtgccgagaggaggtaaaaatcttgtaaaaaaagtgcagaaactctctgcagtgaatgtaattggccatttagaaggtaattgtcatgtttatgtcgataaaaacgctgatttaaaaatggcaagaaaggttgttgttaattctaaaatgagaagaacctcgatttgtggtgcagctgaaactttattaatacactctcaatgtatcaaatcacatgccgtaccaatactaagagacctagcgatttcaggttgtgagattgtggttgacaaaaaattaaataaa

SEQ ID NO: 216079 - DNA, 442 bp, Unknown
  Bacterial polypeptide expressing nucleotide sequence isolated from the Sargasso Sea
actgtattagaaaaattaggaccaatgtatcagcaagaaaaagttgaaatacgcggttgtgaggaatcaaaaaaaatattaggggatatcaaaattgccagtgatgaagattacggaactgaatatttagcgcctatcatgtcacttaagatagtcaatgatattgatgaggcgatgcaacacatagataaattcggttcaaaacatactgatactattgttacagaaaataaatcaaaggcagaacgtttccttcgtgaagttgattcaagttcggttatgctaaatgcgtcaactcgttttgcagacggatatgagtatggtctcggcgctgagattggaatcagcacagataaatttcatgctcgcggtcccgttggccttgagggattaacatcacaaaaatatattgtgcttggcgatggaaatattcgttcataac

SEQ ID NO: 216080 - DNA, 499 bp, Unknown
  Bacterial polypeptide expressing nucleotide sequence isolated from the Sargasso Sea
aatgtctaaaaatttatttatgaaaaaaattggagaaaaagcaaaatttgcttccatagaattatctaaattaaatataaaaaagaaaaattctgttttaaaactatttagtaaatatcttaaaattcatgagcaagcaattttaaatgctaataaaaaagatttatccaacgctaagttaaaaaaaattactgacagtatgcttgatagacttaaattaaacaaaaaaaaaattaaccaaattagaagttcaatagataaaataattaaattcaaagatccaaatgataaaattttatctacatggagaagaccaaatggcttgttaattaaaaaaatttctataccgataggggttatcggtataatttatgaaagtagaccaaatgttacctcggatgtttctgctttatgttttaaaagcggaaatgcagttatattacgcggaggctcagaagcatttaattccaataaaattttagctaaactttttagaaaa

SEQ ID NO: 216081 - DNA, 650 bp, Unknown
  Bacterial polypeptide expressing nucleotide sequence isolated from the Sargasso Sea
ccacgaggtgaaaatcgttagtagaaaaatccagcaagaagctcgggtaccagtttttgcacatcttgaaggaatatgtcatatatatatagatcatgaagccaaaatagaaattgctctaaatatcctattaaattcaaaattaagaagaacaggaatttgtggggccgcagaaactcttttaattgacaaaaggttagatgaaaatcatgtttctgacctaatttataaactaatgagtgaaggatgtgaagtaagagctgaaaaagcaattcaaaataagtataataaagttttacttgctactgaaaaagattggcgcactgaatatttagactccataatatctgttaaatatgtcaatgacgttgaacacgctattgaacacatcaatgaatattcctctgatcataccgagacaatagttacagaaaatcagagcacagcagaaaagtttttgagtcatgttgatagtgcaattgtaatgcataatgcgtcaacccaatttgccgatggaggagaatttggtatgggagctgaaattggcatatcaactggaaggctacatgcaagaggacccgtgggtacagaacaattaacaagcttcaaatatattgtaagaggaacgggtcaaataaggaaaatttagt

SEQ ID NO: 216082 - DNA, 823 bp, Unknown
  Bacterial polypeptide expressing nucleotide sequence isolated from the Sargasso Sea
gttattgggtgtaatttatgaaagtaggccaaatgttacatcagatgttgcaggtttatgtttcaaatcaggtaatgcagtaatcttaagaggaggttctgaagcaataaattcaaatagagttttgtcaaaactttttagaaaagcgctcaaaaaaaataaagtagatgaaaattttatacaatttttagattctaaaaaaagaaagatggttgatgtaatgctttccaaaatgaaagaatatattgatgtgataatcccgcgtggtggaaaaaatcttgtaagaaaagttcaagaactttctaaaattcctataattggtcatcttgagggtatttgtcatacatatgtcgacaaagacgctgaactaaagatggcaaatagagttgtagtaaacgcaaaattaagaaacaccagcatatgtggggcgactgaaaccattattctacataaaaatattgttaaaaaatttagcaatacaatcctgggcaacttggaaaaaaatggttgtaaaatttatggagaaaagactttggctaaattttacaaaggtaaaatttttaaagctactgaaaaagattggtctacagaatatttaagctcagcagtttcggttaaaatagtaaacaacctcaatgaagctataagtcatattaataagtatggaacaatgcatacagactcaataattacaaaaaacaaaaaaacagctaatcaatttctaaagaaagtcaaaagctctattgctatgcataacacttcaactcaatttgcagatggaggtgaatttgggttcggaggagaagttggaatttctacccat

SEQ ID NO: 216083 - DNA, 675 bp, Unknown
  Bacterial polypeptide expressing nucleotide sequence isolated from the Sargasso Sea
aatgaaatatttaaaaaatattggaaaaaatgcaaaacgagcatttgaagatcttaagactgtgaaacatgataaaattaaaaaagttttggacaattacaataaagctcttcttaagaataaagataaaattatcagagaaaatgttaaagatattaaaagtgcaaaaagaaaaaatcttattgatagacttatcttaaatgagaagagaattgaaggtattaggtattcaattaatgaaatagcaaagtttaaaaatcctgttggaagagttttagatcaatggtctagaccgaacaaattaagaataaaaaaaatttccacaccaatcggagttattggtgttatttacgaaagtaggcctaatgtgactgcggatgtttcatctttatgcttaaaatctggaaattgttcaatattaaaaggtggctcagaagcgataaattctaataagttattggcaaatctttttagagatgtgcttcataaaaacggcatcaataaaaattgtgtacaatttatcgatagaaaagacagaaaaattgtagataatttattatctaaaatgagtggctacattgatgtcatcgttccgaggggtggaaaaggattggtggccaaagtacagaaattttctaatgtgcatgtaattggacatttagagggtctgtgtca

SEQ ID NO: 216084 - DNA, 256 bp, Unknown
  Bacterial polypeptide expressing nucleotide sequence isolated from the Sargasso Sea
gagaagcacgggagcggtcattccgaagctatcatcactaatgatgttaacaatgggcaccagtttactaaagatgtggatgcagctttagtactggtaaacgcatccactcgttttaacgacggtggccagattgggctggggtctgaagtcgcaatcagtacagggaaattgcatgcgcgagggccaatgggcctaagggaattaacctcatataaatgggtcgcacttggagctggacaaatacgggattaat

SEQ ID NO: 216085 - DNA, 521 bp, Unknown
  Bacterial polypeptide expressing nucleotide sequence isolated from the Sargasso Sea
aatgaataaaaatttaataaatattggaataaaagcaaaaaaggcatttaaaataaaaattaatagtaaacttaaaaataaagttttggccgattttgcagaattaataaaaaaaaataaaaaaaaaattatcaaagaaaattataaggatataaaatttgcaattagaaatgatcttccagaaaacttaattaaaagacttactcttaataataaaaaattacaggagatgcaaaattctataaataaaataataaaattaaatgatccaataaacaaaatattagataagtggaaaaggcctaatggtttaataattaaaagagtttcggcacctataggtgtaattggtataatttatgaaagtagaccaaatgtgacctctgacgtttctagtttatgttttaaatctggtaatgcaataattttaagaggtggttctgaagcttataattcaaatatgatacttgttaaattatttaggcaatccctaaaaataaacaaaatcaatgaaaattatg

SEQ ID NO: 216086 - DNA, 802 bp, Unknown
  Bacterial polypeptide expressing nucleotide sequence isolated from the Sargasso Sea
tatgtcaattaaactaaacaaaattacaaaaagttcaagaactgcatttgagagtaaagtaaatacgattaaaaaagataaagttctaaaaaaatttgccattttattatccaaaaataaatcaaaaataataagagaaaattataaagatataatatttgccaaaaaaaaaaggttaaaagaaaatctaattaaaagactgacaattaatgagaaaaaaattaattctattattaaatctataaaacaaataatcaaattaaaagatccaacaaataaaattttggattcatggacgagaccaaatggattagtaattaaaaaagttactatcccaattggtgttatagctgtaatttatgaaagtagaccaaatgtaacatctgatgttgcaagtctttgctttaaatcaggcaatgctgttatcttaagaggtggctctgaggcatttaatacaaataaaataattgcaggtttatttagaaaatctttgaaaagttatggcattgatcaaaattatgtccaatttattgaaaacaaaaacagaaaagtcgttgataatttactttctaaaatgaaaggttttatagatttagtaattccaagaggaggtaaatcattagtaaaaaaagtggacgaactatccacaattccatacattggacatttagagggaatttgtcatacatttattgataaaaaagcaaatctcgagatggcaattaaagttttagaaaacgcaaaaatgagaaatactagtatttgtggagcaacagaaacggtattattccataaaaatatt

SEQ ID NO: 216087 - DNA, 811 bp, Unknown
  Bacterial polypeptide expressing nucleotide sequence isolated from the Sargasso Sea
aaaattaactctataattaattcaattaaaactattttaaattttaaagatcctatagatcaaaatctggatacttgggtacggccaaataagctaaaaataaagagggtaaccatacctatcggagttataggtataatatatgagagtagaccaaatgttacagctgatgtttcaaccttgtgttttaaatcaggaaattgtgtaattctcagagggggatccgaagcttattttagtaataaaattttagcaaatctatttagacaatctctaaaaataaataaaatagataaaaattttgttcaatttattgataaaaaaaatagaaagtttgttgattttatgctttcaaaaatgagtaaatatatagatgtaataattccaagaggtggaaaaaatttggtaagaaaggtacaagaattatcttgtattccagtaattggacaccttgaaggaatgtgtcatacttatatcgataaagatgcaaatataaatatggcaaaaaaaatattgttaaatgcaaaattaaggaatactagcatttgtggagctactgaaacattattaattcacaagaaaaattctaaatttatagaagatcttttaaatgttttaacagaaaaagattgtattatttatgcagataaaaaaattaaaaaaatttataaaggaaaaacaagaaatgcattaagtagtacatggaagaaagagttcttatcatcaaaaatttcagttaaattagttaataatatcaatgaagcaattgaacatattaataagtatggaacaatgcatacagatgctataa

SEQ ID NO: 216088 - DNA, 589 bp, Unknown
  Bacterial polypeptide expressing nucleotide sequence isolated from the Sargasso Sea
aatgaaaaattatttaaataatattggaaaaaaatctaaaaacgcttttaaaaatttgggtaatgtaagtttaaaaaaaagaaataaaatcttagagacttatacaaaatctttaaaaagtaataaaaataaaattattaaagaaaatttaaaagacgtaaaactttgtaagcgtgaagaattaatagatagactaatccttgatagtaaaaaaattgaaagtataaggaattcaatttatgaaatcataaaatttaaagatcctctaggaaaagtcattgaaaagtggaagagaccaaataacttaataattaagaaagtttctgttccaattggtgtaataggaattatttatgaaagtagaccgaacgtaactagtgacgtatcatctttgtgtttaaaatccggtaatgtagctattctgagaggtggttctgagtcgttgaattcaaatagaattctagcaaatctttttaggaactctctttcaaataattatgttgataaaaactgtattcaatttatcgataaaacaaatagaaaagtcgtagattttcttttatcacaaatgtcagattatattgatgtt

SEQ ID NO: 216089 - DNA, 850 bp, Unknown
  Bacterial polypeptide expressing nucleotide sequence isolated from the Sargasso Sea
ttaaatgatataaaaagattcaaaaatcctgttggacaaattttgtcaaagtggaggagatctaataaattacgtatcgagaaagtttctataccaattggtgttatttcagtaatatatgagagcagaccaaatgtaacggctgacgtagctgctctctgtttaaaatctggtaactgtgtaattttaaagggtggatcggaggcgtttcacactaacaaaattctagcagatttatttagaaaagctctaaggaaaaataaaatagatgaaaattgtgttcaatttattgaaaaaagagatcgaagtgtcgttgacttcattctctcgaaaatgaaaaattacattgatgtagttgttccaaggggtggaaaaagtttagttaaaaaagttcaaaaattatcaaatgtgaatgtaatcggtcatctcgaaggtttgtgtcacatatatgtagataaagctgctaattttgaaatggcaaaaaaagttgtaataaatgctaaaatgagaagaacaagcatatgcggagcattggaaaccctattgataaatgaaaagattttatcatcattcggcaaaaaaattattaatgatttaattgacagaggatgtgaagtaagagttgataatagaattaataaaattttttattataaattaaaaaaagctaagaaaaaagattgggaaactgagtatttagattcaataatttctattaaaacagtaaaaaatgttgaagaagctatagctcatattttaaaatatggaactatgcataccgacagcataattacagaaaaccttagtacggctaagcaatttttagaaggtgtaaacagctcaatagcta

SEQ ID NO: 216090 - DNA, 915 bp, Unknown
  Bacterial polypeptide expressing nucleotide sequence isolated from the Sargasso Sea
gctggataatggaataaaaattgagaagcgccgggtacctttaggagtgtttggctgcgtatatgagagcaggcctaacgtaactaccgacattgttgccctgtgtttgaaatcaggtaacaccgtaatccttcggggaggtaaagaggcagttaattccaacgccgccttgattaaacttattaggcaagctttggaaaagtcagatatttcagctgatgtagttcaatttataaatagcacagatagatctgtggtggatcaaatgattcgggctaatgactgtatagatttatttatacctcgtgggggagcttcgttaatacaatacgttagagataacgctaccgttccttcgattacaggaggtatcggagtggttcatatttacgcagatgagtctgcagatttacaaaaagtggtcgaaattgtgcacaatgcgaagacgcagcgacctgacgtctgcaatgctttagatacgctgttagttcattcaaccattgctgcggatttattggcgtcgctagtgccgaatataactagtgcaggagtagagatacgttgtgataaacgagctttgtctgttatgggttctgctggttcttccgaattagtaaaggctgcagaagaaagtgattttggacaggaattcctctcattaattatgtcagtgaagattttggatagtatcgacgacgctatcgatcacatagaagaatttggttctggccatactgaagcgatcatcactgaaaatcctcagtcggcaaataaatttcttgatgaagttgaagcatctgtcgttttagtaaatgctagtaccagatttaacgatggcgggcaattgggattaggtgcagaagttgcaataagtactaataaattgcatgcacgtggaccgatgggactaaaaga

SEQ ID NO: 216091 - DNA, 545 bp, Unknown
  Bacterial polypeptide expressing nucleotide sequence isolated from the Sargasso Sea
aaaagcagaaagcattacccttaattcaaagtgtcaaagaccgagtgtgtgtaatgcagctgagaatttactcatacaccaagatgcactatcttcactaccaagattagcacaagccctccatgaacatggtgttgagctaagagtcgattcagccgctaaagcagctttaaccggaacaggcattccgatgatcgatgctcaagaccaagactttggcgaggaatataacgacttaattatttctatagcagttgttcctaatatgaaggctgccattgaaatcattaatacacgaggctcagcgcataccgatactattgtcacagaagatgctcaaaatgcccaagattttttaaatgaggtcgattcctcaaccgttttacacaacgcaagtactcgatttagtgatggctttgaatttggacttggagcagagattggaatctcaacggatcgtctgcacgctcgtggcccaatgggcttaaatgagttatgtacttataaatacatagtacatggcaaaggcgaaatcaaagactgag

SEQ ID NO: 216092 - DNA, 859 bp, Unknown
  Bacterial polypeptide expressing nucleotide sequence isolated from the Sargasso Sea
gttttagaaaattataatcagtcacttttaaaaaatactaacaaaattattagagaaaatttaaaagatattaaatatgttaaaagaaaacatttagttgatagactaattttaaataaaaaaaggattgaaggcattagacactcgataaatgagattgcgaagtttaaagatccaattggaagagttttagaaacatggcgtagaccaaataatttaacaattaaaaaagtaacaaccccaattggtgttataggtgtaatttacgaaagtagacctaatgttactgctgatgttgcagcgctttgtttaaaatcaggtaattgttctattttaagaggtgggtctgaagcttttaattcaaacagattattagctaatttattcagagataatttaaaaaaaaacagcatcaatcaaaactgtgttcagtttattgagaataaaaatagaaaaatagtggaccagctattatcaaaaatgggtgagtatattgatgtaattgtaccaagaggagggagaggacttgtggagaaagttcaaaaattttctaatgtgcatgtaattggccatcttgaaggattgtgccacatttatgttgataaatctgcaaatataaaaatggcaaaagatttaattattaatgcaaaaatgagaaggacaagcatttgtggagcagttgaaactgttttgttcgaggaaaatgctttaaaatcacatgctaaagaaataataaattctcttttaaattcaggctgtgaagtaagagctgataaaaaagtaaataaactttttcaaggaaaattaaagaaagcaatagagaaagatggaaaacagaatatctggatgcgattattca

SEQ ID NO: 216093 - DNA, 923 bp, Unknown
  Bacterial polypeptide expressing nucleotide sequence isolated from the Sargasso Sea
aggttataaaaaaaatttaatcgatagattaatgcttgataaatctaaaatttatcaaataataaaatcaattaataatattgcaaagttaaaagatcctacagatataactttaagtaaatggaaaaggccaaatggattaataataaaaaaagttacaatgcccataggtgtaattggtataatttatgaaagtagaccgaatgtaacatcagatgtatcaagtctgtgttttaaatctgggaatagtgttattttgaggggaggttccgaagcatatttttcaaatttaataatatcaaaattattcagaaaagctttaaaagaaaataaagtagatgaaaattacgtacaatttataaaaaataaaaatagaaaagtagtagatttacttttatcaaaaatggaaaaatttattgatgtaataattcctagaggtggaaaaaacttagtttcaaaagttcaaaaactttccagagttccaattatcggacatttggaaggtaattgccatacatatatagataaagatgcaaaattaaatcttgctgaaaagattttatataatgctaaattaagaaatacaagtatatgtggagcaacagaaacagttttatttcatgaaaaaactctcaataaatttataaatcctgttttaaaaaaattggaaaaaaataattgtattattattgcagataaaaaaattaaaaaaatttttaaaggaatatctaaaaaggctaaagaaaaagattggtctaaagaatatttgttaccaataatatctgccaaatctgtaaaaaacgttcaggatgctgttgatcatataaataaatatggaacaatgcatactgatgcaattataactcaaaataaaagaacagcgaatttttttttaaagaatatcaaaagctctatcgcaattt

SEQ ID NO: 216094 - DNA, 451 bp, Unknown
  Bacterial polypeptide expressing nucleotide sequence isolated from the Sargasso Sea
ggtgctgctcggagacaaaaaacgtctggaatcatatcctgatttaaatttatcttctgcaacagataaagagtgggaatcagagtatatggatttaatactttctataaagactgtcaaatctgcatcagaagcagtagaacatattagccagtttggatccaaacatacagaagcaattgtaactgagaattcagaacttgcagagtggttcatgaaaattgttgactcagcaggagttttctggaacgcctcaacccgttttgctgacggatttcgttatggtttgggagcagaagtagttgtaagtacaggaaaaacccatgcccgtggccctgttggacttgaggggcttgtaatttacaaatacaaattatatggtaatggccatgttgctggagattatggtagagggaaaaaagactttattcataaggatattgaattctaa

SEQ ID NO: 216095 - DNA, 151 bp, Unknown
  Bacterial polypeptide expressing nucleotide sequence isolated from the Sargasso Sea
ctcgacgcgtttcgctgacggctttgaattcgggctgggcgcggagatcggtatttccaacgataagttgcatgcgcgtggaccggtggggctggaagggctgacgtcgctgaagtatgtagtgcttgggcatggtgagggtcggcagtag

SEQ ID NO: 216096 - DNA, 813 bp, Unknown
  Bacterial polypeptide expressing nucleotide sequence isolated from the Sargasso Sea
tattaaaaagatatctgtacctcttggtgttataggaatcatttatgaatcaagacccaatgtaactgttgatgcatctgctattgctgtaaaagctggtaatacagtaatattaaggggtggaaaagatagttttcactcctctcacaaacttaatgaaattatcaataattctttcaatagatcaggactgccagaaaattcagtacaaatgattccaacaccagaaagagaggctgtagatctaatgttaaaacttgactcttatattgatttaatcataccaagaggtggcaaaggtttaataaaaaatgttaaggaaaaaagttctattcctactattaaacatcttgatggaatctgtcatgtatacgttgataaagatgccaatttagaaactgcaaaaaagatagtatttaatagtaaaatgagaagacctggaatttgtggcgctgcagaaactttacttatacatgagttacaaaaaaagaatgctaaaaaaattcttcaggaattggttgactctcaatgtgagattcgaggagatgctttcattaactccttagatgataaattcaaacttgcaactgataaagattggggaactgaatacttagataaaatattgtctgttaaaattatcaatagtgttcaagatgctgtagaacatataaatacccatggatcaggtcacacagaatcaattattacagaaaattatgaaacttttgaatttttccataaaaatattaatagtgctataattttacaaaatgcatcaactcaatatgcagacggtggtgaatttggttt

SEQ ID NO: 216097 - DNA, 496 bp, Unknown
  Bacterial polypeptide expressing nucleotide sequence isolated from the Sargasso Sea
atgaactatttaaaatcaataggaataaatgcaaaaaaagcctttgaagatttaaagggtgtaaaacacaaaaaaataaaaaaagttttagaaggttacaatcaatcacttttaaaaaatactaacaaaataatcagggaaaatatgaaagatgttaaaaatgttaaaagaaaacatttagttgacagacttattttaaataaaaaaagaattgacggtataagacattcgataaatgaaatagctaaatttaaagatccagttggaagagttttagaaacatggcaaagaccaaacaatttatcaataaaaaaagtgtcaactcctattggcgttataggtgtgatatatgaaagtaggcctaatgttacagctgatgttgctgcattatgtttaaaatcaggaaattgctctatattaagaggtgggtcagaagcttttcactcaaatagattactcgcaaatttatttagagataatttaagaaaaaaataat

SEQ ID NO: 216098 - DNA, 893 bp, Unknown
  Bacterial polypeptide expressing nucleotide sequence isolated from the Sargasso Sea
gaaaagaccaaacggtttaactattcaaaaagtgactattccaattggagttattggggttatttacgaaagtagacctaatgtaacatcagatgtttcaacgttatgttttaagtctggaaattgtgttattttgagaggaggatctgaagcttacaatagtaacaaaattttagcaaatttttttaggctggcattaagaaaaaacaaaattaatgagaactatgttcaatttgttaatagcaaaaatagaagacaagtaaattatatgctttcaaaaatgtcaaattatattgatgttattattccaaggggtggaaaaaatttggtaaaaaaagtaaaagatttatcaaaaattcctgttattggacatttagaaggtatttgtcatacttatatcgataaagatgcaaataataaaatggctagtaaaatttgtttaaatgcaaaattaagaaatactagtatatgtggtgcaacagaaacacttttaattcataaaaaaaagaagaattatgtgaacactatattaaatatattagtaaaaaataattgtgaaattatttctgatgtaaatattaagaaaatttttaagggtaaatcacgattggctacaaagaagacctggattactgaacatcttgctccaaaaatatctgttaaactagttaaaaatattgatgaagcgatccagcatattaataaatatggaactatgcatactgatgctatcattactaataatattaactcagctaaatactttttaaagagtatcaaaagttctattgcaatacataactcttcaactcaatttgctgatggtggtgaattcggttttggaggagaagtgggtatttcaaacaataatctgcccgccagaggtccgattg

SEQ ID NO: 216099 - DNA, 824 bp, Unknown
  Bacterial polypeptide expressing nucleotide sequence isolated from the Sargasso Sea
caagatccccttgatcaaactttagagagttggaccaatgccactaatgggttacaatttacaaaagtctcagtgcctattggtgtgattggcattatttatgagtctcgacctaatgtcacaatagatgctgcatgtctttgccttagatctggaaatatttctattcttagaggaggctctgagtgtatcgaaactaataaaaaactttatgagtgcattcaagatgctttaaaagatttaaattttgatactcatcttgtctgttttattcaaaatactgatcgcagttttgttgaagagttgttaaaagctgaaggagatgtagatgtgattattcctcgtgggggaaaatcgttaattgaaacaatttctaaaaattcaaaagttcctacaattaaacatttagaaggtttgtgtcatactttttgggatgaaggatatgataaagataaagccactgaggtcatcgcaaatgccaagctgagaagaccagagatttgtggtgcaacagagactttacttatacactctaataattcagcagaagatatttcatctgttttagataatttaaaatcacaaggatgtgaaattattggatgtagtcgcatcaaagatatttatgctattgatcgagatgcaacagaagaagattggtcaactgaatatctagataagaaaattacagtaaaactagttgataatgttgaagaatgtgtagagcatataaacaaatattctagtggacataccgagagctgtttaagtaacaatcaacaatctatagagtatttctttcaaaactgtaaaagtgccatttt

SEQ ID NO: 216100 - DNA, 892 bp, Unknown
  Bacterial polypeptide expressing nucleotide sequence isolated from the Sargasso Sea
gaaatttataaatttaaaaatcctataggcagagtaattgagaaatggaaaaggccaaatggtcttcttataaaaaaagttagtacccctattggtattattgggattatctacgaaagtagaccaaatgtaacttgtgatgtttcttctttatgcatcaaatctggaaatgtagctattttacgaggaggatcagagtcgtttaactcaaataaaatcttagcaaatttatttaaagagtctttaaaaataaatggtattgataaaaattgtatccaattcattgaaaagaaaaacagaaaaataatagattatcttttatcaaatatgtcagattatattgatgttattgtgccaagaggtggaaaaaatctagtaaaaaaagttcaaaaactttctagagttaatgtcattggacatttagaagggaactgccacgtttatgttgatcgagatgcaagtattaatatggcaaagaaagttgtcataaattcaaaaatgaggagaacatctatttgtggagctgctgagacattactaatcgatagtaaatctttaatttctcatggtgcgccaataattagggaattaattttaaagggttgtgaaatagttgttgataaaaaaataaataaaatttttaaaaatcaactaaaattagcaaaagaaatagattggaatactgaatacttatcaccaaaaatatctgtaaaaagtgtaaatggagttaaagatgctatcttacacataacaaagtatggaactttacatactgactctattattacaaaaaataaaaagacagctaaaatatttttagatggtgtaaatagctcaattgcagttcacaatgcgtcaacacaatttgctgatggtggtgagtttggatttg

SEQ ID NO: 216101 - DNA, 802 bp, Unknown
  Bacterial polypeptide expressing nucleotide sequence isolated from the Sargasso Sea
aatgtctagcgatatatcttcaattatggctgcaatcggcgttaaagctaaagaagctgctactcagattgcagttgcaagtgcaggagctaagaataaggcattgaggcttattggagagaacttggggaccagtctaggtcatatcctctctgaaaatacaaaagatatggttgctggtgaagaaaaaggtctaaactcagccatgttggatcgattagcccttgatgagaccagattaaacgggatgataaagggattaaatgatatagccgcattaaatgatcctgttggtgtggttacatctgagtgggagcgaccaaacggtctgcaaattcaaaggaaacgagtgcctcttggggttatcggtgtcatttttgagtcccggccaaatgttacagctgatgcaggagccctgtgcatcaaggcaggtaatgctgctattctgcgttgtggatcagagagttatttgtcatcttctgcaatttttaattgtatgagaaatggattagtagcggcgggattgcccagtcacgcaattcagcttgtgccaagtcgtggacgcgaggctgtgggagaaatgctaaagatgatagatcacatagacgtgataattccgcggggtggcaagtcactggttgaaagagtaactaaaaacagtaaagtgcctctgtttaagcacttagaaggtatctgtcatacgtacattgaagaaaatgcaaatctagatatggctgcagacatcgtaatgaatgcgaagatgagacggacaggaatctgtggggcactgagaccattttag

SEQ ID NO: 216102 - DNA, 795 bp, Unknown
  Bacterial polypeptide expressing nucleotide sequence isolated from the Sargasso Sea
gctttagataatgaaaggcttcaagggatatgcattacgttagaggcaattaaatcgtttgaagatccagtaggaaaagtccttgcaacttgggatcgaccaaatggattaaatatctctagagttgctactcccctcggcgttataggtttaatttttgaaagcaggccaaatgttgctgccgatgcaggaggtttatgcctcaaatcaggaaatgcagtaatactaagaagtggaaaagacggactggggtctgctgtagcaatcgtcgcctgtcttcaagctgcattaatatctgctgatcttccaaaagaatgtattcaaatagtcccatccgaaagtagagatgctgcaactcttatgctagaaggactaaatggctcaatagatgtgatagtaccgagaggtggaaaaagccttgttgcagaagttgaaaggtctgcaaaagttccagtttttggtcatttagagggcatttgtcatatttatgtagatgagtatgcagatgaagaaaaagctttagcagtttgcttgaatgctaaaatgcgtagaaccggaatctgtggagcagtagaaacaatactcgttaacgataagattgcagcgtcttttgtgcctaaaattattgcatcattatcagaattaaactgtgaggtaagatgctgtgaaaaaacaatcgatcttgataaaaggtcggtgcctgcgcatgaagaagattggtcaacagagtaccttgctccaatcgtaagtttaaagtctgtcttaaatgttgatgaagcaattaatcatattggg

SEQ ID NO: 216103 - DNA, 378 bp, Unknown
  Bacterial polypeptide expressing nucleotide sequence isolated from the Sargasso Sea
gcgagctgcaaggcccggcgaatctggtaccgctgcaggcagaagagcttgataacgagtacctgtcgctgcatctcaacgtggtgctggtgccggatattgaccgcgccatcgcgcatatccgtcaacacggtacccagcactccgatgcgatcctgacccgcaccctgagcaacgccaaccgtttcatcaacgaagtggactcctcagctgtgtacgtcaacgcctccacccgcttcaccgacggcggccagttcggcctgggcgcagaagtggcggtgagcacgcagaaactccacgcacgtggcccaatgggccttgaagcattgaccacctacaagtggatcggcttcggcgatgataccattcgtgcgtaat

SEQ ID NO: 216104 - DNA, 895 bp, Unknown
  Bacterial polypeptide expressing nucleotide sequence isolated from the Sargasso Sea
tatgcagattagttctctagctataagatcaggtaatggagtgatgctaaagggtggtagtgaagctaatttaacaaacacagcaatagtcaatgccttacaaaatggattatgtgaatcaggccttgataaaaatgcaatatgcttactcacaagcagaaaagatagcatgtctatgttaaatctcgagaactatatcaatctaataattccaagaggaagtaatgaattagttaaatttattcaagagaatacaaaaattcctgtgctagggcatgctgatggaatttgccacttgtttatagataaggaggcaaatcttgagatggctttgtcagttgctctagacagtaaaattcaatatcctgcagcatgtaacgctattgaaactttattagtgcataaagatgttgcaccagtttttcttgaaaaggcgatacctttattcaattctaatgatgttaaattaatcggagataaaagatctgttgaattaggattaaaatatgaggctactctagaagattggcaaactgaatatttggatttaatcttatcgataaaaattgttgacgatcttgatgaggcaattacgcatattcataagttcagttcaaaacacacagatggaataattactgaaaatttaagtactgctaataaatttatgaatattattaatagtgcaggtgtttttcataattgctctacaaggtttgccgatgggtttagatatgggttcggagctgaagttgggatatctactcaaactctcccacccagaggacctgtaggtctagaaggtttggtgacttataaatatttccttagaggcgatggcaacatagttgatgatttttcatccggtaaggctatttatacacataaagatttt

SEQ ID NO: 216105 - DNA, 910 bp, Unknown
  Bacterial polypeptide expressing nucleotide sequence isolated from the Sargasso Sea
gcttggtgtaattggtatatttatgagtctcggccaaacgtgaccgcagatgccggcgggttgtgtttaaaatctgggaacgccgcaattctgcgaggcggttctgagagcttttattcctcggcaactattctccattgcttgcagcaagggctcaagaaagccgatctcccaatcactgctatccagcaggtaccaacgcgcgatcgcgcaggtgttggtgaattgctatctatgtctgagtatatcgatattattgtgccccgaggaggcaaatcacttatcgaacgtgttcaaaaagagagtcgtgtgccggtcatcgcgcacttagatggcaattgtcatatatatttggaacaaaccgctgaccccacaatggcaaaaaatgtggtctttaacgctaaaatgcgccgccctgggatatgcggtgcaacagagagcctcattgtcgaccgctctgttgcatcccaattactgccagcaataattgattccctggcaacggctggatgtgaaattcggggcgacgacaacacccaggacatagattcgcgtgtccagccggcaacagacgaagattggggtacagaatatctggacacgattatttccgtaaagcaggtcgatgggttggacgaagctataaatcatatcaacaaatatggttcccaccacaccgattctatcgtgactaacgatggaacggcagcagctaaattccttgaaacggtagattccgctattgtcctgcataatgcctctacacagtttgccgatggtggcgaatttggtatgggtgccgaaattggtatctcaacagggcgcttacatgctcgggggcctgtcggcgtggaacagctcaccacttttaaatatattgttcgtggtgacgggcagataagatcctgaa

SEQ ID NO: 216106 - DNA, 439 bp, Unknown
  Bacterial polypeptide expressing nucleotide sequence isolated from the Sargasso Sea
atgaaaaaaaaaaatattgatcattatggaattaatgccaaagaagcatttagaattttatcattaagtgataataaacaaagaaataatgctttaaaagaaacagcaaaacttttaaaggcgaatatagatcaaatcttagaggcaaataaaattgatattgaaaatagccaaaaaaaatctatgtcaaactcatttattgataggctatcattagataaaaaaagaatttattcaattatagatggtcttattgatatttcaaaattagaagaccctcttaataaggtccttagtacatgggatagaccaaatggtttaaatatttcaaaaatttcagttccattaggtgttattggaattatctacgaatcaaggccaaacgtaacaatcgatgccggtgcactttgcattaaatcaggtaatacttgtattttac

SEQ ID NO: 216107 - DNA, 502 bp, Unknown
  Bacterial polypeptide expressing nucleotide sequence isolated from the Sargasso Sea
aatgattaaatatttaaaaataattggcaataaggctaggcaagcctctaaagataaaataactacaaaaaaaaagaacaagattttattaaaattctcaagactaataaaaataaaccaaaataaaatattaaaagaaaataaaaaagatattaaatatgcacaaacaattggattgaaaaaaaattttgttgaaagattggaactagaccaaaataaaattaataaaatagttaaatcaatagaagatataataaaattaaaagatccagttgatatatctttaaaaaattggaaaagaccaaatggtttaaaaataaaaagagtaacaattcctttgggagttataggtgtaatttatgaaagtaggccgaatgttacttgtgatatttcaagtttatgttttaaagctggaaattctgttatactgagaggtggctctgaagcctatttttcaaataaaatactttctgacttatttagattatctctaagaagcaac

SEQ ID NO: 216108 - DNA, 489 bp, Unknown
  Bacterial polypeptide expressing nucleotide sequence isolated from the Sargasso Sea
tatgaagaatattttaataattggacagaaatcaaaacttgcatttgaaaacttaaagaaaacgaatcataaaaaaatcaataaagtacttgatgattatattaaacttatttcagctagcaaaaaaaaaattattagagaaaacgcaaaagatgtgaaaaatttaaaaagaagcaaagtattagataggctaattttaaatgaaaaaaaaattgatagtattataaattcaataaaagaaataaaaaaatttcctaatcctgttggtaaaatattggacagttgggtcggaaaaaacagattgaatataaagcgagtgacgacacctattggagtgataggtgtaatatacgagagcagaccaaacgttactgctgatgtcgcagcgttgtgtctaaaatcaggtaattgtgtaattttaagaggagggagtgaagcttttaactcaaacaaaattctctcagatttatttcgaaaatctttgaaaaa

SEQ ID NO: 216109 - DNA, 739 bp, Unknown
  Bacterial polypeptide expressing nucleotide sequence isolated from the Sargasso Sea
ccatttaatttgactattaaaagagttacaactccaattggtgtcataggcgtaatatatgagagcagacctaatgtaactgctgatgttgcagcattatgtttaaaatcgggaaactgttctattttaagaggtggatctgaagctttcaattcaaataaattattagctaatttgtttagagataatttacgaaaaaataatatcaatcaaaactgtgttcaatttattgaaaataaaaatagaaaaatagtagatcaattattatctaaaatgagtgcatacattgatgtaattgtaccaagaggagggaaaggacttgtggcaaaagtacaaaaattttctaacgtacatgtaattggtcatcttgaaggattatgtcacatttatattgagaaaactgcaaatattaaaatggcgagggatttaattattaatgcaaaaatgcgaagaacaagcatttgcggtgcggttgaaactcttctaatcgaagaaaaagctttaagctcacacgctaaagaaataataaacgctcttttagactcaggttgcgaagtaagagctgataaaaaaatttacaaaatttttaaaggaaaattaaaaaaaactactgaaaaagactggaagacagaatatctagatgcaattatttcagtaaaaacagttaaaaatgtaaaaggtgctgtcgaacatattttaaaatacggtacaatgcatactgatagtattattactaaca

SEQ ID NO: 216110 - DNA, 385 bp, Unknown
  Bacterial polypeptide expressing nucleotide sequence isolated from the Sargasso Sea
agatgaaaggtgtaagaagaaatttgacaaagtggttttagcttctgatgacgattggaaaacagagtatctagacgctatcatttcaattaaaattgttagtggagttgaagacgctatagaccatatagagaaatatggctctggacatactgagagtattatttcagagagtagagataatgtagaaaaatttcttaattctgtaggcagtgctatcgttatgcacaatacatctacacaatttgctgacggaggtgaatttggattaggagcagagataggaattgcgacgggcaagctccatgctagagggcctgttggtcttgagggattaacaacctataagtatattgttagaggaaatggtcagataagaccctaa

SEQ ID NO: 216111 - DNA, 616 bp, Unknown
  Bacterial polypeptide expressing nucleotide sequence isolated from the Sargasso Sea
aatgaaaaatgtattaataaaaataggtaaaaaatccaaaaaagcttttattaataaattaagctcaaagaagaaggataaggttttaaaagattattatcatctaattgataaaaacagaaaactaataattaatgaaaataagaaagatataaaaaatgctttaaaaaaaaaaataaaagataatctaataaaaagacttatcatagatgataataagatttcaaatataataagttcaataaaaaaaattataaaattgaaagatcctactaatgtaacattagaaaaatggaaaagaccaaatggtttaaatatttcaaaaatttcaattcctattggtgttataggggtgatctatgaaagtagacctaatgttacatcagatgtagcttccctatgttttaaatctggaaatacagtgatattaagaggtgggtctgaagcattttattcaaattatatactttcaaaattatttaggaaatctttacaaaaaaatggtttagatgaaaattttgttcaattcataaataaaaaaaatagaaaagtagttgattttatattaactaaaatggttaaatatattgatgtaatcattcctagaggtggaaaa

SEQ ID NO: 216112 - DNA, 616 bp, Unknown
  Bacterial polypeptide expressing nucleotide sequence isolated from the Sargasso Sea
atgactcagagtaaagaaataaatacttatatgaataagttaggatctgaagcaaaagaagcttctttgatcctagcccaagcttccttagagcaaaaaaatgaggcactgagctgcatttcagaacaaatagaatctgatagagataaaatattaagtataaataaaaaagatttagatttagctaaagaaaaatctattggatcggctctcatcgacagattggaactaaatgacagcagaattaattctatgatcaacggattgcaggttgtttctgcgttacctgatcccataggagaaattacagatttagatcctacgccttcaggaattgaagttagtagaatgagagtgcccttaggagtcgttggaataatatatgaatccagaccaaatgttactgcagacgctgcagcactctgccttaagtctggaaatgcctgtttgttaagaggaggatcagaagccattctatctaataaaattatctggaactgtttgcaagaaggcctcaaaaaggccagcttgcctaaagaatgtattcagctcgtagagactactgatagagaggcggtaaaaactttattgcaattagacgactattggacgtagt

SEQ ID NO: 216113 - DNA, 975 bp, Unknown
  Bacterial polypeptide expressing nucleotide sequence isolated from the Sargasso Sea
ccaatcttaagtgcaaataaattagatattgaaaatgctatagcaaatgatttatcaaaaccactaatcaatcgattaaaagttactgaagagtccatagcaagtataattaaaagtattactgaaataaaaaatcaaccagatccaattggatcagttttagaaaactgggaacagccaaatggacttaaattttcaaaaatatcagttcctctgggtgtattaggagtgatttatgaatcaaggcctaatgtaacagtagatgcatcgtgccttgcattaaaatctaataacgcattaatcctaagaggtggaagtgatagctatcacacttcaaaacaattagttaatatcataagagagtcttttatggaggctaatcttccagaaaatataattcaaatgataccaacaactgatagagaggcagttgatcatcttttagcaatgaaagattatgttaatgttatcattcctagaggaggaaaaagtttaattaaaaaaattaatgaaaaaagtaaaatccctgtaattaagcacctagaaggtttgtgtcatgtgtatgttgataaagaagctgacattgaaattgctaagaatattatttttaatagtaaattaagaagaccagaaatttgtggtgcagctgaaacattattaatagactcatctctaaaagaaaaagcacttgaattaatagaacctatatacaaagcaggatgtgtaataaggggtgatgattttataacaagtttagataaaaattttgaaagagcaaataatgaagactggtctactgagtatttagataaaataatatctgtaaaaattgttgatggtgttatgggagccactgatcatattaatcgctattcttctaatcacacagaatcaataattacagaaaacgaccaaacatttatgaatttttttatatatattgatagtgcgataattcttaaaaatgcatcactc

SEQ ID NO: 216114 - DNA, 865 bp, Unknown
  Bacterial polypeptide expressing nucleotide sequence isolated from the Sargasso Sea
agcttttgaaaaattaaacaaagttgatcataaaaaaattaatcgtgtgcttcatgattacaataaagcattattatctaataaaaataaaataataaaagaaaatattagagatataaaaaattctaaaagaaaaaatttaattgatcgattgattcttaacgataaaagaatcgaatctattagacattctataaataaaattgcaaaatttaaaaaccctgtaggaaatatattagcagaatggaaaagaccaaacggtttaaaaattaaaaaaatatctactccgattggaataataggagtaatttacgaaagtaggccgaatgtgacggctgatgttgcatcattgtgcttaaagtctggaaactgcgcaattttgagaggaggatccgaagcctttaattctaatagaattttagcaaatatatttagagattctctagcaaaaaataatatcgataaaaattgcattcaatttattgaaaaaaaagatagaaaaattgttgaatatttattgtcaaaaatgacaaattatattgatgtcatagttccaagaggaggtaaaagcttggtgtcaaaagttcaaaaattttcaaaaatacatgtaattggtcatttagaaggtatttgtcatatttatatagatacagactctaatgtaaacactgcttctaaaattgtattaaatgcaaaattgagaagaactagtgtttgtggcgctttagaaactcttcttattaactcaaaatctttaaaatcgcatggtatccctattatcaaaaaattaatatcttcaggttgttctgttaaggtagataaaaaaattaacaagttatttaacaataaattaaaattagcgaaa

SEQ ID NO: 216115 - DNA, 866 bp, Unknown
  Bacterial polypeptide expressing nucleotide sequence isolated from the Sargasso Sea
aatagcaaggtttaaagatccaattggaaaagttatggaaacatggaggaggccgaataacttaacaattaaaaaagtaactacaccgattggtgttattggagtaatatatgaaagcagacctaatgtaactgctgatgttgcagcattatgtttaaaatcgggtaattgttctattttaagaggtgggtctgaagcatttaattcaaacagattgttagcaagtttgttcagagataatttaaaaaaaaacaatatcaatcaaaactgtgttcaattcattgagaataaaaatagaaaaatagttgatcaactattatcaaaaatgagtgcttacattgatgtgattgtcccaagaggagggaaaggacttgtagcaaaagtacaaaaattttctaatgtacatgtaattggccaccttgaaggattatgccacatttatgttgataaaactgcaaacataaaaatggcaaaagatttaatcttaaatgcaaaaatgagaagaacaagtatttgtggagcagttgaaactcttctgattgaagaaaaagctttaaattcacatgctaaagaaataattaatgctcttttaaattcaggctgtgaagttagagctgataaaaaagttaacaaaatttttaatggaaaactaaaaaaaacaaaagaaaaagattggaggactgaatatttggatgcaataatttcaattaaagcggtcaaaaatgtagattatgctgtcgaacatattttgaaatatggaacgatgcatacagatagtattattactgaaagcaaaaaaaatgctgaaatttttttaaatggtgtaaatagttcaatagcaatgcataatgtttcaactcaatttg

SEQ ID NO: 216116 - DNA, 508 bp, Unknown
  Bacterial polypeptide expressing nucleotide sequence isolated from the Sargasso Sea
attggaaaaaatcggaattaattctcaaaaagcatctaaaaaaaaaataaatataaaaattaaaaacaaggttttaaaaaaatatgcaaatttaattttaaaaaataagttaaaaataattagtcaaaataaaaaagatataaaatatgctaaaaaaaatagtttaagagaaaatcttataaaaagactatttttaaacgataaaaaaattaatgaaatagttaaatcaataaaaaatattatagctttaaaagatcccgttgatattactttgaataaatggaatagaccaaatggtttaaaaattaaaagagtcacagttccttttggaataattggtgttatttatgaaagtagacctaatgttacatctgatgtttctagtctatgtttcaaatctggaaattgcgttattttaagaggaggttcagaagcttatttttctaacaaaatattagttaaattatttaggaaagcactagaaattaataaaattgataaaaacttt

SEQ ID NO: 216117 - DNA, 790 bp, Unknown
  Bacterial polypeptide expressing nucleotide sequence isolated from the Sargasso Sea
taataaagcattgatgaattgcataaaaaaggctcttaaaattaatcaatttaatgaatacatggttcagttgattgagactacagatcgtaaagcgatagataagatgcttgaaatgaacgattatattgatgttattattccaagaggaggtaaaggactaatagaaaaggtcatgtctatttcaaaaattcctatgattaaacaccttgatggtaattgtcatgtttatatagatcataaagctgatttagatatggcatataatataagtataaattctaagatgcaaagatatggagtatgtaatgcaatggaaacacttttagtacataaaagattttctaaaaagtgtctcagaaaaatattaaatacttatcaggaaaacaatattgaaattagagggtgtaaaaatattttaaagcttttgccaaattctaaattagccaagcagagtgattggactcaagaatatttggcgccggtgcttgcaattaaaattgtagattctattgatgatgctgttaaacatataactgaatttggatcactacataccgatgcaattgtatctaatgataaaaattctattgacaagttcaagaggcttgttaattcaagctccgttatgataaacacatcaactcgatttgcagatggctttgaatatggacttggtgctgaaataggaattagtacagataaattacatgctagaggacctgttggattagatggtctgacgaacctcaaatatattgtgtcgagcaaaggtaagattagaagttaa

SEQ ID NO: 216118 - DNA, 788 bp, Unknown
  Bacterial polypeptide expressing nucleotide sequence isolated from the Sargasso Sea
tatggcagccaggtctctttctagtgttcaacgagtaatgataatcaaaaaaattattaggaacttaagaaaaaataatgaaacaattattaagaaaaactcaatcgatattaaactagcgaagaaaaataatctatcagatgcacttatagatagacttcttattaacagcagtagagttaaaaatatgattaatggactcgaagagataaatacaataccagatacactttataaaagaatcaataagtctagacaatctagcggaataactgtcgagcaaatgagagtacctctgggagttattgctatgatttacgaatctcggccaaacgttacaattgatgctgcaggtctatcattaaaatctggtaatagtattattctaagaggaggcagtgaagccataaatagtaatttaatattatctagtcttataaaaaaggctcttcttgagagcaaggtatcaacagatatggttcaaattgttaagactatagatagagctgctgttagtgagcttttgaaaatggagtcttatatcgacgttataatacctcgcggtggaaaaagcttaattaaaaaggtgtcagaagaatctaagattccagtaattaagcatcttgatggcaattgtcatgtatatattgataaggatgctgactttaaaacagcaatgtcatgtacaataaattctaagactcaaaggtatggcgtatgtaattcagcagagtcattattaattcataagagttttcctaaatcttatatcaaagaaattctttata

SEQ ID NO: 216119 - DNA, 736 bp, Unknown
  Bacterial polypeptide expressing nucleotide sequence isolated from the Sargasso Sea
aaatattattcaatttatagaaactatagataggtcagccgtagactacatgttatctcaaatgtcagactatatagatgttgttgtacctcgaggtgggaaaggactagttaaaaaagttcaggattctgctaaaattccagttattggtcatttagatggaatttgtcatatttatgttgatgaaagttcagatcctgaagctgcgagcaaaattgttacaaatgcaaaactaaggagaactagtatttgtggtgctgctgaaacagttttagtcgatgaaaaatgtatagattctcacctaccaaaaattatcaatgacctgaaatctggtgggtgtgaaattcgtggagatgaaagatgtaaaaagaaatttgatgaagtggttttagcatctgatgacgattggaaaacagagtatttagacgccataatttcaattaaaattgttagtggagttgaagacgctatagaccatatagagaaatatgggtctggacatactgagagtattatttcagagagtaaagataatgtagaaaaatttcttaattctgtaggaagtgctatcgttatgcacaatacatctacacaatttgctgacggaggtgaatttggattaggagcagagatagggattgcgacgggtaagctccatgctagggggcctgttggtcttgagggattaacaacctataagtatattgtcagaggaaatggtcagataagaccttaa

SEQ ID NO: 216120 - DNA, 731 bp, Unknown
  Bacterial polypeptide expressing nucleotide sequence isolated from the Sargasso Sea
acttaacaatacttttgttgataggcttttgctagatgataaaagaattgataatattgtggagggcttaaagcaaatttcagaaatgagtgatccaattggcgttgagttatcaaaatggatacaaccaaatggtttaaatatttcaagaatttcagttccattgggtataattggtattatttacgaatcgagacctaatgtaactatagatgctggtagcctatgtattaaatctggtaacactgcaatacttagaggtggatctgactctattaattcttctaaaatattagcaagatgcatgcaaaaaggcctagaaagtgtaaatttacctagttacacggtacaattagttgaaaacactgatagagaggctgtttcagcaatgcttacttcaactggagaaattgatataatcatacctcgtggaggaaaatctctcgttaaaaaaattcaagatgaagcaagagttccagtcttcgctcacttggaagggatatgccatgtatatgtagataaagatgcagatataaataaagcagtaaaactcatagtaaactcaaaaatgagaagaacagggatatgtggcgccttagaaacattacttgtagatagagatatctctgaaaaagctgtgccaattatagttaaaaacttaattgaatcgggatgtcatattaaaggagatattgagactaaaaaaattgtagatgaaattgagttagctt

SEQ ID NO: 216121 - DNA, 904 bp, Unknown
  Bacterial polypeptide expressing nucleotide sequence isolated from the Sargasso Sea
gaaaaaattatacaagaaaataaaaaagatattaaatttgcctctaaaaaaaaaattaaatcaaatttaattgaaaggcttgtgttaaatcaaaaaaaaataaaatcacttaaaaagtcagtgaaagatattattaagctggaagacccaattaataaaattctagaaaaatggagaagaccaaatggattattaataagaaaaatttcaactcctataggtataattggtgttatttatgaaagcagaccaaatgttacttcggatatttcaagtttatgttttaaatctggaaatgctgttattttaaggggaggctctgaagctataaatactaatagaataatagcttcactttttagaaaagccttaaaaattaataaagtagatccaaattttgttcaatttataaacgatagaaatagaaaaatagtagattttatgttgtctaagatggtaaataaaattgatgttattattccaagaggtggcaaaaacttaattaaaaaagttcaaagtatctctaaaataccaataattggtcacctggaaggcatttgccacacttatgttgataaagaggcaaatttaaaaatggcaaataaaattgttcttaacgctaaattaagaaatacaagtatctgcggggcgactgaaactattctatttcataaaaaaattgttaaaaagttttgtaatgaaattttaaaaaatttacataataatggttgtaaaataataggtgataactttttaagaaaattttataaaggaaaaatatatgttgctaaagaaagagattggtcaactgaatatttatctgctactgtttctataaaatgtgttgatagttgtgaggaagctataaaacacattaataaatatggtacaagtcatacagagt

SEQ ID NO: 216122 - DNA, 755 bp, Unknown
  Bacterial polypeptide expressing nucleotide sequence isolated from the Sargasso Sea
ctggaagactgatgaaggattacatattagaaaaattcgttcaccttttggagttattggagttatttatgaagcaaggcctaatgttacaagtgatgtctcaggtctttgtctaaaatctggtaatgctgtaattttaagaggttctagctattgtcttgactcaaatattgccattcttgaagttcttcaaaattcactagttttaaataattgtaataaaaatattttccagataatagaaagtaaagatcgtcaagacaccattgaatttatgaatctcacagaatttgttgatcttattgttccaagaggtgggaagggactaatacaaacactagtagacaactccaaagtaccatttatcttagatggagatggaaatgtacatttgtatatacataaagatgcaaaaaaagaacatattattgatatagttattaattctaaagtgcaaagacctggagtatgtaacgcccttgaaaccttgctgataaacagtgagatctatcaagatatgggcagtttgatcattgaaaaattattagaaaatgaagtagagctatttgtagacgaaataataaaagaagactttccaaatttaaatcttgctaacgactcacattatgagactgaatttttagatttgaaattggcagtaaaagtcgtcgacagtgttgaacaagcaattgagcacattaaaatcttctcatctggacatactgaagcaattttgactgaatcaaaggaagatg

SEQ ID NO: 216123 - DNA, 910 bp, Unknown
  Bacterial polypeptide expressing nucleotide sequence isolated from the Sargasso Sea
atggaaacaaccgaacggtcttgaaatttctagagtaagaaccccgttggggaccattgggataatttttgaaagtaggccaaacgtctctgctgatgcgagcgctctttgcattaaatcaggtaatgctgttgttttaagaagtggtagtgatagcttgagatcttcgcaagccttagtggaatgttttacaagcgcattaaatgatatgaatttaccgataggtattgttcaaatcattccttccaaagatagagcaatggtcactcatatgcttaaaggccttaataatgcaatagatgttattgttccgcgaggtggaaaaagtcttgttcaggccgttcaagattcagcaaccattcctgtttttggtcatttggaaggtatctgtcatacctatattgataaaagtgctgatctcaatacttctatttcagtggtgacgaatgcaaaaatgagacgacctggaatttgcggtgcactagagactttgttgattcataaagattcaagcgaacagttaaatagtattttagatagcctgattgaagcaggatgcgaaattcgtggttgtgaaaaaaccgtagcccttgataatcgagcaacacccgcaaatgacattgattgggatacagaatatctaagcccaatcttaagtgtaaaaattgttgatgatataaatgaggcgattgagcacattcaaaaacatggcacgggtcatactgatgtgatcattagcgaagacaaaaattctcaagactattttattaatcaactggacagtgcgatattgatgatcaatgcgtcatctcagtttgccgatggtggtgaatttggtatgggtggagaaattggaattgctactggaaaatttcatgcccgtgggcctgtaagtctcgaacagctaaca

SEQ ID NO: 216124 - DNA, 550 bp, Unknown
  Bacterial polypeptide expressing nucleotide sequence isolated from the Sargasso Sea
tttggaacagacagtgagcgatataatctatgaaattgctaagaatgctaaaaactcgttagattcactaagaaaaactagtccagagcaaaaaaacgacgctttaaatttttctgctgaagctatagtaaataacttagaagatatattagaatcaaatttaacagatataagatttgcaaaagaaaaaggaatcaaaaaatctctatttcaaaggctagaattggatgagagtaaggtaaaaaaaatttctcaaagccttactgatgtagctaatttatctaaccccttaggcaagatacttgacaacaatcaacggccaaacggattaacagtaaaaaaaattactgtgccaattggagtcataggtataatttatgaatccagaccaaatgtaacggctgattcggctagcctttgcctaaaatctggaaatgcatccatcttgaaatgtggtagcgaaagtttcaataccagtaaaacaatactgaaatatatgaagatgggtttaaaaaaagctaatattactgaagatagcattcaaatgata

SEQ ID NO: 216125 - DNA, 738 bp, Unknown
  Bacterial polypeptide expressing nucleotide sequence isolated from the Sargasso Sea
aaaatatagttcagtatgtaaatacaaccgacagagcggctgttgattatatgctatctaaaatggataaatatattgatgtaattgtccctcgaggcggtaaaggtttagtcaaaaaagttcaggatactgcaaaaattccagttattggtcatcttgatggcatatgtcatctttatgttgatgaaacatccgatccagatgttgcaagtaaaattgtagagaatgcaaaattaagaagaactggtatttgtggtgccgctgaaacagttcttatagacaaaaaaagcattgatagccatttaggtaaaataatagaaactctcattaaaggtggttgtgaagtgagaggtgatagcatatgcatgaattattccgataaagtaaaagaagcgactgaaattgattgggaaactgaatatcttgaagcaattatatctatcaaaattgtaaaggatgtcgatgaagcaattgatcatatagctaaatatggatcaggacatacagaaagtataatttccgaaaataaaaataatgttgaaaaatttttaaactcagtaggtagtgcaattgtaatgcataatgcgtctactcagtttgctgatggaggagaatttggccttggtgcagaaattggaatagcaacgggcaagctgcatgcaagaggtcctgtggggcttgaaggtttgacaacctataaatacattgttcgtggaagtgggcaggtaagaccataaa

SEQ ID NO: 216126 - DNA, 791 bp, Unknown
  Bacterial polypeptide expressing nucleotide sequence isolated from the Sargasso Sea
aatgaaaaaatatatagaaaaaattggagtaaatgcaaaaattgcttttgaaaaaaaaataagtaataaaagaaaaaataaagtattaatttattacacccaacttattttaaaaaatcaaaaaaaaattttagtagaaaatgcaaaagatatagaaattgcaaaatctagaaagctaaaagataacttgattaaaagactcgcgcttaataaagttaaaataaaatcaattgttaaatcaattaaaacaatagcaaattttaaagatccagtagatgtagatatagaaagctggaaaaggccaaatggcttaaaaataaagaaagtatctattccaattggtgtgattggtgtaatttatgaaagcagaccaaacgttacttctgacgtatccacactttgttttaaatctggaaactgtgttattttaagaggaggctcagaagcttattttagtaataaaattttagcaaatctttttagaaaatcattagaaaaaaataaaataaataaaaactttgtacaatttattgaaaataaaaatagaatgctagtagacttaatgctttctaaaatgtcaaaatacattgacgtaataattccaagaggtggaaaaaatcttgttaaaaaagtacaggatttatcttctgtaccagtaatagggcaccttgaaggtatgtgtcacacatatattgataaagatgcaaatcttgcaatggcaaaaaatatcttaatcaatgctaaattacgtaatacaagtatttgcggagctactgagacactgttaatac

SEQ ID NO: 216127 - DNA, 874 bp, Unknown
  Bacterial polypeptide expressing nucleotide sequence isolated from the Sargasso Sea
ttcaaaagatagaaatttagcaatattaaatatatctaaaattataaaacaagaacaagaagagattcttaaagcaaacaaaattgatataaataatgctaaaagaaaacaacttaacaatgcttttattgataggcttttactaaatgataaaagaattgatgatattgtggagggcttaaagcaaatttcaaaaatgagtgatccaattggcgttgagttatcaaaatggacacaaccgaatggtttaaatatttcaagaatttcagttccattgggcataattggcattatttacgaatcgaggcctaatgtaactattgatgctggcagcctatgcattaaatctggaaatacagcaatacttaggggtggatctgactcgattaattcttctaaaatattagctaaatgcatgcaaagaggcctagaaaatgccaatttacctggtaacactgtacaattagttgaaaatactgatagaaaggctgtttcagcaatgctaacatcaactggggaaattgatataatcatacctcgtggagggaaatctcttgttaaaaaaattcaagatgaagcaagagttcctgtcttcgctcacttggagggaatatgccatatatatgtagataaagatgcggatataaacaaagcaataaaaatcattgtaaactcaaaaatgagaagaacagggatatgtggtgccttagaaactttacttgtagatagaaatatctcaaaaaaaactgtaccaatcatagttaaaaagttaattgaatcaggatgtcatattagaggggatattgagacaaaagaaattgtaaatgaaattgaattagcatctgaaaaagactggtatactgaatatcttgat

SEQ ID NO: 216128 - DNA, 745 bp, Unknown
  Bacterial polypeptide expressing nucleotide sequence isolated from the Sargasso Sea
atgacaatttcacagcaaatgacattgattggtaagaatgcaaaagtttcttctcaatttttaaggaggttagcggagaagagaaaaaatgaaattttagctataataagtgaattaattcaaaataataagaatctcataatcgagcagaataaaaaggatatggagtttggggctaataaaaatttatcagaatctatgttggacagattatatatagacgaaactaggctaaatgccataataatgggtttagaggaaataataacgcttcctgatccaattggtaccgtaattgaaaaattctcgagaccgaacggtttgaaaattaaaaaagtacgaacaccaattggtgttatcgggattatttttgagagtagacctaacgtttttgttgatgctgcagcgttatgcttcaaatcaggaaatgcaagcgtattgcgttgtggttctgagagttataacacttcactagctctagaaagttgcttcatttcaggttttaagaaagcgggaatacctgaattttgtactcaattaatacctactagagatcgtctagctgttgaagaaatgttaaagatgaatgaattttttgatgtcattgttcctcggggtggcaaaggcttagtaggtttagttcaagaaaaagctcaggtgccaatttttgctcatttagaaggcatagtccacatatatgtccattctgacgctgatcctgagaaggcaagagaggttatttaaa

SEQ ID NO: 216129 - DNA, 797 bp, Unknown
  Bacterial polypeptide expressing nucleotide sequence isolated from the Sargasso Sea
aatgcaacaattaaaaaaaattggattaaacgcaagaaaagcttttgaagagctaaaaatcgtaaaacactctaaaattaaaaaagttttaagtgattataataagattttgttaaaaaataagaaaaaaatcatagcagaaaatcaaaaagatataaaaaatgcaaagcgtaaacaattaatagataggttgattttggatgaatcaagaattgaaaatataagaaactcaatcaaccaaatagaaaaatttaaaaatccagtaggcagaatattggatagttggcaaaggccaaacaaattaaagatacaaaaagtttcaacaccaattggagtaataggggttatttacgaaagtagacccaatgtgactgcagatgtggcggctttatgtttaaaatcaggaaattgttctatattaaaggggggatctgaagcgattaattcaaataaaattttagctaatctttttagagacgcgcttcaaaaaaataatatcaataaaaattgtgtgcaatttattgataataaagatagaaaaattgttgataatctactttcaaaaatgagtaaatatatcgatgtaattgtccctaggggcggaaaaggattagtttcaaaagttcaaaaattttcaaatatacatgtaattggtcatcttgaaggattgtgtcatatttatattgataaaagtattaatttgagaatggctaaaaaagtaattttgaattccaaaatgagaagaactagtatatgtggagcggtagagacattactcatagatcaaaaagccatta

SEQ ID NO: 216130 - DNA, 616 bp, Unknown
  Bacterial polypeptide expressing nucleotide sequence isolated from the Sargasso Sea
agccgtgaggcgcgggtgccggtcatcaagcatctggacggtatctgtcacgtgtatgtggatgatcgcgccgattttgacaaggccgaagccattgtcatcaacgccaagacccaccgttatggtgtgtgcaacgcgatggaaaccctgttggtcaatgaggccattgccgggcctttcctgcagcgcgtggcgccgctgtatgcggccaagggtgttgaactgcgtggctgcccggccacctgcgcgctgttgcctgacgccgttgcggcaaccgaggaagactggtcgaccgagtatctggcgccgattctctcgatccgcgtggttgctgatatggatgcggccatcgagcatatcaatacctacagctcgcaacacaccgacgccatggtgtccgaggattacacccgggcccgccgcttcatcgccgaggtggactccagctcggtgatgatcaatgcctcgacccgctttgccgatggtttcgagtatggtctgggcgctgagatcggtatttccaccgacaagattcatgcccgtggcccggttggtctggaagggctgaccagcgagaagtacgtggtcttcggcgacggtcatattcgtcagtgag

SEQ ID NO: 216131 - DNA, 1249 bp, Unknown
  Bacterial polypeptide expressing nucleotide sequence isolated from the Sargasso Sea
aatgaaaaattatttaaataatattggaaaaaaatctaaaaatgcttttaaaaatttaggtaatgtaagtctaaagaaaaggaataaagtactagagacttatataaaatctttaaaaaataataaaaataagattattaaagaaaatttaaaagacataaaactttgtaagcgtaaagaattaatagatagactaatccttgatagtaagaaaattgaaagtataaggagttcaatttatgaaatcataagatttaaagatcctttaggaaaagtaattgaaaagtggaagagaccaaataacttaataataaagaaagtttctgttccaattggtgtaataggaattatttatgaaagtagaccaaatgtaactagtgacgtatcttctttgtgtttaaaatctggtaatgttgctattttgagaggtggttctgaatcgttgaattcaaataaaattctagcaaatatttttagaaactctcttacaaataattatgttgataaaaactgtattcaatttatcgataaaaaaaatagaaaaattgtagattttcttttatcgcaaatgtcagattatattgatgttatagttccaagaggaggtaagagcttagttaaaaaagtacaaaaaatctcgaatgtaaacgtaattggacatttggaaggcaattgtcatgtatatgttgataaagatgctgatctaaacatggcaaaaaaagtagttttaaattcaaaaatgcgaagaacatcaatttgtggtgcagcagaaactttgttaattcatgataaatgtttgaggtctcattcacttccaattattagagagttaatcctaaaaggatgtgaagtacttgtagataaaaaaataaacaaatattttaataataaacttaagttagctaacgaaagtgattggagaactgagtatttatcacctaaaatatctataaagagcgtaaatggagtaaatgaagctattaaacatatattaaaatatggaacaatgcataccgatgctatcattactcgaaatacaaaaacggcaaatatatttttaaacggaataaatagttcaatagctgttcataatgcgtcgacacaattcgcagatgggggtgaatttggatttggtggagaaattggtatatcaacaaataagttgccacctagaggtcctgtaggcataaatcagcttacttcatataaatatatggtcttaggaaaaggtactataagaccgatataa

SEQ ID NO: 216132 - DNA, 1102 bp, Unknown
  Bacterial polypeptide expressing nucleotide sequence isolated from the Sargasso Sea
atgaaaaattatttaaaaaaaataggttttaaatctaaagaggcttttaaaaatctcaacaatattaactctgataaaagaaataaagttttagaaacgtacaataaagaattaggaaagaaaaaaattaaaattataaaggaaaatgagagagatattaaaagatgcaagcgtaaagatatgattgatcgacttattatagataaagacaaaatagaagctattagattttctttaaatgaaatttcaaaatttaaagatccaattgggaaaataataaataaatggaaaagaccaaatggactaacaataaaaaaagtgagtatacctattggtgttattggtgtaatttatgaaagtaggccagatgtaactccttatgtatcatccttatgcttaaaatcaggaaatgtagccatattaaaaggggggtctgaggcaattttttcaaatgctatattttcaaacctatttagagattcattaaaaaaaaataatgttaatcaaaattgtttacaatttataaataaaaaaaatagaagaatagttgactatttattatcacaaatgtcggactatatagatgttattgtacctagaggcgggaaaggtcttgttgagaaagtaaaaaaattttcaaatgtgaatgtgattggtcatttagaaggtaactgccatgtttatgttgataaagactctaaaattgaaatggctaaaaagcttgtcttaaattctaagatgagacgaacatctatttgtggagctgccgaaactctattaataaatgaaaaatgtataaaatcacatggtattccaataatagaagaattaatatcttacggatgtgaggttatcgtagataaaaaaataaatagaatttttggaaataatttgaaaatagcaaaagaaattgactggaaaacagaataccttagtccaaaaatttctataaaatcagtgaaagatacaaaagaggctataaaccatattttgcaatatggaacaatgcatacagactcgataattacaaataataaaaaaactgctaaattttttttaaatagcaataatagttcaattgctgttcataacgcttcaactc

SEQ ID NO: 216133 - DNA, 1246 bp, Unknown
  Bacterial polypeptide expressing nucleotide sequence isolated from the Sargasso Sea
gagtaaatatttaattactttaggaaatagagcaaaaattgcatttaaaaataaaatagatagtaaattaaaaaataaagttttaacagattattataaactaattataaaaaataaaaaaagaataattaatgaaaataaaaaggacattaaatttgcagaaaaaaagaagttaaaagaaaatttaattaaacgattatctcttaatgttgaaaaaattaattctattattaattcaattaaaactattttgaatttcaaagatcctattaatcaagaactagatacatgggtaaggccaaataaacttaaaataaaaagagtaactattccgattggcattattggtataatatacgaaagcagaccaaatgtaacagcggatgtttcaactttatgttttaagtcgggaaattgtgtaattcttagagggggttctgaagcttattttagtaataaaattttagcaaatctttttagaaaatcgttagaaaaaaataaaatagataagaattttgtgcagtttatagacaaaaaaaatagaaaattggttgattttatgctttctaaaatggacaaattcattgatgtaataatcccaagaggtggaaaaaatttggtaaaaaaagttcaaaacttatcttctgttccagtaattggtcatcttgaaggaatgtgtcacacttatatagataaagatgcaaatataagtatggcaaaaaaaatattagtaaatgctaaattgagaaatactagtatttgtggagccactgaaacagtattaattcacaaaaaaaattcgaatgttataaacgatctattaaatgtattatcagaaaaaaattgtattatttatgcggacaaaaaaattaaaaaaatttatagaggaaaggcaagagatgcatcaaatagtacatggaaaaaagaattcttatcatcaaaaatttcagtaaaactagttaataacattaatgaagcaatcgaacatataaataaatatgggacaatgcatacagatgcaattattactaaaaataaaatatctgcaaaatattttataaaaaatgtgaaaagctctattgcaatgcataatacatcaactcaatttgctgatggaggagagtttggttttggtggtgaagtaggaatatcaacaaataagcttccgccaagaggaccagtagggcttaaccaactcgtaagttataagtatgaagtatatggcgcaggtcaaatcagaaaataa

SEQ ID NO: 216134 - DNA, 884 bp, Unknown
  Bacterial polypeptide expressing nucleotide sequence isolated from the Sargasso Sea
aatgactcagagtaaagaaataaatacttatatgaatcggttaggatctgaagcaaaagaagcttctttaatcttagcccaagcttccttagagcaaaaaaatgaggcactgagctgcatttcggaacaaatagaatctgatagggatgaaatattaagcacaaataagaaagacttagatttagctaaacaaaaatctataggatcagctctcattgatagattggaactaaatgacagcagaattaattctatgatctctggattgcaggttgtttctgagttacctgatcccgtaggagaaattactgatttagatcctacgccttcgggaattgaagttagtaaaatgagagtgcccttaggagttgttggaataatatacgaatcaagaccaaatgttactgcagatgctgcagcactctgccttaaatctggaaatgcttgtctattaagaggaggatcagaagccattctttctaataagatcatctggaactgtttacaagaaggtcttaaaaaagccagtttacccaaggaatgtattcagctcgtagagaccactgatagagaagctgtaaaaactttactgcatctagatgattatttggacgtcgtcattcccagaggaggcaaaggtttggtacagcttatttctgatgaatcaaaggtgcctgtaataaaacacttagatggaatttgtcatgtatacatagacgaggaagcagatataaaaaaggctgaaaatattgcttttaatgcgaagacctacagatatggaatatgcggtgctatggaaacgcttctagttcattcttcagtagcatctttacttctgcccagcttagaagatagattttcttcggagggagtggaagttagag

SEQ ID NO: 216135 - DNA, 1252 bp, Unknown
  Bacterial polypeptide expressing nucleotide sequence isolated from the Sargasso Sea
tatgtcattaagattagaaaatattgtaaagaattcaagaatagcttttgaaagcaatattgactcaatcaaaaaagacagggttttaaataaattcacaaatttaatattaagaaataaaaaaaaaattttaaaagagaatcataaggatataaaatttgccaagaataaaaaattaaaggaaaacttaattaaaagactagaaataaacgatagaaaaatcaatgatattataaaatctataaatcaaataattaaaataaaagatcctacaaataaagtcttggaaaaatggaaaagaccgaacaagttagtaattaaaaaagttactattcccattggagtaatagcagtaatttatgaaagcagaccaaacgtaacctcagatgttgcaagtttatgttttaaatcaggaaatgctgttattttgagaggaggatctgaggcttataatactaataaaattatttctaatttatttagaaagtctttaaaggtttgtggtgttgatcaaaattatgtccaatttattgaaactaaaaatcgaaaaatagtagataatattctttctaaaatgaaaggttatattgacttagtaattcctagaggaggaaaatcattagttaagaaagtagataagttatctacagtaccttacattggtcatttagaggggatttgtcatacttttattgataagaaagcaaaacttaaaatggcaattaatgtattggaaaatgcaaaattgagaaatactagtatttgtggagcaaccgaaacagtgttattccataaaaatattgcaaaaaaatttattaatcctgttttaaaaaatttgaaaaaaaagggttgtaatatttatggagataaatctataaaaaagatatttaaaggtaacatgaatttagccagtaataaaaattggtctacagagtatttatcttcaaatatatctgcaaaggtagtgaaggatgttaatgatgctgtgaaacatattaatcaattcgggactatgcatactgatgctattattacagctgataaaaaaacagcaaattattttttaaaaaacataaaaagttcaattggtatacataactcttcgactcagtttgcagatggtggtgaatttggttttggcgctgaagtaggtatatctactaataatttacctccaagaggacctgtgggcttaggtcagcttgttagttataaatatgaaatctatggtaatggtcaaataagaaagtaa

SEQ ID NO: 216136 - DNA, 1252 bp, Unknown
  Bacterial polypeptide expressing nucleotide sequence isolated from the Sargasso Sea
atggatatatatttaaaaaaaattggtgttaatgctcatatagcatttaaaaaaaaaatagatactaaaattaaaaataaagtattaaataaatatgctgatctaataaataaaaataaatttaaaattattaatgaaaataaaaaagatataaaatttgccaggaaaaaaggtttaaaggaaaattttataaaaagactaaatttagatctaaaaaaaattaaccaaataattaaatcgataaaaattatctctaaattaaaagatccaataaatgtaacgctttcaaaatggtcaagaccaaatggtttaaaaataaaaagagttactattccattgggagttattggtgtaatctatgaaagtagaccaaatgttaccgcggatgtttcaagtttatgtttcaaatcaggaaattgtgtaattttaagaggaggttctgaagcttatttttcaaataaaatattggcaaatttatttagaacttctcttaaaaatagcaaaattaatcccaattatgttcaatttgttgatagtaaaaatagaaaactagtagatgttttattatctaaaatggaaaaatatatagatgtaataatacctagaggtggaaaaaacctggtaaaaaaagttctaaaactgtgttcagtgccaataattggacatctcgaaggtatttgccatacctacatagataaagaagcaaatttaaattcttctatcaaaataatacataatgcaaagcttagaaatacaagtatatgcggtgcaacagaaacaattttgattcacgaaaaaattctaaaaaaatttataaatcctgttttaaataaacttatcaatgaaggttgtgttatttttggtgataaaaaaataaaaagaacattcgaaggaaatatcttaaatgctaaagagaaaagttggtcgaaagaatatctgtcagctaaagtatctgttaagtctgtaaaaaatgttatagatgctgtaaatcatataaataaatatggaacaatgcatacagatgcaattattacaaaaaataaaaaagtagcaaaatactttttaaaaaatgtcaaaagttcaatagcaatgcataatacttcaacacaatttgctgatggaggtgagtttggatttggtggtgaagtcggtatttcaactaatactatgccgccaagaggacctgtaggtttaaatcaattaatttcatataaatatgaagttctgggaaaagggcagataagaaattaaa

SEQ ID NO: 216137 - DNA, 1276 bp, Unknown
  Bacterial polypeptide expressing nucleotide sequence isolated from the Sargasso Sea
tctggcccgcgcctcaagcctgaggcgtcatgccattgatttggcgcagtgcatcgatcagcagcgccaggaggcactgctggccatggccgaagccctggagcaacagcgcgatttgatcctgaaggccaatcaggcagaccgtgaagcggccgagcaggaacagctggctcctgccttgctctcccgtctcaagctcgatggccccaagcttgatggggcgattgctggcataaggcagttggcccagctggctgacccactcgctcagcggcaattgcaccgggcccttgatgaggggcttgtgctcgagcgcgtcagcgttccccttggtgtggtcggggtgatttttgaagcgcgccccgacgctgtgatgcagatcgctgccttggcgattcgctctggcaatggcgccatcttgaaaggcggacgcgaggccaaccgcagttgcagcgcaattctgggcgctctgcagcaaggtctaagccgttcgtcagtccatcccgatgtcttggcgttgctcactagcagggaagagagcttggcgctgctcaagttggaaggattggtggatttgatcatccccaggggatccaatgccctggtgcaattcattcaggacaacacccgtatccctgtgttggggcatgctgacggtatttgtcatctctacatcgatcggcaggtcgacctcgatcaggctgtgacggtggctgtcgatagcaagtctcaatacccagcagcctgcaatgccattgaaaccctgctcctgcaccaggaggtggccccggcttttatggctgcagcgctgcctgcatttgccaaggtaggagtggagttacgtggtgatcctgttgccatggctctgggtgtaagccatgccgcgagtgatgacgactggtccaccgagtatctcgatctggtgctcagtattcgcgtggtggattcgatggaccaggccctcgatcacatcgctcgctacagctcacgccacaccgaagtgatctgcaccaccaattcccaaacagccgagcgcttcctctcccgggtggatagcgctggggtctatcaaaactgttcatcgcgttttgctgatggttttcgctacggctttggcgctgaagtgggcatcagtacccagacgctgcccccgcgcggaccggtgggcttagagggcttggtcacctatcaataccgcttgcgcggcgatggccatctggctgctgattacgccagtggtgagcgccagttcacgcacaaaaacctgccgttgtga

SEQ ID NO: 216138 - DNA, 1252 bp, Unknown
  Bacterial polypeptide expressing nucleotide sequence isolated from the Sargasso Sea
aatgaataattatatgaatttaatcggtaaaagagcaagaaaagcaagtcaatataaaatagacacaaaaattaaaaataatgttttagcctcctatgctaaaatgcttgacgaaaataaaggtttaataattaaagaaaatactaaagatattaattatgcaaaaaaaataggattaaaagaaaatttaattaatagacttcatttaaatgagaaaaaaataaacgacatcaaaagttctattattagtattattagatttaaagatcctattgatcatgttttagaaaagtggaaaagacctaatggattaaatattagcagagtatcaattccaataggggtgattggcgtaatttatgaaagtagaccaaatgttacatcagatgttgcaagtttatgtttcaaatcaggtaatgcagtaatcttaagaggaggttctgaagcaatcaattcaaatagagttttgtcaaaactatttaaaaaagcgctcaaaaaaaataaagtagatgaaaactttatacaatttatagactctaaaaacagaaagatggttgatataatgctttctaaaatgaaagaatatattgatgttataattccacgtggtggaaaaaatcttgtaagaaaagttcaagagctttctaaggttcctattattggtcatcttgagggtatttgtcatacatatgtggacaaagacgctgaactaaagatggcaaataaagttgtttctaacgcaaaattaaggaacaccagtatatgtggtgcaactgaaactattattatgcataagaatattgtcaaaaaatttagcaatacaatcctgggtaatttagaaaaaaatggttgtaaaatttatggagaaaagactttatctaaattttacaaaggtaaaatttttaaagctactgaaaaggattggtctaaagaatatttaagctctgcagtttcggttaaaatagtaaacaacctcaatgaagctataagtcatattaacaagtatggaacaatgcatacagattcaataattacaaaaaacaaaaaaacggcaaatcaatttctaaaagaagtcaaaagctctattgctatgcataacacttcaactcaatttgcagatggaggtgaatttgggttcggaggagaagttggaatttctaccaatgtgcttcctccaagaggacctgtgggacttaatcaacttgtttcatataaatatcaaattacaagtaacggcaaaataagaaattaa

SEQ ID NO: 216139 - DNA, 1114 bp, Unknown
  Bacterial polypeptide expressing nucleotide sequence isolated from the Sargasso Sea
cttgaagctaataaaatagatttagaaaatggtaaaaataaatctttagccaatcctttaataaatagacttacgctaacggataaatctattgacggattgataacatcaattgaagatataattgaaataccagatccaattggaattacattagaaaaatgggaaagacctaatggtttgcagtttcgtaaaatttcaacacctcttggtgtattaggcgtgatttatgaatccagaccgaacgttactgttgatgcgtcttgtctttcaataaagtctggtaattgcataattttaagaggtggaagtgatagtttttattcttctaaggaattagttaataatataactaattctttcatggaagctggtctgcctgaatattgcgtccaaatgatcaatactcctgaaagagaagctgttgatcatttacttagtatgagagattatattgatgtaattattccccgaggtggaaaaagtttaattgaaaaaattaattctgcaagcaagatacctgttatcaaacatctagacggcatatgtcacgtgtttgtagatagagatgccgatttaaagattgcagaaaaagtagtttttaatagtaaaatgaggcgtcctgaaatctgtggtgcagcagagactcttttgatagatgaaaaaattaaagatgaagcaatgaagatattaaaccctttaaaagaggtaaactgtgaaattcgaggagattcatttatacagtctctggatggcagttttaaaagtgcaaaagaggaagattggtctacagagtatttagataaaatactatcagtaaaaattgttaagggtattgatgaagcagtaatgcatataaataattattcgtctggacatacagaaagtataatcactaataacgaagttacttttgaaaaattttataataaaattgatagtgctataattctcaaaaatgcatctacacaatttgctgatggaggtgaatttggctttggagcagaaattggaatatcgactgataaaatacatgtaagagggcctgtaggaacaaaacatttaacaacattcaaatatgttgttaatgggaacggccaggaaagaccgtaat

SEQ ID NO: 216140 - DNA, 1216 bp, Unknown
  Bacterial polypeptide expressing nucleotide sequence isolated from the Sargasso Sea
aatgaaacaatatttaaatttgttaggaaaaaagtctaaaaaagcttttttaaataaaatcaatacaaaaactaaaaataaagtattgaataattttgcttccttaattaataaaaaaagaaaattaattatacttcaaaataaaaaggacattaaaaacgctaccaaaaaaaaacttaaagaaaatttaattagtagattgatacttaataaaaaaaaaattgatcaaataataatttcaataaaaaatatttcaaaatttaaagatccaacaaatatttctttaagtgaatggatgagacctaatggtctaaaaataaaaaaagttacaataccaattggtataattggagttatttatgaaagtagacctaatgttacatctgatgtatctagcctttgttttaaatctggtaattgtgttattttacgaggcggatcagaagcttactttacaaataaaatattagtaaatttgtttagaaaatctcttaaaaaaaataaagtagatgaaaattatgtgcaatttattgatacaaaaaacagaaaagctgttgattttatgctttctaaaatgaaaaattatatcgatataattatacctaggggtggaaaaaatttagtcaaaaaagtacaaaagctttcaaatgtacccgtaataggacatttggaaggaatttgccatacttatgtggataaagatgcgaatttgaatatggctgtaaaagttttattaaatgcaaaattacgcaacacagctatatgtggggcaaccgaaacaattttattacataaaaaaattgttaaaaaatttgctaagccaataataaaatctttagaaattaataactgtcaagtttttgcagatagagaaataagaaaaacatataagggaaaatcaaaattagcttctaaaaaagattggtcgacagaatatctttcatcaaaagtatctataaaaacggttaaaaatattcaagaagctataaatcatattaataaatatggtaccatgcacacggatgcaataattaccaaaaataaaaataatgcaaaaatatttctaaattatgtaaaaagttctatagcagttcataatgcatctacgcagtttgcagatggtggagaacttggatttggtggagaggtaggaatttctactaataaaatgccaccaagaggtcctgtaggattaaatcaacttgtatcatataaa

SEQ ID NO: 216141 - DNA, 1249 bp, Unknown
  Bacterial polypeptide expressing nucleotide sequence isolated from the Sargasso Sea
gatgagtaaattattaaataaaattggacaaaattctaaaatagcttttagaaatagaattaatttaaaaaaaagaaataaagtattaaaagatttttgtaatttaataattaaaaatgagcaaaaaattatcttagaaaataaaaaagatattaaatttgcaaaatcaaaaaaattaaaagaaaatttaattaaaagactttctttaaattctgaaaaaataaattctataataaaatcaattcatacagtaattaaatttaaggatcctttagataaagaattaaataaatggaaaagaccaaatggtcttaaaataaaaagagtgactataccgataggcgttattggaataatatatgagagcagacctaatgttactgctgatgtttcaacgctatgttttaaatctggaaattgtgtaattttaagaggaggatcagaggcttattatagtaataaaattttagcaaatctatttaggcaatcattaaaaaagaattctttaaatatgaattttgtccaatttattgaaaacaaagatagaaaattagtagattttatgctttcaaaaatgaataactatattgatgtcataatccctagaggtggaaaaaatttggtaaaaaaagtacaagacttatcatctgtcccggtaataggtcatcttgagggggtatgtcatacatatattgataaagatgcaaatataagaatggcaaaaaaaattataataaatgctaaaatgagaaatacaagcatttgtggagcgactgagacattgcttattcacaaaaaaaattcaaaatttgtaaataatattttacaggaattgagagaaaatggttgtgagatatacgcagactcaaaagttaaaaaactatatctaggaaaaacaaaaacagcgaatgaaaagttatggtctagagaatttttatctgcaaaaatatctgtaaaacttgttaacgatatttatgaagctattcatcatataaataaatatggaactatgcacacagattcaataataactaaaaataaaaagtcagcaaagatattcattaaaaatgtgaaaagttcaattgcaatgcataactcttcgactcaatttgctgatggaggtgaatttggatttggaggtgaagttggaatatctacaaataaacttcctccaagaggtccggttgggcttaaccagcttgttagttataaatacgaggtttatggttcaggtcaaattagaaaataa

SEQ ID NO: 216142 - DNA, 697 bp, Unknown
  Bacterial polypeptide expressing nucleotide sequence isolated from the Sargasso Sea
ttggaggaaaataaaaaagatattaaatttgctaggaagaaaaaaattaaggataatttaattaaaagactagaaatgaatgagggaaaatttaatagtattattaaatcaataaaagaaattattaaaattaaagatcctacaaataaaatattagaaaggtggaagagacctaatggtcttataattcagaaagttactgtgccaattggtgttatagctgtaatttatgaaagtagaccaaatgtaacttccgatgttgctagcttatgttttaaatcaggaaatgcagtaattttgaaaggtggatcagaagctttcaatactaacaaaattatttctgatttatttagaatgtctttaaaaaaatgtggagtaaataaaaattatgttcagttcattgagtcaaaagatagaaaagtagtcgataaattgctatctggtatgaagggatatattgatttaataattccaaggggtggaaaatcattagttaaaaaagtggatacattatctaaaattccatacattggtcatctggaaggtctatgtcatacatttattgataaaaatgctaaactcgatatggcaataaaagttttagaaaatgcaaaattgagaaatacaagcatttgtggagcaactgagactgtactatttcatagagcaattgctaaaaaatttattaatcctgttt

SEQ ID NO: 216143 - DNA, 1234 bp, Unknown
  Bacterial polypeptide expressing nucleotide sequence isolated from the Sargasso Sea
atgattggcaaaaaggctaggagagcaatcgaaaataaggttgatagtacaacaaaaaataaagtcttaaaaaaatttttagttcttttaagaaaaaacgaaaaaaaaattctacgacaaaataaaaaagatattaagtttgctaaaaagaaaaaacttaaaacaaatttgattgacagattagtgttaacttcaaaaaaattagagtctataaaaaaatcagttaaagacattattaaattaagagaccctgtagataaaattttggataattggaaaagacctaatggattaaatattaaaaaagtttcaacacctattggtgtaattgctgttatttatgaaagtagaccaaatgttacctcagacatatcaagcttatgttttaagtcaggaaatgcggtaattttgagaggaggttcagaagcaataaatactaataaaattttatcttcattatttagaaaggccttaacaatgaataaggtcaacccggactttgttcaatttataaacgatagaaatagaaaaatagtagacttcttgttagctaaaatgactaaagagatagacgtgattataccaagaggtggtaaaagtttagtcaaaaaagtacaaacgatatctaaattaccaataattggtcatttagaaggaatttgtcacacatatattgataaagacgcaaatttaaaaatggctaacaaagttcttcataatgctaagctaagaaatactagtatatgtggtgcaacagaaacagttttatttcataaaaaaattattaagaaattttgcaatatagttttaaaaaatttgcaagatagcaattgcaaaattttgggagataatttaataagaaaattttttaaaggaaaaatatattcagcaaaagataaggattggtctacagaatatttggctcctacaatttctgctaaatctgttaatagttgcgaggaagcaataaaacatataaataaatatggaacatcccatacagaatcaataattacaaaaaataaaaaaacagctcaaaaatttattaaaaatatcaatagttcgatagttatgcataatacatcaactcaatttgctgacggtggagaatttgggtttgggggtgaagttggaatttcaacaaataatttaccaccaagaggtccagttggattaaatcaattagtttcatataaatatgaagttcatggaaaaggccataccaggaaataaa

SEQ ID NO: 216144 - DNA, 1243 bp, Unknown
  Bacterial polypeptide expressing nucleotide sequence isolated from the Sargasso Sea
atgaaatatcttgaaaaaataggacaaaacgcaaaaaaagcctttaaaggattaaaggctattaaacattatcaaattaagtcagttttagaaaattttaataaagctattttaaataataagaaaagcataataaaagaaaatttaaaagatataaaaaatgttaaaaggaaacatttagtagatagattaattttaaatgagataagaattgatggaattagacattctattaatgagatagctaagtttaaaaatcctattggtcgtgtattagaaaaatgggaaagacctaataaacttaaaattaaaaaagtttcaacaccgataggagttataggtgtaatttatgaaagtagaccaaatgtaactgcagatgttgctgcattgtgtattaagtctggcaattgttcaattttaagaggaggatctgaagcctttaactcaaacaagatactagctgatttattccgtgataccttgagtaaaaaaagaattgataaaaactgtgtacaatttattgaaaaaaaagatagaaaaattgttgatatgcttctttcaaaaatgagtaaatatatcgatgttatagttccaagagggggtcgagggttggtagaaaaagttcaaaaatattctaatgtccacgtcataggtcacctagaaggattgtgccacatctatattgataaatattcaaatttagaaatggcaaaaaaaattgtaatcaatgctaaaatgcgaagaacaagtatatgtggtgcgctagaaactttattaataaatgagaaagtattgaattctcacggtaaagcaattattcaatcattaattttttctggatgtgaagttcgtgtagacaaaaaaattaataatatgtttcataataaacttaaactagctaatgaaaatgattggagaacagaatatcttgattctataatatcaattaaaacagttaaaaacactcaagatgcaattagtcatattttaaaatatggaactatgcatactgatagtattattacaagtaattctagaaacgcaaaaatttttctagacggagttaacagttcaattgcaatgcataatgtttcaactcaatttgctgatggcggtgaatttggatttggtggtgaaataggaatttcaactaacaagctccctcctagaggaccggtaggaattaatcagttaacttcatataagtacattgtatctggcaaaggggttgtgagaccatagc

SEQ ID NO: 216145 - DNA, 954 bp, Unknown
  Bacterial polypeptide expressing nucleotide sequence isolated from the Sargasso Sea
gcatgggaaagacaaatggattaagttttagaaaaatttcaactccattaggagttcttggtgtaatttatgagtctaggccaaatgtcactgtagatgcttcttgtctttctatcaaatcaggaaattgtataattttaagaggaggaagtgatagttttcattcttctaaagaacttgtaaacaatataaaatactcatttaaagatgcaggtctccccgagtattgtgttcaaatgattgatacgcctgaaagagaagctgttgattacctattaaaaatgaatgattatgttgatgtaattatccctcgaggtggtaaaggtcttattgaaaaaataaattctacaagcaaaatacctgttatcaaacatttggatggcatatgtcacgtattcgttgataaagaagctgatttaaaaattgcagaaaaagttgtttttaacagcaagatgagacgtccagaaatttgtggagctgcagaaacgcttttaatcgatgaaaatataaaagataaagcaattaatattttaaatccacttaaagcagttggatgtgagataagaggtgatgagtttattcaatcattagacaaggattttaaaattgcaaatgaagaagattggtcgttggaatatctagataagattatatcagcaaagatcgtatctggggtagatggagcaatcgatcatatcaataattattcctctggtcatactgaatcaataattactaataatgaaaaaacatttgaaaaattctttaataaggttgacagtgcaatcattcttaaaaatgcatctactcaatttgcagatggtggagaatttggatttggggcagaaattggtatttcaactgataaaatacatgttagaggaccggttggaacaaaacatttaaccacatttaaatatgtcgttaatggcaacggtcaagaaaggccatagt

SEQ ID NO: 216146 - DNA, 1111 bp, Unknown
  Bacterial polypeptide expressing nucleotide sequence isolated from the Sargasso Sea
atgagcaaattattaattaaaattggaaaaaattctaaattagcatttagaaataaagttaattcaaaaactaaaaacaaagttttagaagatttttgtaaattaataattaaaaataaaaacaggattatcttagaaaataaaaaagatatcaattctgcaaaattgaaaaaattaaaagaaaattttattaaaagactttctttaaattctgaaaaaataaattctataattaaatcaattaaaacagtaattaaatttaaagatcctgttgatttagaattaaaaaaatggaggagaccaaacggtctaaaaataaaaagagtaactataccaataggtattataggaataatatatgaaagcagaccaaatgttacagcagatgtttctactttatgttttaagtcaggtaactgtgtaattttaagagggggatctgaagcatactttagtaataaaattttagctaatttatttagacaatcattaaaacaaaacaaggtagataaaaatttcgtacaatttgttgatcaaaaaaatagaaaattagtagattttatgctttcaaaaatgaataaatttattgatgtagttatccctagaggtgggaaaagtttagtaaaaagagtacaagacttatcttcagtccccgtaataggtcatcttgaaggaatatgtcatacatatattgacaaagaagcaaatctcaaaatggcaaagaaagttttaataaatgctaaattaagaaatactagtatttgtggagcaacagaaactttgctaattcacaaaaaaaattcaaaatttgtaaacagtattttagaagaattaacaaaaaatggctgtagcatttatgcagactcaaaaataaaaaaattatataaaggaaaagcaaaattagctaatgaaaaaatatggtctaaagaatttttatcatcaaaaatatctgtaaaacttgtagacgatattcatgaagctatttaccatattaacaaatatggaacaatgcatactgatgcaataataactaaaaataaaaagtcggcaaatttatttattaaaaatataaaaagttcaattgcaatacacaactcttcaactcaattgc

SEQ ID NO: 216147 - DNA, 820 bp, Unknown
  Bacterial polypeptide expressing nucleotide sequence isolated from the Sargasso Sea
ttgcgaggtgggtcagaatcaattaatagtaatatagtattaatgaattgtattaaaaaagctcttaaagatcataatattaacccatatatggttcaattgattgaaactactgatcgtagagctattgataagctccttgctatgaacagttatattgatgtaattattccaagaggaggcaaaggtctcatagaaaaagttatgtcatcttcaaagattcctatgataaagcatcttgatggtaattgtcatgtctatattgatcaaaaggcagatctagagatggcttataggattagtataaactctaagactcaacgatatggcgtatgtaatgcaatggagactcttttagttcataaaaaattttctaaaaagtgcttaaataaaatattaaagacttatacagaaagcaatgttgagataagggggtgcaagaatattgtaaaaatttaccctaaagcaaaacctgcaaaacaatatgattggagtcaagaatatttggcgccaataatttcaattaagatcgttgactctattgatgatgccattgaacatataactaagtatggatcactccatacagatgcaataatatccaatgacaaagaatcaataaataaatttcaaaaactggtcaattcaagttctgttatgattaatacttctactaggtttgcagatggctttgaatatggacttggagcggaaattggaattagcacagataaattacatgccagaggccctgttggtctagatggtcttactaatcttaagtatgttgtaacaagtaaaggaaagattagaaattaag

SEQ ID NO: 216148 - DNA, 1270 bp, Unknown
  Bacterial polypeptide expressing nucleotide sequence isolated from the Sargasso Sea
atgttagatactaaagatataaatatttacatagattctttaggagcttctgctaagaaagcttcaagtattcttgctcaagcacctgagaaacaaaagaatgatgcattgttaaatattgcaaagataattgatttaaaacgaaatgatatccttgatcaaaatgtaaaagatctagaagatgcaaaaaacaagcaaataggagatgctttggttgacaggcttgagttaactgaagagcgaataaattcgatggtttcaggtttagaagtagtttctcagttacctgatcctgtaggagaaattactaatttagacccaactccttctgggattaatgttagtaaaatgagagttcctcttggggtagtagggatcatttatgaatcaagacctaatgttacagcagatgcagctgctctatgcttgaaatcaggaaattcatgcattctcagaggcggttcagaagctattctatcgaataagattatttgggaatgccttcaaaaggggcttgaggagtcagggcttcctaaagaatgtgttcagttagtagaaactatagacagagaagctgtgaaaaatttacttcacatggataaatggattgacgtgattattccaagaggaggaaagggcttagttaaattaatttctgaagagtctagagttccagttattaagcatttagatggcatatgtcatgtatatatagatgaagatgcagacatagaaaaagctatagatatagcttttaatgcaaagacttatagatacggtatatgtggagctatggaaactttacttattcataaacaattagcagtcggaattctccctaagttattggagaagtatgcttctgagaatgtagagcttagaggttgtagggcaactcaagaagttgtagaggtaaaagcagctttgacagaagattggtcaacagagtatttggcccctgttctatcagtaaaggttgtagatgacttagaagaggccatagaacatatcaattactatggctctaatcacactgattctatagttactgaaaatgataaaaaagttaagatttttttcgatcaagtcgattccagttccgtaatgcacaatttacctacttgttgggcagatggttttgagtatggtttaggagcagaggttggaatatctactgacaaaattcatgcaagaggaccagttggattggaggggctaacttcccaaaaattcatagtaaaaggcaattctcagctaagaggatcttgag

SEQ ID NO: 216149 - DNA, 943 bp, Unknown
  Bacterial polypeptide expressing nucleotide sequence isolated from the Sargasso Sea
aatgacgaaaaatattgaaaaattagttagagaacttggaaaaaaaggtaaaaaagcaagtcttttaatgtcaaatatatctattcagaaaagaaatgaagcattagataatatttctgctttaattaattccaaacaagatttaattctagaagcaaataaaaaagacttaaataaagcaattaaaaataatttagatgatgcaaagattgatcgattatctttaaatgaaaaaaggataagagatattcgatcaagtttacaagatataattaattttggagatcctataaataaaattttagattcaaaagaaagaccttctggaattaaaataaaaaaaatttcaactccaattggtgttataggaattatatatgaaagtagaccaaatgtaacaattgatgcagcagcattatgtattaaatcaagtaattctgcaattttaagacctggttctgagagttaccaatcttgtttagcattatttaggtgtataaatgaagctttaattcaagcaggactaccagaaaatttaattcaaataataccaaccactgacagaagtgctgttaaaaatttaattcaaatgacagactatgtagatgttataatacctagaggaggtaaaaatttagttaaattaattcaagataatgcaaaagtaccagttttcgcacacctagatggaatagttcatacatatattcacaatgatgcagatccaaatatggttgaaaaactaataataaattccaaattgagaagacctggtatttgtggtgctttagagtgtcttcttattaacaagtcatattatgaaatgcatggggagaaattaataaaaaaattaataaataaaggaatcgaaattcgtggtgataaaatagtaagtaagattaatggagtaaagttagctaattataatgattggggtagggga

SEQ ID NO: 216150 - DNA, 1005 bp, Unknown
  Bacterial polypeptide expressing nucleotide sequence isolated from the Sargasso Sea
catgagcattgaaaataatattattgaattaggcaaaagagcaaaatctgcctccctaaatatgaaagtctgtagcagtgatcaaaaaaatcttgctttaacaaaactcactaaaaatttagataaaaatagaaataaaattcttgaagctaataaaatagatttagaaaatggtgaaaaaaaatctttagctaagcctttaataaatagacttacattaactgaaaaatctattgatggattgattacatcaattgaagatataatcgaaataccagatccaattggcattacattagaaaaatgggaaagacctaatggtttgcagtttcgtaaaatttcaacaccacttggtgtattaggtgtgatttatgaatccagaccaaacgtcactgttgatgcgtcttgtctttccataaaatctggcaattgtataattttaagaggtggtagtgatagttttcattcctctaaggaattggtaaataatattacaaatgctttcacggaagctggcctccctgaacattgtgtccaaatgattaatacacctgaaagagaagcggttgatcatttactaagcatgagagattatgttgatgtaattattcctagaggcggcaaaggtttgattgaaaaaattaattcagcaagcaaaatacccgttatcaaacatttagacggtatatgtcatgtgtatgtagataaagatgctgatttaagcatcgcagaaaaagtagtttttaatagtaaaatgagacgtcccgaaatttgtggtgctgcagaaacacttttaattgatgaaaaaattaaagacgaagcaatgaaaatattaaaacctctaaaagaagtaaattgtgaaattagaggcgatgaatatattcagtctttagatagtgattttaaaactgcaagtgaagaagattggtcattagaatatttagataaaattttatcagtaaagattgtttcaggagttgaggaagcggttaagcatataaatga

SEQ ID NO: 216151 - DNA, 1255 bp, Unknown
  Bacterial polypeptide expressing nucleotide sequence isolated from the Sargasso Sea
atgagcaacaataattacattttagaattaggcactaaagcaaaaaaagcttcagaattgttatccaatatttcaactaaaataaaaaatgagggtcttcttgagttaaaaaaaaatataattaaattttctgacgaaatattaaaagtaaatgagaaggatatagaaaatgctaataaaaaattactttcttcagcaattattgatcgtttaacattaaataaggatagaatagattctatgactaaaagtatagatgaaatcataaaattagaagatccggttggtaaagtgatttctgaatgggacagacctaatggtcttaaaattcaaaagatatcagtaccattgggtgtaataggcataatatatgaatctagacccaatgttactgttgatgcttcaataatttgtattaaatctggaaatgctgttatcttaagaggtggaactgacagtttctttacttctaataaattaaaggaaattattaatgattcttttaatacagttggccttcctaaaaatgttgttcaaatgattgattcaactgatagatctaatgttgatgaaatgattaaacttgataaatttattgatgtaattattccaagaggaggtaaaggactaattaaagctataaatgagaatagctctattcctgtaattaaacatcttgatggaatatgtcatatatttgttgaaaaagatgccaatcttgaaaaagctaaagctattattttaaatagtaaaatgagacgacctggaatttgtggcgctgtggaaagcttattaattaatgaatcattatatgagcaaacattagaaatcttaaagcctttaataaatgcagggtgtgaaatccgaggagataaacttatttgtaaactaagccctgaatttaaattagcagataataatgattggagcactgaatatttagaaaaaataatatctgtcaaacttgtcaaagatgtagatgaagctattaatcacatcaataaatattcgtcaggccacactgagtcaattattacagaagatatagaaaaatttaataatttttataaaagaattaacagtgctataatattgcagaatgcctcaactcaatttgctgatggaggagaatttgggtttggaggagaaataggcatttcaacagataaattacatgttagaggacctgtaggtgtagagcatttaacaagttttaagtatgttgtacaaggaaatggtcaggtgaggtcgtaat

SEQ ID NO: 216152 - DNA, 1261 bp, Unknown
  Bacterial polypeptide expressing nucleotide sequence isolated from the Sargasso Sea
tatgaattcattaaaagaaatagcaaaagaaactaaagcagcatcttttgaattgtctatctcatcaacagaagataggaataaggttcttgataaagtttcccaactcctcagtgaacgtataaccgatatagtatcagctaatcaaattgactatgaaaacgggaagacatcaggtctaaatgatcaaatgttagatagattgttactaacaccagaacgaatcgaaggaatggctactgacgtacagactatcaagagtttaagtgatcctattggtgaaataatagagcagaaaactctggaaaacgggatagaattaaagaaagttagagttccgttgggagtcctaggatcaatctatgaaagccggcccaatgtaactattgatatcgcaagcttagccataaaatcaggcaacgcagctttgttacgaggcggcaaagagagtgttaactctaatatagtactaacgcagatactaaaagatgcattatccaacgccggtctcccagagtctgcagttgggcttatcactgatcctgatcgaagcatcgtagacgagatgcttgggctagatgagtacattgatttgctcgttcctcgaggaggagctggattaattaaacatgtatatgaaactgccagtatgcctgtggtggcaggcggaataggagtatgccatgcatttattgatgaaaatgcagaccctcgaaaagttattcctatcgttatcaattccaaaacgcaaagacctacggtatgtaacgctttagatacagttttagttcacaaaaatgcagataaattaatgatccaaaatatgatttctgaactccttgatcatcaggtggaagttagagctgatgagcaaatcttgcagcatatcacactagacaattcattgataaaagctgcatccgaagatgattgggggacagaatttttatctttagttatttctatcaaaacagtggattcattacaggaagccctagaacatattaaaactcatggttctggccatactgaagcaatcttaagtgaagataaaccgtctcaggatactttcactcggactattgatgccgctgcagtgtttgttaatgcaagtactagatttacagacggttcacaatttggtttaggtgctgaggtaggaatcagtactcaaaaatttcatgcacgtggccccctcggactcaaagaactcacttcatacaaatggataggtatagggagcggtcaagtcaggccttaa

SEQ ID NO: 216153 - DNA, 850 bp, Unknown
  Bacterial polypeptide expressing nucleotide sequence isolated from the Sargasso Sea
atgaataattatatgaatttaatcggtaaaagagcaagaaaagcaagtcaatataaaatagacacaaaagttaaaaatagtgttttagcctcctatgctaaaatgcttaacgaaaacaaaggtttaataattaaagaaaatactaaagatattaattacgcaaaaaaaataggattaaaagaaaatttaattaatagacttcatttaaatgagaaaaaaataaacgacatcagaaattctattattagtattattaaatttaaagatcccattaatcatgttctagaaaagtggaaaagacctaatggattaaatattagtagagtatcaattccaataggagttattggtgtaatttatgaaagtaggccaaatgttacatcagatgttgctggtttatgtttcaaatcaggtaatgcagtaatcttaagaggaggttctgaagcaatcaattcaaatagaattttgtcaaaactttttagaaaagcgctcaaaaaaaataaagtcgatgaaaactttatacaatttatagactctaaaaacagaaagatggttgatgtaatgctttccaaaatgaaagaatatattgatgtgataattccacgaggtggaaaaaatcttgtaagaaaagttcaagaactttctaaaattcctataattggtcatcttgagggtatttgtcatacatatgtcgacaaagacgctgaactaaagatggcaaatagagttgtagttaacgcaaaattaagaaacaccagcatatgtggggcgactgaaaccattattctacataaaaatattgttaaaaaatttagcaatacaatcctgggcaatttagaaaaaaatggtt

SEQ ID NO: 216154 - DNA, 1252 bp, Unknown
  Bacterial polypeptide expressing nucleotide sequence isolated from the Sargasso Sea
atgaaaaattatttaaatagaattggaataaacgcagttaaggcaggattaaaaattattaataaagaaaaaaaaaataaaattttaaaagattatgtgagcctattaactaaatataatgacaaaattttaaaagaaaatttaaaggacctgaagatagctagacaaaaaaaacttgatattaacttaataaatagattagagcttaatgataaaaagattgaaggtatcaggaaatctgtattagaaataattaaacttaaagacccagttaatagagtggtttctaaatggagtcgacctaacaaattaaaggttaaaaaagttactattcctattggggtaattggagttatttatgaaagtagaccaaacgtaacttcagacgtctcttctttatgttttaaatctggaaatagtgtaatattaaaaggaggttcagaagcttttaattctaataaaattatctcaaacttattcagaaaagctcttaagaaaaataaggtagatgtaaattttgttcaatttattgaaaaaaaaaatagaaaagtggtagattttttattgtctaaaatggaatcttacattgatgtaataattccaagaggcggcaaaaatctagtaaaaaaggtaaaaaaatattcaaatatacccaccataggacatcttgaaggtttatgtcatacctttgtagatgaaaacgtaaatcacaaaatggcaagtaaaattatattaaatgcaaaattaagaaaccctggaatttgtggtgctacagagacattgcttgttcatagaaaactatctagcgaaaaaatcagtttaattattaatgatttattaaaaaataattgtgaaatatatgctgacgacactatcagaaaaatttctccaaaaaaaattcataaagcaacatcaaaagattggtcgaccgaatacttgtcattaaaaatttctgtaaaaaaagtcaacaatgtagaggatgcagtcaaacatattaataagtatggtacttcacatactgaggcaattatttctaataataaaaaaaatacaaaatacttttttgaaaatgtgaaaagttcaatattgattcataattcatcgactcaatttgcagatggagctgaacttggctttggtggcgaagtaggtatatcaactaataaattaccacctagaggtcctgttggtttaaatcaacttgtatcttataaatatgaagtaataggaaatggccaaatacgatcttaaa

SEQ ID NO: 216155 - DNA, 1249 bp, Unknown
  Bacterial polypeptide expressing nucleotide sequence isolated from the Sargasso Sea
aatgaatattattttagaaaaaattggtgagaatgcaaaaattgcatttcaaaataaaataaataataaaaaaaaaaatcaagtactaaatgattacatcaatcttattttaaagaaccaaaataaaatattaatcgaaaatgaaaaagatattaaaattgctaaatcaaaaaagcttaaagaaaacttaattaaaagactagctcttaataatgacaagataagttcaattgttaagtcaatcaaaactattgcaaaattcaaagatccgataaatgttgatcttgaaacatggaaaagaccaaatggcttaaaaatgaagaaagtatcaattccaattggcataattggggtaatttacgagagtaggccaaatgttacttcagacgtatctacactttgttttaaatcaggaaactgtgtaattttaagaggaggttctgaggcttattttagcaataaaatcttggctaatctttttagaaaatctttagaaaaaaataaaataaataaaaatttcgtacaatttgttgaaaataaaaatagaaaactagtcgactatatgctttcaaaaatgtcaaaatatatagatgttattattcctcgaggtggaaaaaatcttgtaaaaaaagtacaaaatttatcttctgtacccgtaataggtcaccttgaaggaatgtgtcatacatatattgataaagatgcaaatctaaagatggcaaaaaaaattttaattaatgctaagatgcgtaatactagtatttgtggagctacagagacactattaatacataaaaataaatcgaaaaatgtaaacgaaatactaaacgaactaactaaaaaaggttgttctatttatgcagacaaaaaaattcacaaattgtttaatggaaattcgaaattagctaataataaaacctggtctaaagaacatctatctgcaaaaatttctgtaaaattagtagatagtattactgatgcagttaatcatattaataagtatggaacaatgcatacagatgcgataattacaaataataaaatttctgcaaaattttttataaaaaacattaaaagttcaattgctatccacaattcttcgactcaatatgctgatggaggtgaatttggttttggtggagaagttggaatttcaacaaataaacttccaccaagaggtcctgtaggactaaatcagcttgttagttacaaatatgaaatatatggctctggacaaacaagaaaataa

SEQ ID NO: 216156 - DNA, 1030 bp, Unknown
  Bacterial polypeptide expressing nucleotide sequence isolated from the Sargasso Sea
aataaaatcgataattaaatcaattaaaataattgcggattttaaagatccagtggatgtagatctagaaacttggaagaggccaaatggtttaaaaataaagaaagtatctattcctattggaattattggtataatctatgaaagtagaccaaatgttacatcagatgtatctacgctttgttttaaatctggaaactgtgtcattttaagaggaggttccgaagcttattttagtaataaaattttagttcacctttttagaaaatctttagaaaaaaataaaataaataaaaactttgttcaattcattgaaaataaaaatagaaagctagttgagtatatgctttcaaaaatgactaaatacatagatgttataattccaagaggaggaaaaagtcttgttaaaaaagtacaagaactttcatctgtacctgttattggacatctcgaaggtatttgtcacacatatgttgataaagatgcgaatatatcaatggcaaaaaagatattagttaatgctaaaatgcgtaatactagtatttgtggagctactgagacgctattaatacataaaaataaatcaaaaaatgtaaatgagattttaaatgaattgagtgaaaaaggttgtttaatttatgctgataaaaaaatctctaaattattcaaaggaaaatcaaaactagcaaataataaaacttgggctaaagaacatttatcagctaaaatttcagtaaaattagttgacgacattcattatgcagttagtcatatcaataaatttggaacaatgcatacagatgcaataattacaaacaataatcactctgcaaaatattttttaaaaaatgttaaaagttctatcgcaattcataattcatcaacacaatatgcagatggtggtgagtttggttatggtggtgaggtaggaatttcaacaaataaactcccaccaagaggtccagtaggactcaaccagcttgtaagctacaaatatgaaatatatggatctggtcaaacaagaaagtaa

SEQ ID NO: 216157 - DNA, 1255 bp, Unknown
  Bacterial polypeptide expressing nucleotide sequence isolated from the Sargasso Sea
aatgataaaaaaaattttaaaaaaaataggtaagaattcaataatctcacaaaaagaaattgcctcagcagcacatgaaaaaagaaacgctgtgcttaaattgtcttcagaaataataagcaaaaatactaataaaattattgaagcaaataaagaagacttactcttagcaaataaagctggattgaaagaatcatacattgaccgactacttttagattcaaaaaggatttccgcaatatcagaaagcttaatcagtattagtacactacctgatcctctatcaggtaaaattacaaaatgggaaagaccaaatggattagttatttctaagcaaccaacaccacttggtgtcttaggtattatttatgagtctaggccaaacgtaacagttgatgctgcagctctttgtataaaatctggaaattcagttattttaaggtgtggctcagatagttataactcttgttatattttatctgaacttatcagagatgccttgcagcaatgcaatctttcaaaagacataattcaactgattccatctaaagatcgagatgctgtagattatatgttgaagatgtcaaatgttattgatgttattattcctagaggtggtaaatcattggttgaaaaggttcaaaaaaacgcaagagttcctgtattttcacatcttgaaggtatatgccatatttatgtcgaccagtttgctgaattagaaaagtcatgttctgtagttattaatggtaaaatgagaagaactgggatctgtggcgctacagagacattattagttaatgaacacattgcaaaaaaattccttcctaaaatttgctctgaacttaatgaaaaggggtgtgaaattgtaggtgatgaggtaactaaatcaatagttccttacattgatcttgctattgaggaagattggtcaactgaatatttagctccaaaaatatcaatcaaggttgttggggatgtttatgatgctatagaacatattcaaaaatttggaacgcaacatacagacgcaataatgacagaaaatgaggaaatagccaaagtttttacaaatgcagttgatagtgcgatagttttagtaaacgcttcaacacaatttgctgatggcggtgaatttggactaggtgcagaaatagggatttcaacaggcaaattacatgcaagaggtccggtaggcgctgcacagttgacaagttttaaatacgttgttcacggtaatggccagatcagaccttag

SEQ ID NO: 216158 - DNA, 1063 bp, Unknown
  Bacterial polypeptide expressing nucleotide sequence isolated from the Sargasso Sea
atgagtaataacatttttgaatatgtaaaaattataaaccaaaagtctaaaaacgcttttgataaaatttcaaaaagtagttctaaagatcggaatttagctattttaaatacctctttaattataaaacaaaaacaagaagaaattcttcaagcaaataaaattgatataggaaatgcaaagaaaaaaaatcttactgatgcatttgtggatagattatttataaacgataaaagaataaacgatattattaacggcttaaacaaaattgctgaaatggatgatcctattggaattgaattgtcaaggtggaaacaaccaaatggtcttgatatttcaaggatttcagttccacttggtataattggtattatatatgagtctagaccaaatgtaactattgattcaggaagtctatgtataaaatctggtaacacagtgatacttagaggaggctcagattcaatcaactcttcaaaaatcttaacttcatgtctccaagaaggattaatgagtgctaatttacctgctgacgcagttcaaatgatagataatacagatagagaggctgttacagcaatgctcagatctacaggtcaaattgatgttattattcctcgaggtggtaagtctcttgttaataaagttcaacaagaggctaaggttccagtctttgctcatctagaaggtatttgtcatttatatattgataaggacgcagacgtagaaaaagcaattaagattgtaattaattcaaaaatgagaagaaccggtatttgcggggctttagaaacattacttattgataaagaaattagcaacaaagtagtacctattttagttgaaaaattaatggaatctggatgtcatattaagggagactatgaaacaaaagctatatcagatgagattgaattagcatcagaaattgattgggaaacagagtaccttgaagccattttatctattaaaattgttaatggagtatcaggagctattaatcacatcaataattattcttcaaatcataccgaatcaattgttacagaaaataaaattactg

SEQ ID NO: 216159 - DNA, 889 bp, Unknown
  Bacterial polypeptide expressing nucleotide sequence isolated from the Sargasso Sea
atgagtaagtatgtagagacaatatgtgaaaaagctaagactagctcatataattctagtaaatatgatactcgtcgtaaaaacaatacgctcagcacattaataaaagaaattcgctcaagtaaattagaaattataaaatataacgataaggatataaagctggcatctaaaatgggcgtaaaagacagttttttggatcgattagttttaaataaatctaggattgataatatgattgatggtctagataaaataattcaaataccagatatcactttttcaatatctaaatcaaagagacagcttagcggcatatatacctcacaaatgcgagttccaattggtgtaatatttatgatttatgaatcaaggccaaatgtaacaattgacgcagcagggttatgtttaaaatctggaaatagcgtaatacttagaggcggttcagaagcacttaataccaacgctatattaattaatctcttagagaattcgttaattaaaaataagattgacaagaattttattcaattagtcaagaaacctgatagaaagtatgtttctgaatttcttcgtatgaatgattatatagatgtaataattccaagaggaggcaaaggtttaattaagaacataattcagaattcatcaatacctattatcaagcatcttgatgggaattgtcatgtttatattgataaatctgcgaacattggctatgccaaagaaatttcgattaattctaaaactcaaagatacggagtttgtaatgcgatggaaactcttttaatacataaaagtttttctaaaaaacataccaaggagataattgaagatttcctactaaaaggtgttactttaaagggatgtagtaaatcaagaaaactaa

SEQ ID NO: 216160 - DNA, 1249 bp, Unknown
  Bacterial polypeptide expressing nucleotide sequence isolated from the Sargasso Sea
tatgagcctaattaaacaaatatctgccgatgccgcccatgcggcccgcacactcgcccaactcgatgagtcgttaaaaaacaccgtattactggatatggcgcgctcattaagggaaaaaacctatgaaatccaaagcgcgaacctgattgacgtgcaccgagcgactcaggataacttaagccctgcaatggtcgatcgcctcacgctgaaccagcatcgtatcgagacgatggcgcaaggaatcgaaaccatcgccgccctgcccgatcccgttgggcgcgagcgttttattggtaaacgacctaacggcttatctatcagtaagatgcgtgtgccactcggcgtggtgtgtatgatttatgaggcgcgcccaaatgtcaccgccgatgctggcgcattgtgctttaaatccggcaatgcggtgatcctgcgtggcggtaaagaagcactgcacaccagccaagtgatcgccagcattttacaggcggtactgaccgcctatggtttgcctaaagcacttatcagcgtaatccccgatcctgaccgcgccctaatgctcgaactgatgcagcagcgggaatttatcgatgtgatcatccctcgaggtggcgaaggactgattaattacgtcactgaaaacagtagcattccggttattcagcactttaagggcgtgtgccatttatatgtggataaggacgccaatcaagatatcgccttagatttgctgcttaatggtaaaacccaacgcacaggcgtatgcaacgccctcgagggcttgttagtgcataaggatatcgcgccgcgattcttgccccgcgtcgccaaagcactgacagaacatcaagttaaaatcaatgcatgtcctcagtccgccgcgtatttcgacgcctgcacttatatggcagaagaagattttggccaagaatacttagacttagaaatcgccattcgccaagtcgacagctttgaggttgccacccaacatatcgctaagtttggcagccaccataccgaggtgatttgcaccgacaatgaactcaccgccgcccgctttcaacgcgcagtggatgcctctgtcgttatggtgaatgcctcatcacgtttttccgatggcagtgaactcggcctcggcgccgaaatcggcatagccaccactaagctacatgcctacggccccatgggactcgaagccttaaccactgaaaaatacctagtttcaggcactggacagattagagcttag

SEQ ID NO: 216161 - DNA, 1255 bp, Unknown
  Bacterial polypeptide expressing nucleotide sequence isolated from the Sargasso Sea
atgaattttaaagaaataatcaatgaaatcggaagtaaagccaaaaaagcatctataaaattaagaacactcaatgctgataagaaaaaaattgcttatgagtgtttagaaaaaaatattaaagataaaacaaaggatattttaaacgcaaacaaaattgatattgaaaatgcagttaataataatttagcagaacctctaataaatagattgaaacttaatgaagactcaatttcaggcatccttaaaagtattgctgagattaaaaatcaaccagatcctataggtaagattttagaagaatggtcgcagccaaatggtctaaggttttcaaaaatatcagttccactcggagtattaggagtaatatatgagtctagaccaaatgtaaccgttgatgcgtcatgtctagctttaaaatcaaataatgctttaatcctcagaggtggtagcgacagttttcaaacatctaatgagttaattaaaattataacaatgtcgtttaaagaagcacaacttcccagtgatatagctcagatgattccttcaacagacagagaggcagttgattgtctattagcgatggataactacgtaaatgttatcattccaaggggtggtaaaagcttgataaaaaaaataaatgacaaaagtagaatacctgtaatcaaacatttagaaggtctttgtcatatctatgtagataaggaggctaatctagatgttgctaaaaaaattatttttaatagtaaattaagaaggccagaaatatgtggtgctgctgaaaccctactaatagataacgcccttgaagataacgcccttgaattaattaaacctttatatgacgcaggttgcataattaaaggagataagtttattaaatctctcgatcctaattttgaaatggcaagcgatacagattggtcaacagaatatttagacaaaattataagtgtaaagattgttaaaggtgtaatgggtgctatagaacatataaataattattcttctaatcatacagagtcaattattacagagaatgaaaaaactttttctgatttttataataacattgatagtgcgataatattaaaaaatgcttctacacaatttgctgatggcggagagtttggctttggagctgaaattggtatttcaacagataaacttcatgtacgtggtcctgttggagctaaacatttgacaacattcaaatatattgttcatggtaacggacaatcaagaaattaaa

SEQ ID NO: 216162 - DNA, 829 bp, Unknown
  Bacterial polypeptide expressing nucleotide sequence isolated from the Sargasso Sea
aatggattatttaaaaaaaataggaataaatgcaaaaaaagcctttgaagatttaagaggtgtgaaacataaaaaaataaaaaaagttttagagaattacaatcaatctcttttgaaaaatactaataaaataattagagaaaatttaaaagatgttaaaaatgttaaaagaaagcatttagttgacagacttattttaaataaaaaaagaatagagggtataagacattcaataaatgaaatagcaaagtttcaaaatccagttggtagaattttagaaacatggcgaagaccgaataatttgacaattaaaaaggtaacaattccgatcggcgttatcggtgtaatatatgaaagcagacctaatgtaactgctgatgttgcagcattatgtttaaaatcaggtaattgttctattttaagaggtggatcagaagcttttaattcaaacagattattagctaatttattcagagacaatttaaggaaaaacaatatcaatccaaattgtgttcagtttatagaaaataaaaatagaagaatagttaatcagctattatctaaaatgagtgcatatattgatgtaattgttccaagaggagggaaaggacttgtagcgaaagttcaaaaattttctaatgtgcatgtaattggccatctcgaaggattgtgccacatttatgttgataaaagtgcaaatataaaaatggcaaaaaatttgattgttaatgcaaaaatgagaagaacaagtatttgtggagcagttgaaactcttttaatcgaagaaaaagctttaagctcacatggtaaagaaataattaatgctctt

SEQ ID NO: 216163 - DNA, 1255 bp, Unknown
  Bacterial polypeptide expressing nucleotide sequence isolated from the Sargasso Sea
tatgataaaaaaaattttaaccaatattgggaaaagatcaaaaaacgccttggcacatcgggtggatactaaaaagaaaaataaagtattaatagattactgttcactttataaaaaaaatcaaaaattaatccttagtgccaataagaaggacgttaatagatcaataagtaagggtgtcaaaaaaaatttaattgaacgtcttattttgaatgaaaaaaaaatagataatattattagctcaataaaatctgtaataaaacttaaagacccaacaaatagagttttggagaaatggaatagaccaaacggattaaatatttctaagatctcaattcctataggaataattgctattatttatgaaagtaggccaaatgttacctcggacgtcgtatcattatgcttcaaatccggaaacccagtaattttgagaggtggatcagaggcttttttttcaaataaaattttatcaaagctttttagagactcattaaaaaaaaataatattaacgaaaattttgttcaatttattgactccaccaatagaaagattgtcgattatctattaaataaaatggataaatatgttgatgttgttattccaagaggaggaaaaaatttagtaaaaaaagttcagaagttatctaacttaccagtgattggtcatttggaaggagtgtgtcatacttatgttgataagaacgcaaacttaaatacagcaaaaaagattatttttaatgccaaattaagaaatacagcaatttgtggagctacagaaacgattttaattcatcaaaaaatcttaaaaaaatcatgtaacattattttaaaacacttagaagatcatggatgcaaaattattggagataacagaatcaaaaaaaattataaagggaaaattattagagctactaataaagattggtcaaaagaatatttgtcagctacagtttctgtaaaatgtgtcagagatataaatgatgcaatcaatcatattaataaatatgggacaatgcacactgactcgattatcaccatgaataagaaatctgcaaaaaaatttttaaatgaagttaaaagctcaattgccatgcataatacatcaactcaatttgcagatggtggagaatttggttttggcggcgaagttggtatttcaactaacaagcttcctccgcgaggccctgttggacttaatcaactagtgtcttataagtatcaaatatcaagtaatggtagaataaggaaataa

SEQ ID NO: 216164 - DNA, 715 bp, Unknown
  Bacterial polypeptide expressing nucleotide sequence isolated from the Sargasso Sea
atgagcatagaattagaattagaaaagatgggcgaaaacagtgttagggcctcaaaagacattaggtctttgaacgaaagagataaaaataatattttaaaatcaattataataagtttaaaaaagaataaaaaaaatattctagatgctaattcattagatattagtaactctgaaaatagtctttcaaaagcaatgattgatcgacttatgctagatgacgaacgatttgatggaatattgtcgtcaattgaaaatgttatttctttagaagatccagttggaaacaaactttattctaataaacgaccaaatggaatgttagttgaaagagtgtctgttcctcttggtgttattggaattatttatgaaagcagaccaaacgttacagttgatgcaacagttttatgtctaaaagctggcaatagcgtaatactaagaggaggatctgagtgttttaatactaactcagaaatggtaaaatctatacaaggggctttaaaggaaaattctgttagcgaacatattgttcaatatgtaagcaccactgatagagcggcagtagattacatgcttgctaaaatgggaaaatatattgatgttgtagtgcctagaggcggtaaaggtttagtaaaaaaagttcaagataccgcaaaaatacctgttatcggacatctcgatggaatatgtcatttatatgttgatgaaacatcag

SEQ ID NO: 216165 - DNA, 1090 bp, Unknown
  Bacterial polypeptide expressing nucleotide sequence isolated from the Sargasso Sea
atgggcgaaaacagtgttagggcctcaaaagacattaggtctttgaacgaaagagataaaaataatattttaaaatcaattatagtaagtttagaaaagaataaaaaaaatattctagatgctaattcattagatattagtaactctgaaaatagtctttcaaaagcaatggttgatcgacttatgctagatgacgaacgatttgatggaatattgtcgtcaattgaaaatgttatttctttagaagatccagttggaaacaaactttattctaataaaaggccaaatggaatgttagttgaaagagtgtctgttcctcttggtgttattggaattatttatgaaagcagaccaaacgttacagttgatgcgacagttttatgtctaaaagctggcaatagtgtaatactaagaggaggatctgagtgctttaacactaactcagaaatggtaaaatcgatacaaggggctttaaaggaaaattctgttagcgaacatattgttcaatatgtaagcaccacagatagagcggcagtagattacatgcttgctaaaatgggaaaatatattgatgttgtagtacctagaggcggtaaaggtttagtaaaaaaagttcaagacaccgcaaaaatacctgttattggacatctcgatggaatatgtcacttatatgttgatgaaacatcagatacagaaatagcaagcaaaatcatagaaaatgcaaaattgagaagaactggaatttgtggtgcagctgaaactatattaattgatgaaaactgtgtcgatactcatttaccaaaaattattactgatttaattaatgggggctgtgaagtaagaggagataatgtatgtatgaaaatctcagacaaagttctaaaagcatccgaagaagattggggtacagaatatttagatgcaataatatctataaagactgttaaaggggtagatgaagcaatagaacatattgctacatatggatcaggtcatacagagagtattatttctgaagataaagagaaagttgaaaagtttttaaataccgtaggtagtgcaattgttatgcataacacctcaacccaat

SEQ ID NO: 216166 - DNA, 490 bp, Unknown
  Bacterial polypeptide expressing nucleotide sequence isolated from the Sargasso Sea
gatgaaaaaatatttaaatatagttggagaaagagcgaataaagcatttgctggtaaagttaatactaagacaaaaaataaagtattatttaaatttgcaactttaattaaaaataaacaatcagaaataattaatcaaaatattaaagatataaaatttgcaaaaaataaaggattaaaagaaaatttaataaatagacttaaaattgatagtaaaaaaataaatcaaattatcaaatcaataatcagtatagcaaaactaaaagatcccatagatgttacattgagtaaatggaaaagaccaaatggattaataataaaaagagtaactgtaccaataggtgtaattagcgttatttatgaaagtagacccaatgtaacttcagatgtttcgagtttatgttttaagtctggcaattgtgtaattttgagaggaggttctgaagcttatttcacaaacaaattaatagcaaatttatttcgaaaagca

SEQ ID NO: 216167 - DNA, 1075 bp, Unknown
  Bacterial polypeptide expressing nucleotide sequence isolated from the Sargasso Sea
gatttatcatccgccttagttgaccgattaactttaacaaaagagagaattgaaggcatgagtaatggtttgaaaaagatcattccgcttaaagatcctgttggtgaagtaacaaaatcttggacaacagatgatggacttaaaattaacaaagtgaggtctccatttggagttattgggattatttatgaagcaaggccgaatgttacgagtgatgtctcagctctatgtattaaatcaggaaatgctgctgttcttaaaggatctagttattgtgtagattcgaattctgaaatattgaattcattacaaaaatcccttgagaaaaataaaataaataagaatgcaattcagcttattaaaagtaaggaaagagaagatgcaataaaatttatgaaactaactgaatacattgacttgattgtcccaagaggtgggaaaggattaattgacacattagtagaaaatgcaaaggtcccttttattttagatggagatggtaacgtacatctttatgtgcacgaagatgctaatacagaatatgtaattgacataattattaattcaaaagtacaaagaccaggagtttgcaacgcactagagactttgatattaaataaatcaatatatcaaaaaatgggtaaagaaattattaatgagttacttaagaatgaggtagaactttttgtagatgaagttatagctaaagacatatctgatcttgaaatagctaaagatgagcactacatgacagaatttcatgatttaaagttagcaattaaaattgttgatgatttagatcaagctatacatcacatccaacaatattcttctggacacaccgaagctatccttacagaatctgaagaagcaaaaaataaattttcaaaatctttagattcttcagtaatttttataaatgcatctaccagattcactgatggtgaaatgtttggctttggtgctgaagtaggtattagcactcagaaacttcacgttaggggtccaatgggattagaatcattaacaaatgaaaggtatgttgttgaaggctcaggaacaataagacaatgaa

SEQ ID NO: 216168 - DNA, 358 bp, Unknown
  Bacterial polypeptide expressing nucleotide sequence isolated from the Sargasso Sea
gatttagaaattgctaatgatgagcattattcaactgaatttttggacctcaaaatagcaataaaaatagttgaaaatgaagatgaggcaataaagcatgttaataaattttcatctggccatacagagggggttcttactgaatctgaacaaatagccgaaaaattctcaagctcaattgattcatctgtgatatttataaatgcctctacaaggtttacagatggagaaatgtttggttttggagctgagataggaataagtactcaaaaattacatgtaagaggacctatgggcttagaagcattgacgacagaaagatatgtaattaatggaaaaggaactgtcagaggatgaa

SEQ ID NO: 216169 - DNA, 799 bp, Unknown
  Bacterial polypeptide expressing nucleotide sequence isolated from the Sargasso Sea
atgagtattgaaaataatattattgaattaggcaaaaaagcaaaatctgcctctctaaatatgaaagtctgtagcagtgatcaaaaaaatcttgctttaacaaaactcactaaaaatttagataaaaatagaaataaaattcttgaagcaaataaaatagatttagaaaatggtgaaaaaaaatctttagctaagcctttaataaatagacttacattaactgaaaaatctattgatggattgattacatcaattgaagatataatcgaaataccagatccaattggcattacattagaagaatgggaaagacctaatggtttacagtttcgtaaaatttcaacaccacttggtgtattaggtgtgatttatgaatccagaccgaacgtcactgttgatgcgtcttgtctttccataaaatctggcaattgtataattttaagaggtggtagcgatagtttttattcctctaaggagttagtaaataatattacaaatgctttcacggaagctggactcccagaacattgtgtccaaatgattaatacacctgaaagagaagcggttgatcatttactaagcatgagagattatgttgacgtcattattcctagaggtggaaaaggtttgattgaaaaaattaattcagcaagcaaaatacccgttatcaaacatttagacggtatatgtcatgtgtatgtagataaagatgctgatttaagcattgcagaaaaagtagtttttaatagtaaaatgaggcgtcctgaaatttgtggtgctgcaaaaacacttttaattg

SEQ ID NO: 216170 - DNA, 349 bp, Unknown
  Bacterial polypeptide expressing nucleotide sequence isolated from the Sargasso Sea
cagcaaatgaaattgattggggaaactgagtatcttgatgcaattatatcaattaaaactgttaagggtgttgatgaagcaattgatcatatagctaaatatggatcgggacataccgaaagtattatttctgaaaataaaaataatgttgaaaaatttttaaattcagtaggcagtgcaattgtgatgcataatgcatctactcagtttgctgatggtggagaatttgggcttggtgcagaaattggaatagcaacaggcaagctacatgcaagaggtcctgtgggtcttgaaggtttgacaacctacaaatatattgttcgtggaagtgggcaggtaagaccataaa

SEQ ID NO: 216171 - DNA, 1312 bp, Unknown
  Bacterial polypeptide expressing nucleotide sequence isolated from the Sargasso Sea
atggctaatatcttcgaagttcctcaaccaggtaatgatcttttaggaaaagctgaaaaagttcgtttggcatcaataaaaataagtcagactgaaaatcaaaatcgaattaaagccttaaattttatggctgattatctagaaaaaaattctaaagaaatattagaggctaataatgaggattattcaagtgcagagaaaaaaggtatttctagggctttactttctagattaaagttatcaaaagaaaaattaaatttaggaattgaaggggtaagaaaagttggagacttggctgatcctgtaaatcaagttcaaataaaaagagagctttcaaagggattgattttagagagaaaaactgtgccaattggagtcttaggggttatttttgaatcaaggccagatgccgtgatgcagattagttcattagcaataagatcaggtaatggagtaatgctaaaaggtggtagtgaagctaatttaacaaatacttcaatagtgaaagcattgcaagaaggtttaaatgaatcaggcctcgataaaaatgcaatatgtttactaacaagcagaaaagatagcatggcgatgttaaatcttgagaaatacattaatttaataattccaagaggaagtaatgaattagttaagtttattcaggagaatacaagaattcctgtgctaggccatgctgatggaatttgtcatttatttatagatattgaggcaaatctagagatggctttatcagtcgctttggacagcaaaattcaatatcctgcagcatgtaatgctatcgaaactttattagtccataaagatatagcacctgcttttttagaaaaggccatccctttgtttaattctaatgatgttaaattaattggagataagagatcagttgaattagggttaaagtacgaggctagtctagaagattggaaaactgaatatttggatttaattttatctataaaaatcgttgatgatctcgaggaagcaattacacatattcaaaaatatagttcaaaacatacagatggaataattactgaaaattcaaatactgccaataaatttatgaatgtagttgatagtgcaggagtttttcataattgctctactcggtttgcagatgggtttagatatggattcggagctgaagttggtatatctactcaaactcttccaccaaggggacctgtaggtctagaaggtttggtaacttataaatatttcctaaaaggtgatgggaatatagttgatgatttttcatcaggaaaggctatctacacacataaagatctttaaa

SEQ ID NO: 216172 - DNA, 644 bp, Unknown
  Bacterial polypeptide expressing nucleotide sequence isolated from the Sargasso Sea
gatgaacaagttattaaataaaattggacaaaactctaaaattgcatttagaaataaaattaattcaaaaaagaaaaataaagtattaaatgatttttgtagtttgataattaaaaatgaacaaaaaattatctctgagaacaaaaaagatattaaatttgcaaaatcaaaaaaattaaaagaaaatttaattaagaggctttctttaaattctgaaaaaattaaatctataattaaatcaattaatacagtaattaaacttaaaaaccctgttgatattgaattaagtaaatggaaaagaccaaatggtcttaaaataaaaagagtaactataccaataggtattattggaataatatatgaaagcagacctaatgttactgctgatgtttctactttatgttttaaatctggaaattgtgtaattttgagaggaggatcagaggcatattttagtaataaaattttagcaaatctatttaggcaatcattaaaaaaaaataatataaatatgaattatgtgcaatttgttgaaagcaaagatagaaaattggtagattatatgctttcaaaaatgaataaatatattgatgtaataattccaagaggtggaaaaaacttagtgaaaaaagtgcaagacctat

SEQ ID NO: 216173 - DNA, 238 bp, Unknown
  Bacterial polypeptide expressing nucleotide sequence isolated from the Sargasso Sea
tcacagcgaggcaataatcagcgcggacaacgtcgcgactgaagagtttgcacatagagtcgatgcagccgccgttctagtcaatacatcaactaggttcgtagacggcgaagaatttggtttcggagctgagataggaatcagtacgcaaaagcttcatgcacgaggccctatggggcttcaacaattaacaactactaagtacatcgtgaatgggcagggtcagactcgtggatga

SEQ ID NO: 216174 - DNA, 892 bp, Unknown
  Bacterial polypeptide expressing nucleotide sequence isolated from the Sargasso Sea
tttttgaagcaggccaatgttgctgccgatgcaggaggtttatgccttaaatcaggaaatgcggtcatcctaagaagtggaaaagacggtctaagatctgctgaagcaatcgtcgcctctcttcaagctgcattaatatctgctgatcttccaaaagaatgcattcagatagtcccatccgaaagtagagatgctgcaacccttatgctagaaggacttaatggctcaattgatgtgatagtgccgagaggtggaaaaagccttgttgcagaagttgaaaagtctgcaaaagttccagtttttggtcatttagagggcatttgtcatatttatgtagatgagtatgcagatgaagaaaaggctttagcagtctgcttaaacgccaaaatgcgtagaaccggaatttgtggagccgtagaaacaatactcattaacgataagattgcagcgtcttttgtacctaaaattattgcatcattatcagaattaaactgtgaggtaagatgctgtgaaaaaacaatcgatcttgatagaagatcagtgcctgcgcatgaagaagattggtcaacagagtaccttgctccaattgtaagtttaaagtctgtcttaaatattgatgaagcaattaatcatattgagcgatatgggacaggtcatactgaatcaattatcagtgagaatgaagacaaccaagataagtttacacattctattgatagtgcaattgtgatgatcaatgcttcaactcaatttgctgatggaggtgaatttggtcttggtggtgagataggtatcgcaaccggaaaatttcatgccagaggaccggtcggtgtagatcaacttacgagttttaaatacattgtctcaggaaacggacaaacaagagattaat

SEQ ID NO: 216175 - DNA, 592 bp, Unknown
  Bacterial polypeptide expressing nucleotide sequence isolated from the Sargasso Sea
atgaagaaatatttagaaaagattgggtcaaatgctaagattgcttttgagaaaaaaataagcaataaaaaaaaaaataaagtattaaattattacactcaactaattataaaaaatcaaaaaaaaattttaagtgaaaatgcgaaagatgtaaaaattgccaaatccaaaaaacttaaagaaaatttaattaaaaggcttactcttgatcaaaataaaataaaatcaataattaaatcaataaaaactattgctaattttaaagatccagtagacttaaatttagatacatggaaaagaccaaatggattaaaaattagaaaagtatcaattccaataggtattattggtgtaatttacgagagtagaccaaacgtaacatcagatgtttcaactctatgttttaaatcaggaaattgcgttatattaagaggtggctccgaagcttattttagtaataaaattttagcagaactttttagaaaatcgttagaaaaaaataaaattgataaaaattttgtacaatttattgaaaataaaaatagaaagcttgttgattacatgctgtcaaaaatgtcaaaattttattgat

SEQ ID NO: 216176 - DNA, 985 bp, Unknown
  Bacterial polypeptide expressing nucleotide sequence isolated from the Sargasso Sea
aatgaaatatttagaaaaaattggaaaaaatgcaagaaaagcttatgaaagtcttcaagaggtcaaacataaaaagataaaaatagttctagataattacaacaagtcgttatttgaaaataaaaaaagaataattaaagaaaataagaaagatgttaaaaatgtaaagcgtaaacatcttgttgacagacttatattaaatgaaaaaagaattgaaggaataaggcattctataaatgaaattgccaaatttaaaaatcctgttggaaaaattttagaaagctggaagagaccaaatcaattaaaaataaaaaaagtttcaacacctattggagtgataggagtaatatatgaaagcaggccgaatgtgactgccgatgtagcagctttaagtttaaaatcaggaaattgttcaatattaagaggtggttccgaagcttttaattctaacaagttattagcaaatctttttagagaagtccttcaaaaaaataatattaataaaaattgcattcaatttatcgataagaaagatagaaaaattgtagacaatttactttcaaaaatgagcaaatatattgatgtaatcgtacctagaggtggcaaaggattagtagctaaggttcaaaaattttctaatatacatgtcatcggccacttagaagggttgtgtcatatctttattgataaaagtgctaatttaagaatggcaaaaaaaattgttattaatgcaaaaatgagaagaactagcatatgtggtgcagttgaaacgcttttaatagaggaaaaagcactaaagtctcatgcaatcgaaataataagctcacttaaaaaatcaggttgcgaagtcagagtggatggtaaaataaataaattgttaaaaaataagttaagacttgcaaaagaaaaagattggaaaactgagtatttagatgcgattatatctataaaaactgtgaaaaatgttcaagaaggaattaaacac

SEQ ID NO: 216177 - DNA, 937 bp, Unknown
  Bacterial polypeptide expressing nucleotide sequence isolated from the Sargasso Sea
atgtgtataagcaatcgattcctcttgggggttatatctataatatatgagtctagaccaaatgttacatctgatgcagctgtattatgtcttaagtctggaaatgctactgtacttagaggcggctcagagtgttttcacacaaatactgtaattatagagataattaaagattcattaactaagtgtggatttaatcctaattgcattaatatgattcctataactgatagagaagctctcaaatatatattaacactggatgagtatattgatttagtgataccgagaggaggagaaaatttaattagatttattgcaaatttttctagaattccagttattaagcactacaaaggtgtttgccatgtctatattgatgagtttgcagattcaaataaagcttttgaaatatcaattaactcaaaagttcagagaccaggagtatgcaactcaatggaaactttattgattcataggaaaaaagttagttctgttttgaaaaccataatcgatgccttaaaggagagtaaagttgtaatacactctactgatgaagtaaaagatatgtttagaaatgaaaaaattgtaaaaattgatgaacaggattggtatacagaatatcttgatttagaaatgaatataaaaattgttgataacattgatcaggctattagtcatattgaaaaatatggatcactccatactgaatctatagttaccgagaatattaaaaatgcagagtattttatcaattcggttaactcatctgctatcatgcataatgcatcaacaagatttaatgatggaaacgagttgggcttaggtgcagaaattggaattagcactactaagctgcatgcttttggtccaatgggtctcaatgagcttacaacccagaaatttgtaattttaggagaagggcagattaagtaag

SEQ ID NO: 216178 - DNA, 1267 bp, Unknown
  Bacterial polypeptide expressing nucleotide sequence isolated from the Sargasso Sea
atgaatgaagatttaaaatcacaattagttaagattggtaaagatgcacaaaaagcttctcatatcttatcaatggcaaatgaagataccaaaaactcagctttaacaaatatggctgaccttatcgatagcaattcaaatgaaattatcgaggctaataatgttgatatggaaaatgctaaacaaaaaggtataaccgactcttttttagatcgtctttatctagatgaagatcgaattttatcaataagtaatggtcttagatcaattgtagagttaagtgatcctgtcggtgaggaaataggcagatggaagcgtcccaatggtcttgatatttcgagagtaagaacgccattaggagtaattggagtaatttatgaaagcaggccaaatgttactgctgatgcaggagctttgtgtctaaaagcaggaaatgcagtcattttaagaggtggatctgaaagttttcactcttctaactcaattcataaatttttagttcagggtttagtaaatgctgacttacctaaacattctatccaaattataccaacaacagatcgtgaagcagttggtcatcttttagaaggattaaatggaaatatcgatgtcattgtgccaaggggtggcaaaagccttgttgaaagagtacagaatgaagcaaagatacctgtttttggtcatttagagggtatatgtcatatatatgttgataaagatgctgatatttcaaaagctaaagatattttaattaacgcaaaaatgagaagaccaggcatttgcggtgctgcagaaacattattaatagataaaaatagtgatcagtctttcctgcctcttctattgaatgcattaaaagatagtggatgtgaagtaaggggctgtcaagaaacgatggaatcaaatcaaaacataattttggcaaatgatgaagattggtcaaccgaataccttgaggcgattataagcgtaaaagttgttaatggagtagaaggagcaatatcgcatattagtgaatattcaacaaatcatacagactcaatcattaccgagaatacaaatattgcagaaaaatttatgcgtgaagttgatagcgcaatagtaatgcataatgcatcaacacagtttgctgacggtggtgaatttggtatgggtgcagaaattggtatagccactggtagatttcatgctagaggaccagttggagttgaacaactaacaagttttaaatatgttgttcgtggatcagggcaaacaagaccatagt

SEQ ID NO: 216179 - DNA, 1288 bp, Unknown
  Bacterial polypeptide expressing nucleotide sequence isolated from the Sargasso Sea
catgcccgactgttcaacagcctccaatcacaaaattcacgagctatgccgcattactgctgaaaagagccgtgaagctgcaatacagcttgcaacaatttcgggagaacagcgagcggcatgccttcgggtggctgcagatacaatccggaaggatgaagccgacatcttgaaggctaaccttcaggatctcgccgcagcacctggcttcggcctcacagaagctgccacagacagactccgcctcgacagcgagcgaatcgaagctattgccgcaggtattgaagcagtagccgcactgccggatccgatcggtgaactcattgagacatcaacacaacccaacgggcttcaagttcgtaaggtacgtgtccctcttggtgtcatttttttcatttacgagtcacggccaaacgtcactgcagatgccgccgcagtcgcgatggcttcaggaaatgcagtcattctgcgaggaggaaaggaagcagcttactcaagtagaagaattgttgaaagcattcgtcaggcgatctctgtaagtggcctaccaactgattgcgttcaacttgttaacattgcagatcgtgaggctgttggtgcttttcttcagttcgacaacctgatcgatcttgcaattccacgtggtggcgagggcctcatccgccgggtctgcgctgaagcacgcatgccagtccttaaacatttcagtggaaactgccatgtgtacgtcgacaaatctgctgatcttgatatggctgaaagaattttaattgatgccaaatgtcaacgcatgggtgtctgtaacgcagcagaatcacttttagtacacggatctgttgcacaagaattccttcctcgagtagccgagcaactccgatcgcggaatgttgacatgcttggggacaaagctacccgtgaaattcttcctgaggtaggattagcgactgaatcggatttcgcaacggaatttcttggcccgaaactttccataggtgttgtccgttcaattgatgaggccattaagcatatcaatcagtttggttctcgacatactgacgcaatcgtaacttcggaggaatctgttgctgaaagatttgccgctcaggttgataccgcagttatactcgtcaatgcaagcactcgtttcaatgatggtggcgaacttgggcttggtgcagaaattggaatttcaacagacaaacttcatgcgcgtggcccatgcggcccgagggaattgaccacctacaagtatgtcgttatgggaaatggacagacaaaagggttgtaa

SEQ ID NO: 216180 - DNA, 961 bp, Unknown
  Bacterial polypeptide expressing nucleotide sequence isolated from the Sargasso Sea
gatgagtctggagaaaatggggcaggcggcccgtgaagccgcctatcagctggccaccgtcagcacggcgcagaagaaccgggcgctggccgccatcgccgacgagctggaggcgcgcagccaccagatcctggccgccaacgagaaagacatcgccgccggccgtgcggcgggcttgtcagacgccatgctggatcggctgctgctcaatccggcccggctggccggtatcgtggcggacgtgcgcaaggtgatctctctggacgatccggtcggggccgaaatcgacagccgggtgctggagaacggcctgcgcctctcccgccgccgggtgcccatcggggtcatcggggtcatctacgaggcgcgtcccaacgtcaccatcgacatcgccagcctctgcctcaagaccggcaacgccagcatactgcgtggcggccgcgagaccttccactccaacctggagctggtgcgggtgatccagagtgcgctggcggcctccggcctgccgcgcgatgcggtgcaatacatcgacaacccggatcgggcgctggtgggtgagctgctgcgcctcgaccgctacgtggacatgatcatcccccgcggcggcgccgggctgcacaagatgtgcaaggagaacagctcgattccggtgatcatcggcggttttggcatcagccacatctttgtggacgagagcgccgatctggcgcgctccctggcggtcatcgacaacgccaaggtgcagcgcccctccgcttgcaatgccctcgacagcctgctggtgcacgagaaggtcgccgcgaccctgttgccgcagctggtgggcctgatgaacgagcgcaaggtggccctggtcgctactcccgaggccatgcctctgctggcgggtgccgacagcctgcgtgccgccggcccggaagacttcgataccgagtggctctcgctgaccctgggggtc

SEQ ID NO: 216181 - DNA, 772 bp, Unknown
  Bacterial polypeptide expressing nucleotide sequence isolated from the Sargasso Sea
atgcgcttgacgctgttgaccacccgtcaggaaagcctggcgctgttgcggctggatggtctggtggatctgatcatcccgcggggcagcaacgagctggtgcgattcatccaggacaacacccgcattcccgtgctgggccatgcggacggcatttgtcatctctacgtggatgctgctgctgaggtggagcaggcggttcgcatcgccatcgacagcaagacccagtaccccgccgcctgcaatgccatcgagaccctgctggtccatgaatcgattgcaccggctttcctggcgtccgcggtgccggcatttcagtcggcaggcgtcagcttgcgcggggacgagcgaagccgcgagctcggcgtcagcgacgctgccagtgacgcggactggagaacggaatacctcgatctgatcctttcggtgcgggtggtgtcctcgatggatgcagcgctcgagcacatccggcgccatggatcacgccacaccgaagccatcgccaccgctgatgagcgggcggcggagcggttcctggctgccgttgacagtgctggtgtgtaccacaactgctccacgcgcttcgctgacggcttccgttacggctttggagctgaggtgggcatcagcacccagaccctgccgccgcggggtccggtgggactcgatggtctggtgacttaccgctaccggctgcgtggtgacggacacatcgctgccgatttcgcggacggcacccgccgcttcacccataccgacctgcccctgtgac

SEQ ID NO: 216182 - DNA, 1312 bp, Unknown
  Bacterial polypeptide expressing nucleotide sequence isolated from the Sargasso Sea
aatgcagcagaatgtgaaacaggcacgtgatgccagcctagcaatggctaatattgatacctcgcagaaaaataaaattctgcatgatctggcagaaacactgcgtgaaaattctgatgagatattgattgagaacgccaaggacatgacaattgccaacaaaatgctggaaagaggagaacttacatacagtgcatgcaagcgtgtgatgcttaaccgagtcaaaattgaccaaatggctcaaaattgtgaaagcgttgctgccctgccagatcctgctggcaaaacagtgaaggcaatccgcatagattatggacttgatcttcactgcgtttcatgtccgatcggggttataatggtgatctttgaatcacgtccagatgtggttattcagatttctgctcttgctctaaaatctgggaatgctgtaattctaaaaggagggaaagaagcccaaaattcaaatcgtgtgttagcaggactgattcgaaagacgttagcaaaaagtgatactgttctgggaaatgctatcattttagtggggactcgggatgaagtgactgagctgataaaaatcggttccggaattgatttaattattcccaggggaagtaatgaattagtaaggcatatacaggaaaacgcccgtgcacctgttcttggacatggtgatgggatctgtcatgtgtatctgcatgaggatgcagacaaggaaaaaagcctcgatgtcgctcttgatgcaaaacttgattatcctgctgtctgtaatgctctagaaactctgcttgttcatcacaaatatcctgtaagttggcttgtgaacatattgcttaaaatgcaggattcaggggtagaattaagggtctgttcggaaacaaaaaaacgtctggaatcatatcaggatttaaatttatctgcggcagcagatatagactgggaaactgaatatgtcgacttaatcctatcaataaaaactgtcaaatctgcagaagaagcagtagaacacatcagccagtttggatccaaacatacagaagcaattgtaacggagaattcagatctttcggagtggttcatgaacacggttgacgcagctggagtattctggaacgcctcaacacgctttgctgacggcttccgttatggtttaggagcagaagtagtggtaagcaccgggaaaacccatgctcgaggtcctgtgggacttgagggtcttgtaatttacaaatacaaactatatggtaatggccatgttgcaggaagttacggtaaaggcaaaaaagattttattcatcaggatattgaattgtga

SEQ ID NO: 216183 - DNA, 1279 bp, Unknown
  Bacterial polypeptide expressing nucleotide sequence isolated from the Sargasso Sea
tttgagtcaaattaatcaagcgcaatatttacaacaacttggtcataatgccaaacaggcgagttatgccttggccaacctaacagcgagccaaaaggccgatttgcttgacgcgattgccgatgcgctgacggaaaacacccaggcaatcctcgcggccaatgccaaggatgtggtggcggcgaaagccgagggcttgaatgacgccatgatcgatcgcctgttgctaaacgagtcacgtctggcgggaatcatcggcgatatcagcgatgtggttcgtcttgccgatcccgttggcgaagagtttggtagccgcgtattagagaacggcttaaggttgactcgtcgccgcgtaccgctaggggtgataggggtcatttacgaagcgcgcccgaatgtgaccgtcgatattgcggtgctggcactcaaaaccggtaacgcggtgattttacgtggtggcaaagaaaccctcgaatccaacaaactgataagcgaagtgatccgtggcgctatcgcgagccaagggttgccagtcgatgcggtgcagctgattgattctcccgatagagccttagtcacagggctacttaagctcgaccaatatgtcgatatgatagtcccccgtggcggacaagccttacagcgcctttgcgccgagcaagcgacaattccggtgattttaggtggcattgggatctgccatttgtatgtcgataaacatgccgatcttgagcgggctcttgaggtgattgccaacgcaaaagtgcagcgcccaacggtatgcaacgctctggataccttgctggtggataacgcggttgccgagcgctttgtgccacaaattgccgaatacttacatcgtttaggtgtgcgtttttcggtgtgcgaacaaagctatgctctgctcgatgggttggggtttgatatttccccggcaacggagcaaagctttgcgaccgaatggttatctttgaccttaggcattaaagtggtgagtgatattgatgcagcaattgcccatatccgtacctattccagtgggcactctgaggcgattctgaccgatgatatccatgctgcaacgtattttatgaatgaggttaattcggccgctgtgtatgtaaatgccagtacccgctttaccgatggtggccaatttggcctaggtgccgaggtggcagtgagcacgcaaaagctccatgcccgtggcccaatggggcttgaggcgctaaccacctataagtggttagcgtggggcgattatacgagtcgttcatag

SEQ ID NO: 216184 - DNA, 439 bp, Unknown
  Bacterial polypeptide expressing nucleotide sequence isolated from the Sargasso Sea
atgggtgaagaaattgttaactctctacttcaaaaggatgtagagctatttgttgatccaataatcaaaaaagactttccagcacttacaattgcaactgatgaacactttgaaacagaatttcatgatttgaaactagcaatcaaagtagtaaacaatattgaagaagcaataagccatataaacgaattttcttcaggccatactgaagcaattttgactgaatcaacagaatctgctgacttatttacaagttcaattgattcttctgtgttgttcgttaatagttcaacaagatttactgatggtgaaatgtttgggtttggtgctgagataggtattagtactcaaaaattgcatgtaagaggacctatgggattagaagcactgacttctgaaaagtatgtagttaaaggaaatggacaaattagaaaatgag

SEQ ID NO: 216185 - DNA, 1345 bp, Unknown
  Bacterial polypeptide expressing nucleotide sequence isolated from the Sargasso Sea
gatgaaaattaataaatcaaaaatcccagcagaaataaagaaacagcttgaaaatgcaagaaaatcatcatttgttttatcaaatctgaacgttacaaaaaaaaatcaaattttgtacgacttgtcttttaaactaagagcaagcttatctgaaatcttggaagaaaattttaaggatattattaatgcaaaaaaattgtatgaattaggagaattatctctaagtctttttgaaagggttaaactaaccgaatccaaaattgaacaaatggctgtttattgtgaaagcgttgcgaaattgactaatcctaatggaaaaattatagatgcaactcgtttagatattggccttgaattatataaagtaacttgtccaataggtgtaattttgatgatttttgaatctcgtcctgacgctgttattcagatttcgtcattaggactaaaatctggtaatgctattatattaaaaggtggaaaagaagcttctttttcaaatagaattttagtaaaacttatcagagaaactattaataaaattagtgattcttcagtcaattctataagtttagttgaaactagagttgaagttaatgaattgattaaattaagtcaggatctggatttaattatcccaaggggaagtaaccaaatggttcaaaaaattcagagtaaatcaatggttcctgttttaggacatgctgatggaatatgtcatgtcttcctagataatgaaggagatgaaaataagagtatgtcagtagtcctagattcaaaacttaattatcctgcagtttgcaactcattagagactttactcgtccacaaggattttccagatagttggttagcatcaattttattaaagatgcaggaatctggagttgaattaagggtatgcagtgaaacaaaaaatcgtttgaaaagtttcaaatcattaaaattaaaaaaagcagtgaagcaagattggaaaacagaatatattgatctaataatttcagttaaatcagtagattctgctacagaagctgtaatgcatattaataattttggatcaaaacatactgattcgattgtgacagaaaacaaggaattagcagagtggtttttaaatgcagttgattcagcgggagtattttggaatgcttcaacacgttttgcagatggatttagatatggcctaggagctgaagttggtgtcagtaacggaaaaattcatgctagaggtccagtaggattagatggactagttacatataagtataaattgtatggtaatggtcaaggagttggagaatatagtaaaggaaatagagaatttattcatgaaaaaataaatttgtag

SEQ ID NO: 216186 - DNA, 874 bp, Unknown
  Bacterial polypeptide expressing nucleotide sequence isolated from the Sargasso Sea
atgacgagattaggagagggtgcctatcaagcgtctagagatctatcttctttatcgactgagcaaaagaataaggctttagagcttatggcagagtctttatctgataataaagaagatttattggaggcaaataaagaggatattaacaaagcaaatgagagtggaatcagtagcgcacttttagacagattagagctcaatgaagatagaatagaatcaatgatttcaggtttaatttctatctctaaacttccagatcctatcggagagataaccaatctaaaacctaccccatctggaataaatgtgagtcagatgagagtgcctttaggtgtagtagggataatttatgaatcaagacctaatgttacagctgatgctgccggattatgtttaaaatctggaaatgcttgtatcttaagagggggtagcgagtccatcaattcaaatttagctatctataaaaatcttttaaagggacttgaaacctcagaagctccaaataattctattcaactagtagaaacagtagatcgggaagcagttaagaagctcttatctatgaaagaatggatagatgtagtaattccaagagggggaaaaggattagttcaactcgtttcagatgaagcaaaagttccagttatcaagcatttagatgggatttgtcatgtctatatagatggagactgcgatgaagataaagctgtttctattgctgttaatgctaaaacttatagatttggaatttgtggagctatggaaacacttttggtagataggaaagtagctaaatctatcttgcctaaaatatacgatgaattcactaaggaagaggtagagatgagaggatgttctctaacaaatgaca

SEQ ID NO: 216187 - DNA, 967 bp, Unknown
  Bacterial polypeptide expressing nucleotide sequence isolated from the Sargasso Sea
atccttgaaagaaaaacagtaccaataggagtattaggagttatttttgaatcaagacccgatgctgtaatgcagataagttcgttggccattagatctggtaatggagtaatgctaaaagggggaagtgaagcaaaattaactaatcttgcaatagtttctgcactaaaggagggtttgcaagattcaaatcttgatgaaaatgcaatctgtcttcttacaagtagaaaagatagtatggcaatgttaaatttagaaaaatatataaatttaataattcctagaggaagcaatgaactcgttaaatttatacaggagaatacagaaattcctgtgttaggtcatgctgatggaatttgtcatttatatatagataatgaagtaaatctcgatatagctttgaaagtggctttagatagtaagatccaatatccagctgcatgtaatgctgttgagactcttttaatacataaagatactgcctctgaatttttgaataaggctattccaatgtttaactctaacgatgttaaattgattggagataaaaaatcttttcaattgggtgttgcttttgaagctaattatgaggactggcaaactgaatatttagatcttattctttctataaaaattgttaatgatttagaagaagcaattgctcatatacaaaaatttagttcaaaacatacagatggaataattacggaaaatgtaattaatgctaataaatttatgagcgagatagatagttcaggcgtttttcataattgctcaacaagattcgcagatggttttagatatggctttggagcagaagttgggatatctacacagacattgcccccaagaggcccagtaggactagaggggctagtaacttataagtattttttaagaggagcaggccatattgttgatgatttttcatctggaaaattaatctattcacataaagatgtttaac

SEQ ID NO: 216188 - DNA, 877 bp, Unknown
  Bacterial polypeptide expressing nucleotide sequence isolated from the Sargasso Sea
atgaaaaattatttaaataatattggtattaaatcaaaagaagcttttaaaaatttaggacatgtgagcctaaagaaaagaaataatgtattagagacttatataaaatatttaaaaattaacaagaataaaattatcaaagaaaattcaaaagatataaaactttgtaagcgtgaggaattgatggatagactaattattgataataaaaaaattgatagtatgagaagctcaattaatgaaatcataaaatttaaagatcctttgggaagagtaattgagaagtggaaaagaccaaataatttattgattaaaaaagttactgtttcaattggtgtcataggaattatttatgaaagtcggccaaatgtgacaagtgacgtatcatctttgtgtttaaaatctggtaatgttgctattttaagaggtggctcagagtctttgaattcaaacagaattctagctaatctttttagaaactctctcacaaataataatgttgataaaaattgtgttcaatttattgataaaaaaaatagaaaaattgtagattttcttttatcaaaaatgtctgattacattgatgttatagttccaagaggtgggaaaggcttggttaaaaaagtaaataaactttcaaatgtgaatgtgattgggcatttagaaggaaactgtcatgtatatgttgataaagatgcagatcttagcatggcaaaaaaagtagttttaaattccaaaatgagaagaacatcaatttgtggtgctgcagaaactttactaattgataataagtgtcttaaatctcatgcattaccaataattagagagctaattcttacaggatgtgatgttgttgtagataaaaaaataaataaat

SEQ ID NO: 216189 - DNA, 1147 bp, Unknown
  Bacterial polypeptide expressing nucleotide sequence isolated from the Sargasso Sea
aatttaagaaaagctgaaaatgaaataatatatgcaaataatacggatttagattctttaaatccaaaagattatacatcagctttttatgatagattaaaattaaattctccaagaattaaccaaatgatttcaaacatattggaagtaatagctcttgaggatcctgttgggaaaagaaggtatttgtatgatagacctaatggtataaaagtatttaaacaatctattccattaggtgttatgtcaattatctatgagtctagaccaaatgttacctctgatgcagcatctttatgtttgaaatctggtaattctgtcatattgagaggtggttcggaaagtttcaatactaataagattattgttgaaataataaaggattccttgagtcaaaacaacatcaactctgatgctattaatcttgtcccttatactcaaagggatgtaatgaaatatattttaagaaaggatgagctaattgatttaataattccaagaggtggcgaaggattaataagatttgtttctgaaaattcatcaatacccgttataaaacattataaaggtgtttgccatgtttatattgatttaaaggccaatcttgatattgcacactctgttgcgataaactccaaaattcagagacccggagtttgcaatgcaatggaaacactaattattaatcagaatcttcccaaagaatttattgaaaatttattgaaggatttaaaagaaaataaagttaaattaagaggagaaaagaatttgtcctcttttattgattcagatagctttgtagaacttgaagagatagatttccaaaatgaatatcttgatttagagctaaacataaaattggtagattcagtagattcagctattactcacatcgagagatatggatctttacacacagaatcgataattactgaagatgaaaacataaaagaaaagttcataaatagcctaaattcatctgcaatatttcataatatatctacaagatttaatgatgggaatgaattaggtcttggtgctgagattggaattagcaccactaagttgcatgcttttggtccgatgggattgaatgaacttacttccgaaaagtttgttgtgaccggcagtggtcaaataaaataaa

SEQ ID NO: 216190 - DNA, 1195 bp, Unknown
  Bacterial polypeptide expressing nucleotide sequence isolated from the Sargasso Sea
caaaataagtaataaaaaaaaaaataaagtattaaattattacattcaacttattaaaaaaaacaaaaataaaattttagtcgaaaacacaagagatataaaaatagccaaatctaaaaaacttaaagaaaatttaattaaaagacttgctcttaataatgacaaaataagctcaattattaaatcaattgaaactattgcaaaatttaaggatccagtagatgttgatatagaaacctggaaaagaccaaacggtttaaaactaaagaaagtatcaattccgataggtattattggtgtaatttatgaaagtagaccaaatgttacttcggatgtatctacactttgttttaaatctgggaactgcgtaatattaagaggaggatcagaggctttctttagtaataaaattttagcaaatctttttagaaaatcattagaaaaatacagaataaataaaaattttgttcagtttatagagaataaaaatagaaaattggtcgactatatgctgtcaaaaatgtcaaaatatatagatgttattattccaagaggtggaaaaagtcttgtaaaaaaagttcaagatttatcctctgttcctgtcattggacaccttgaaggtatatgtcatacttatattgataaagatgcaaatctttcaatggcaaaaaaaatattaatcaatgctaaattgcgtaatactagtatttgtggagctaccgagacacttttaatacataaaaataaatctaaaaatgtagatgagatattaaatgaactcactaagagaggttgttctatttgtgctgatagaaaaatttctaaattatttaaaggaaattcaagattagcaaataataaaacatggtcgaaggaacatttatctgcaaaaatttctgtaaaactagtaaataatattaatgatgcagtaaatcatattaataaatatggaacaatgcatactgatgcaatcattacaaataataaaatttctgcaaaattttttattaaaaatgttaaaagttcgatcgctattcataattcttcaacgcagtacgctgatggaggtgaatttggttttggaggagaagttggaatttcaacaaataaacttccaccaagaggacctgttggactaaaccagctagttagttacaaatatgaaatatatggatctggacaaacaaggaaataa

SEQ ID NO: 216191 - DNA, 793 bp, Unknown
  Bacterial polypeptide expressing nucleotide sequence isolated from the Sargasso Sea
aggtttaaacgcatcaggttttgataaaaatgcgatatgtttattaacaagtagaaaagatagcatggctatgttaaatcttgagaaatatattaatttaataattcctagaggaagtaatgaattagttaaatttattcaggagaatacaagaattcctgtgctaggccatgctgatggaatttgtcatttgtatatagatattgaggcaaatctcgagatggctttatcagttgctttggacagtaaaattcaatatcctgcagcatgtaatgctattgaaactttattaatccataaagatattgcaccagcttttttagaaaaagccatccctttgtttaactctaatgatgttaaattaattggagataaaagatcagttgacttagggttaaagtatgaggctagtctagaagattggcaaactgaatatttagatttgattttatcgataaaaattgttgatgatcttaaagaggcaatcatccatattcaaaaatatagttcaaaacatacagatggaataattactgaaaatttaattacggctaacaaattcatgaatgaagttgatagtgcaggtgtttttcataattgctctacaaggtttgcagatgggtttagatatggattcggagctgaagttggcatatctactcaaactcttccaccgaggggaccagtaggtctagaaggtttggtaacttataaatatttcctaaaaggtgatgggaatatcgttaatgatttttcatcaggaaaggctatctatacacataaagatctttaa

SEQ ID NO: 216192 - DNA, 1261 bp, Unknown
  Bacterial polypeptide expressing nucleotide sequence isolated from the Sargasso Sea
atgtttcaagatttagaaaaaaatgtatccaaagttaaacaaagttccttagatctaagtttagttatgcccaatcaaagaaagaattgtctaagtcttttgtctgagaagttaaattctaataagggtgaaatcatagaaatcaataagaaagaaataaccgaagcactgaataatggtttagataatcatgttttggacagaatgagattatcaaatgagtctatcgatagaatgattgattctcttataactgttagagatatgcctgatactgtatctgaaattattgaaactaacaaaagaaataatgggttaatagtaaataaagtaagagtcccattaggagttttaggagttatttttgagagtcgtccaaatgtagtcattgaaattgcttcattggctattaaatctgggaatggtctagttatgcggggtggaaaagattgtataaaaactaatttatatctttttaatcttgtaaaacaatctttatctgagtcaggaattcctgatgatagtatgtattttctagactttattgatagaaaggcagttgacgttattttgtctatggataaatatattgacttgttgattcctagaggctcttctgaattggtaaatctagtaaatcaaaatgctaaaatgccttcaattaccggtggagttggagtttgtcatacatatgtagatagagatgtggatatcgaacaagctatatcaattatagataatgcaaaaactcaaaatccttctgtttgcaatgctttagatacagtaattattcataaggaaattttgaatagccttttagagccattagtgaagaatctatctgatcgtaatgtagaaattaaggttgatgaagacgcttataaaattattggttcaaataagagtgtttcattagcggaaaaagaagattttggacaagaatttttagatttagttgttagtataaaaactgttgaaaatcttgatatggctatttctcatattactaaatatggatctaagcattcggaagctattattacaaaaaatcaagatagtgcaaaatattttatcgataaagttgatgcatctgctgtttttcataatacttctactagattcaatgatggatttgagttaggattaggagctgaagtagcagtttcaactgataagcttcatgcaagaggcccaatgggtataaatgacttaatgacttacaagtgggtagttttaggcgaaggacaaattagaacttaat

SEQ ID NO: 216193 - DNA, 1165 bp, Unknown
  Bacterial polypeptide expressing nucleotide sequence isolated from the Sargasso Sea
ggcaatattaaatacaactaaaattataaaaaaagaacagaaaaagatccttgaagcaaataaaattgatatagaaaatgcaaaaagaaaacaacttagtaacgcttttattgataggcttttactatctgataatagaattgataatattgtcgagggcttaaagcagatttcagaaatgaatgatccaattggcgttgagttatcaagatggacacaaccaaatggtttaaatatttctagaatttcagttccattgggcataattggtattatttacgaatccagacctaatgtaactatagatgctggtagcctatgcattaaatctggtaacacagcaatactaagggggggatctgactctattaattcttctaaagtattagcaaaatgcatgcaaaaaggcttagaaagtgccaatttaccagtcaatactgtgcaattagttgaaaatactaatagagaggctgtttcagcaatgcttacttcaactggggaaattgatataatcatacctcgtggaggtaaatctcttgttaaaaaaattcaagatgaagcaagagttccagtcttcgctcacttagagggaatatgccatatatatgtagataaagatgcagatataagcaaagcaataaaaattattgtaaactcaaaaatgagaagaacaggtatatgtggtgccttagaaacattacttgtagatagaaatatctctgaaagagctgtgcctatcatagttaaaaatttaattaaatcaggatgtcatattagaggggatattgagacaaaacaaattgtagatgaaattgaattagcatcagaaaaagattggcatactgaatatcttgacgctattttatccataaaattagttgatggtgtatcaggggctattgaccacattagcaaatattcatcaaaccatacagaatctataatcactgaaaataccattgtagctgagacttttctaactagtgttgatagcgcaattgttatgcataacacttcaactcaatttgcggatggaggagagtttggaatgggcgcagaaataggaatatctactggtagaatacatgctagaggtccagtaggagctgctcaattaactagttttaaatacatcgttagaggaaatgaccaaatacgtgaataa

SEQ ID NO: 216194 - DNA, 1246 bp, Unknown
  Bacterial polypeptide expressing nucleotide sequence isolated from the Sargasso Sea
atgaaaaattatttaaataatattggcattaaatctaaaaatgcatttaaaaatttaggttatgtagaccttaagaaaagaaataatgtgttagagacttatttaaaatctttaaaaagtaataaaaataaaattattaaagaaaatttaaaagacataaaactttgtaagcgtgaagagttaatagatagactaattattgataataaaaaaattgagaatatgagaagctcaatttatgaaatcgtaaaatttaaagatcctttaggaaaagtgcttgaaaaatggaaaagaccaaacaatttgttaattaaaaaagttactataccaattggtgtaataggaattatttatgaaagtagacctgatgtaaccagtgacgtatcatctttatgtcttaaatctggtaatgttgcgattttaagaggtggttcggagtctttgaattcaaatagaattctagctaatctttttagaaattcactttctaataacagcgttgataaaaattgtattcagtttattgataaaaaaaatagaaaaattgtagattttcttttatcaaaaatgtctgattatattgatgttatagttccaagaggtggcaagggcttagttaaaaaagtaaagcagctttccaatgtgaatgtgattgggcatctggaaggaaactgtcatgtatatgttgataaagatgctgatcttaatatggcaaaaaaagttgttttaaattcaaaaatgcgaagaacttcaatttgtggcgcagcagaaactttgttgattcatgataaatgtttaaggtctcactcacttccaattattagagaattaatcttaaaaggatgtgatgtattagtggataaaaaaattaataaatatttcaaaaataaattaaaattagcaaatgagaatgattggagaactgaatatttattacctaaaatatctataaagagtgtaaatggagttaatgacgctattgcccatatattaaaatatggaactatgcatactgatgctattataactcgaaacattaaaaccgcaaaaatttttttaaatggaataaacagttctatcgctgttcataatgcttcaactcaatttgcagatggaggcgagtttggatttggcggagaaatcggtatatcaacaaataaattacctccaagaggtcctgttgggataaatcaacttacttcttacaaatatatggtcacaggaaaaggaactatcagaccgtagt

SEQ ID NO: 216195 - DNA, 1249 bp, Unknown
  Bacterial polypeptide expressing nucleotide sequence isolated from the Sargasso Sea
atgagcctaattaaacaaatatctgccgatgccgcccatgcggcccgcacactcgcccaacttgatgagtcgttaaaaaacaccgtattactggatatggcgcgctcattaagggaaaaaacctatgaaatccaaagtgctaacctgattgatgtgcaccgagcgactcaggataacttaagccctgctatggtcgatcgcctcacgctgaaccagcatcgcatcgaagcgatggcgcaaggaatcgaaaccatcgccgccctgcccgatcccgttgggcgcgaacgttttattggtaaacgccccaatggtttatctatcagtaagatgcgcgtgccactcggcgtggtgtgcatgatttatgaggcgcgccctaatgtcaccgccgatgccggcgcattgtgctttaaatccggcaatgcggtgatcctgcgtggcggtaaagaagcgctacacaccagccaagtgatcgccagcattttacaggcggtactgaccgcctatggcttgcctaaagcacttatcagcgtgatccccgatcctgaccgcgccctaatgctcgaactgatgcagcagcgggaatttatcgatgtgatcatcccccgcggtggcgaaggactgattaattacgtcactgaaaacagtagcattccggttattcagcactttaagggcgtgtgccatttatatgtggataaagacgccaatcaagatatcgccttggatttgctgcttaatggtaaaacccaacgcacaggcgtatgcaacgccctcgaaggcttgttagtgcataaggatatcgcaccgcgattcttgccccgcgtcgccgaagccctggccgagcatcaagttaaaatcaatgcctgtcctcaggccgccacgtatttcgatgcttgcacttatatggcagaagaggattttggccaagaatacttggacttagaaatcgccattcgccaagtcgacagctttgaggtcgccacccaacatatcgctaagtttggcagccaccataccgaggtgatttgcaccgacaatgaactcaccgccgcccgctttcaacgcgcagtggatgcctcggtcgttatggtgaatgcctcatcacgcttttccgatggcagtgaactcggcctcggcgccgaaatcggcatagccaccactaagctgcatgcctacggccccatgggactcgaagccttaaccactgaaaaatatctggtttcaggcacaggacagattagagcttagc

SEQ ID NO: 216196 - DNA, 1279 bp, Unknown
  Bacterial polypeptide expressing nucleotide sequence isolated from the Sargasso Sea
ttgagtcaaactaatcaagcgcaatatttacaacaactgggcagtcaggctaagcaagccagctatgccttggccaatcttagcgccgcacagaaagcggatttactcgaggcgattgccgaggccctgacgcagaatattcctgccattcttacggctaatgccaaagacgttgccgccgctaaggctgaaggcttgaatgatgcaatgatcgataggctgttgcttaacgagtcgcgtctggcagggattatcggtgatatcggtgatgtggtgcgtcttgcagatcccgttggcgaagagtttggcagccgagtgttggataatgggttaaggctcacgcgccgccgcgtaccgctgggggtaattggggttatctatgaggcgcggccgaatgtgacggtcgatattgctgtgttggcacttaaaaccggtaacgcagtgattttgcgtggcggaaaagagacgctcgaatccaataaactgattagtgaagtgatccgtggcgcgattgcgagccaaggtctgccagtcgatgcggtgcagctgattgattctcccgatagagccttagtcacaggtctactcaagctcgaccaatatgtcgatatgatcgtcccccgtggtggacaagcactgcagcggctttgcgccgagcaagcgacgattcctgtgatcttaggcggcattgggatctgccatctgtatgtcgataaacatgccgatcttgagcgcgcactcgaggtgattgccaacgcaaaagtgcaacgtcccacggtatgtaacgcgctggataccttgctggtggataacgcggttgccgagcgctttgtgccgcaaattgccgagtacttacatcgcttaggtgtgcgtttttcggtgtgtgaacaaagctatgcactgctcgatgggctgggttttgatatttcccctgcaactgagcaaagctttgcgacagagtggttgtctttgaccttaggcattaaagtggtgagcgacatagatacagccattactcatatccgtacctattccagtggacactctgaggcgattctcaccgatgatatccacgcggcaacgcattttatgaacgaagtgaattcggctgctgtgtatgtgaatgccagtactcgctttaccgatggcggccaatttggcttaggggccgaggtggcagtgagcacacaaaaactccatgcccggggtccaatggggcttgaggcgctgaccacctataagtggttagcatggggtgattacaccagccgcgcttagt

SEQ ID NO: 216197 - DNA, 1267 bp, Unknown
  Bacterial polypeptide expressing nucleotide sequence isolated from the Sargasso Sea
atgaatgaagatataagattacaattaactaagattggtaatgatgcaaaaaaagcatctaacgcactatccatggcaagtgaagacaaaaaaaatcaagccttaatgaatatggctgaacttattgaaaacaaccaagacgaaattcttaaggccaacaatactgatatgaaaaaagctgaagaaaaaggaatatcagattcctttctagaccgtctttatttagataaagatcgaatttcttctataagtaacggtctgagatctattgtagagctaaatgatcccgttggagaagaaataggaagatggcaacggcctaatggtcttgatatttctagggtaagaactcctttaggagttatcggagtaatttatgaaagcagaccaaatgttactgctgatgctggagcattgtgtcttaaagctggaaatgcagttattttaaggggaggatcagaaagcttccattcctctaatgctatacataaatttttggttcaaggattagaggcttccaatttaccaaaacactctatccaaattataccaactacagaccgtgaggcggtcggtcttcttttaggaggattaaatggaaatattgatgttattgtcccgcgcggtggtaaaagtcttgtagaaagagttcagaatgaagctaaaatacctgtgtttggccatttggaaggaatatgtcacttatatgtcgataaaagtgcagatttgataaaagctaaagatattataattaatgcaaaaatgaggagaccaggtatttgtggtgctgccgagacattattaattgataaaaatagtgataagtcttttcttcctttactagtaaattcattgaaagatagtggatgtgaggtaagaggatgtgaggaaactctcaaattaactgataatataatttctgcaaatgatgaagattggtcaactgaatatcttgaggcaattataagcgtaaagatagttgatggcgtagaggaggcaatttcacatattggtgagtattcaactaatcacacagactcaataattacagaagataatgatattgcagaaaaatttatgagagaagttgatagtgcgatagttatgcataacacatctactcagtttgcagatggcggtgaatttggtatgggagcagaaattggtattgcaacaggaagatttcatgccagagggccagtaggtgtagaacaattaactagttttaaatatatagttcgtggttcaggccaaataagaccttagt

SEQ ID NO: 216198 - DNA, 526 bp, Unknown
  Bacterial polypeptide expressing nucleotide sequence isolated from the Sargasso Sea
aatgagcaaatatctaaataatattggtatcaaatcaaaaattgccttcaaaaatcttgctggaatagatcttaaaaaaagaaatagggttcttgaaagttacagtaagtcattatccaaaaataaaaaaaaaattattaaagaaaaccttaaagatattaaaacttgtaaacgtaaagatttaatagatagattaataatagatgagaaaaaaattgaaaatattagaagttcgataaatcaaattgttaaatttcaagatccgcttggaaaaataattcaaaagtggaaaagaccaaataatcttattataaaaaaagttacagtacctattggtgtcataggaattatttatgagagcagaccgaatgttacctgtgatgtatcatctttgtgcctaaaatctggcaatgtcgctattttacgaggaggatctgaatcttttaattcaaataaaattctggcaaatttatttagaaattctcttgaaaaaaatcggattgataaaaatttatacaattcatag

SEQ ID NO: 216199 - DNA, 815 bp, Unknown
  Bacterial polypeptide expressing nucleotide sequence isolated from the Sargasso Sea
tatgtcagacatacattctctagttgttgatataggtaaaaaagcccgagaagcctctcggaggctagctgttgcatctagtcagcaaaaaaaggatgcgttgatttttagcgctgacgcaatcaggaaaaatactgcaattataatagaacagaataaaaaagatcttgattttggagcgtccaaaagcttgtcaaatgctttgatggatcgattgcttttaaatgaagagcgaataggttcaataattgatggtctggaagcgattgccgatcaagacgatcctgttggtgaaattatggaggcatggagacgcccaaatggtcttgaaattaaaagagttcgtacgcccttaggggtaattggcgtaatatacgaaagtcgtccaaacgtaaccgctgacgcgggtgctctttgtttaaaagcaggaaatgcagtaattttgcgagggggttctgaaagttataatagttccattgccatccataattttttgcaagaaggcttgtcaaaggcgcatttacctaagaactctattcagctcatcccaacgaaagatagggctgcggttgcgagccttctgaaattgactgagtatattgatgttattgtgcctagaggcggtaaaagtctggttgggctggttcaatcggaggcaagagttccagtatttgcgcatctagaaggaattgttcacatatatcttgataaaaccgcggatccaagaaaagcatttgatgtaattttgaactcaaaaacgaggcgtacgggtatctgtggtgcagcagaatgtctgttaatcaataaagatatac

SEQ ID NO: 216200 - DNA, 973 bp, Unknown
  Bacterial polypeptide expressing nucleotide sequence isolated from the Sargasso Sea
atgacgaatcaaaagtttaagaaagagctaaattctttaggagctaaagctaaagaagcaaaggaattcttgcttaattcgtctgtggacacacgaaatgatgcattaaaatttgcttgcgaggaaatacatgtaaacagatctgatcttttcaaagaaaatgaaaaagatttagtagaagcaaaaaagttggacttgcaaaatagcttcattgacaggcttgagctaaatgataaaagagtagactcaatgatagatggcctcaataaggtcataaacttaaacgatcctattggagagttagaaggaatgaatccttcaccttcaggattcaaagttagcaagatgagagtgcctttaggcactataggaattatctatgaatcaagaccaaatgtgacggctgatgcttcggctttgtgcattaaatcgggaaacgcatcaatcttaagaggggggtctgaggccgttcattcaaataaccatattgttacacaagtaagaaaaggccttacaaaagctaatttgcctgaagacagtgttcaattaattcaaaatcaagatcgagacttggttaaagaattcattaaatttgatgactgcattgatttaattattccgcgaggaggatctagtttggtgagactaattgctgccgagtcaaaagttccaatacttaagcattttgagggattgtgtcatgtatttgtagactcagaagcagatttagagctggcgcaaaaagttgcaagcaatgcaaaatcttatagatatggtatctgcggagctatggaaacccttctagtctctgaagatattgcccaaaaattcctgccaaagatagttaatgaatttaatgagcaaggagttgaagtaagggcatgcagtcaaacactcaatattgtctcagcgaacaaagctactgaaaaagattggtcaacagaatatttagaaccaattattttcaattaag

SEQ ID NO: 216201 - DNA, 1264 bp, Unknown
  Bacterial polypeptide expressing nucleotide sequence isolated from the Sargasso Sea
atgacttcctttaaaaacaaaattaatcaagtaggtcttcaggctaaagaggcatcaaaaatcttagccaaagtttctactaaacaaaaaaatgaagctatattggcaatggcaggtcatatcttaaaagataaagagctgatcttagaagaaaataaaaaagatttaaagaaagcaaaaacaaaaggtttatcagaatcatttattgatagattagagcttggtgatgaaagaattatttctattgcaactactcttagtgaaattgaaagctttagggaccctgttggtaaagttttagactcttggacaaggccgaatggacttagtatatcaagagtatccactccccttggaaccgtcggagttatctatgaaagcaggcccaatgttacagcagatgcaggagctttatgtcttaaatctggtaatgcctcgatattaagaggaggttctgacggtattaattcatgtatagcaattcataagagcatgataaaggggctgagtgatgctggtatcactgaaaacgcaattcaaatcattgaagatatagatagagatgcagttaatatgatgcttcaaggaattaataagagtattgatgtaattgttcctaggggcggtaaaaacttagttgctcaaattgaaaaagaagcaaaggttccagtatttgctcatctagagggtatttgtcacatatatgttgataaagatactaatctagagaaagctataaatgtttgtgtaaatgcaaaaatgagaaggccgggtatatgtggtgctgtagaaactatattagttgattcagaaattgcaattgcatttttgccagatctaattaaggccctatcaaccagagactgtgagataaggggatgtaaagaaacacaacaatattctaataatgttgttgctgcaaatgatgaagattggaaaacagaatatttatcaccaattgttagtattaagattgttaaagactatgaagaagcgattgagcatatagatactttctcatctggtcatactgaatctatactaactgaaaatttaaatacagcagctcagtttcaaaaagacttagatagtgccattgtaatgcacaacgtctcaactcagtttgcagatggtggtgagtttggtttgggtggtgaaattggaattgcaactggaaaatttcatgcaagaggtcctgttggagttgatcaattaactagctttaagtatcttgtaaacggtaacggacatataagaccttaac

SEQ ID NO: 216202 - DNA, 451 bp, Unknown
  Bacterial polypeptide expressing nucleotide sequence isolated from the Sargasso Sea
atggataaaaatttagtaaatataggtaaaaaagctaatagggcattaactgtaaaaatagaccaaaaattaaaaaataaaattttatataaatttggaaaattaattaatgaaaataaatcgaaaataattaaagaaaataaaaaggatattaaatttgcaattaaaaaaggtcttaaagaaaatttaatcgacagattattgcttaataattctaaaataaatcaaataattaaatcgataaataatattgcgaaacttaaagaccctacaaatataactttaagtaaatggaaaagaccaaatggattagttataaaaagagttacaatacctataggtgttattggggtaatatatgaaagtcgaccgaatgttacatcagatgtatcaagtttgtgttttaaatctgggaatagtgttattttgaggggtggttcagaagcatatt

SEQ ID NO: 216203 - DNA, 523 bp, Unknown
  Bacterial polypeptide expressing nucleotide sequence isolated from the Sargasso Sea
atgagtaaaaacttagaaaaaattggtacaaatgcgaaaattgcttttcaaaacaaaataagtaataaaaaaaaaaataaagtattaaattattacattcaacttattaaaaaaaaccaaaataaaattttagtcgaaaacacaaaagatataaaaatagccaaatctaaaaaacttaaagaaaatttaattaaaagacttgctcttaataatgacaaaataagctcaattattaaatcaattgaaactattgcaaaatttaaggatccagtagatgttgatatagagacctggaaaagaccaaacggtttaaaactaaagaaagtatcaattccgataggtattattggtgtaatttatgaaagtagaccaaatgttacttcggatgtatctacactttgttttaaatctggaaactgcgtaatattaagaggaggatcagaggctttctttagtaataaaattttagcaaatctttttagaaaatcattagaaaaatacagaataaataaaaattttgttc

SEQ ID NO: 216204 - DNA, 898 bp, Unknown
  Bacterial polypeptide expressing nucleotide sequence isolated from the Sargasso Sea
atgcaaaaaaatcttaataaaataggtagaaatgctagaaaagctttttcaaaaaaattaaataataaattaaaaaataaagtattaaaaaagtttgctaaattgatagaaattaataaaaaaaatattctcaaagaaaattctaaagatattaacttcgccagaaagaagggtttaaaagaaaatttaattaagaggctagagttaaataataataaaatagatcaaataattaagtctgttgttgctataagtaaattcaaagatcctgtaaatataataaaagaaaaatggaaacgtccaaacggattaagaataaaaaaagtaaccataccaataggagtagtgggggttatatatgaaagtagaccaaatgttacttcagatgtatcaagcttatgttttaagtcaggaaattgtgtaatattgaggggtggatctgaagcatattttagtaataaaataatatcaaacttatttagaaaatcattacaagaatacaaaatagataaaaattacgttcagtttataaaactaaaagatagaaaagtagttgacttactattatctaaaatggaaaaatatttagatgtaattatacctaggggaggaaaaagcttagtaaaaaaagtacaagatttatcaattgtaccaacaattggtcatttggagggaatttgtcatacttatgttgataaacatgctgatatcaatttagcaaaaaaaataataataaatgctaaattaagaaacactagtatttgtggcgcgactgagactgttctaattcatgaaaaatgcttaaaaaaatttactaaccctattctgcaagaattggaaaaaaataattgtataatttatgctgataaaaaaattagaaaaatttataagggtaaat

SEQ ID NO: 216205 - DNA, 1087 bp, Unknown
  Bacterial polypeptide expressing nucleotide sequence isolated from the Sargasso Sea
atgagtataaattttaatgaaatttgtatatctgcaaaaacagcttcgcgagaattttcattacttgatgctaagcaaaggaatcaaatattgctccgtatagcttcaagagttttagagtctaaaaatgaaatactagatgcaaataaaattgattatgataatgctaaagaaagtggtgcagatgatcatatcctagatcgactatatttaaatgaggaaagaatagatgctatagttgatggggtgtatcaagtagttgaattagaagatcctttagatattgaatatgatactactgtgagaccaaatggtttaaatgtaagcaaaagatcggtacctcttggagtaataggagctatttatgaaagtagaccaaatgtcacattagatatagtagctctatgtgtgaaatcaggaaatgtcagtatattaaaaggcggttctgatacgctaagtaccaataatgcgattgtatcttctatccacaaggctttcggcgacttgaagcttaacccagatattgtgcaatttataaacagttctgatcgtaaatatgtagattcaatgctcaatgcaattgattatattgatttgattatacctagaggtggagctcagctcgtaaacatggttcgggaaaaatcaagagtaccagctataactgggggtataggggtttgtcatatttatgtcgacgaaactgctgataagaataaagctattgaaataatttacaactctaaagttcaaagaccaagtgtttgtaatgctttagatacagtaatttttaacgaaaatataaataaagatataattataagtgcagtaaagaaattactcgaatcaaaagttgaagtccgtgttgatactcaatgttttgatatcttatcttccttaaaagaagactatccgaatagtatctgtctagcatcagatgatgactgggggcaagaatttttatctcttatattatcaataagaattactgattctatagaaaatgcaattaattatataaatcaatatggtgggcattcagaagcaattatttctgaaaatccagataatacaacacagttctaaa

SEQ ID NO: 216206 - DNA, 862 bp, Unknown
  Bacterial polypeptide expressing nucleotide sequence isolated from the Sargasso Sea
tctggcagccgaagagctaaaaacaatcgatacagatactaaaaataaagtattaaatgacatggcgtcagaactaatcaatgatgctgacgaaattattgaggcaaataaaattgatttagaaaatgctaaacaattagagttaaccgctgctttaaccgatagattaactctaaataaagagagaattcaaggtatgtcagatggattaaaaaagataatacctctcgaagatccagttggtaagataacagaatcttggacatccgatgatggattgaacataaataaagtaaggtcaccttttggagtaatagggattatttatgaagcaagaccaaatgtaacaagtgatgtctcaggtctatgtttaaaatcaggaaatgcatctatccttcgtggctcaagttattgtttggattcaaatctaaaaatattaaatacgttacaaaaagctttagaaaaaaataatttgtccaagaattgcatacagcttatagagagcaaagacagagaagatacaatcgaatttatgaatatgactgagtatattgatttgattgttccacgaggcggtagaggattaattgatacattggtaaataactcaaaagttccatttattttagatggtgatggaaacgtacacctttatatacatgaagatgcaaaagaagagtatatggttcctatagttatcaattcaaaggtccaaagaccaggagtttgtaacgctttagaaactttaatattgcataagcatgtttataaaaaaaatggtgaagagattataaatgcccttaaagaaactcggttgaagtttttattgatgaaaaagcaggcaatgattatccagatttag

SEQ ID NO: 216207 - DNA, 622 bp, Unknown
  Bacterial polypeptide expressing nucleotide sequence isolated from the Sargasso Sea
cctgcatgatgatgcagaacagagaaaaagcctagatgtctccattgattcaaagctagattatccagctgtctgtaatgctctggaaaccctgcttgttcatcaaaattatccagacagttggcttgcgaacatattgctaaaaatgcaggattcaggagtagaattgagggtttgtaaggaaacaaaaaaacgtcttgatgtatattcagatttaaattgttccgtagccgaagatatagactgggaaacagagtatgttgatttaatcctttctataaaaacggttacatctgcagaagaagcagtagaacacatcagcaagtttggatccaaacatacagaagcaattgtaactgaggattcaggccttgcagagtggttcatgaaaactgttgatgctgcaggagtattctggaacgcctcaactcgttttgctgacggttttcgttatggtttaggagcagaggtaggagtaagtacaggaaaaacgcatgcccgtggtcctgtaggacttgaggggcttgtaatttacaaatacaaattatatggtaatggccatgttgccggcaattacggtgaaggcaaaaaagattttatgcatacggaaattaaattgtaa

SEQ ID NO: 216208 - DNA, 913 bp, Unknown
  Bacterial polypeptide expressing nucleotide sequence isolated from the Sargasso Sea
aggagttatatgtgtaatatatgagagtagacctaatgtcactgcagacgtagctgcgctatgcttaaaatctggtaacagtgtaatcttgcgaggtggttccgaggcctattatacaaatagatttttagcgaacctttttaggaaagccttaagaaaaaataaaattgatgaaaattgcgtccaatttattgaaaaaaaagacagaaaaatagtcgactttattctttctaaaatgagcaattatattgatttgattgttccacgtggcggaaaaaatttagtcagaaaagttcagaaattatctaaagtaaatgtaatcggacatcttgaagggttgtgtcatatttatgtagataaagattcaaatttagaaatggctaaaaaaattataattaatgccaagatgagaagaacaagcatatgtggagcattagaaactcttctaataaatgataagattttatcatctcatggcaccaagattattcatgctttaattaaaacgggttgtgaggttagagtagacgataaaataaataaattatttaattttagattaaaaaaggcaattgaaaaggattggcaaacagaatacttggactcaataatttcaattaaatcagtaaaaggtgtggatgaagctgtgtctcatattttgaaatatggcactatgcatacagatagtattatttctaacaataataaaactgcaaaaagttttctaaaaggtgttaatagctcaatcgcgatgcataatgtttcaacacaatttgctgacgggggagaatttggatttggtggtgaaattggaatttcaactaataaaatgccaccaagaggtcctgttggcattaatcagttaacttcatacaagtacattgtaaaaggcaatggttcaataagatcgtag

SEQ ID NO: 216209 - DNA, 1009 bp, Unknown
  Bacterial polypeptide expressing nucleotide sequence isolated from the Sargasso Sea
atggtttataaagaaatgaataaagagctttcctcattgcttgatgaaatgggcctaaaggcaaaaattgctagctcaatattaaatactacatccagcgatcaaaaaaataaattttttgatttggctattgaatcaattcaaaaagatgctgatacaattcttgaggctaatcaagcagacattcagcaagcaaaagaaaacaacaaagatgaagcctttattgatcgcttagcgttagataatgaaaggcttcatggaatatgcgatacgttagaggcaattaaatcttttgaagatccagttggaaaagttcttgcaacttgggatcgaccaaatggattaaatatttctagagttgctaccccccttggcgtgatagggttaatttttgaaagcagaccaaatgttgctgccgatgcaggaggtttatgccttaaatcaggaaatgcagtgatactaagaagtggaaaagatggtcttagatctgctgaagcgatcgtcgcctctcttcaagctgcattagtatctgctgatcttccgaaagaatgcattcagatagtcccatccgaaagcagagatgctgcaaccctcatgttagaaggacttaatggctcaattgatgtgatagtgccaagaggaggcaaaagccttgttgcagaggttgaaagatctgcaaaagttccagtttttggtcatttagaaggcatatgtcatatttatatagatgagcatgcagatgaagagaaagctttagcagtctgcttaaatgctaaaatgcgtagaactggaatttgtggggctgtagaaacaatactcgtaaacaataagattgcagagtcctttgtgcctaaaattattgcatcattatcagaattaaactgtgagataagatgttgtgagaaaacaattgattttgatggaagatcagtaccagcaactgaagaagattggtcaacagagtaccttgctccaattggtaagtttaaagtctgtcttaaatgttgat

SEQ ID NO: 216210 - DNA, 919 bp, Unknown
  Bacterial polypeptide expressing nucleotide sequence isolated from the Sargasso Sea
atgtcaatgcctttaggtgtaatatgcatgatttatgagtctagaccaaatgtcacaatagatgctgcagtgttatgcttaaaatcaggaaattctgtgattttaagaggcggctcagagtcaattaatactaatatggttttatcaaagtgtcttaaaaatgcattagtggaaaataaactacccgaaaattgtgcatcactcattgaggatgctaatagagatttggtcaacgaacttcttacatatgatgaatttatagacgtcgtaataccaagaggaggcaaaggtttaattgacctagtaagtaaaatatctaaaatacctgtgttgaagcatttagatggcatttgccatgtttatattgatgaatatgcagatctagatatggcccatgatatagctatgaattcaaaaactcagagatatggcgtatgtaacgcaatggaaacattacttgtgtcacaaaaaatcgcagataattttataccaaaagtaatctctagtttgtttgaaaaaaatgtagaagtccggggttgcagtaaaacagtaaaatataatcaaaagattttaaaagcaaacgaagaagattggaagacagaatatctaagtccaatactttctataaagattgttcagtcaatagatgaggcaattaatcatatagaagcatatggatcaggtcatactgatagcattgtttcttcaaataaagaccaatcagaaaaatttttacgaaatgtaaattcaagctcagtaatggtaaatgcctccaccaggtttgcagatggctttgaatatggtcttggtgctgagataggaattagcactaataaactacacgcacgaggacctgttggattagatggcttaactaatcaaaaatatattgttttaggagagggtaatactagatgaa

SEQ ID NO: 216211 - DNA, 1167 bp, Unknown
  Bacterial polypeptide expressing nucleotide sequence isolated from the Sargasso Sea
aatgagtaaaaacttagaaaaaattggtacaaatgcgaaaattgcttttcaaaacaaaataagtaataaaaaaaaaaataaagtattaaattattacattcaacttattaaaaaaaaccaaaataaaattttagtcgaaaacacaaaagatataaaaatagccaaatctaaaaaacttaaagaaaatttaattaaaagacttgctcttaataatgacaaaataagctcaattattaaatcaattgaaactattgcaaaatttaaggatccagtagatgttgatatagaaacctggaaaagaccaaacggtttaaaaataaagaaagtatcaattccgattggtattattggtgtaatttatgaaagtagaccaaatgttacttcggatgtatctacactttgttttaaatctgggaactgcgtaatattaagaggaggatcagaggcttactttagtaataaaattttagctaatctttttagaaaatcattagaaaaatacaaaataaataagaattttgttcagtttatagagaataaaaatagaaaactggtcgactacatgctgtcaaaaatgtcaaaatatatagatgttattattccaagaggtggaaaaagtcttgtaaaaaaagttcaagatttatcctctgttcctgtcattggacaccttgaaggtatgtgtcatacttatattgataaagatgcaaatctttcaatggcaaaaaaaatattaatcaatgctaaattacgtaatactagtatttgtggagctactgagacacttttaatacataaaaataaatcaaaaaatgtaaatgagatattaaatgaactcactaagagaggttgttctatttatgctgatagaaaaatttctaaattgtttaacggaaattcaaaattagcaaataataaaacatggtcgaaggaacatttatctgcaaaaatttctgtaaaactagtgaacaatattaatgatgcagtaaatcatatcaataaatatggaacaatgcatactgatgcgataattacaaataataaaatttctgcaaaattttttataaaaaatattaaaagttcgatcgctattcacaattcttcaactcagtatgctgatggaggagaatttggttttggaggtgaagttggaattttcacaaacaaact

SEQ ID NO: 216212 - DNA, 1261 bp, Unknown
  Bacterial polypeptide expressing nucleotide sequence isolated from the Sargasso Sea
gaaaataatataaaaaagcatattgaagaaatatgtataaaagctagtaatgcttcaaaaaatttgtttcatgctagctctgaaagaaaaaatctagctttagaatcaatagctaaacatatcaataaaaataaaaatgagattttaaaagcaaactccattgatatggatttagcaaaacaaaataatattactggagctttactggatagattattcctcgacgaatccagaataaataatatgattcaaggtttgcacaatataattcgcttagatgaccctataggtgcagaaattaaaaattggactcctaaaaatggaattaatatgagccaaaaacgagttcctataggtgttattggcattatttatgagtctaggcctaatgttactgctgatgctagtgcactggctttaaaatctggaaactctataatattacgaggaggatctgaaagttttaattctagttcagccatagtggcttctataaaaaatggattaaaagaatctgcgatatctgaagattgtgtgcaaattgttaatactactagtcgagatgccgtcggcgaattattaaaaatgaataagtatataaatctaatcattcctcgtggtggaaagtcattaattgcaagagtgcaattagacagtaaaattgctgttttatctcatttagacggcctttgtcatacgtatatagataaagatgctgataaagagatgtcactagatattgttattaatgctaaaatgagaagaactggtatatgcggcgctactgaaactcttctttgtcatgaaaaggttataaatagtattctgcctgacataatagaaaaacttattgatcaaggctgcgaaattagagcagatagaaacatcaagcttctaaataagaatattaatgatgcttcagaaaaagactggcagacagaataccttgataagattatatctattaaaagtgtaaatgacgtatctgatgccataaaacatattgaacaatatgggtctaatcatacggatgctattattactgaaaattataaaacagctgaaatatttttaaatgaagttaacagtgctatagtacttcataatgcttctacacaatacgcggacggaggagaatttggaatgggagctgaaatgggaatagctactggtagacttcatgcaagaggtcctgttggtttagaacaactcactacatataaataccaacttagaggtaatggtcaggtaaggccataaa

SEQ ID NO: 216213 - DNA, 961 bp, Unknown
  Bacterial polypeptide expressing nucleotide sequence isolated from the Sargasso Sea
acttgggatcgaccaaatggattaaatatttctagagttgctaccccccttggcgtgatagggttaatttttgaaagcagaccaaatgttgctgccgatgcaggaggtttatgccttaaatcaggaaatgcagtgatactaagaagtggaaaagatggtcttagatctgctgaagcgatcgtcgcctctcttcaagctgcattagtatctgctgatcttccgaaagaatgcattcagatagtcccatccgaaagcagagatgctgcaaccctcatgttagaaggacttaatggctcaattgatgtgatagtgccaagaggaggcaaaagtcttgttgcagaggttgaaagatctgcaaaagttccagtttttggtcatttagagggcatatgtcatatttatatagatgagcatgcagatgaagagaaagctttagcagtctgtttaaatgctaaaatgcgtagaactggaatttgtggggctgtagagacaatactcgtaaacgataagattgcaaagtcttttgtgcctaaaattgttgcgtcattatcagaattaaactgtgagataagatgctgtgaaaaaacaattgattttgatggaagatcagtaccagcaactgaagaagattggtcaacagagtaccttgctccaattgtaagtttaaagtctgtcttaaatgttgatgaagcaattaatcatattgcgcaatacgggacaggacatactgaatcaataatcagtgagaataaagacaatcaaaccaagtttacacattctatcgatagtgcaattgttatgatcaatgcttcaactcagtttgctgatggtggtgaatttggtcttggtggtgagataggtatcgcaactggaaaatttcatgccagaggaccagtgggtgtagatcaacttacgagttttaagtacatcgtctctggcaacggacaaacaagagattaat

SEQ ID NO: 216214 - DNA, 730 bp, Unknown
  Bacterial polypeptide expressing nucleotide sequence isolated from the Sargasso Sea
atgtattcaactaattgagaccaccgacagagaagctgttaagactttattacatttagataaatatctggacgtaataatacctagaggtggaaaaggtttagtaaagcttataacagaggaatccagagttccggtcattaagcatcttgatggaatatgtcatgtatacatagatgacagcgcagatctaaataaagctgaagagatagcgttaaatgctaaaacttacagatatggtatttgcggagctatggaaacacttttaattcataataaagttgcttcagatgttttaccttctctaattggtaaattaaatgccgaaggtgttgaagtaagaggttgtaagaaaacaactgagtttgttgaagtttctgatgctaccgaagaagactggacaacagaatatcttgccccgattctttcaataagagtggttgaatcgatgaatgaagctatagaccacatacaaaagtatggatctcaccatactgactctatagtttcagaagatctgaaaaaagttgatgtcttctttaagcaagtcgattccagctcagtgatgcataatttacccacttgttgggcagatggatttgaatatggccttggagccgaagttggaatatctacagataaaattcatgcaaggggtccggttggcttggaaggattaacttcacaaaaattcattgttaaaggaaactcagaactaagaggagcttga

SEQ ID NO: 216215 - DNA, 997 bp, Unknown
  Bacterial polypeptide expressing nucleotide sequence isolated from the Sargasso Sea
aaattagatgatcctacaaataaaattattgaaaaatggaaaagacctaatggtttagtaattaaacaggtatcaacaccaatcggagtaataggtatcatttatgagagtagaccaaatgttacatcggacatttcaagcctatgtttcaaatcaggtaatgttgtaattttacgtggtggatctgaggcaattaattcaaatctaattattgcaaatctttttagacaatccttaaaacttaatagaattaatgaaaactttgttcaaatagtaaaaaacaaaaatagaaaatcggtagactatatgctttctaatatgcagaattttatagatgtaataattccaaggggcgggaaaaatcttgttaaaaaagttcaaactttatctaaagttcctataattggacacttggaaggaatttgtcatacttatatagacaaagatgctgatttaaaaatggctattaaagtagttcataacgcaaaattaagaaatactagtatatgtggagctacagaaactatattaatgcataaaaatatagttaaaaagttttgtaatcctgttttaaataaattaaccgaaagtaattgtgaaataattggtgacaagataattagaaaaacttttaaaggtccatcaaaaaaatcaaataaaaaaagttggtctactgaatatctatctccaaaagtttcagttaaaacagtgaacaatatcgatgaagcaatctatcatattaataagtttggaaccatgcatacagacagtatcataagtaaaaataaaaaaagtgcagattactttttaaaaaaaattaaaagttcgatagctatgcataatacctcaacacaatttgcagatggaggagaatttggttttggtggagaggttggtatttcaacaaataccctaccacctagaggtccggttggattaaatcaattgacatcttttaaatacttggttttaggcaatggtcaaattagaaaataaa

SEQ ID NO: 216216 - DNA, 760 bp, Unknown
  Bacterial polypeptide expressing nucleotide sequence isolated from the Sargasso Sea
tatgagtaaagaattacaaaaaattgaaaatattcaaaatatatctaaattaagtgttggtgaaagaattaactatttaaacaaacttaaaaaggaaattatacaaaatgaagataatatttattctgcgctacacaatgacttaaacaagccaaaatttgaagtttatacctctgaaattggattcctactcaatgaaataaaattgtttattaaacatttaaatgaatggtcaaaacccaaaaaagttaaaagctcaataattaactttccatcaaatgattttgtatatagtgaaccctatggaaaagtactgattatatccccatggaattacccttttcaattagcaattctccctgttttatcagctttttcttgtggcaatactgttgtattaaaacctagtgaacacactcctgaaacctctagacttgtaaacaaaataatttcaaaaatatttccttctgatttagtctgtgtggtcgaaggtgactataaagttgcatcaaaacttttaaaattaaaatgggattatatttttttcaccggaagtgttcgcgttggtaaaattgtagcagcagaagctgcgaaacagctaactcctcacactcttgaattgggcggtaaaagcccttgtattatagacaaaaaaacaaatttaaaaatagcatgtaaaagaattgtttggggcaaatttatgaatgctggacaaacttgtgttgcaccagactacatattggttcataaatccattaaa

SEQ ID NO: 216217 - DNA, 979 bp, Unknown
  Bacterial polypeptide expressing nucleotide sequence isolated from the Sargasso Sea
gagcagcagcactccatcagccgcatgaacgacctgttcgaagcccagcgcgcgctttttcgcaaggcccccatgccttccgccgacgagcgcattcaacacctgcaggctctcaagcatggggttctaaaacaccagcaggcgctgatcgatgccatcggagaagactttggccggcgctcggcggatgagacccggctggccgagatcatgccctcgcttgaaggcattcactacgccagcaagcgggtcaaaggctggatgaagccttcacgccgcaaggtcgggctggccttccagccggccaaggcgcaggtcatctatcagccgctgggcgtggtcggcattatcgtgccgtggaactaccccttgtttctggctatcgggccgctgatcaccgcgctgtcggccggcaaccgggcgatgatcaagatgagcgaatccaccccgcgcaccgccgaggtactggagcaactgctgggtgagatattccccgaggatcacgttgctgtggttaccggcgaggccgaggtgggtgtcgccttctccaaactggcctttgatcacctgctgttcaccggtgccaccagtattggtcgccatgtgatgcgcgccgccgccgacaacctgaccccggtcaccctggaactgggcggcaagtcaccggccatcatctccgccgatgtaccgctgaatgacgcggccgagcgcattgccttcggcaagggcgtgaatgccggccagacctgcgttgcccccgattacatcctctgcccgcgtagccgcatcgaggacctgacccaggctctgcaccagcagtttgcgcagatgtacccgtgtctgcgcgacaacgccgacttcacccaggtcattaacccgcgccaataccagcggttgcagagctatctgaccgatgccgaagagaaaggcgcgcgcattctgccggtcaacccggccaacgaagacctgagggcacgcg

SEQ ID NO: 216218 - DNA, 1429 bp, Unknown
  Bacterial polypeptide expressing nucleotide sequence isolated from the Sargasso Sea
ctggcccgccagcgcaacgcgttcgtgagcgaggggccgccgagcgtgcaacagcgcaaggcacggctcgcgcggctgcgcgccgtggtgctcgcgtatcgcagcgaagtggaggaggcggtcagcgccgatttcgggcatcgctcgcgacacgagaccgcgatcatggaactggtcggcgtgatccaggcgatcgactacctgacgcgcaacctgcgccgcttcacgaagccgcagcgccggcacgtcgggatcttttaccgggccgggcaggcgcacgtggagtaccagccgctgggtgtgatcggcgtgatggcgccgtggaattatccgttcgcgctcacgttcattccgctcgccaccgcgctggccgcgggcaaccgcgcgatgctcaagccgtcggaactgacgccgcgcaccagcgagctgatgcgccggatgctcgcggaaaccttcccgagcgaagaagtcgcggtcgtgctcggcggcccggaagtcggcgccgccttcagcggcttgccgttcgaccatctgctgtttaccggcagcacgcaggtgggccgcaaggtgatgaaggcggccagcgacaatctggtgccggtgacgctcgagctcggcggcaagagcccggcgatcgtcgcgagagggcacgtcgacggccggacgatgtccagcatcgtgttcggcaagttgtctaacggcgggcagacctgcgtcgcgcccgactatgcgctggtgcatgaagacgacctggacgcgttcgtcgcgcaatacgatgcggccgtcgcgcgtttctatccggacgggccgaccagccccgactacacgtcgatcgtcagcgaccggcatttcgatcgcctgaaatacctcgtcgacgaagcgcgcagcaagggcgcgcgcgtgatcgaggcgggcgtgaacccgcagcaggcggccacccgcaagcggacgctcgcgcccacgctgatcgtcggggccggcgacgatacgaccgtgatgcaggaagagatcttcgggccgatcctgccggtgcgcacgtatcgcacgatcgacgaagtcgtcgactacgtcaatgcgcgcccgcggccgcttgcgctgtattacttcggcgcgcaggacagcgactgcgagtcgttgctcaaacgcaccacgtcgggcaatgtcggcatcaacaacacgctcctgcatgtcgcgcaggaagacttgccgttcggcggcgtcggtccgagcgggatgggcgcgtatcacggcatcgagggattccgcgcgatgtgccatgccaagggcgtgttcgtgctggggcgctggaacctgccgagcctgctgcgcgcgccgttcggtaagctcgcggatctgtcgctggcggcgctgctcgggcgcagccgggaaccggcgggtgcacgggcggggttgagcgcgaagcgttgag

SEQ ID NO: 216219 - DNA, 1420 bp, Unknown
  Bacterial polypeptide expressing nucleotide sequence isolated from the Sargasso Sea
atgaagaacgatttacccgaagtcgccgcgctcgaagcgctgctacgcgatcagcgccatgcgtatttgcgcgcgccgtatccgtcgtgggaaacccgtgcgggacatctgaaagcgctgcgcaaagtcatgctcgacaatcgcgatgcactcgccgacgcgatgagcgccgacttcggcaatcgcgccaaacaggaagtgctgctcgcggaattcctgctggtgaaagaggagatcgacgccgcgctcaaacacggcaaacgctggatgaaagcgcagcgccgcagcaccagcaaatggctgatgccggcgcgcgcgaaagtcgtgccgcagccgctcggcgtgatcggcatcatcgtgccgtggaactatccggtgctgctcgccgccggtccgctgatcagcgcactgacggccggcaatcgcgccatcatcaagatgtccgaattgacgccacgtacctcggcgctgttcgagcaactgatcggccagaccttcgctcgcgaacacgtcgccgtggtgaatggcgacgccgcattcgccgccgcgttcagctcgcaaccgttcgaccacctgctgttcaccggttccaccaaaatcggccatgaagtgatgcgcgccgccgccgaacatctgacgccggtcacgctcgaactcggcggcaaatcgccggccatcatcggtcagcacgcgcgcttcgacaacgcggtggacaacctcatcgccggcaaaacgctcaacgcgggacagacctgcgtcgcgccggactacgtgctggtgccgcgtggcaaggagcaggcgttcattgaacgggcgcgcgcgcgaatggcgaaggtgtaccccgattttgcgcacaacctcgattacacatcgatcatttcggagcggcactttgcacgcttgcagcgccttgccgacgaagcacaggccgccggcgcgcagctgcacacgctcaccgacagcacgccggacgaggcaagccgccgctacccactgatcgccgtcacgaatgccccggaagagagcgcgttgatgcaggaggaaatcttcggcccgctgctgccgatcgtcccctacgacacactcgacgacgcgatcgcgtggatcaacgcgcgtccgcgtccgctcgcgctgtatctctacgccgacgacagcgcgacgatcgaacgcgtcacacgcgacaccatcgcgggcggcatggcgatcaacgaaacgctcatgcatctggcgtgcgaaagcctgccgttcggcggcgtcggtgcaagcgggatgggggcgtatcacggttacgaaggcttcgtgaatttctcgaagatgaagccggtgctgacgcaagcgcgcctgaatgcgcgcgactggatctcgccgccgtacggcaagcgggtgaacgcgctgctgaagttgatgctgcggttttgat

SEQ ID NO: 216220 - DNA, 1186 bp, Unknown
  Bacterial polypeptide expressing nucleotide sequence isolated from the Sargasso Sea
cctgcatggcatccattacgccaacaaacgcatcaagaagtggatgaagccgtcgcggcgcagcgtcggcatgcagttcatgcccgcttcggccaaggtcatctaccagccactgggcgtggtcggcatcatcgtgccgtggaactacccgctgtttctcgccatcggcccgctgaccggcgcgctagccgccggcaaccgggtaatgatcaagatgagtgagtccacccctgccacctcgcaactggtcaaggatctgctggcacgcgttttccccgaggacctggtcagcgtcgccttgggcgaggcggaagtcggcatggccttttccaaactgccgttcgaccacctgctgttcaccggtgccaccagcatcggtaagcacgtaatgcgcgccgccgccgagaacctaaccccggtgaccttggagctgggcggcaagtcgccagccatcgtttccgccgacgtgccgctggcggacgccgccgagcgcatcgccttcggcaagaccctcaacgccgggcaaacctgtgtagcgccggactacgtgctggtgccaagggatcgcgtcgatggcttcgtcaccgcctaccgccaggtggtgcagcgcttctatccgcagctcaaggacaacccggactacaccgcgatcatcaacgagcgccagctgacccgcctcaatggctacgtgcaggatgccgaagccaagggcgcgcgtatcgtctcgctgtacccagaaacccagggccggcgcctgccgcagagcctggtgctggacgtaaacgacgacatggagctgatgcaggacgagatcttcggcccgctgctgcccgtggtgccctacgaccgtatcgaagacgccttcgcctacgtcaacgcgcggccacggccgctggcgctttactacttcggctacgacaagcgcgagcaacagcgcgtgctgcatgaaacccactccggcggcgtgtgcctgaacgacaccctgctgcacgtggcgcaggacgatatgccgttcggcggcatcggcccgtccggcatgggccattaccacggccatgaaggtttcctgaccttcagcaaggccaaaggcgtgttcatcaagcagcgcttcaacgccgcgcggctgatctacccgccctatggcaaggcgatccagaagctggtctacaagctgttcgtacgctga

SEQ ID NO: 216221 - DNA, 610 bp, Unknown
  Bacterial polypeptide expressing nucleotide sequence isolated from the Sargasso Sea
actggggctttctagaacactttattctgttcttcaagaatatggtattgataatgtccaggcagtaatggttaggcgcagtggagatcctaaggacagtaatagaggtccgattaattcgattgaacctgttttaggggttcctagtcaccatggtccggatgtgcagacagttatttcaaatcttaatatacaaaccatggcagttaaagttcctactacgattatgcatgttcattgtataatagctgagcttgaaaaggaaccaaatgtagaaaagataatacaactttgggaagaaacaccacgtgttgatttgattgagggatatttgaagaacgatgattctaaggtttcaaatcttccaggtactgctgagataatggaattggccagagactcactttatacaagaggagatttaaatcagattgcagtgtggagagatggagtacatgcttttggaaataagttgtattattatcaagcaatacaccaagaatctgatgtcgttccggagaatattgatgctattagagcaatgtgtggtctcgaagaagataatatgaagtctattgtgaaaactaatgcgtctcttggtataaactag

SEQ ID NO: 216222 - DNA, 571 bp, Unknown
  Bacterial polypeptide expressing nucleotide sequence isolated from the Sargasso Sea
gtatggtattgataatgtgcaagctgttatggttagaagaagtggagatcctaaagatagtgatagaggtcccctcaattcaatagaaccagttctttcagttccgagtcaccatggtcctgatgttcaaacagttattgaaggtataaacatacaaactatggcagttaaagtgcctacaactattatgcatgttcattgtattatagctgaattagataatgaacctgatgttgatgagatattatctatgtgggaatctacaccaagggtaaatctgttggagggtttcttgaacaaagatggctctaaaattaggaatttaccaggtacagctgagataatggaattagctcgtgatgcattgtatactcgaggagacttaaatcaaattgcagtctggaaagatggagttcatgcatttggtaaaaaattatactattaccaagcaatacatcaagaatctgatgtaattcctgaaaatattgatgctataagggctatgtttagtctagaatcagacaatatgaaatctattttgaaaacaaacaaagcattaggcattgactag

SEQ ID NO: 216223 - DNA, 248 bp, Unknown
  Bacterial polypeptide expressing nucleotide sequence isolated from the Sargasso Sea
gatgagcattaaagtcgcaatcaatgggtttggaacaatcggaaagagagtcgccgacgcagtcgatgcgcaagatgacatggaaattgtgggcgtcactaaaactgggccttcttttggttgcgatttagctgtgaagaagggcttcccactctactgtaccttcgatgatgctgatcgaattgcccgttttgccgaacaaggatacgagtgccacggtggtctggctgatctgttggcgattgcag

SEQ ID NO: 216224 - DNA, 382 bp, Unknown
  Bacterial polypeptide expressing nucleotide sequence isolated from the Sargasso Sea
atggttacaagagttgcaattaatggatttggaacaattggaaagagggttgcagacgctgtagacgctcaagaagatatggaaattgtaggagttacaaaaacaagaccctcgtttggatgtgatcttgcagtgaaaaagaaatttcctttattttgtacattcgatacaaaagaaaaaattgcagcattcgcagatgctggttatgattgtaaagggggattatctgatcttctatcaatttgtgatgtgattatagattgttcgccaggaaaagtaggtgctgaaaatttagataaatatcaaaaagcaggagtaaaatctatttttcaaggtggtgaaaaacatgaattgacaggtaaatcatatacttcaagtgcca

SEQ ID NO: 216225 - DNA, 798 bp, Unknown
  Bacterial polypeptide expressing nucleotide sequence isolated from the Sargasso Sea
tcgcggatgtggttgtggattgcgctcctggtaaattgggtgctgagaacctagagaaatatcgctctgcaggagtaaaatacattttccaagggggagaaaaacacaatctgaccggtctctcttacacttcttccgctaatcacaaggagaatctgaatgccgaaggaacaagagtagtttcttgcaatactactggactatctagaacacttgtgcccctattcgagcactgtggatcgttgaaagttgagtgtacaatggtgaggcgtgcggctgatccaggagactctggcaagggcccgattaatgctataaaacccgttctcaaggtccctagccatcatgggccagatgtcatgacggtgaaacccgagattgagataaacagccttgcagtcgcagttcccaccacaataatgcatgttcactgtattattgcagatttaccaaagggccacggtctatctacagagtccataatcgaaatgtggtcgaacacccccagggtgatcataatgaatggtgccgatgatagaatccccactactgcagaggtgatggagatggccagagatataggtaggaagtggggggacttacacgagattttcgtttgggaggatggagtgaaacttgtgggagatcgcctgtattattttcaagcgatacatcaggagagtgacgtaattccggagaatgtagactgcatcagggcactaatgggtgttgaagaagactggaggaaatcttccgaaaagaccgattcagccatcagtacttactattccacatgac

SEQ ID NO: 216226 - DNA, 765 bp, Unknown
  Bacterial polypeptide expressing nucleotide sequence isolated from the Sargasso Sea
gatgagcattaaagtcgcaatcaatggatttggaacaatcgggaagcgagtcgccgacgcagtcgatgcgcaagatgacatggtaattgtgggcgtcacaaaaacgggaccttcatttggttgcgatttagctgtgaagaagggtttccctctctactgtaccttcgatgatgctgaccgcattgctcgttttgctgaacaaggatacgaatgccacggaggccttgctgatttgttggcgattgctgatgtagtggtcgattgttcaccaggaaagttaggggctgagaatctggccaagtatgaaaaagccggaatcaaatacatgttccagggtggcgaaaagcacgcattgacaggactatcctatacctcttcagcaaaccatgcagaaaatctcaatgcacagggtacgcgtgtggtctcttgcaacaccacaggtttgtctcgaacattggtgccactgtacgagcattgtggttctctcaaagtggagtgcacgatgattcgcagagcggccgatcctggtgattcaaagaagggtccaattaacgccatcaaaccagtgctgaaagtacccagtcaccacggacctgatgtgatgacggtcaagccagaaattgagattaacagcctcgcagttgctgttccaaccaccatcatgcatttgcactcaatcattgctgattttactgaagggcatgggttgacgaccgactccattctatccatgtggaggcaaactccacgcgtcatcatcatgca

SEQ ID NO: 216227 - DNA, 1048 bp, Unknown
  Bacterial polypeptide expressing nucleotide sequence isolated from the Sargasso Sea
catggttacaagagttgcaattaatggatttggaacaattggaaagagggttgcagacgctgttgacgctcaagaagatatggaaatagtaggagttacaaaaacaaggccctcttttggatgtgatcttgcggtgaaaaagaaattccctttattttgtacatatgatgcacaagaaaaaattgcagcattcgcagatgctggttatgattgtaaagggggattatctgatcttctatcaatttgtgatgtgattatagattgttcgccaggaaaagtaggtgctgaaaatttagataaatatcaaaaagcaggagtaaaatctatttttcaaggcggtgaaaaacatgaattgacaggtaaatcatatacctcaagtgccaatcatcttgaaaattttgatattgactgtactagagtagtttcttgcaataccactggtttatctaggacattggttccattattcaaatcagttaaagaaaaaggaactctttcagtaaattcagttatgattcgtagagccgcagatcctggagattcttcaaaaggacctataaatgcaataaaaccagttcttaaagttcctagtcatcatggacccgatttaatgacggttaagccagaaattgagatcacaagtcttgctgtggcagtaccaacaacaattatgcatttacatgcaattactgttgaattaccttctgagcatggcctttcaacacaatcagtaattgagatgtggaaggaaacaccacgtgtaattattatgaatggatcagatacaaaaattacatctactgcagaagtaatggaattagccagagatattggtaggaaatggggagatttacatgaaatttttgtttgggaagatggagtaagtttacaaggaaatacattgtattattttcaagcaattcatcaagaaagtgacgttattccagaaaatgtggatgctattcgggcgataatgggtttggaaaaagattggatggtttctgttgataagacagacaaggcgatttcagcatattatggtatttaa

SEQ ID NO: 216228 - DNA, 952 bp, Unknown
  Bacterial polypeptide expressing nucleotide sequence isolated from the Sargasso Sea
atggaactacagttatttggcattaatcacaagacctcaaatgttgctgagagggaaaagttcattataaatgagtctaaccaaattttactcgatagtcatttaaaaaaactatttggtaatgattttgaatcattttttggaatttctacctgcaataggacagaaatataccttgttggaagacctggtatctcaaaacatatttttaaagaagtacttaaattattaaatgttaaagatatctcaagtgatagtttttattttctatctaatcatgatgctcttgctcatatgtgcaaagtagcttctgggattgattcacaggtattaggcgagcaagaaatctttggtcaattcaaaactgctttaagaaatgcaaaagaatacaaaataattggcaataagttatcttattttgctgataaggtcattgagattgcaaaaaaagcgaggactgatactgaaattggacttaattctctttcagtaagtggacttgccatgaaattgattaaaaatatatttgaggcaccagaaaatcagaatatattagttattggagctggctcactttcaaagagtgttattgaaaatttatatgataaaggaattcgcaatattaaattagttaatagaactgttaaaaaaattaatctaggtaaaaactttgaaattttgtcttcttcacttgattcacttcatgatcagcttgaattggctgatattgttatttcttcatcaataactgaagttcctcttatcggtaaaggagcaattgaaaatgctttgaaattcagaaaaaataaacctattttattgatagacttgggagttccaagaaacattgaagatgaaataagaagaattgaacaggcttatttatattcaatcgatgacattgaaaaaattactcaagaaaattttgggcaacgctctattgaggctgaaa

SEQ ID NO: 216229 - DNA, 583 bp, Unknown
  Bacterial polypeptide expressing nucleotide sequence isolated from the Sargasso Sea
atgtgcgaatcgtccgtgtcaacgtgtaacagagccaacgtcaatgagtaccaccgttacaacctggtcacgccggtgtgcatccgcacggcgggcagcccaccgccaccggccccttcaccttcaacttcgcttcccccgggcgcgagcaccacgacaacgacaacgacgcttcccccgggcgcgagcactacgacaacgacaacgacgacaacgtcgacgacgacgacgacgacgactaaccctgacaactgtgcccgcactttgtctaagtgcaccgttgcgtgcgaaaagtctgacgagcgaaccgccaccatcacgcgcaacgctactaaaaacggaacctgcccaacgacccttcccgactgcgcgccaggagacggggattgcgtcgccagcgaggcgtcgtcttcgtcggggatggccgccggctatgtggcgttaattgttgtaatcggggtgatgttcgcgggggtcggcgtcgcgtatgccttatggccccaaaagttcaacgagttggtcggtcgtttccgcgagcaggctaaaggtgctgcagactacaacaaatactttttgttgtgag

SEQ ID NO: 216230 - DNA, 351 bp, Unknown
  Bacterial polypeptide expressing nucleotide sequence isolated from the Sargasso Sea
catggaactacaattattcggcatcaatcataagacctcaaatgtcgcagaaagagagaaattcattataaatgagtctaaccaaattttacttgatagtcatttaaaaaacattttccacaatgaacttgagtcattttttggaatttcaacatgcaataggacagaaatatatttagttggcaaatcaggtatttctgagaaggttttccatgaaatattaaaaaaattaagtataaatgatatttctagtgacagtttttattttctttcaaatcacgatgctcttgttcatatgtgcaaagtcgcctctggtattgattcacaagttttaggtgagcaagaaatttt

SEQ ID NO: 216231 - DNA, 286 bp, Unknown
  Bacterial polypeptide expressing nucleotide sequence isolated from the Sargasso Sea
atggaattacagttatttggtataaatcataaaacatccaatgtctccgaaagagaaaaatttattataaatcactctaatctagttttattagataataatttaaaaaaaaattacaagaatgaccttgaatcattttttgggatatccacctgtaatagaacagaactttatattttaggaaaagcaggaatttctgagaaaattttcaatgaagtttcgaagattttaaaattagatgatataccaaaagatagtttttattttcttgatggtcatgatgctt

SEQ ID NO: 216232 - DNA, 846 bp, Unknown
  Bacterial polypeptide expressing nucleotide sequence isolated from the Sargasso Sea
aagacctcaaaagtttcagatagagaaagatttatcgttgatgattcaaatctcgtttatctaaatgattttctaatatcaaaattaggtaaaaagatttctggtttttttggcctttctacatgtaataggactgaaatatatttctatggagacaagggcatagaagatgatgtcctaaaactaactaaggaggcacttaatatttctgatatacctgataaaaacttttatatttttgacggtttaaaagcatttgagcatatgtgtagagtttgttgcggcatagattctcaagtggttggggagcaagaaatatttggacaatttaaaaacgcatataattcagccaaagcttttaggctcgttgggaaagaacttatgatttatgttgaaaaagtttttgaaattacaaaaaaagtaagaactgaaacaaagataggtataaatccattatctgtgagcggcttatcattcaacctcgtaaaggaaatttttgagaatcctgaaaacaaggaagtcctagtaattggaggaggagatttagcaaaatctataattaaaaacctctttgacaaaggcttgaggtctatttcggctataaatagaactataaaagaaataaagatatctgaagatttttctgtaattccaatgcctctaaatctagtccatagagaaattattaatgctgatattattatttgttctgcatcaagtcttacaccaattattggtaaaggagcagttgaaaatgcatttaaaaatagaggaaacaaaccaatgatgataatagatttggctgttcctaggaatgttgaaccagaaatagaagatttagaactg

SEQ ID NO: 216233 - DNA, 307 bp, Unknown
  Bacterial polypeptide expressing nucleotide sequence isolated from the Sargasso Sea
aagaaaaggatcattttcctagaatggtgggcaagtctagaggctgttccagtaattaataaacttagatcagatttggagttaattagaaaagaggaattgcaaaaagcacttagcagaatgggaccagatttttcggctcgagaaagaaaagttgtggaagctctgactaaaggaataattaataaaatacttcatacgcctgttactaagttgagaagtcctcaatcaagagaagaaagacaagtttctttgaaaatcgttgaaaaattgttttctttggtagaagaggataaaaataagtaac

SEQ ID NO: 216234 - DNA, 139 bp, Unknown
  Bacterial polypeptide expressing nucleotide sequence isolated from the Sargasso Sea
atgaccatttttgctttaggtattaatcataaaactgcacctgtctccttacgtgagcaggtcgcttttgcgcctgaacaaattttggacgccttacgggatctgacgacgacgacccaggtgtccgacgcagtgattt

SEQ ID NO: 216235 - DNA, 600 bp, Unknown
  Bacterial polypeptide expressing nucleotide sequence isolated from the Sargasso Sea
tatggaatttcattgctggggcataagtcataaatctacctctttagaggttagagaaaaatttgcgtttaataaagacaagattgatgaaatcttagcaaaacttaaaactttgacagcttttgacaatggtattttcctatcgacatgcaatagaacagaattttattcattttgtccgagaatagaaataaagaaatttgatgcacatttagagcatattcttggcaagggtctggaagtaagaaaaaatgaccaatatcttttctcagatagtgatgcatttgctcatttacttcgtgtcatgacgggtattgattcgatgattgttggcgaaccagatatttttggtcaagttaaaaaggcatatgagaattctcgctcttttggttacttaaattcaaaccttgatgcaattttctctaaatctataaatattactaaggaaattcgttcagctacaaatttatcaaagaacccaatctcaatagcatcattagttgaaaatataatcttgaaggaaggggattcccctgttctcattattggtgctggcgatgtaggtagacctttattaaagagacttttagcggataatta

SEQ ID NO: 216236 - DNA, 637 bp, Unknown
  Bacterial polypeptide expressing nucleotide sequence isolated from the Sargasso Sea
tatggaactacaattatttggcataaatcataagacctctgttatatctgagagagaaaaatttattataaatgagtctaatcaaattatattagatagtcacttaaaaagaatttttaaggatgattttgaatctttttttggcatttcaacttgtaatagaacagaaatttattttgttggtaaacaggggattattaatgaagtttttaatgaagtattaaaaattttagacatcaataatatacctaaaaagtgtttttattttcttacaaaccataatgcccttgctcatatgtgtaaagttgcatctggaattgactcacaggtgcttggtgaacaagaaatattcggacaatttaagacagctttcaaaaaatcttcagaacataatatggttggaaaaaaactttctttttttacaaagaaagttattgaaattacaaaaattgctagaacaaatactgaaataggactaaatcctttatctgtaagcggtttaacaataaagttaatcaataatatttttgaaaagccagataaccaaaatgttttagtggttggagcagggtcccttgctttaagtgttatggacaatctttatagaagcgggatcaacaatattaattctgttaat

SEQ ID NO: 216237 - DNA, 197 bp, Unknown
  Bacterial polypeptide expressing nucleotide sequence isolated from the Sargasso Sea
tatgactattattgcttatggaattaatcattcaacagcgcccgtagatatcagggagaaggtttcttttgggacagaaattatgcctaatgctttgaatgaactgaaaaaccaaaatggcgtttatgaagcggcaatactttctacctgcaatcgcacagaaatttattgcaatatagatcaaagtgaaaatcgta

SEQ ID NO: 216238 - DNA, 835 bp, Unknown
  Bacterial polypeptide expressing nucleotide sequence isolated from the Sargasso Sea
atgcaagaaattcacctagttggaattaaccataagacctcaaaggtttcagatagagaaagatttatcgttgatgattcaaatctcgtttatcttaatgattttttaatatcaaaattagataaaaaaatttctggtttttttggtctttctacatgtaataggactgaaatatatttctatggagacaggggtatagatgatgatgtccttaggctaataaaagaggctcttaatatttctgatatacctgataaaaacttttatatttatgatggtttaaaagcattagagcatatgtgcagagtttgctgcggtatagattctcaagtggttggggagcaagaaatatttggacaattcaaaaacgcatataactcagccaaggcttttaggatcgttgggaaagaacttatgatttatgttgaaaaagtttttgaaattacaaaaaaagtaagaactgaaacaaaaataggtataaatccattatctgtgagtggcttatcatttaacctcgtaaaggaaatatttgagaatcctgaaaacaagcaagtccttgtagttggaggtggagatttagcaaaatctataattaaaaacctatttgacaaaggtttgaggtctatttctgctataaatagaactataaaagaaataaagatatctgaaaatttttctatcattccaatgcctctaaacctagttcatagagaaattattaatgctgatattattatttgctctgcatcaagtcttacgccaattatcggtaaaggagcagttgaaaatgcatttaaaaatagagggaataaacccaatgatgataatcgatttg

SEQ ID NO: 216239 - DNA, 860 bp, Unknown
  Bacterial polypeptide expressing nucleotide sequence isolated from the Sargasso Sea
attcagtgacccggcaaaattaaaaagagtgatcgctgatcttgaccaagaggactggtctttattaagttccgatgttaaaggggatgcctatgaagcccttttggaaaacagtgtgggtgatgtaaaaagtgcggcaggacagtactttacaccgaggcccttaatcagagcacttgttgagatcatgaaacccaaaccaggagagatgatctgtgaccctgcatgtggaactggagggtttttgatgttggcccataaatacattgttgataactatccaaacatgacaagggaggaaaagaaaacattaaaatccgatagtttaaaaggtggagaactggttcatgatactgcccgcctttgcaccatgaatatgatgcttcatggcttgggctctgacgaaaaaccaacagtatccgtcgaagatgctctcaaggcagattctggagatcgttttgacctcgttttggcaaatcctccttttggtaaaaagagtagtactgttttctatggagaagatggagaaaaaaagaccgaaaaagaaaccatccaacgccaagatttctgggcaactacatccaacaaacaattaaattttgtccagcacatcaagaccatcttaaaaataaacggtcgtgcagctgtggtggtcccagacaatgttttatttgaaggcggtgcgggagaaacaataagaagaaagctgctttctgattttgacgttcacactttacttcgactgcccactggtttgttttatgcccaaggggtcaaggccaatgttttattttttgagaaaaaacctgcccatgctgagccttggacaaaaaaactctggatatatgacctcagaacaa

SEQ ID NO: 216240 - DNA, 799 bp, Unknown
  Bacterial polypeptide expressing nucleotide sequence isolated from the Sargasso Sea
tcatttatattatcaaaaaatcacattaactatattagtgatcttcttaaaagaaaatttacagatcaattaagttcattattttttttatcaacatgtaatcgaacagagtgttacatgatttgtgaaactgaacaaacttgtagagattttttcttagagatttacaggatgttagatagtgatttggatcaagaaagctttttttattttaaagcccacgatgatgcatttgttcatttgtgtaaagttggcagtggtgttgattcaagaatcatcggagaaaaagaaatatttggtcagttaaagaatgcatttaaagaatatgacgaaatgggtctaatctctaatcaaatgcgtgatatatgtgatagagcgttttcaatttcaaagtttattcgaaatgaaactaacattgattcaactccaatatctatatccacattggtattaaagttacttaaagagttatttgaaaatccatctgaacaaaacattctgctcattggtgcaggtgatgtggcgacaaatattattaaaaaccttcatcaaaatggatataaacagatagagttccataatcgaacaaaaaaaacaatttctatttcaaactcacttagacttgaatctaaacctctaaacaagatcaacttagcccttaaaaaaaatgacatattgatttcatccattagttcagacttaccaattataggtaaaggattgattgatgaaaacttaaaattaagaaagaataaaccacttttacttatagatttaggcgtgcctagaaatatgaaac

SEQ ID NO: 216241 - DNA, 788 bp, Unknown
  Bacterial polypeptide expressing nucleotide sequence isolated from the Sargasso Sea
aaatcataaaacatccaatgtctccgaaagagaaaaatttattataaatcactttaatctagttttattagatagtcatttaaaaaataatcttaaagatgactttgaatcattttttgggatatctacttgcaatagaacagaactttatattttgggaaaagctggaatatctcagagaatctttaatgaagtttcaaaggttttaaaattagacgacatacctaaagataatttttattttcttgatgatcatgatgctttagtacatatgtgcaaagtagcctctggtattgactcccaagttcttggagaacaagaaatttttggacaatttaaaaaagcaatcaaaactgcagaggggttagaaattattaatactaagttattaaatcttagtaataaagttattgagattgcaaaaaaagctaggacagaaacaaatattggccttaattctttatctgtaagtgggttggcgcttaagcttgtaaggaatatttttgaaaaaccacaaaatcaaaatgttttagttgttggcgcgggttctttggctactagccttattaataatttatataagaatggaataaataaaattaatttagtaaatagaagcatgaagaaaataaaactattagataattatgaaattatttcatcttcgtttgatagcctgcatgatgctttagaaattgcagatattgtaattgcttcagcagaaactgacatgccccttataggaaaaggagcaattgaaaatgctcttaaaaaaaggcaaaacaagc

SEQ ID NO: 216242 - DNA, 787 bp, Unknown
  Bacterial polypeptide expressing nucleotide sequence isolated from the Sargasso Sea
aatgcaagaaattcacctagttggaataaaccataagacctcaaaggtttcagatagagaaagatttatcgttgatgattcaaatctcgtttatctaaatgattttctaatttcaaaattagataaaaagatctctggtttttttggcctttctacatgtaacaggactgaaatatatttctatggagacaagggcatggaagatgatgtcctaaagctaaccaaggaggctcttaatatttctgatatacctgatagaaacttttatatttatgacggtttaaaagcatttgagcatatgtgtagagtttgttgcggcatagattctcaagtggttggggagcaagaaatatttggacaatttaaaaacgcatataactcagccaaagcttttaggatcgttggtaaagaacttatgatttatgttgaaaaagtttttgaaattacaaaaaaagtaagaactgaaacaaagataggtataaatccattatctgtgagtggcttatcattcaacctcgtaaaggaaatatttgagaatcctgaaaacaaggaagtccttgtaattggaggaggagatttagcaaaatctataatcaaaaacctctttgataaaggcttgagatctatttctgctataaatagaactataaaagaaataaagatatctgaagatttttctataattccaatgcctctaaatctagtccatagagaaatcattaatgctgatattattatttgctctgcatcaagtcttacaccaattatcggcaaaggagcagtgaaa

SEQ ID NO: 216243 - DNA, 862 bp, Unknown
  Bacterial polypeptide expressing nucleotide sequence isolated from the Sargasso Sea
cttgaaagggtcggaaatatcaagagaccggccccttgtggtcggcgccaatcatcgtagcagttccctgaccattcgggatcgcttattcgtcgaagatgcagacattcccgcgttcttaaacaagcttcaggccaagggtatcgaaaatgccgtcttgctctccacctgcgatcgagttgaggtgattgcctcgcatagtgatccaaggaacgcggctgggtctataatagcctgttttgccgacttactcggtgatcctggtatcatgctaaaaggccagtgctacactctggtagatgatcgtgcggtcgaacagatctttgcagtcgcttcttccctggatagccaaatcattggtgaacctcaagttcttggccaagttaaggccgcccatcggatagcccgcgaaaacggaatggttggtggcggattggaggtgcttatgcaggccgccttcggggttgcaaaacgggtgcgcacggaaacggctatcggcgaacgccccgtatcaattgccgctgccgcggtcgatttggctcgtgacgtacatggcgacctgtctcgatcgaacggcttgttaattggtgtcggggacatgggccacacggtaacagaacacctaatggctgccggtctcgaacggcttacagtaacccatcctttagaggctcgtgccgctatcctcgctaggaacttgaattgccatcgtatctcttacattgaccgcgccaagtcgatggcggatgcggatgtggtagtcaccgcgcttggtcggcgcaattatgctttaaatgcagacatggtccagagcgccctcaagactaggcgtatgcgacctatgctcttggttgacgtggcg

SEQ ID NO: 216244 - DNA, 814 bp, Unknown
  Bacterial polypeptide expressing nucleotide sequence isolated from the Sargasso Sea
atggaactaaagctatttggaattagccataaaactgcaaatttagagatgcgggaatcttttgtcataaatgatgaccattatagttatatgcagaatcttttagaaacaaagtttgctggtgaaatagatagcatctttgttttatcaacgtgcaatcgaactgaggtttattcttattgcagaggtgaggattcccatcaacaattttttcaatcaatttataaatatttaggctgtgagttagaagtaactaaacacttttatcaattctctggaatagaggcatttaagcatatgtgttcagttgcatcaggcattgagtcaagaatattaggtgagaaagaaatatttggtcaattcaaaaaagccaatgagcttttcttaaatataggccttaataaacgtatgttattaatgtatacggatgcagcaatcaagattgctaaacaagttaggtcaaatacaaaaattgatcataatcctgtatctgtttcttcattagtattaaatgtcttcgctgaaatctttgaaaaccctttggatcaaaacatcattacaattggagctggtgaggttgcttcaggagttttgaactctttagtaaatgcaggattccaaaatctaacatttgcaaatagaactcctaaaaaaattagccttggaaataatattaacctctcgtctaggccactaaacaagcttgaccaattattattaggacaagatatcatcatttcatcaatctctaccgatttaccctttatcggcaaaggattgatcgaaaaaatttgtacttatagaaagaataaac

SEQ ID NO: 216245 - DNA, 838 bp, Unknown
  Bacterial polypeptide expressing nucleotide sequence isolated from the Sargasso Sea
tctagttttattagatagtcatttaaaaaaatattatggtaaagaacttatatctttttttgggatatcaacttgcaatagaactgaactatatctattgggaaaagctgggatttcaaaagatatttttaaagatgtttcagatttattaaatttagttgaaatccccaaagatggtttttattttctgaacaatcatgatgccatggttcatatgtgtaaagtagcatctggaattgattcacaggttcttggagagcaagaaatttttggccaatttaagaatgcttataagatggcaaaagatttaagcattcttgataacaagctatcaaatctaacaaataaagttatagagattgcaaaaaaggctagaacagaaacaaatattggccttaattctttatcagtgggcgggctagctcttaaattagtaaggaatatatttgaaaaacctgaaattcaaaatgttttagttgttggagcaggttctttggctaatacccttgtaaataatttatataaaaatggaatcaataagataaatattgttaatagaagtataaagaagattaaattatttgatgattatgaaattatctcagcctctctggatagtctccataatgccttggaaatagcagatatagtaatcgcctcatccgatactgatatacctcttattggaaagggagcaatagagaatgctcttagaaaaaggaaaaataaacctattcttttaattgatttaggtgttccaagaaatattgaagaagaaataagaaatattgagcaagcatatttattttctatagatgatcttgaaaagataacccaa

SEQ ID NO: 216246 - DNA, 460 bp, Unknown
  Bacterial polypeptide expressing nucleotide sequence isolated from the Sargasso Sea
tatggaattacattgttggggcataagtcataaatctacttctttagaagtaagggaaaagttcgcgtttaataaaaaggaaatagatgaagttctcacaaacctaaagattacaaatacatttgacaatgggattttgctctcaacttgcaatagaactgaattttactcagtctgctcaaggtctgatataaaaaattttgaaaaggttgtttctaaaattttaaataaatttgaaaatctcagaaaaaatgaccaatatctgtatgctggtactgatgcatttaaacactcattaaaagtgatgacaggtatagattcaatgataattggtgagccagatatatttggccaagtaaaaaaatcgctaaataattcacgttcaatgggatttttaaatactgaattggaaaacactttcaataatgcgataagattttcaaaactcataagaactgaa

SEQ ID NO: 216247 - DNA, 207 bp, Unknown
  Bacterial polypeptide expressing nucleotide sequence isolated from the Sargasso Sea
gatgaattttactctcctcggctggaatttccgcagtaccccacttgaaatacgagaccggctatcgctgacggaacaggaacaactcgaactgatccaacagatcaatgcgcgctgcgggattaaggaaagtgtcctgctcagcacctgcaacaggaccgaactttatctatacaacatggagcggcctgcagaagaactgctgga

SEQ ID NO: 216248 - DNA, 655 bp, Unknown
  Bacterial polypeptide expressing nucleotide sequence isolated from the Sargasso Sea
tatggaatttcattgctggggcataagtcataaatctacctctttagaggttagagaaaaatttgcctttaataaagataagattgatgaaatcttaataaaacttaaaacattaacagcttttgataatggtattttcttgtcaacatgcaatagaacagagttctattctttttgtccgagaatagaaataaagaaatttgatgaacatctagaaaatattcttggaaaagaattagaagtaagaaaaaatgatcaatatcttttttcagatagcgatgcatttagtcatttgcttcgtgttatgacaggtatcgattccatgattgtaggtgaaccagatatttttggccaagttaagaaggcatatgaaaattctcgtacttttagctatttgaatgcagaccttgatgcaatttttgagaaatctataaatatcactaaggaaattcgttcaactacgaatttatcaaaaaacccagtctcaattgcatcattagtggagagcataattctcaaggaagggcattcacctgttctaattattggagctggtgatgtaggaaaacctttattaaagagacttattgctagcgactatgatgtagccctttttaatcgatctcaagtagagattgaaggagtaaaaagcaaa

SEQ ID NO: 216249 - DNA, 727 bp, Unknown
  Bacterial polypeptide expressing nucleotide sequence isolated from the Sargasso Sea
ctgcgaccgcgttgaggttctggcctcgcatagcgatcctcggaatgcggctgtgtctatccaagcctgttttgccgatttgcttggcaataccgaagtcaccctcgaaagtcagtgctacacactgatcgatgatcgcgccgtcgaacagattttcgccgtttcggcgtccttggatagccatatcgttggcgagccgcaggtcctaggccaggtaaaggctgcccatcggatagcccgcgagaatggtatggtgagtggcggattggagaccctcatgcaggccgcctacggtgctgcaaaaagggtgcgcaccgaaacggctatcggcgaacgcccggtatccattgcctccgccgccgttgacttggcgcgcggcgtgcatggcgatctctctagtgcgagaggcttgctgattggtgtcggggacatgggccacatggtggcagagcacctcgtggctgccggtctcgaacggctcacgatcacccaccccttggaggtccgcgccgccattcttgcccggaccctgaattgccattgcatcggttacgatgaccgcgctgaggcgatggcaagtgcggatgtggtcgtcaccgcgcttggacggcatgattatgccgtgaacacagacatgatcaagagcgctctcaagactaggcgcatgcgacccatgttcctggtcgacgtggcggtgcccggcgacgtggatccggccatcaaccgg

SEQ ID NO: 216250 - DNA, 152 bp, Unknown
  Bacterial polypeptide expressing nucleotide sequence isolated from the Sargasso Sea
tgtggaagctctgactaaaggaataattaataaaatacttcatacgccggtcaccaagttgagaagtcctcaatcaagagaagaaagacaagtttctttgaaaatcgttgaaaaattgttttctttggtagaagaggataaaaataactaat

SEQ ID NO: 216251 - DNA, 316 bp, Unknown
  Bacterial polypeptide expressing nucleotide sequence isolated from the Sargasso Sea
tttagtagaagaagaaaggatcatttttctagaatggtgggcaagtttagaggccgttccagtaataaataaacttagatcagatttggagttaattagaaaagaggaattgcaaaaagcacttagcagaatgggaccagatttttcggctagagaaagaaaagttgtggaagctctgactaaaggaataattaataaaatacttcatacgccggtcaccaagttgagaagtcctcaatcaagagaagaaagacaagtttctttgaaaatcgttgaaaaattgttttctttggtagaagaggaacaaaataactaa

SEQ ID NO: 216252 - DNA, 628 bp, Unknown
  Bacterial polypeptide expressing nucleotide sequence isolated from the Sargasso Sea
atggaattacagttatttggcataaatcataagacctctgatgtttctgagagagaaaaattcattataaatgagtctaaccagattgtattagataatcatttaaaaaaaatttttaagaataaattagagtctttttttggtatatcaacttgtaatagaactgagttttatttatttggtgagccaaatatttcatcagaggtttttcatgaggttatgactattctcgaaaatgaagatatgaacaaggaaagtttttattttttaaacaatcatgatgctttggttcatatgtgcaaagtagcttctggcattgattctcaagttcttggtgagcaagaaatattggggcagtttaaaagcgcacttaaaaaagcacaagaactcaatattattaagagcaaactattaaatctttcaaataaagtagtagagatatcaaagcaagcaagaactgaaacaaatataggcttaaactctttatcagttagcggtttagcatataagctagaaaaaaatatatttgaagaacctaaacatcaaaatattttgatagtaggagctggatcattagcccatagcgtaatggagaatctatttaaaaatgggatacataaaattaaat

SEQ ID NO: 216253 - DNA, 365 bp, Unknown
  Bacterial polypeptide expressing nucleotide sequence isolated from the Sargasso Sea
ttcaagaaatcagaattttagacagaaaatagcaaaggaagcggaatctttagtagaagaagaaaggatcatttttctagaatggtgggcaagtttagaggccgttccagtaataaataaacttagatcagatttggagttaattagaaaagaggaattgcaaaaagcacttagcagaatgggaccagatttttcggctagagaaagaaaagttgtggaagctctgactaaaggaataattaataaaatacttcatacgccggtcactaagttgagaagtcctcaatcaagagaagaaagacaagtttctttgaaaatcgttgaaaaattgttttctttggttgaagaggaacaaaataactaac

SEQ ID NO: 216254 - DNA, 478 bp, Unknown
  Bacterial polypeptide expressing nucleotide sequence isolated from the Sargasso Sea
atgaattcattatacattatagcattcactcatagaaatttcacatttgatgaaataggactttttcatttagaggatgaaattagaatagcgaaattaaaaaaacttaaaattgactttcaatttgacgaattaatgtatttatcaacttgtaatagggttgagttcattattgattcaagtcaaaatataaattctgggtttttaaaaaaattagctgctaattttttaactaattcagatccaaaatatattgattcaatagtaaataaaattgaagtcttttcggaaaataaagctgttcatcatcttttttcagtggcttcttctattgattctttggtagtaggagaaagagaaatcatcacacaagtgagaaaagcatttgaagaatgtaatcaaaataatttattgggagattctattaaggcgctaattcagattacaatttctactgcaaaaagagtatatacggaga

SEQ ID NO: 216255 - DNA, 601 bp, Unknown
  Bacterial polypeptide expressing nucleotide sequence isolated from the Sargasso Sea
atggaatttcattgctggggcataagtcataaatctacctctttagaggttagagaaaaatttgcgtttaataaagacaagattgatgaaatcttagcaaaacttaaaactttgacagcttttgacaatggtattttcctatcgacatgcaatagaacagaattttattcattttgtccaagaatagaaataaagaaatttgatgcacatttagagcatattcttggcaaagggttagaagtaagaaaaaatgaccaatatcttttttcagatagtgatgcatttgctcatttgcttcgtgtcatgacgggtattgattcgatgattgttggcgaaccagatatttttggccaagttaaaaaggcatatgagaattctcgctcttttggctatttaaattcaaacctcgatgcaattttctctaaatctataaatattactaaggaaattcgttcagctacaaatttatcaaagaacccaatctcaatagcatcattagttgaaaatataatcttgaaggaaggggattcccctgttctcattattggcgctggcgacgtgggcaggcccttattaaagaggcttttagtgaataattaaa

SEQ ID NO: 216256 - DNA, 553 bp, Unknown
  Bacterial polypeptide expressing nucleotide sequence isolated from the Sargasso Sea
catgcaagaaattcacctagttggaataaaccataagacctcaaaggtttcagatagagaaagatttatcgttgatgattcaaatctcgtttatctaaatgattttctaatttcaaaattagataaaaagatttctggtttttttggcctttctacatgtaacaggactgaaatatatttctatggagacaagggcatagaagatgatgtcctaaagctaactaaagaggctcttaatatttctgatatacctgataaaaacttttatatttatgaaggtttaaaagcatttgagcatatgtgtagagtttgttgcggcatagattctcaagtggttggggaacaagaaatatttggacaatttaaaaatgcatataactcagccaaagcttttaggatcgttgggaaagaacttatgatttatgttgaaaaagtttttgaaattacaaaaaaagtaagaactgaaacaaagataggtataaatccattatcagtgagtggcttatcattcaacctcgtaaaggaaatatttgagaatcctgaaaacaaggaa

SEQ ID NO: 216257 - DNA, 616 bp, Unknown
  Bacterial polypeptide expressing nucleotide sequence isolated from the Sargasso Sea
atcgagcgggcccaagccttgacggaacaactgtgcagcgaggccatctctctggccgagatacccgaacgccttcaccaggcagacatcgttgtggcgtccacagcaagcactctgccgattctgggaaaaggcacggtggagacggccttgcgtcaacgccgtcaccgacccatgtttctgattgatcttgcggtaccgcgtgacatcgaggcccaggtcgacgaactggaagacgtattcctttacacggttgacgatctgcataaagtcgtcgccgaaaatcaggcgtcccggcaagaggcagccgttgaggcggagaaaatcatcgactttcaggtggtgcgcttcatgcactggatgcgctcgctcgactcggtacccaccatccggtccttgcgcgatcaggttgagacgctgcgtgaggcagaaatggcggatgccaagcgccggctggctaacggcgaggatcccgagcaggtactggaacacttctcgcgcaacctgtctcgcaagttttcccatgcccccagccaggcgctcaagcaggccagtcaggaaggaaacgcaagcctgatcagcaacacccgccggctgttcaaactcaaaccataac

SEQ ID NO: 216258 - DNA, 528 bp, Unknown
  Bacterial polypeptide expressing nucleotide sequence isolated from the Sargasso Sea
tatggaatttcattgctggggcataagtcataaatctacctctttagaggttagagaaaaatttgcgtttaataaagacaagattgatgaaatcttagcaaaacttaaaactttgacagcttttgacaatggtattttcctatcaacatgcaatagaacagaattttattcattttgtccaagaatagaaataaagaaatttgatgcacatttagaacatattcttggcaaaggattagaagtaagaaaaaatgaccaatatcttttttcagatagtgatgcatttgctcatttgcttcgtgtcatgacgggtattgattcgatgattgttggcgaaccagatatttttggccaagttaaaaaggcatacgagaattctcgctcttttggctatttaaattcaaacctcgatgcaattttctctaaatctataaatattactaaggaaattcgttcagctacaaatttatcaaagaacccaatctcaatagcatcattagttgaaaatataatcttgaaggaagggga

SEQ ID NO: 216259 - DNA, 1222 bp, Unknown
  Bacterial polypeptide expressing nucleotide sequence isolated from the Sargasso Sea
atgaatcttagattatttggcataagtcataaaacagctaatctcgagcagagagaatcatttatattatcaaaaaatcatattaactatattactgatctccttgaaaggaaattttcagatcaattaagctcattattttttttatcaacatgcaatcgaacagagtgttacatgatttgtgaaactgaacaaacttgtagagattttttcttagagatttataagatgttagatagtgatttggatcaagaaagttttttttattttaaagcccgagatgatgcatttgttcatttgtgtaaagttggcagtggtgttgattcaagaatcattggagaaaaggaaatatttggtcaattaaaaaatgcattcaaagaatatgatgaaatgggtctaatctcaaatcaaatgcgtgatatatgtgatagagcgttttccatatcaaagtttattcgaaatgaaactaaaattgattcaactccaatatcgatatccacattggtattgaagttgcttaaggagttatttgaaaatccaaccgaacaaaatattctgcttattggcgcaggtgatgtagcgacaaacattattaaaaatcttcataaaaatggatataaagaaatagagttccataatcgaacaaaaaaaataatttctatttcaaactcacttaaacttgaatccaaacctttaaacaagatcaatttagcccttaaaaaaaatgatatattgatttcatccatcaattcagactttccaattataggcaaaggattaattgaagaaaacttaaaattaagaaagaataaaccacttttactaatagatttaggcgtgcctagaaatattgaagcagcggtttcctcatctgagtttgtttacctgtatacactagaggatattgaaaattttagttttaaaaatttaaaagaaagaaaacaatctgcatctcatgcaactactctaattaaggcaatggttgcagattcaattagggagatagatgaagacaatgctaaagaacaaatatttataaccttatcttcgatcttaagaggtaaaaatgaatcatatattagtcagcttttatcaaacaagaaaattgctgacgtaattattgaggattttgatattgaagatgatttagcacataaatttacaactatggataacaaaatagttatatcaatgattaaggagatttcacgtgcttcctaaa

SEQ ID NO: 216260 - DNA, 1159 bp, Unknown
  Bacterial polypeptide expressing nucleotide sequence isolated from the Sargasso Sea
tatggaatttcattgctggggcataagtcataaatctacctctttagaggttagagaaaaatttgcgtttaataaagacaagattgatgaaatcttagcaaaacttaaaactttgacagcttttgataatggtattttcttatcaacatgcaatagaacagagttttattcattttgcccaagaatagagataaaaaaatttgatgcgcatttagaaagtatccttgggaagggactagaagtcagaaaaaatgatcaatacctattctctgataatgatgcatttgctcatttacttcgtgtcatgactggcattgattcaatgattgttggggagccagatattttcggccaagttaaaaaagcatatgagaattctcgttcatttggctatttaaattcaaacctcgattctatcttttctaaatctataaacattacgaaggaaattcgttcagctacaaacttatcgaaaaatccagtgtcgatagcctcgttagttgagaacataattttgaaagaagggcattcacctgttttaattatcggtgctggtgatgtaggtaagcccttattgaaacgattaatcgcaaatggctatgaagtagcactttttaatagatcaaaagtagaagttgatggaataaaaagcaatccacttagtaaattaaccaaaaatatcaacgaatttaaaaccattgtagttgccgctccatcagacaaagaattttttggatcaaaagattttaaaacttctgaagatagactaatttttgatttagcaattccaagaaatttagatggtagcttaaataatcttaagaactttaagcttttaacattggatgaaataagtatgatggttgaagaaaatataaaaggaagaaaagattctgtagctcaagctgaagaaataattgaaaaaaattctgaaacagaatttagaaaaattaaaaataaaaaaaatatagatcttaagcaaaaggaatttagggaaagtttaactgaaactagggatgaagctgtaaataaagcaaagaagagaattttaaaaggcgatgatatagaaaatataatagatgatcttgccagtgaaatcgcatctaaaaatgcctttcaagtatcaaaaattttagatagttcaacaaaaaataaataa

SEQ ID NO: 216261 - DNA, 1231 bp, Unknown
  Bacterial polypeptide expressing nucleotide sequence isolated from the Sargasso Sea
atgcaagaaattcacctagttggaattaaccataagacctcaaaggtttcagatagagaaagatttatcgttgatgattcaaatctcgtttatctaaatgattttctaatatcaaaattagataaaacgatttctggtttttttggcctttctacatgtaataggactgaaatatatttctatggagacaagggcatagaagatgatgtcctaaagctaactaaggaggctcttaatatttctgatatacctgataaaaacttttatatttttgacggtttaaaagcatttgagcatatgtgcagagtttgttgcggcatagattctcaagtggttggggagcaagaaatatttggacaatttaaaaacgcatataactcagccaaagcttttgggatcgttgggaaagagcttatgacttatgttgaaaaagtttttgaaattacaaaaaaagtaagaactgaaacaaagataggtataaatccgttatctgtgagcggtttatcattcaacctcgtaaaggaaatatttgagaatcctgaaaacaaggaagtcctagtaattggaggaggagatttagcaaaatctataattaaaaacctctttgacaaaggcttgaggtctatttctgctataaatagaactataaaagaaataaagatatctgaagatttttctataattccgatgcctctaaatctagtacatagagaaattattaatgctgatattattatttgctctgcatcaagtcttacaccaattatcggtaaaggagcagttgaaaatgcatttaaaaatagaggaaacaaaccaatgatgataatagatttggctgttcctaggaatgttgagccagaaatagaagatttagaactggtttacttgttttcaattgatgatatcgaaaagatttctcaagataatcttgaagagagattagttgaagctggaagaggaaaagagatcatcaaatatcaagccttaaaatcatataaaactattaattcaaagatagaagatgacaaatttgcttttgagatattaaaacttcttaaatctatagacgataaaagagtatttgaactttccaatgacaacgacataaatttagagtttttaactcttgttgaaaacacaaacaatattcaattatcagaaaagcttagaaaaaaaattgaacttatcgatggccaaaaacttatttcaataatttctaattataaataat

SEQ ID NO: 216262 - DNA, 1234 bp, Unknown
  Bacterial polypeptide expressing nucleotide sequence isolated from the Sargasso Sea
tatggaactacagttatttggcattaatcacaagacctcaaatgttgctgagagggaaaagttcattataaatgagtctaaccaaattttactcgatagtcatttaaaaaaactattcggtaatgattttgaatcattttttggaatttctacctgcaataggacagaaatataccttgttggaagacctggtatctcaaaacatatttttaaagaagtacttaaattattaaatgttaaagatatctcaagtgatagtttttattttctatctaatcatgatgctcttgctcatatgtgcaaagtagcttctgggattgattcacaggtattaggcgagcaagaaatctttggtcaattcaaaactgctttaagaaatgcaaaagaatacaaaataattggtaataagttatcttattttgctgataaggtcattgagattgcaaaaaaagcgaggactgatactgaaattggacttaattctctttcagtaagtggacttgccatgaaattgattaaaaatatatttgaggcaccagaaaatcagaatatattagttattggagctggctcactttcaaagagtgttattgaaaatttatacgataaaggaattcgcaatattaaattagttaatagaactgttaaaaaaattaatctaggtaaaaactttgaaattttgtcttcttcacttgattcacttcatgatcagcttgaattggctgatattgttatttcttcatcaataactgaagttcctcttattggtaaaggagcaattgaaaatgctttgaaattcagaaaaaataaacctattttattgatagacttgggagttccaagaaacattgaagatgaaattagaggaattgaacaggcttatttatattcaatcgatgacattgaaaaaattactcaagaaaattttgggcaacgttctattgaggctgaaaaagctatgaacataattgctctagaatccaaatcaaaattggaagctttttctgagaaatcttccaaagatctagctagtcttcaattagaccaatttttaaatagtttatctagccatgagatccaacaatttaagacaaatggtaattattcaaacctagttgattcaattaaaagcatgaatttagctaataaaaatttaaatgattttaaagatttaaaaaatctagatgaccatgtaattaaatctatgatcaaaaggttttttagtaatgcatga

SEQ ID NO: 216263 - DNA, 175 bp, Unknown
  Bacterial polypeptide expressing nucleotide sequence isolated from the Sargasso Sea
aagagagctttttattataaatgactctaatcaagatgactttataaatttttttcgggaggaatttggtcattttgtagagtcttttttttcactttctacatgtaacagaacagaaatttattattttggggagcctggaaattcaatatttaatagctcaaaaaactcttga

SEQ ID NO: 216264 - DNA, 460 bp, Unknown
  Bacterial polypeptide expressing nucleotide sequence isolated from the Sargasso Sea
catggaacttcagttatttggcattaatcataaaacttcaaaagtctccgaaagagaaagattcattataaatgatacaaatcaaattttattgtctagtcatctaaaaaagatatttaaagatgatattgaatctttttttggtatatcaacctgtaataggactgagctttattttgttggaaaaaaggatatcagcaaaaatgtgttgaatgagactttgaaagcacttcaagtaaataatatttcagatgacagtttctatttcttaagcggacatgatgctttagtccacatgagtaaagttgcttcaggaattgactcacaggtattaggagaacaagaaatttttgggcagtttaaaactgcttataagaaagcaaaagacattggcatcgtagggagggagcttatttacttatctgaaaaagtaattgaaatttccaaaaaagcaagaaca

SEQ ID NO: 216265 - DNA, 1225 bp, Unknown
  Bacterial polypeptide expressing nucleotide sequence isolated from the Sargasso Sea
aatggaattgcaattatttggcataaatcataaaacttctaatgttttcgaaagagaaaattttattataaacgagtccagtcaaattattttagatgattgttttaaaaaaaattttggggatgatattaattctttttttggtatttctacatgcaacagaactgaaatatatttattaggaaaagctaacattgcaagagaagctctcgatttaaccattaaagaattaaatattaaaaatattcaacaagatagttattatttcttagacaaagaagatgcctttatacatatgtgcaaagtcgcttctggtatagattctcaagttttaggcgaacaagagatatttggacaattcaaaaaagctattaaagttgcgaaagatttaatgatacttaaacctaatttaaattatttttgcaataaagcctttgagattgttaaaagagtaagaactaatacaggcattggattgaattctctatctgtcagtggattatctttaaaactagtcaaaaaaatctttgaaaaacctcaatcacaaaatatcttaattattggagcaggttcactggctcattctattgtagaaaatttatataataatgatgtaagtaatataagagccattaatagaagcattagaaatattaaagttactgatgattatgaaataatttcatcatcacttgacaacttacattatgaacttgaaaaagctgatattgtaatctcttcagcgtcatcagaagttccgtttattggaaaaggtgcaatcgaaagttgtcttaaaactagaaaaaataaacctttattaataattgatttagcagtacctagaaatgtagaagaggaagtaaagtttcttgaacattgttacctatttacaatagatgatatagaaaaaattactcaagaaaattatggtcaaagaaccattgaagctgaaaaggccatcaacatgattgtaattgattcacaagatgcaattaatgaaattaatgataaattcataaaagataatttacaaaatcaattacatattttcattaattcactttcaaatgaagataaagatgaattaatgaatacaaagaatactaaaaaatatctattgaatatcttagatgaaaaaaagaataagaagtttctaattgatctatcagtattaaatgaacttgagtctcacattattaaatcaatgataaaaaggcagagttaa

SEQ ID NO: 216266 - DNA, 880 bp, Unknown
  Bacterial polypeptide expressing nucleotide sequence isolated from the Sargasso Sea
catggaacttcagctatttggtatcaatcataaaacttcaaaagtctccgaaagagaaagattcattataaatgatacaaatcaaattttattgtccagtcatctaaaaaagatatttaaagatgatattgaatctttttttggtatatcaacttgtaataggactgagctttattttgttggaaaaaaggatattagcaaaaatgtgttaaatgagactttgaaagctcttcaagtaaataatatttcagatgacagtttctatttcttaagcggacatgatgctttagtccacatgagtaaagttgcctcaggaattgactcacaggtattaggtgaacaagaaatttttgggcagtttaaaactgcttataagaaagcaaaagacatgggcatcgtagggagggagcttatttacttatctgaaaaagtaattgaaatttccaaaaaagcaagaacacaaacaaaaataggactaaattcattatcagtaagtggacttgctttaaaattagtaaataatatttttgagaatccccaggatcaaaatgttcttgtagttggtgctggttcattagcacaaaacgttattaaaagactatacgaaaaaggcattgataaaattaaatcaataaatcgttcaataaagaagattaaattaaatgatagttatgaaatattttctggttcacttgaatctttgcatcatgagttagagcatactgatattgtaattgcatcctcaacaacagaattaccaataatcggcaaaggagccgttgaaaatgcgtttaaaacaagaaaaaataaacccatgttgctcatcgatcttggtgtaccaagaaatattgaggaagaaatcaaaaatatagagcaagct

SEQ ID NO: 216267 - DNA, 574 bp, Unknown
  Bacterial polypeptide expressing nucleotide sequence isolated from the Sargasso Sea
atgcaagaaattcacctagttggaataaaccataagacctcaagggtttcagatagagaaagatttatcgttgatgactcaaatctcatctatcttaatgattttctaatatcaaaattagacaaaaaaatttctggtttttttggtctctcaacatgtaatagaactgaattatatttttatggtgacaagggcatagaagatgacgtccttaagctaactaaagaggcgctcaatatttctgaaatacctaataaaaatttttatatctataatggtttaaaagcattagagcatatgtgcagagtttgctgtggtatagattctcaagtggttggggaacaagaaatattcggacaattcaaaaatgcatataactcagccaaggcttttaaaattattggcaaagagcttacgatttatgttgaaaaagtctttgaaattacaaaaaaagtaagaaccgaaacaaaaataggcataaatccattatctgtgagtggcttatcatttaacctcgtaaagaaaatatttgagaatcctaaaaacaagcaagttctcgtaataggaggtggag

SEQ ID NO: 216268 - DNA, 382 bp, Unknown
  Bacterial polypeptide expressing nucleotide sequence isolated from the Sargasso Sea
aatggaactgcagttatttggcataaatcataaaacttctagtgtttctgaacgagaaagttttattataaatgagtctaaccaaattttattagataatcattttaaattaatttttggtaacaaattaaaatcatttttttgcctatcaacttgtaataggactgaagtatacatttatggtgcatctggaatattaaataaagtttttaaagaagtttttaaaattcttggacaaagggagattccgagggataaattttattttcttgataaccatgatgcccttgtccatatgtgtaaagttgcatctggaattgactcgcaagtattaggtgagcaagaaattttcggtcaatttaaacaatctttaaagaatgca

SEQ ID NO: 216269 - DNA, 514 bp, Unknown
  Bacterial polypeptide expressing nucleotide sequence isolated from the Sargasso Sea
atggaactacaattatttggcataaatcataagacctctgttatatccgagagagaaaaatttattataaatgagtctaatcaaattatattagataatcacctaaaaagaatttttaagaatgactttgaatctttttttggtatttcaacttgcaacagaacagagatttattttgttggtaaaagggggattattaatgaggtttttaatgaagtattaaaagtcttagatttaaatgatatacctaaaaactgtttttattttcttacaaaccacaacgcccttgctcatatgtgcaaagtggcatctggaatagactcacaggtattaggtgaacaagaaatatttggacaatttaaaaaagcttttaaaaattcatcagaacataagattgtaggaaaaaaactatcctatctaacaaagaaagttattgaaattgcaaagatggcaagaacagataccggaataggatttaaccctttatctgttagtggctttacaatgaattaat

SEQ ID NO: 216270 - DNA, 1234 bp, Unknown
  Bacterial polypeptide expressing nucleotide sequence isolated from the Sargasso Sea
tatggaactacaattatttggcataaatcacaagacctctaatgttgctgagagggaaaaatttattataaatgagtctaaccaaattttgctggatagtcatttaaaaaaagtcttccatgatgatcttgaatctttttttggaatatctacatgtaatagaactgaaatatattttgtaggtaaatcaggcatctcgaaagaggtcttacgagaagcgcttaaaagattagatgtaaaagacatctctatggatagtttctattttctttcgaatcatgatgcccttgtgcatatgtgtaaagtagcttctggcattgattcacaagttttaggtgagcaagaaatttttggacaatttaaaactgcacttaaaagtgcaaaagaatacaaaatagttggtaagaagttatcttattttgcagataaagttattgaaatttctaaaaatgcaagaacaaatactaaaattggaatcaattctttatcagtaagcggactagccctaaccttaattaaaaatatttttgaagcaccagaaaatcaaaacatattaatcattggagctggctctctttcacaaaacgttatcaaaaatttatatgataaaggaatacgtaatattaaattagtaaatagaacagtcaaaaagattgaattaaatagtaactttgagattttgtcttcttcacttgatacgcttcatgaccagcttgaactagcagatattgtaatttcttcttcaataactgaattacccttaattggtaaaggtgcaattgagaatgctttaaaaattagaaagaataagccaatccttttaatagacttaggtgttcctaggaacattgaagatgagattagaaatattgaacaagcttatttgtattcaattgatgatattgaaaaaattactcaagataactatggacaacgctctatagaagctgataaagcaatgaatataatcgttcttgaatcaaaatctaaactagaaaatttttctcttaaatcttccaaagacttagctaaccttcaattagataaatttttaaatggtttatcaaatcatgagataaaacaatttaaatcaagtggcgattactcaaatttagttgaatcgattaaaagtatgaatatagaggatgaatacttaaataatttccaagatatcaaaaatttggatgatcatataattaaatctatgattaaaacgttttttgataatgcatga

SEQ ID NO: 216271 - DNA, 352 bp, Unknown
  Bacterial polypeptide expressing nucleotide sequence isolated from the Sargasso Sea
tatggaatttcattgctggggcataagtcataaatctacctctttagaggttagagaaaaatttgcgtttaataaagacaagattgatgaaatcttagcaaaacttaaaactttgacagcttttgacaatggtattttcctatcgacatgcaatagaacagaattttattcattttgtccaagaatagaaataaagaaatttgatgcacatttagagcatattcttggcaaagggttagaagtaagaaaaaatgaccaatatcttttttcagatagtgatgcatttgctcatttgcttcgtgtcatgacgggtattgattcgatgattgttggcgaacccagatatttttgg

SEQ ID NO: 216272 - DNA, 1234 bp, Unknown
  Bacterial polypeptide expressing nucleotide sequence isolated from the Sargasso Sea
atggaattacagttatttggtataaatcataaaacatccgatgtctccgaaagagaaaaatttattataaatcactctaatctagttttattagataataatttaaaaaaaaattacaagaatgattttgaatcattttttgggatatctacctgcaatagaacagaactttatattttaggaaaagcaggaatctctgagaaaattttcaatgaagtttcaaagattttaaaattagatgatataccaaaagatagtttttattttcttgatggtcatgatgctttagtgcatatgtgcaaagtcgcatctggtattgactctcaagttcttggagaacaagaaatttttggacaattcaaaaaagcagtcaagaccgcacaggggctagaaattattaatgctaagttactaaatcttagtaataaagttattgagattgcaaagaaagctaggacagaaacaaatattgggcttaattctttatctgttagcggattggcgcttaagcttgtaaggaatatttttgaaaaaccacacaatcaaaatgtcttagttgttggggcaggttctttagctacaagccttattaataatttatacaagaatggaataaataaaattaatttagtaaatagaagtatcaagaaaattaaactattagataattatgaaattatttcatcttcatttgatagcctgcatgacgctttaggaattgcagacattgtaattgcttcagccgagactgatatgcctcttatagggaagggggcaattgaaaatgctctaaaaaaaaggcaaaacaaaccaattctattaatagatttgggtgttccaagaaatattgaagaagagataaggaatattgaacaagcatatttatttactatcgatgatattgagaaaataacccaagaaaattatgggcagcgctctatagaagctgaaaaagcaatgaatttaattgttctagaatcccaaagagtattagattcactctctcttaaaacatttaaagataaaattaatattcagctagaggaattcttaaacggtttatctttaaaagaaatagaacaatttaagttttcaaaagattatgctcaattggcaaaatcaattaaagaaatgaatatagaaaatcctgaatttaataattttaaagaaataaagaatattgataatcatataattgaatcaatgataaagaggttttttgataatgcatgat

SEQ ID NO: 216273 - DNA, 1234 bp, Unknown
  Bacterial polypeptide expressing nucleotide sequence isolated from the Sargasso Sea
tatggaattacagttatttggcataaatcataagacctctgatgtctctgaaagagaaaaatttattataaatgagtctaaccagattttattagataatcatttaaaaaatatatttaatgataaattagagtcattttttggtatttctacttgcaacaggactgaattttattattttggtgaattaagcatatcatctaatatttttgatgaagttatgaatatccttgggaaggatgatattaataaaaataatttttatttcttagacaggcatgatgcgctcgttcatatgtgcaaagtagcttctggtattgattctcaagttcttggtgaacaagaaatactaggacagtttaaaaaagcattaaagatagctcaagaattaaaaatagttaacggtaaacttttaactctttcaaataaagtactagagatatctaagaaagctagaactaaaactgatatagggcttaattctttgtcagtaagtggattagcatataagttggttaaaaatatttttgaggaacctaaagatcaaaatattttaatagttggagctggatctttagctcatagcgtaatggaaaatctttttaagaatggcattaataaaatcaaatctgtaaatagaagtgttaaaaaaattaaattagataatgactacgagctgatatcatcttcattagaatctcttcacgacgagctagaatttgcagacatagtaattgcttcatctgctactgaattacctctaatcggtaaaggagcagttgaaaatgcattgaagaaaagaaaatataagccaatgttacttattgatttaggagtccctagaaatatagaagatgaaacaagaaaaatcgaacaggtgtatttgttttcaattgacgatattgaaaagataacacaggaaaattatggtcaaagatcaattgaagctgaaaaggcaatgaacataattgctttggaagctcgtaacgctttggattcattctctttaaaacatacaaaagatagaattagcattcagctggaagaatttttaaaaggtttatctccacaagaaattattcaattcaaagattctaaagatttctctggtttgataaattccattaagaccattaatattgaaaatccaaaatataataattttgaagatatcaaaaaacttgatgatcatattgttgagtctatgattaaaagatttattgaaaatgcataa

SEQ ID NO: 216274 - DNA, 562 bp, Unknown
  Bacterial polypeptide expressing nucleotide sequence isolated from the Sargasso Sea
atggaattacagttatttggtataaatcataaaacatccaatgtctccgaaagagaaaaatttattataaatcactctaatctagttttattagataataatttaaaaaaaaattacacgaatgactttgaatcattttttgggatatccacctgcaatagaacagaactttatattttaggaaaagcaggaatctctgagaaaattttcaatgaagtttcaaagattttaaaattagatgatataccaaaagatagtttttattttcttgatggtcatgatgctttggtacatatgtgtaaagtggcatctggtattgactctcaagttcttggagaacaagaaatttttggacaattcaaaaaagcagtcaagaccgcacaggggttagagattattaatgctaagttactaaatcttagtaataaagttattgagattgcaaagaaagctagaacaagaacaaatattgggctcaattctttatctgttagcggattggcgcttaagcttacaaggaatatttttgaaaaaccacacaatcaaaatgtcttagttgttg

SEQ ID NO: 216275 - DNA, 208 bp, Unknown
  Bacterial polypeptide expressing nucleotide sequence isolated from the Sargasso Sea
aatgcaaaaagcacttagtaggatgggaccagatttttctgctagagaaagaaaagttgtggaagctttgactaaaggaattatcaataaaatacttcatactcctgttactaagtggaggagtcctcaatcaagagaggaaagacaagcctctttaaaaattgttgaaaaattgttttctttggtagaggaagaaaaaaatagctga

SEQ ID NO: 216276 - DNA, 694 bp, Unknown
  Bacterial polypeptide expressing nucleotide sequence isolated from the Sargasso Sea
caaaggtgctcgcagcatcacggtcgtcaaccgcacggtgtcgaaagccgaagcgcttgccaaggatttcccggacttggtgatcacctgttgcgggcttgatcagctcgatgctcagttggcatgcaacagccttttatttacaagcactggtgctgacgagccgatcattaatcgcgcgcgcttggacgtgatccagcgccaaaaacgcttgatgcttgttgacattggtgtcccccgcaatatcagctctgatgctgctgaggtgtccggcaccttgagctacgacgttgacgacctgcaagaggtggtggagcgcaacgtggctgcaaggcagcagttggcacagcaagcggaagtgctgctccaagaagaccggcaggcctttttggattggtgggacggacttgaagctgttccgaccatcaaccgcatgcgtcagcagtttgaagagattcgtaaacaggagctccttaaggcgctgagccgcatgggatcggatttctctcagcgtgaaaagcaagttgtcgaagcgctcaccaaaggtttgatcaacaagatcttgcacggaccgaccacggctttgcgtgctccacagcatcgacaacaacgactcgattccatggctgcggtgcaacggctctttgatctgccaggtgacgaagcagaacgagatcggagcgacgcaaattaa

SEQ ID NO: 216277 - DNA, 916 bp, Unknown
  Bacterial polypeptide expressing nucleotide sequence isolated from the Sargasso Sea
agctctgttcagtcaattggtaaatctctacataagcttatccaagtatccttgtttgcggcaaaaagagttagatctgaaacctctcttggtaacagagtagattcaattggttcattagttattaaattaggaaaaaatctttttcaagacttagataatagaagtgcactaatcttgggaactggtgagataagccaaattttaatttctaatctaaagaatgttggtgtttcagaaattctaattgccagtagggatataaagaatgctataacatttgcagataaaaataattgtagaccgattcctcttgaggacataaatcagcatctcttaaaagctgatatagtcttttcttcaactggttcttctgattttattataaaaaaagaagatattgagatagctttagaggatagaagagattctattatgttttttatagacatagcagtgccaagagatattgatcctagagtaggagatatcgatagctgttatttatataacttagatgatttaaaatctataatagacgacgatgtttctgaaaataacaggaatcttaaagaagcatcccttatcattgagagttcattaaataattatgtccactgggaaaattctgataatgtaaaagatattattactcgtatgagaaaaacagtagaagacattgtcgaaaaagagtttaagaatgcctccactaccaatgtagacaagagtcttattgcaaaaagaattagtaataaaatacttcatgtaccaacacaaaatattaaaaatgaggcaaacctagaaaacaacttatatatatctgtcttatcagagatttttgatctagataaagatggagatgattcaaacctacttaaaatagaagatgaaaaaacttttaagaataggaactaga

SEQ ID NO: 216278 - DNA, 655 bp, Unknown
  Bacterial polypeptide expressing nucleotide sequence isolated from the Sargasso Sea
tatgattattgccagaatttttccaaaaaaatctcagaattttaagaatgctaaacctttttttcaaaaaattggtgattctatggattcaggaggatggattcgactattctctttatggactcttattgttgcaggtattgttttgaatatggactttgaaaatagatatgtttactggagttggtcaggatgggagtcaggtttcataaagttagtagttgcttctgttttatacttctattttttaaacccaaacaatctatggattattggttccaaaagattgcaaaataaagaaattagtattcatgcattaattgcatttatcttacttatttttggttatgttggtttagattcaatggttccaaactttttcgggatctttccgtattttacggcttttttgtcttgcctactcattttccaatttccacttattttagatggggacaaaggcgtatggaataattttgattggaacaataaggttcaatatttttccctttctttaatcttaatgattgcatctgttttcttaggtgtttttttagatgaccctattatgagtacagctggtgctgtttctgttgcttttccattggtaggactaacttggcctaatcatgtaaggcatttgcaacggggctag

SEQ ID NO: 216279 - DNA, 361 bp, Unknown
  Bacterial polypeptide expressing nucleotide sequence isolated from the Sargasso Sea
aatgacaaaaaatatcataaatgcaagagttactttcaaaaaatcaccgatccatgtgcttgaaagattctctttgggagattcagaaaatgcttacaaatctttcaaagatcacaccggtttatccgaatgtgtaatattacaaacttgtaatcgtgtagaaatatttggttctggtaataattttgatagagaagaaatcaaaaaaacttgggcatcgttatctggtttagaggaaaatagctttaaagataatttagaatggtcacaagattctgatgtgtatgaacatttattgaaattaacttctggtttagattctatggttgtaggtgaagaacaaatcatgacacaaataaaa

SEQ ID NO: 216280 - DNA, 253 bp, Unknown
  Bacterial polypeptide expressing nucleotide sequence isolated from the Sargasso Sea
atgaccatttttgctttaggtattaatcataaaactgcacctgtctccttacgtgagcaggtcgcttttgcgcctgaacaaattttggacgccttgcgggatctgacgacgacgacccaggtgtctgacgctgtgattttgtccacctgtaacagaactgagctgtattttagcggcagccctgaacaatcgaaacaagtaattgactggctgagcaaatttcatcagctcgactggccgaattgcagcatca

SEQ ID NO: 216281 - DNA, 816 bp, Unknown
  Bacterial polypeptide expressing nucleotide sequence isolated from the Sargasso Sea
tatgcatattgttgtcgtcggactgagtcatcgcacggcacctgtcgaagtgcgtgagaagttaagtattcctgaccaatccataacagaatcactgaaagcattaaaagctttctctgatgtattggaggtgtcaattttaagtacttgtaataggctagaaatttatgcgctagttaaggataaaaatactggaatttcatctattaaagaatttatatcagattattctggaattatttttgaagatttaaatccacatcttttttgctttagacaagaagatgcagttttgcatttgatgaaagtttctgcaggactcgatagcctcgttttaggagaaggacaaatcctttcacaagtaaaaaaaatgatgagattaggtcaagagaatcaatctactgggcccattcttaatagattattaactcaatcagttagtacaggtaaaaaagttagatccgaaacaagtttgggaactggagctgtatcaatcagttcagcagcagtggaacttgctcaattaaaaattggccaagaaaaggggtttgatactcttgtaagtttggaatcagagaaagttcttgtagttggggctggtcgaatgagtaggcttttaataactcatttaaaatcaaaaggatgcaataaacttatacttgttaatagaaatattgatagagcattaaatcttgctttagatttcccagacttagaaattatttgtaaaggattgaatgaattagatgaaaatatatcattatcctctcttgtttttactagtaccgcatcagaagagccaataattgatttcgc

SEQ ID NO: 216282 - DNA, 604 bp, Unknown
  Bacterial polypeptide expressing nucleotide sequence isolated from the Sargasso Sea
tttggtcggattaattagtattaactacaaaatagctcccttagacataagagaaaaattctacttcgacagtcctgaaaaaattgtattcaataatctcctaaagaagaaagttggctgtgaaggtttaatgataatttcaacttgtaatcgaacagaaatatactttgaatttgaaaatcatgtcggagaggaaaaaaaattccttcatgctattgtgaaagaactcgttgagtttaaaaaatttaaagatagcttatcaccttatcttaataattatactggatcgtatgatgttgctaatcatttattcagacttgtttcaggtcttgagtccatgattattggtgagtttcaaattgtagaacaactaaaagaagcttattacttttcaaaaaaacacaaaatgcttggtccaattttaagtagaatgattcaaaaatctcttgaaactggaaaatacataagaacaaatacagaaataggaagaggagctgtttccgttagctacgcagcagttgaacaaataacaagtaaatataatttaagcgagtcgaattttctttgcgtatgtcttggtgaacatcaaaactatctattcgtc

SEQ ID NO: 216283 - DNA, 591 bp, Unknown
  Bacterial polypeptide expressing nucleotide sequence isolated from the Sargasso Sea
tatgcatattgttgtcgtcggactaagtcatcgcacggcacctgtcgaagtgcgtgagaagttaagtattcctgaacaatcgatctcagaatcattaaaaactctgagtatcaattctgatattttagaagtttctattttaagtacttgtaataggttagaaatatacgctcttgttagagagataaatattggtatttcaactattaaagaatttttaacagattactcgagcgtaaattttgaagacctaaatcctcatctttttgattttagacaagaggaagctgttttacatttaatgaaagtctcagctggattagatagcctcgttttgggcgaagggcaaatactctcgcaagttaaaaaaatgatgagattaggtcaggagaatcaatctactgggccaattcttaataggttattaagtcaatcagttagtgccgggaagaaagttagatctgaaacaaatttaggaactggtgctgtttcaattagttcagccgctgtagaactggctcaattaaaaattggacaggatcagggtgttgatgggctcgttagtttgaaatcagaaaaaagtctagtcgt

SEQ ID NO: 216284 - DNA, 816 bp, Unknown
  Bacterial polypeptide expressing nucleotide sequence isolated from the Sargasso Sea
ggtcattttgtagagtctttttttgcactttccacatgtaacagaacagaaatttattattttggagagcctggaactactattttaatagctcaaaaaacccttgaatttttaggctgcgatgattatgtccgggacagcttatatttttttaatgataaagcagctattgagcatatgtgttgtgttgcaagtggcttagattctcaagtcttgggagaacaagaaatattaggacaatttaagaaatcagtccaaaacttcacaaaacttggacttttaaataagcaacttcttaaagcaactgacgagatcatatcgatagcaaaagcagctagaaccgaaacaaaggttggttataatccgttgtctgtttcaggtctatcgttaaaaattgttcaggagatttttgaagacccaactcagcaaaaacttacaatagtgggcgctggtcagatggcaatgaacgtcattgaaaatttttatgaaaatggaataaaaaatatacaagcagtcaatagatcaaaaaagttcctgcaaatcaataactcatttagcttagtaactaataatttatctaaactaggatcacttattcaaaccacagacattctagtgacatctgttaattcaccactgcctattatcgggaaaggtctcattgaagatgcaatgaggttgagagcgaataaaccaatgttgctaattgatttaggtgtgccaagaaatgtagaggaccaagtacgagatcttgaatatgcatatctttttacaattgaggatatagagcttgttacccaagaaaatctagacgaa

SEQ ID NO: 216285 - DNA, 880 bp, Unknown
  Bacterial polypeptide expressing nucleotide sequence isolated from the Sargasso Sea
actgctccaattaatattaagggaaaagctcgtatttgacaaagattctattccacgagctcttacagatattagaaaaattcaaggcgttaatgaggttgtattaatatcaacatgtaacagaactgaaatatacacagagagtacttcagataataccgaaattattaactggttaaatagtaatcaaagcatcgaaaaagactgcgaaccttatatgtatagctattgtgatgaacaagcggttaagcacttatttaatgttacctctggcgtagactcaatggttattggtgagaatgaaattcttggtcaagtcaaagaagcttataaaattgctgaccaaaaccaatgtctagcttcttcgttaaaaagattatttgagttttcattttctgttgctaaggaagtccgcacaacgactgatattggatctaacccagtatcatttatgtttacctcaatgacactcattaaaaaaatattcgaagacatatcatcgaaaagagcattagttgtaggctctggttatatggttaagcttgctatcaaatacttgcaggcaaataatcttcacaatatcactctaacgaataggaattatgacaagggcagtaaaattgcaaaagataatcaatgcaattattcaagattacaatatttgccaaatataatctcttcgcatgatattattatttcatgcacatcaagtactataccaataataggtaaaggcatgatggaaaactgtgtaaataacactaatgccaaaccctatgtaattattgatttaggtgttccaagagatgttgagcctgaaataaatgaactagataatatatatttatatagtattgatgacttaggaaaagttatagaa

SEQ ID NO: 216286 - DNA, 946 bp, Unknown
  Bacterial polypeptide expressing nucleotide sequence isolated from the Sargasso Sea
atgaccttggcgtttgtcggtggaacccatcgcactgtaccgcttccgcttcgggagcggctggctttttcaacagatcaggcagcagaggcactctgttgttttcgtgatcgctttccagggagggaaggtgtactcctctcaacatgcaatcgggtagaactctacacggcgggagagagtgatgtgttacccctgccccgtgaacaacttgttggttttcttgcagaatctcgtggtattgatgcagaagttctctcaccagttttattcggcgagacagatgaagctgtcgtacgacatctttttagtgtggcctctgggctggacagcatggttcttggtgaaccacaaattatgtcacaggtgaagcaggccttagcaatcgcacaagacagtcaaaccactgggccactgacaggagaaatgtttcaggcagctttgagaactgcgaaacgtgttgccacagaaacagcgattggacgtgaacggttgtcaattccaagcattgccgtttcggattttgttgcaggtgtttttgagcggttggacgataaaaaggtactgcttttaggagcaggaaaaatggcaagggagacacttcgctatcttcgagatgctggagcgaaggatgtcaccatcattaacagaacatctgaaagagcaagtactctggcttcggagttgcaggcacgaccaagtacgtttgatcgacttggcgaggagttggtagtggcagatcttatcgtgagcaccacaagtgctactgagccaatcataacgaatgattattaccacagtgttgaaaaatcccgtcatggtcggccgctggtcattcttgatctggcgattccacgtgatattgatccagatataggcaagagtcctgatgtctggctttactcaatcgatgatctcggacgaacgtgtgaagcgaatcgaaaaa

SEQ ID NO: 216287 - DNA, 570 bp, Unknown
  Bacterial polypeptide expressing nucleotide sequence isolated from the Sargasso Sea
tatgcatattgttgtcgtcggcctaagtcatcgcacggcacctgtcgaagtgcgtgagaagttaagtattcctgaccaatccataacagagtcattaaaagcattaaaagctttctcggatgtattagaggtgtcaattttaagtacttgtaataggctggaaatatatgcgctagtaaaggataaaaatactggaatttcatctattaaagaattcatatcagaatattctggaattatttttgaagatttaaatccacatcttttttgctttagacaggaagaagcagttttgcatttaatgaaagtctcggcaggacttgatagcctcgttttaggggaaggacaaatcctttcgcaggtaaaaaaaatgatgagattaggtcaagagaatcaatctactggaccaattcttaatagattattaactcaatcagttagtacaggtaaaaaagtaaggtccgaaacaaatttaggaactggagctgtatcaatcagttcagcagcggtagaactagctcaattaaaaattggacaagaaaagggttttgatactcttgtaagtttgga

SEQ ID NO: 216288 - DNA, 445 bp, Unknown
  Bacterial polypeptide expressing nucleotide sequence isolated from the Sargasso Sea
atgagcttagttactataggaatgaaccataaaacagcttctctggacatcagggaaaagatttctgtggataaagacgaatcgcacataatccttaaaaaactccaagatatgccgttggtcgacgaggcatttattttatctacttgtaatagaactgagctttatctagaaatagatgatttgcaatatgttgaaaatatttctgattggcttttaagacataaaggtttaacaccagaagatatttccgaaaatatgtacatatattcagatagctttgttgtaagacatgcgctgaatgtagcttgtggcttagattctatggttattggggaatcacaaatacttagacagtttaaggatgcttttagtgaagcgagtaatgctggcacaattggtaaaaatttaaatagattgtttcaatatgcttttctaccgcaaa

SEQ ID NO: 216289 - DNA, 472 bp, Unknown
  Bacterial polypeptide expressing nucleotide sequence isolated from the Sargasso Sea
atgcaccttgccgtcgtcgggcttagccatcgcacggcgcctgttgaggtccgcgagcggttaagcattccggaacaccacctggagacctctctccagtcattgcgctcccacgagcaggtcctggagacctcaattctcagtacctgcaatcgtctagagatttattccctgttgcggcatccagaggatggcgtagcggccattagagattttctggctaaccacagcggtctggctgatccagatctcaagccacacctgtttgctcttcatcatgaagaggccatccaacatttgctccgcgttagtgctggcctggacagtttggtcctgggcgaagggcagatcctcagccaggtcaaaaaaatgtaccggcttggccaggatcacaaatccattggcccgattctcaatcgtctgctgaatcaggctgtcagcactggtaaacgggtccgtaggaaacgaactc

SEQ ID NO: 216290 - DNA, 835 bp, Unknown
  Bacterial polypeptide expressing nucleotide sequence isolated from the Sargasso Sea
aacaatactaattctcctccttttcttccatacagtatatcaatccgaacgcaaatcgtccatcatcactttaggtctctccattcactcgtgtccggttgagattcgagagaagatggcggtgccagccgatcgattcaatgaggcggtgacgtctttggtggaaaacccgcacatcgaagaggcggctattttgtccacgtgtaatcgcatggaggtgactattgttgggttgtcatacgatcgcgcggtggcggagttggaaaattggatgagcaaatggtctggagtggaattgtcggagttgagagagcactttttcttgttgaaggatcgagacgcgtgcacgcacttgttggcggtttcgggcggcttggattcggtcgttttgggcgagggacaaattttagcgcaagtgaaatcggtgtttcaaatgggcgaaggtgtcaaaggatttgggagacatttgaatggattgttcaaggcggcgattgtggctgggaaacgcgtgagaaacgaaacatcgattgcgtctggggcggtttccgtgtcctcggcggcggcggagttgttgcaaatgaagttgccgggcgagtcctacgaagggacgaaagtgatgattgttggtgctgggacgatgagtaagttattggtgaaacacttggagtcgaagagatgcacggaaatgacgattttgaaccgtacgaaaccgagagcggaggcgttggcggaggagtttcccaacgtgaacatgaaaattcacctcatggaagatttcatcccgttggcggctgagcacgatattatttttaccgcgagttcttccatggaacct

SEQ ID NO: 216291 - DNA, 709 bp, Unknown
  Bacterial polypeptide expressing nucleotide sequence isolated from the Sargasso Sea
attcatcaactcaaggtcaccaaccgtacttttgccaatgccgccaaactggcagagcagttccaggccagtgttttcccttttgaaaaactctatgacgaacttcccgattcggacatcgtgatcagttccaccggtgcccgtgaaccgatccttaccccggaacgggttcgccagagcttacgtaagcgtcgtggaagaccgatgttttttatcgacattgcagtgccgagagatatcgatccaaccgtgaacgagctctcaggagtttactgttacgacatcgacgatcttcagggagtcgttgagcagaaccgtgaagaacgcagagagcagtcgaatcttgcggaagaaatcatccgaaaagaactggaaaaggtcatgctctggtttgaaacccagtcggtcatccctaccgtcaaaagccttcgtgaatccttccaggaaactgtggatgtggagttagagaaaacccttgcaaagcttggttcgttgactgaaaagcagcaggctgaagttgaaaagatggtcagagttttgaccaataaattgctgcacaaaccatccacccggctcaagcatctgagtggccgtgaagatctgtacctctacctggaaaccctttcagaactttttgatctgaatccctcaaataatgttgaggaagcgagtcctcaacctgctctgaagttgctgaagaagcaatgat

SEQ ID NO: 216292 - DNA, 442 bp, Unknown
  Bacterial polypeptide expressing nucleotide sequence isolated from the Sargasso Sea
atgcaattacagctatttggcataaatcataagacgtctaagttatctgaaagagagctatttattataaatgactctaatcaagatgactttataaatttttttcgggaggaatttggtcattttgtagagtctttttttgcactttcaacatgtaacagaactgaaatttactattttggagagcctgaaacttctatattaatagctcaaaaaactcttgaattcttaggctgcgatgattatgtccgggacagcttatatttttttgatgataaagcagctattgagcatatgtgttgtgttgcaagtggcttagattctcaagtattgggagaacaagaaatattaggacaatttaagaaatcagtccaaaacttcacaaaacttggacttataaataagcaacttcttaaagcaactgacgaaatcatatcttagc

SEQ ID NO: 216293 - DNA, 553 bp, Unknown
  Bacterial polypeptide expressing nucleotide sequence isolated from the Sargasso Sea
atgcatatcgttgtcgtcggactaagtcatcgcacggcacctgtcgaagtgcgtgagaaattaagtattcctgaccaatctataaaagaatcattgacagcattaagagctttctctgatgtgttagaggtatcaattttaagtacttgtaataggctagaaatatatgcgttagtaaaggaaaaaaacactggaatttcatctatcaaagaatttatatcagattattctggaattatttttgaagatttaaatccacatcttttttgctttagacaggaagaagcagtactacatttgatgaaagtttcggcagggctagatagcttagttttaggcgaagggcaaatcctttcccaggtaaaaaaaatgatgagattaggtcaagagaaccaatctactgggcctattcttaatagattattaacacaatcagttagtacaggtaaaaaagttaggtccgaaacaaatttaggtactggagctgtatcaatcagttctgcagctgtagaacttgctcaattaaaaattggacaagaaagagggatttgat

SEQ ID NO: 216294 - DNA, 730 bp, Unknown
  Bacterial polypeptide expressing nucleotide sequence isolated from the Sargasso Sea
cttgtagttggggctggacgaatgagtaggctcttaataacgcatttgaaatcaaaaggatgtaataaactcatccttgtaaatagaaatatggatagagcattaaatcttgctgtagacttccccgacttagaaattgtttgtaaagggttaagtgacttagatgaaaatatatcaatatcttcacttgtttttactagtacagcatccgaagagccaataattgatcttgctaaaattgataaattaaatttaaataataaacttaaatttattgatattggtgtaccaagaaatatatctagtgatgttaaacaacacaaatttgttcaatcatttgatgtagatgacttacaagaggttgtttcaagaaatcaggaatttagaaaaaaaattgcaaaggaagcagaatctttagtagaagaagaaagaataatttttcttgaatggtgggcaagtttagaggcggttccagtaattaataaacttagatcagatttggagttaattagaaaagaggaattgcaaaaagcacttagcaggatggggccagatttttctgctagagaaagaaaagttgtagaagctttgactaaaggaattataaataaaattcttcacacacctgttactaagttgagaagtcctcaatctagagaagaaagacaagcctctttaaaaattgttgaaaaattgttttctttggtagaagaggatagaaatagctaaa

SEQ ID NO: 216295 - DNA, 787 bp, Unknown
  Bacterial polypeptide expressing nucleotide sequence isolated from the Sargasso Sea
aatgacactcagaataattggtctcaatcatcataatgcttcgctagattatagagaaaagttagctttttctgatgaagagattcaatcctgtctgaaagatttaatagcaaacgatcagataaaagaggctgtcattctttcaacatgcaatagaactgaattttatctccaaactaatgaagaaggagaggaatatacaaaaacatggcttaaaaaaaataaaaatatcaataaaaacacggaggacctccttttttcattgaagggcgaaaaagcaattattcatttaagtcgggtagcatgtggtttagattctatgattttgggcgaaccacaaatattaggccaattaaaaaatgcatataaatcctctgttgaattgggcgctataacaaaagatttttcaaagttatttgatcatatatttcgtctcgcaaaaaaaatacgtacaaatacaaacatcagcaacagtcctgtttctgtatcttatgctgctgttattttggctaaccaattcttctcacgattagataatcattctgctcttcttattggtgctggtgaggcaattgaattggtcgcaaaacacttagtaaataagaaaatcgataaactttttatcgctaatagaaatataaataaggctcaagaactggcaaagagatatggtggctatgctctagatctggatagtcttgatggtgtaattgaaattacagatttaatccttagttcaacagcaagtgatcactatatcctgaaaaaatttcagatccagaaagcg

SEQ ID NO: 216296 - DNA, 934 bp, Unknown
  Bacterial polypeptide expressing nucleotide sequence isolated from the Sargasso Sea
agggtaacgtttaggaaatcaccaattcatgttttagaacgttttacattaggtgatattgataatgcttattcatcttttcaagaacatacagacctaaaggaatgtgtgatattacaaacatgtaatagagtagagatttttggtagtgggaataaacttgatatcgaaaagataaaaaaagtttgggcatcattatcaggcttggaagaacatgcgtttcaagataatctagaatggagtaaagattctgatgtttatgatcaccttctgaaattaacatccggactagactctatggttgtaggtgaagagcaaatattaggtcagataagaaattccattgcttctgctagaagtaataaatcatcaggtgaacatcttaacacattatttgataaagcaattcgtgtaggtacacgtgtaagaaattcaactggaattagtaaagggagtatttcaattggttctatggcagtaaaacttgctgaggaaaatgttgatgatatgaaattaaaacatattttgttaattgggacaggtgatgctgcagcattagttgcaaaatctcttacaaaacgtggatatcaattttcaataacaagtagaacaattgaacgctcaacatctttttcgaaaacaatcggtggaacacctatagattttaataagatattatctggatttggaaaatatgacattgtattcgtagctacaaccgcaccatatttcctagtaacccacgagaggatagaaaaagcactaaatgaaaaaaatagtggaatgatgattctagatttatcaaatccacgaactgttgatgtgaaagttgctgaattaagtggaataaaattaatgaatattgatcaaatcgctgaaatggttgataaaaatatgcgaagtcgaatgggtcaaaaaacttctgcagaacaaa

SEQ ID NO: 216297 - DNA, 618 bp, Unknown
  Bacterial polypeptide expressing nucleotide sequence isolated from the Sargasso Sea
aatgacaaaaaatatcataaatgcaagagttactttcaaaaaatccccgatccatgtacttgaaagattctctttgggagattcagaaaatgcttacaaatctttcaaagaccacaccggtttatccgaatgtgtaatattacaaacttgtaatcgtgtagaaatatttggctctggtaataattttgatagagaagaaatcaaaaaaacttgggcatcgttatctggtttagaggaaaacagctttaaagataatttagaatggtcacaagattctgatgtgtatgaacatttattgaaattaacttctggtttagattctatggttgtaggtgaagaacaaatcatgacacaaataaaagattcaatccaatctgctaaaaaactaaaagtttctggtgaatctctaaacacattatttgataaagctattcgtgttggtactagagtaagaacttctactggcataagtaaaggaagtatttctgttggctcaatggcagttaaacttgcagaagaaaacgtggatgagatgaaatctaaaaaaattcttttaattggaactggtgaagctgcaacacttgtcgcaaaatctttgaaaaaacgtggatatccatt

SEQ ID NO: 216298 - DNA, 480 bp, Unknown
  Bacterial polypeptide expressing nucleotide sequence isolated from the Sargasso Sea
tatgcatattgttgtcgtcggactaagtcatcgcacggcacctgtcgaagtgcgtgagaagttaagtattcctgaccaatccataacagagtcattgaaagcgttaaaagcattcgctgatgtattagaggtgtcaattttaagtacttgtaataggctggaaatatatgcgctagtaaaggataaaaatactggaatttcatcaattaaagaattcatatcagaatattctggaattatttttgaagatttaaatccacatcttttttgctttaggcaggaagaagcagttttgcatttgatgaaagtctcggcaggactcgatagcctcgttttaggggaaggacaaatcctctcgcaggtaaaaaaaatgatgagattaggtcaagagaaatcatctactggaccaattcttaatagattattaactcaatcagttagtacaggtaaaaaagtaagatccgaaacaaatttaggaac

SEQ ID NO: 216299 - DNA, 394 bp, Unknown
  Bacterial polypeptide expressing nucleotide sequence isolated from the Sargasso Sea
atgcatattgttgtcgtcggactaagtcatcgcacggcacctgtcgaagtgcgtgagaagttaagtattcctgaccaatccataacagagtcattgaaagcgttaaaagcattcgctgatgtattagaggtgtcaattttaagtacttgtaataggctggaaatatatgcgctagtaaaggataaaaatactggaatttcatcaattaaagaattcatatcagaatattctggaattatttttgaagatttaaatccacatcttttttgctttaggcaggaagaagcagttttgcatttgatgaaagtctcggcaggactcgatagcctcgttttaggggaaggacaaatcctctcgcaggtaaaaaaaatgatgagattaggtcaagagaatc

SEQ ID NO: 216300 - DNA, 452 bp, Unknown
  Bacterial polypeptide expressing nucleotide sequence isolated from the Sargasso Sea
acgccgtcataaacctatgttttttgtcgatttagctgtgccacgtgatattgagaaacaagtggcagagctggaagacgcctatttgtatacagtggatgacttgcaatccatagtgctgcaaaacctgcagaaccgtcaggaagcagcggctgaagccgagcaaatgattttgcagggcgtcagcgagttcagtcagtggctgagtttgcatggccagctggacgtagtgcgcgattaccgcgacaaaggcgaagccatacgtgacgaattgctggccaaagcgggcaaacaaattgcagcagggcaggaccctgaaaaagtattagctgaacttgcgactaaactcagcaacaggttgatgcatgcaccaaccaaggcgctgaggcagttactgcaggacgagcaacctcaacaacaatctttgatcaacactttgttagatctgtaat

SEQ ID NO: 216301 - DNA, 604 bp, Unknown
  Bacterial polypeptide expressing nucleotide sequence isolated from the Sargasso Sea
tcccgattcggacatcgtgatcagttccaccggcgcccgtaaaccgatccttaccccggaacgggtacgccagagcttgcgtaagcgtagaggaagaccgatgtttttcatcgacattgcagtgccgagagacatcgatccaaccgtgaacgagctctcaggagtctactgttacgacatcgacgatcttcagggagtcgttgagcagaaccgtgaagaacgcagagagcagtctaatcttgcggaagaaatcatcagaaaagaactcgaaaaggtcatgctctggtttgaaacccagtcggtcatccctaccgtcaaaaaccttcgcgaatccttccaggaaaccatggatttggagttagagaaaacccttgcaaagcttgggtcgttgaatgaaaagcagcaggctgaaattgaaaaaatggtcagagttttgaccaacaaactgcttcacaaaccgtccacccggctcaagcatctgagcggccgagaagatctgcacctctacctggaaaccctttcagaactttttgatctgaatccctcaaacaatgttgaggaagcgagtcctcaacccgctctgaagttgctaaagaagcaatga

SEQ ID NO: 216302 - DNA, 439 bp, Unknown
  Bacterial polypeptide expressing nucleotide sequence isolated from the Sargasso Sea
gatgaattttaccctcctcggttggaattttcgcagtacccccctggaaatacgagaccggctatcgctgacggaacaggaacaactcgaactgatccaacagatcaatgcgcgctgcgggattcaggagagtgtcctgctaagcacctgcaaccggaccgaactttatctatacaacatggagcggcctgcggaggaattgctggaactgcttcagaaacgttggggaatgcctgaacttctggaaacgcattatctgttgaaggatgaagaagccgtttttcatctatttcgtgtggcttccagcctggattcgatggttgtgggggaaccgcagatactcgggcagttgaaagatgctttcggacggtttcatgaaaacggtttaatcggccggttcctctatgcgatgttcaccccgtgctttttcgattgccaa

SEQ ID NO: 216303 - DNA, 472 bp, Unknown
  Bacterial polypeptide expressing nucleotide sequence isolated from the Sargasso Sea
taataaacttaagtttattgatattggtgtgccaagaaatatatccaatgatgtcaaacaacatgaatttgtaaaatcattcgacgtggatgatttacaagaggtcgtttcaagaaatcaagaatttagacagaaaatagcaaaggaagctgaatctttagtagaagaagaaaggatcatttttctagaatggtgggcaagtttagaggcggttcctgtaattaataaacttagatcagatttggagttgattagaaaagaggaattgcaaaaagcacttagcaggatgggaccagatttttcggctcgagaaaggaaagttgtggaagctctgactaaaggaattatcaataaaatacttcacacccctgttaccaagttgagaagtcctcaatcaagagaagaaagacaagcatctttgaaaatcgttgaaaaattattttctttggtagaagacgataaaaataactaa

SEQ ID NO: 216304 - DNA, 664 bp, Unknown
  Bacterial polypeptide expressing nucleotide sequence isolated from the Sargasso Sea
gccaaacatttgcttgagcagggcgcggaaaaaattactgtagctaaccgctcttatgacaaagcggcggctttagccagccagtttaacggtgaagccgtcagtctggcccaagtgccacaagctttggctaatgccgatgtggtgattagctccactgccagtaccttgcctattgtcggtaaagggatggtggaacaggcgctgaaaaaacgtcgtcataagccgatgttttttgtcgatttagctgtgccacgtgatattgaagagcaagtagccgagctggaagacgcctatttgtatacagtggatgacttgcaatccatagtgctgcaaaacctgcagaaccgtcaggaagcggcggctgaagctgagcaaatgattttgcagggcgtcaatgagttcaattcgtggctgagtttgcatggccagttggacgtagtgcgcgactatcgcgacaaaggcgaagccatacgtgacgaactgctggctaaagcgggcaaacaaattgcagcagggcaggacgcagaaaaagtattagctgaacttgcgactaaactcagcaacaggttgatgcatgcaccaaccaaggcgctgcggcagttactgcaggacgagcagcctcaacaacaatctttgatcaacactttgttagatctgtaat

SEQ ID NO: 216305 - DNA, 706 bp, Unknown
  Bacterial polypeptide expressing nucleotide sequence isolated from the Sargasso Sea
atggaattacagctgtttggcataaatcataagactacaaagttatcagaaagagagttatttattataaatgactctaatcaagaagactttaaaaatttctttcaaagcgcttttggcaactccatagattcattttttgccctatctacctgcaataggacagaggtatatatttttggctcttcaacgagcgctactaaaattgccgaaaagactcttgaattttttggctccagcgattctttgaacaatgatttatatttttttaacgataatgaggctatcgagcatatgtgcaatgttgcaagcggtcttgactctcaggtattgggtgagcaagaaatattaggtcaatttaagaaatccattcagacatatactgcacttggttcattaaaaggagaatttcagcgcctaactgatgacattatttcgattgcaaaagcagcaagaacagaaacacaaattggttttaattccttatctgtttcaggcctatcattaaaaattgtccaagagatttttgaggatccgactcagcaaaaacttacaatagtaggagccggccagatggcgttaagcgtcattgaaaattttcataataatggtatcaagagtattaatgcagtcaatcgttccaagaaaacattaacgattaataactctttatcaatagaaacaactcatttatctcaacttggag

SEQ ID NO: 216306 - DNA, 281 bp, Unknown
  Bacterial polypeptide expressing nucleotide sequence isolated from the Sargasso Sea
tatggctataaatgtacttggtataaatcataaaactgcacctattgagatacgggaaaaactagtttttgacaaagaaagccttccgcatgctttgactgatataaagaatattgatggagttaacggcgtaatactcttgtctacatgcaatagaactgaagtctatactgaaaatgattatgataattctagaattattgagtggctaaaaagccaaaatatgactaacgatatttcggactttacttacaattattatgaagagaaagccataaaaa

SEQ ID NO: 216307 - DNA, 829 bp, Unknown
  Bacterial polypeptide expressing nucleotide sequence isolated from the Sargasso Sea
tttgataggacttattagtattaattataaaatctctccagttgaggtaagagaaaaattctattttgaggataaagaaaaaatagacttttatgaatttgtgtcaaagcaatttcctattgatggtatagttattctatctacttgtaatagaactgaaatttactatgagtatgaaaattatttaggtcaagaaaaaagaatatttcatgtaattatgaaatgtttagtagaatataaaaagtattcagagggactatcaccatacgcaattaaaaaaactggatcaattgatgtttccaagcatttatttagactaatatctggattagaatctatggttgttggagaatttcaaatagttgatcagttaaaggaagctttttatttttctaaaaagaaaaagattctaggaccaatacttagtagaatatttcaaaaatcttttgaaacagggaaggatgtcagatcaaataccaaaatttctgaaggagccgtgtcagttagctatgcagcagttgaaattatttctaaaaaatatgatttaaaaaaatcatctatactatgtgtcggtactggagaaacatcaaagctgtcaattaagcaccttttaaagaaaaaaattaaaaatattgtattagcaaataggactgacaaaaaagctgaaaactttgctaattcttataatttagattttgtttcgtttaaaaattataagaagtgtttttcaaaaattgatatcgcaattttttcaacttcatcatcatctcctctgatttcattttctgaagtttctgatttgatgaaaaaaaaggaaaaacaaaaagct

SEQ ID NO: 216308 - DNA, 829 bp, Unknown
  Bacterial polypeptide expressing nucleotide sequence isolated from the Sargasso Sea
agaagccgtgtttcatctatttcgtgtggcgtccagcctggattcaatggtagtaggggaaccgcagattctcgggcagttgaaagatgctttcggacggtttcaggaaaacggtttaaccggtcgatttttctatgcgatgtttacccgcgctttttcgattgccaaaaagatccgcacggagacttcgatcggggataatgcagtttcaatcagttatgcggcggtggaactggcgaagcgaatttttgatgacatccgccagcagaaggtgcttgtgatcggcaccggagaaatggcggaacttgcgatccgtcacctgctaagaaccgggattcatcaactcaaagtcaccaaccgtacttttgccaatgccgccaaattggctgagcagttccaggccagtgttttcccttttgaaaaactctatgaagaacttcccgattcggacatcgtgctcagttccaccggtgcccgtgtaccgatccttaccccggaacgggttcgccagagcttacgtaagcgtcgtggaagaccgatgttttttatcgacattgcagtgccgagagatatcgatccaaccgtgaacgagctctcaggggtctactgttacgacatcgacgatcttcagggagttgttgagcagaaccgtgaagaacgaagagagcagtcgaatcttgcagaagaaatcatccgcaaagaactgcaaaaggtcatgctctggtttgaaacccagtcggtcatccctaccgtcaaaagccttcgcgaatccttccaggaaaccgtggatgtggagttagagaaacccttgcaaagcttgggtcgttga

SEQ ID NO: 216309 - DNA, 1246 bp, Unknown
  Bacterial polypeptide expressing nucleotide sequence isolated from the Sargasso Sea
atggctataaatgtacttggtataaatcataaaaccgcgcctattgaaatacgggaaaaattagtttttgacaaagaaagtctgccgcatgctttgactgatatcaaaaatattgatggagttaatggcgtaattcttttatctacttgtaatagaactgaagtctatactgagaatgattatgataattctaaaattattgagtggctgaaaaaccaaaatatgactagggatatttctgactttacttacaattattacgaggaaaaagccataaaacatttgttgaatgtcacctcaggaattgattcgatggttgttggggaaaatgaaatacttggtcaagtgaaacatgcatttaaaattgctgatagcaataatatgattaatacacctttaaaaaaattgtttgagttttcattctctgttgctaaacaagtcagaactgatacggatattggagcgaaccctgttaccttcatgtttacagctatgactttaattaagaaaatatttgaggattttaatagcaagcgagcaacaattgttggtgctgggcatatgagtaaactagcaatcaaatatcttcaatctcatggtattaatgacatacgtttaacaaactataattatgataaaggacaaaaagtagctaaagagcatggatgcatctactcaaaaatacaatatattggtaatctgattgcaactagtgacattattattacctctacttcaagttcaactcctgtaataggaaaaggcctcatggaaagctgtataaaaacatcgaagaacctcccagtcgtcataattgatttgggcgttccaagagatgttgaaacagaaatttcatcattggataatgtttttctatatagcatagatgatttaggcgaagtaatttctaaaaactttaaattacgcgaagaatcagtgatggaagcgaagaaaattatcgataataaaattgatgaatttaaacagtggttaatacagagcgactctgagaaacttgtcaaagcttatagaggttttgtagatgatattacgcatggggctataataaaaacaaaaaaaatgattgaatctggagagaatatagatcaagcaattgattatctagcttccacgctaaaaaataaactcactcatgaaacaactacgaaactgagggaaatactacccttgctagacgagtcatcatttaagaaagctgaagaaattttcaaaaaaaataaatgac

SEQ ID NO: 216310 - DNA, 1261 bp, Unknown
  Bacterial polypeptide expressing nucleotide sequence isolated from the Sargasso Sea
atgacaaaaaatatcataaatgcaagagttactttcaaaaaatcaccgatccatgtgcttgaaagattctctttgggagattcagaaaatgcttacaaatctttcaaagatcacaccggcttatctgaatgtgtaatattacaaacttgtaatcgtgtagaaatatttggttctggtaataattttgatagagaagaaatcaaaaaaacttgggcatcgttatctggtttagaggaaaacagctttaaagataatttagaatggtcacaagattctgatgtgtatgaacatttattgaaattaacttctggtttagattctatggttgtaggtgaagaacaaatcatgacacaaataaaagattcaatccaatctgctaaaaaactaaaagtttctggtgaatctctaaacacattatttgataaagctattcgtgttggtactagagtaagaacttctactggcataagtaaaggaagtatttctgttggctcaatggcagttaaacttgcagaagaaaacgtggatgagatgaaatctaaaaaaattcttttaattggaactggtgaagctgcaacacttgtcgcaaaatctttgaaaaaacgtggatatccatttttcatatcaagtagaactgttgagcgctcaacctcattttctaaaacagttggtggtgaacctgttgattttaattcaattctaactggatttgaaaattatgacattgtatttgtagccactactgcaccttactttttggtaacttttgaaagaatacaaaaagctctagaaactaaacattcgggtatgatgatattggatctatctaatcctaggactgttgatgaaaaggttgctgaacttcgaggaataaaactaatgaatattgatcaaattgctgaaatggtcgataagaatatgagaagtagaattggtcagaaaaactccgcagaagaaattattaaagaagaattgccagtactagaagccactatgaaaagattagaagctgaacctatcgtaaaggatgttttcaaaagtactgatgcaattagagtgaaggaacttgaaaaggcatttagtatgttaggtgaactagatgactctcagaaaaaaataattgaagaattaaccaaatctgttgctgaaaacataatgtcaactcctatgaataatcttagaaaagaaactgagcatggaaattctgatgttattaatgcagcatcgaaattatttaattttaaaaaagaagagaattagt

SEQ ID NO: 216311 - DNA, 417 bp, Unknown
  Bacterial polypeptide expressing nucleotide sequence isolated from the Sargasso Sea
tatggctataaatgtacttggtataaatcataaaaccgcgcctattgaaatacgggagaaattggtttttgacaaagaaagcctgccgcatgctttgactgatatcaaaaatattgatggagttaatggtgtaattcttttgtctacttgtaatagaactgaagtctatactgagaatgattatgataattctaaaattattgagtggctaaaaagccaaaatatgactaacgatatttctgaatttacttacaattattatgaagagaaagccataaaacatttgttgaatgttacctcaggaatcgattcaatggttattggggaaaatgaaatacttggtcaagtgaaacatgcattcaaaattgctgatagcaataatatgatcaatacacctttaaaaaaattatttgaatt

SEQ ID NO: 216312 - DNA, 1261 bp, Unknown
  Bacterial polypeptide expressing nucleotide sequence isolated from the Sargasso Sea
atgacaaaaaatatcatcaatgcaagagtgacttttagaaaatctcctattcatgttcttgaaagattctcacttggtgattcggaaaatgcatatcgctcattcaaagaacacactaatctttctgaatgtgtaattttacaaacatgtaatcgtgttgaaatatttggttctggtgaaaaatttgataaagaaaaaatcaaaaaaacttgggcatctcttgctggattggaagagaatacctttcatgaaaatctagaatggtctgaagactctgacgtgtatgaacatctcttgaaactaacttctggacttgattctatggttgttggagaagaacaaatcatgacacaaattaaagattcaattcaatctgctaaaaaattaaaagtttctggtgaatctctaaacacattatttgataaagcaatacgtgttggtactagagttcgtacttcaactggaatcagtaaaggaagcatatctgttggttcaatggctgtcaaacttgctgaagaaaacgttgatgaaatgaaactcaaaaagatacttttgattggaactggtgaagctgcaacacttgtcgcaaaatccttaacaaaaagaggatacccatttttcatatccagtagaacccttgaacgttcaacatcattttctaaaactgtaggtggtgaacctgtagactttaattcaattctaactggttttgaaaattatgacattgtatttgttgcaacaactgctccttatttcctagtgacttttgaaagaatacaaaaagcactcgagacaaagaaatctggtatgatgatactagatttatctaatcctcgaaccgttgatgaaaaagttgctgaattaagaggaattaaactgatgaatattgatcaaattgctgaaatggttgacaaaaatatgcgaagtaggattggtcagaaaaactctgcagaagaaataattaaagaagaactgcccgtattagaagcaagcatgaaaagattagaagctgaaccaattgtaaaggatgttttcaaaagtactgatgcaattagggtcaaggaacttgaaaaagcattgggtatgttaggtgaattaactgattcacagaaaaaaattattgaagaattatcaaaatctgtagcagaaaatatcatgtctacccctatgaataatcttagaaaggaaactgaacatggaaattctgatgtaattaatgcagcatcaaaactatttaattttaaaaaagaagataattagt

SEQ ID NO: 216313 - DNA, 469 bp, Unknown
  Bacterial polypeptide expressing nucleotide sequence isolated from the Sargasso Sea
ttggtggacattgcggtgccgcgtaacgtgcacgccaactgcagcgaagatgcgaatacggtagtttacaacgtcgatgacttgaaggagctcgcggagctcaacaaggcgaagcgcgaagcagcggccaaagaggcggaggctcttttattagaggagcaacgcaactttgaggcgtggagggacagtctggaaaccgttccgaccatcaagcgtttacgtcaaaaggctgaaaacattcgcagcgcagagttagacaaggcgatggccaagctcggggatggtttgaccaacaagcaaaagaaggccgtcgaagagctctcgagaggcatagtcaacaagctgttgcacggcccgatggccgcgcttcgctcggacggttccgacccgacggcggtcgccatgacgctcgtgaacatgcacgcactcgagcgcatgtttgatctgcgaaatgtcgaggaaaaataat

SEQ ID NO: 216314 - DNA, 717 bp, Unknown
  Bacterial polypeptide expressing nucleotide sequence isolated from the Sargasso Sea
tatggaattacagctatttggcataaatcataagactacaaagttgtctgatagagagttatttattataaatgactctaatcaagaagactttataaatttctttcttgaaaattttggtgagtctattgattcattttttaccctttctacttgtaacagaacagaggtttatatttacggagcttcatcatgtatttcatccattgctgaaaaaactcttgagctctttggttcaagtgatgctttaaaaaatgacttatatttttttagtggcaatgaggctcttgagcatatgtgcttggttgcaagcggtcttgattcacaggttttaggtgaacaagagatattgggtcaatttaagaaatcagttcagatttatattgagttgcaatgtttgaagggagaatttaagcaattaacagatgatattatttctattgcaaaagcggctaggacagaaacacaaattggttttaatccattatctgtatcaggcttatcattaaaaatagttcaggaaatttttgaagatccagccaagcaaaatcttaccatagtaggagctggccaaatggcaataagcgtgattgaaaatttttataatcatggcattacaaaaataaatgcagttaaccgatcaaagaaaatattaactatcaatgattctctctctatggaaaccactccattgtctcaactttgggcaagatcaaa

SEQ ID NO: 216315 - DNA, 443 bp, Unknown
  Bacterial polypeptide expressing nucleotide sequence isolated from the Sargasso Sea
aatgacactcagaataattggtctcaatcatcataatgcttcgctagattatagagaaaagttagctttttctcatgaagagattcaatcctgtctgaaagatttagtagcaagcgatgaaataaaagaggccgtcatattgtcaacatgcaatagaactgaattttaccttcaagctaatgaagaaggagaggaatatacaaaaacatggcttaaaaaaaataaaaatatcaataaaaacacagaggacctccttttttcattgaagggcgaaaaagcaattattcatttaagtcgggtagcatgtggtttagattctatgattttgggcgaaccgcaaattttaggccaattaaaaaatgcatataaatcctcttttgaatcgggcgctataacaaaagatttttcaaagttatttgatcatatttttcgtctcgcaaaaa

SEQ ID NO: 216316 - DNA, 1023 bp, Unknown
  Bacterial polypeptide expressing nucleotide sequence isolated from the Sargasso Sea
aatgaccatatcagttatagggctaaatcataaatcggctaatatagatatcagagaaaagttctcttttacagctgataatgcagcgcttcttttgagaagaataaaaaaggttagagatattctagaagtaatagtagtctcaacctgtaacagaacagagatatattgtgagagcgctaacggttctgatgacattaaaaattggctattatcagagaaagaatacaagtcatttgccagacacctgtacgttcatcaagaggaggatgctattgagcacctcttcaaagttgtggcaggtcttgattctatggttattggcgagagtgaagtactagggcaggtaaagacagcatataaaattgctcttgataataaatctattgacggaaaattaaaaaggctttttgaatactctttttctgtagcgaaaaatgttagaaccaatactgatataggcggaaatgcgatatcgttcatgtatacatccatccttctgataaagaaaatattttctacagttgaagaaaagaaatgtttgctaattggtgctggggaaatgactgagctagcactaaaatatttaaaatctaataatgtaaatgatattactatctgcaatagaaaagaggagaaaggtaaaaaactagcattagaaaattcatgtaggtactctaatttaaataacttatcgaacattattcatgattacgatgttataataacttctacctcaagctctttaccacttataggaaaaggtaacgttgaaaatgcgttaattaaaagaaataatgattcaatagtaataatcgaccttggtgttcctagagatgtagagtcgcaaataaaaactctggataatgtatatttatacaccattgatgaccttggacaaatcatcgaaaagaattataaaattcgagaaaaatctatcaaagatgctgaagagataatcaaatttaaaatcgtggaatataaaaattggttatcagaaaacaacagtactgagataataaa

SEQ ID NO: 216317 - DNA, 502 bp, Unknown
  Bacterial polypeptide expressing nucleotide sequence isolated from the Sargasso Sea
ttagtaagagttgaaaatattagtttaaataacaaacttaaatttattgatataggtgttccaagaaatatatcaaatgatgttaagcatcatgcttctatagagtcttttgatgttgatgacttggaggaagttgtttctagaaatcaagaatttagacaaaaaatagcaaaagaggctgaatctttagttaaagatgaaagaatcatttttttggagtggtgggctagtttggaagcagttccagttataaataaattaagatctgatttggaattaataagaaaagaagagttacaaaaggcacttagtagaatgggacctgatttttctgctcgagaaaggaaagttgtagaggctttaactaaagggattattaataagattcttcacacaccagtcactaaattgagaagtcctcagtcaagagatgaaagacaagcatcattaaaaattgttgaaaaattgttttctttggtagatgatgaacaaaatttttaaa

SEQ ID NO: 216318 - DNA, 1211 bp, Unknown
  Bacterial polypeptide expressing nucleotide sequence isolated from the Sargasso Sea
tttctcatcagagcaagcaactgaagctctagctcttttccagaaacagtttccgggcagtgaagcagtccttttatcgacttgcaatcgcatcgaattgtacgctgctgacgaggaacgccgagggccacctccgccagatgaattagccatgtttctggcagagtgccgaggtattgatcctacaaatgctggaagagtactcggtggtgagcagggaactgctgctgtaaaacatctattttgtgttgctgctggactcgacagcatggttctcggagaacctcaaattgttgcacaagtgaaacaggcatggcagcttgcccaacaaagtgggacgaccggacctcttactggagaactctttcaggcagccttacgcgcggcaaaacgtgtaacgacggaaacagctgtcgggcgagaacgtttatcaatcccaagcatcgcggttgctgattttgccagtggtgtgtttgaaagattcgatgacaaacgtgtgcttttgattggtgcggggaaaatggcggccgaaacccttcgatatctccgtgacgccggggcacagaacatccgaattattaatcggtctctggagcgggctcacagcctggcacaacggcttgaggctcaaaccggcgattataacaatatttctcgtgagcttgttgatgccgatcttgtcgtcagcacgaccggtgcttcagagcccgttgtaacactcgacctttaccaaaacgttgaagatcaacgacagggtcgtccccttgttgttcttgatcttgctgttcctcgtgactttgattcacgtatcggtaccaggcctggggtttggctttactcaatcgatgatcttggtcaggcctgtgattccaatcgccgtagaagacaaaatcaacttcctgcagcactcacaattgttgatgaagaaactcgtcggttcatgggagacctccaccaccgatcaaccgttccagttattgaacaacttcgagctggctggaatgaaaccggcgaagtagagcttgatcgacttttccgaaagcttccagagcttgacgaaagtagtcagaaggaaattcgacaggcgtttgaaaggtatgctgccaaaatgctccatcccccgatggcttctctacgaagtgaaagtaaagcgggcccacctcatggccttcttgaagcattaaggcggctctttgatttaaaggaatgat

SEQ ID NO: 216319 - DNA, 873 bp, Unknown
  Bacterial polypeptide expressing nucleotide sequence isolated from the Sargasso Sea
gctgcgagaacgcgtaacgttttcgccggatacgctcgatcaggcgctggagagcttgctggcccagccaatggtgcagggcggggtggtgctgtcgacctgtaaccgcacggaactctatctcagcgtcgaagagcaggataaccttcaggaagtgcttatccgctggctgtgcgactaccacggtttaaatgaagacgacctgcgcaaaagcctctactggcatcaggataacgaggcggttagccatctgatgcgcgtcgccagcggcctggattcgctggtgctgggcgagccgcagatcctcgggcaggtgaaaaaagcctttgccgactccagccgtggtcacctgaacgttagcgagctggagcgcatgttccagaagtcgttctcggtggccaaacgcgtgcgtaccgaaaccgatatcggcgccagcgcggtctccgtggcgtttgccgcctgtaccctggcgcgacaaatcttcgaatcactctccagcgtgaccgtgctgctggttggcgccggtgagactatcgagctggtggcccgccatctgcgcgagcataaggtgcgcaagatggtgattgctaaccgcacccgcgagcgcgctcaggcgctggccgatgaagtcggcgcggaggtgatcgccctgagcgacatcgacgaacggctaaaagaagcggatatcattattagttctaccgccagcccgctgccgattattggcaaagggatggtggagcgcgcgctgaaggcgcgccgcaatcagccgatgctgctggtggatatcgccgttccgcgcgatgtcgaaccggaggttggcaagctggcgaacgcctatctctacagcgtggacgatctgcaaaacatcat

SEQ ID NO: 216320 - DNA, 890 bp, Unknown
  Bacterial polypeptide expressing nucleotide sequence isolated from the Sargasso Sea
tgcattttctactgcaaaacgcgttcgtacagaaactagtatcgcaattaacgcagtttccgtaagttatgctgcagtagaattagcaaaacacattttcgaagatttatccaaacaaagtgtaattgtgattggggcaggagaaatggctgagctggctgttcaacatatgataaggagtggaatttatcagttatttgtaaccaatagaacatttgctagtgcagcaaagctggcagaaaaatttcaaggagtagcagtgcctttcgaacatcttaatcggcatctccatcaggcagacattgttataagctcaactggatctcgaaagtatataataacaaaagaattagtaaaaaaatgtttggttaaacgcacgggcaatcccatgttttttatagatattgcagttccaagggatattgatcccgaaataaatgatcaacatggagctttctgctacaatattgatgatttacagacaattgtttggaaaaatcaggaagaacgaaaaaaacaatctataaaggctgaagaaatagtcgaagaggaattatccaaattagaaatatggttcaagtctctttctgcagttccgaccattagaagtttacgcaaagtattccactttactgctgaagaggaactacagaaagtttttaaacgcattaagaaaatgcctgagtcagagcgtaaggaaattgagaattttgcctataggcttgtaaacaaacttttgcatgatccgtcacgaaacctgaaacatctagcacaggaagaagattcacacctctacatggaatcaattgtaaaattgtttggtttaacacctgattctttaggaaaaaatgtccaacaaaagctcagacttaaaatcataaaatcatgac

SEQ ID NO: 216321 - DNA, 725 bp, Unknown
  Bacterial polypeptide expressing nucleotide sequence isolated from the Sargasso Sea
acacggtgtattccagcacgcctttggcggtgccaagcaaattcgtaccgaaaccggtatcggctctaaccccggatcggtggcctatacagcggtaagcttatcgcgccgcttattcagtaagctagataccaaaaccgctttactgattggcgctggcgacacgatagaattggtggcgcgccatttacaagaacaagggattagcaagctaattgttgcgaaccgttcattagggcgcgcccgtgaattggcggaaaaagtttcagcaaaacccttgttgctatccgacttatccagccacttacatttggccgatattgttatttcttctaccggtagccagttgccggtattgggtaaaggtgcggtggaatcagcaattacacagcgtaaacaccggcccatgtttatggtagatattgccgtaccacgcgatatagagccagaagtggggctgttaccggatgtgtatttatacaccattgacgacttgcacgaagtagttgatgtgaaccagaaagagcgcgagttagaagcgcagaaagcaatgggtattgtgcaaaccggtgttgagcaatttaaaaaacagctgaatgtgcgtagctcaacccaaattattgtgggtttgcggcaaagtgccgaagccttgcgtgatcaagaagtagaacgcgccttattacagctagaaaaaggcgcagcccctgaagcgatcattcagcagc

SEQ ID NO: 216322 - DNA, 937 bp, Unknown
  Bacterial polypeptide expressing nucleotide sequence isolated from the Sargasso Sea
aataggctagaaatatatgcgctggtaaaggataaaaatactggtatttcatcaattaaagaatttatagcagattattccggaattgtttttgaagatttaaatcctcatcttttttgttttagacaagaagatgcagttttacatttaatgaaagtttctgcaggactcgacagcctcgttttaggtgaagggcaaatcctctctcaagtgaaaaaaatgatgagattaggtcaagagaatcaatctactggtcctattcttaatagactattaacccaatctgttagtacaggtaaaaaagttagatctgaaacaaatttaggtactggagctgtttcaatcagttcagcagcagttgaactcgctcaattaaaaattggccaagaaaaggggcttgatactcttgtgagtttggaatcagagaaggttcttgtagttggggcaggacgaatgagtaggcttttaataactcatttaaaatcaaaaggatgtcataaacttattcttgtcaatagaaatattgatagagcattaaatcttgcagtagacttccccgacttagaaatcgtttgtaaagggttaaacgaattagaagaaaacatatcaatatcttccatagtttttaccagtactgcttctgaagagccaattattgatctcgcaacaattaaaaagttaaatttgagtaatagacttaaatttattgatattggtgtaccgagaaatatatctaatgatgtcaaacaacatgaatttgtaaaatcatttgatgttgatgacttacaagaggtcgtttcaagaaatcaagaatttagacagaaaatagcaaaggaagcggaatctttagtagaagaagaaaggatcatttttctagaatggtgggcgagtttggaggccgttccagtaattaataaacttagatcagattggagtt

SEQ ID NO: 216323 - DNA, 601 bp, Unknown
  Bacterial polypeptide expressing nucleotide sequence isolated from the Sargasso Sea
atgaattttaccctcctcggctggaatttccgcagtacccccctggaaatacgagaccggctatcgctgacggaacaggagcaactcgaactgatccaacagatcaatgcgcgctgcgggattcaggaaagtgtcctgctcagtacctgcaacaggaccgaactttatctatataacatggaacggcctgcggaggaactgctggaactgcttcagaaacgctggggaattcccgaacttctggaaacacattatcttttggaggatgaagaagccgtgtttcatctatttcgtgtggcgtccagtctggattcgatggttgtgggagaaccgcagattctcgggcagttgaaagatgctttcggatggtttcaggaaaacggtttaaccggtcgtttcctctatgcgattttcacccgcgctttttcgattgccaaaaggatccgcacggagacttcgatcggggataatgcagtttcaatcagttatgcggcggtggaactggcgaagcggatttttgatgatatccgccagcagaaggtgctcgtgatcggcgcaggggaaatggcggaacttgcgatccgtcacctgtgcgaaccgg

SEQ ID NO: 216324 - DNA, 952 bp, Unknown
  Bacterial polypeptide expressing nucleotide sequence isolated from the Sargasso Sea
tttatccgcgttgcttcaggattagactcccaggtgttaggcgagcctcaaattctgggtcaagtaaaagagagcttcgataaagcagagggcatgggttgcgttggaaaagaacttacctctctattccaagtagggattaggtatgcgaagaaaattcgtagtgaaacaaaaatcggagagaatcctgtatcgatcgcttacgctgcggtctttcttgcctctaagattttcgaaaaccttagctcaaagaaagccttgttaattggcgctggcgaaaccatttcactagtaacagaacatctcaaaaaagccggcatcaaagacctaactatcgcaaataggacattggaacatgcgcaggaattggctttccaacaaggtacagacgccattcatcttcaagatattgaagaaaaactatcttctattgacataatagtgtcttcaactggctcagaagacacgatcttaaaaaaaagagatttcgaagaaatcatgaaattaagaaagcgtaatccgatatttatagtcgacattgcggttcctagggatattgaagcctcagttcaagaagtgccaaacgtgtacctctacacaattgatcacctaactgaggtaatcaacttaaacataggcaagcgacaacaagctgctgaggcagcggaggagtatgtttcacttgggtctaaaacttatttacaagaaaaacgggttagatctggaaacgtcctaatcaaagagtatcgaaaccaagtagagtcaataagacagagtgagcttgctaaaattaaaagtcttcttagcttcaagaataatgacatagaaacaatcgagaattttagccaatcgctagccaacaagcttacacatgaaatcacgacactaattagatctgcgatcgcggagaaacacttggatttgcttgcagaattacagcatctttataaac

SEQ ID NO: 216325 - DNA, 838 bp, Unknown
  Bacterial polypeptide expressing nucleotide sequence isolated from the Sargasso Sea
ttcagtgaggcagaactaacacgaaaattgcttcaccctctatttactcgtgcattttcaacagcaaaaagggtacgtacagagaccacagttgcaagcaacgcagtttctgtaagttacgctgcagtagaattggcaaagcacattttcgaagatttatccaaacaaagtgtgattgtaattggtgcaggagagatggctgaattggctgttcaaaacctaatgcggaatggaattactcagttatttgtagccaacaggacatttactagtgcagcagagttggcagaaaaatttcagggaattgctgttcctttcgaacatcttgatcgacatctccatcaggcagacattgtaataagttcaacaggggctcgaaaatatatcgtcactcaagaacttgtgaaaaagtgtttgcttaatcgtaagggcaatcccatgttttttatagatattgcagttccaagagacattgaccctgaaataaataagttgcatggtattttctgttacgatattgatgatttacaaacaattgtttcacaaaaccgagaggaacgaaaaaaacaatccatagaggctgaaaaaattattgaagatgaattgtctaagttagaaatatggtttaggtctctttctgcagtccctactattaggagtttacgcaaatcattccactctacagctgaaaaagaactgcaaaaagtttttcgaagaattaataaaatgcctgagtctgagcgtatagagattgagcagtttgttcacaggcttgtacaaaaacttttgcatgaaccgtctcgaaacataaaaaaattagctcaggaagaagactctc

SEQ ID NO: 216326 - DNA, 858 bp, Unknown
  Bacterial polypeptide expressing nucleotide sequence isolated from the Sargasso Sea
aatgaattttaccctcctcggctggaatttccgcagtaccccacttgaaatacgagaccggctatcgttgacggaacaggaacaactcgaactggtccaacagatcaatgctcgctgcgggattcaggaaagcgtcctgctcagcacctgcaaccggaccgaactttatctttacaacatggaacggcctgcggaggaactgctggaactgcttcagaaacgttggggaattcctgaacttctggaaacacactatcttttgaaggatgaagaagccgtgtttcatctttttcgtgtggcgtccagcctggattcgatggtagtaggggaaccgcagatactcgggcagttgaaagatgctttcggtcggtttcaggaaaacggtttaaccggtcgatttctctatgcgatgtttacccgcgctttttcgattgccaaaaggatccgcacggagacttcgatcggggataatgcagtttcaatcagttatgcggcggtggaactggcgaagcggatttttgacgacatccgccagcagaaggtacttgtgatcggcgccggggaaatggcagaacttgcgatccgtcacctgttgcgaaccgggattcatcaactcaaggtcaccaaccgtacttttgccaatgccgccaaactggcagagcagttccaggccagtgtttttccttttgaaaaactctatgaagaacttcccgattcggacatcgtgattagttctaccggggcccgtgaaccgatccttaccccggaacgggtacgccagagcttacgtaagcgtagaggaagaccgatgtttttcatcgacattgcagtgccgagagacatcgatccaactgtgaa

SEQ ID NO: 216327 - DNA, 660 bp, Unknown
  Bacterial polypeptide expressing nucleotide sequence isolated from the Sargasso Sea
tatgcgaattaccgtaataggatggaattttaaaaatacacctattgaagtacgagaacgattagccttgacccaggatcagcaaattgagctggcaaaccggctaaaagaaaacttcaaactaggtggaattttaatattatgcacctgtaaccgtacagagttgtttcttgccaatgcagagcagcagctaaatcaaattattgaaatacttcaaaaatattggaatatccccgaacttcgtgaaagtgtttacattctgcaaaatcttgacgcttcaagacatttgttcagggtcgcttcaagtctagactccatggtacttggggagcctcagattttaggccagctaaaagatacgtttaattattttagtgatgcagaactaacaggaaaattgcttcaccagctattcactcgggcattttccactgcaaaacgtgtgcgtacagaaactaatgtcgcaagtaatgcagtttccgtaagttatgctgcagtagaattagcgaaacacatattcgaagatttatccaaacaaagtgttattgtgattggggcaggagaaatggctgagctggctgttcaccatatgatgcgtagtggaatttcacagttatttgtaaccaatagaacatttgctagtgcagcaaagctggcaga

SEQ ID NO: 216328 - DNA, 835 bp, Unknown
  Bacterial polypeptide expressing nucleotide sequence isolated from the Sargasso Sea
cctcctgaggtagtaagtgatgctttgagagacattaggtcattaactgatgtaagtgaagtggttttactgtctacatgtaacagaacagagctatacatcaagagaatcaacgatgagagcttgagcaacaagctcgatcataatacacaaaattccttggttcaaaaaacagtaaaagatgtgatttcttggcttgccagttttcatgactttgagtcgagtgagcttgagcgaagtatttattcattttcaggaatggatgtcgttagacatctgatgaaagtttcttgtgggttagattccttggttttaggagagccacagattcttggccaaataaagtctgcttttgccttagcaaaagatctgaaaacagttggcccatctttgaatggtgctttcattgcggctttctctattgcgaaaaaggttcggaccgatacggcaataggcgaaaatccagtttcagttgcgtatgctgcaaccgtattagcggaaagaatcttttctgattttcagtccctatcaattttgttaattggagctggtcggactattgaacttgtggcaacgcatttccatgaaaagaatgtgtctaggcttacagttgcaaataggactttggataatgctctcgaaatcgcgctaaaattcggcggtaaaggtgttttactctccgaaattccagagcagctcgaaaccgttgatgtggttgtttcttcgacaaatagccagctaccgctccttggtaaaggttcagtcgagcgagcattacaaagaagaaaacatcaaccaatgctcttaattgatttggccgtaccgagagacatcg

SEQ ID NO: 216329 - DNA, 916 bp, Unknown
  Bacterial polypeptide expressing nucleotide sequence isolated from the Sargasso Sea
ctggaaacgcattatctgttgaaggatgaagaagccgtgtttcatctttttcgtgtggcatccagcctggattcgatggttgttggtgaaccgcagattctcggacagttgaaagatactttcggacggtttcaggaaaacggtttaaccggccgtttcctctatgcgatgttcacacgtgctttttcgattgccaaaaggatccgcacggagacttcgatcggggataacgcagtttcaatcagctatgcggctgtggaactggcgaagcggatttttgacgatatccgccagcagaaggtgcttgtgatcggtgccggggaaatggccgaacttgcgatccggcacctgttgcgaaccgggattcatcaactcaaggtcaccaaccgtacttttgccaatgccgccaaactggcagagcagttccaggccagtgtttttccttttgaaaaactctatgatgaactccctgattctgacattgtgatcagttccaccggggcccgtgaaccgatcctaaccccggaacgggtacgccagagcttgcgtaaacgtcgaggaagaccgatgtttttcattgacattgcagtgccgagagatatcgatccaaccgtgaacgagctctcaggtgtctactgttacgacatcgatgatcttcagggagttgttgagcagaaccgtgaagaacgaagagagcagtcgaatcttgttgaagaaatcatccgcaaagaactgcaaaaggtcatgctctggtttgaaacccagtcggttatccctaccgtcaaaagccttcgcgaatcttttcaggaaaccgtggatgtggagttagagaaaacccttgcaaagcttggttcgttgactgaaaagcagcaggctgaagttgaaaagatggtcagggttatgaccaataaattgc

SEQ ID NO: 216330 - DNA, 964 bp, Unknown
  Bacterial polypeptide expressing nucleotide sequence isolated from the Sargasso Sea
tagtattcctgaccaatccataacagagtcattgaaagcattaaaagctttctctgatgtattagaggtgtcaatcttaagtacttgtaataggctggaaatatatgcgctagtaaaggataaaaatactggaatttcatctattaaggaattcatatcagaatattctggaattatttttgaagatttaaatccacatcttttttgctttagacaggaagaagcagttttgcatttgatgaaagtttcggcaggactcgatagcctcgttttaggggaaggacaaatcctttcacaggtaaaaaaaatgatgagattaggtcaagagaatcaatctactggaccaattcttaatagattattaactcaatcagttagtacaggtaaaaaagtaagatccgaaacaaatttaggaactggggctgtgtcaatcagttcagcggcggtagaactagctcaattaaaaattggacaagaaaagggttttgatactcttgtaagtttggaatcagagaacgttcttgtggttggcgccggacgaatgagtaggcttttaattactcatttaaaatcaaaaggatgtcataaactaattcttgtaaatagaaatattgatagagcattgaaacttgctctagacttccctgacttagagattgtttgtaaaggattaaacgaattagatgaaaacatatcaatatcttcgcttgtttttaccagtacagcttctgaagagccgataatcgatctcgctaaaattgaaaaattaaaattgagtaataaacttaaatttattgatattggtgtaccgagaaatatatctaatgatgtgaaacaacatgaattcgtaaagtcatttgatgtagatgacttacaagaagtcgtttcaagaaatcaagaatttagacagaaaatagcaaaggaagcagaatcattagtagaagaagaaagaatcatttttcta

SEQ ID NO: 216331 - DNA, 518 bp, Unknown
  Bacterial polypeptide expressing nucleotide sequence isolated from the Sargasso Sea
catgcacattgccgtcgtcggcctcagtcatcgcacggcaccggtggagatccgggaacggctcagcatccctgagcagaccatggagacgtccctccaatcgttgaagggcaacgatcaggtgatcgaggcttcgattctcagcacctgcaatcgcctggagatctatacgctggtgcggcatccggatctgggtgtgtccgccgtcagcgatttcctcagcggccattccggtctggggaccggcgaactgtcgccccacctgttcagttaccaccacgctgatgccgtggaccacctgatgcgggtggcggccgggctggacagcctggtcctgggtgagggacagatcctctcccaggtcaagaagatgatgcgcctgggacaggagcacaaatctcttggaccgattctcaaccggctgctcacccaggccgtcagcaccggcaaacgggtgcgcagcgagaccaacctcggcaccggggcagtgtccatcagctccgccgctgttgagctgg

SEQ ID NO: 216332 - DNA, 688 bp, Unknown
  Bacterial polypeptide expressing nucleotide sequence isolated from the Sargasso Sea
aatgagcgtcttcatatacggcataaattttaaaacagcacccgtagaaattagggaaaaaaccgtgttgtctggcgagaaactcgaatcaagccttatagaaataagaaaaaaactcgctaacattaatgagattttcattgtatcaacctgcaatcgaaccgaattttattattctaccagcagtgacgcttcatctaacctcgaaacttggttatctgaaacaagcggcctatcccaatcgaccctgaaagacatttcatatcaacactctgcagacaaagtcattaaacactttatccgcgtcgcttcgggattagattcccaagtgttaggcgaacctcaaattctgggtcaagtaaaagagagcttcgataaagcagagggcgcgggttgcgttggaaaagaactttcctctctgttccaggtagggattaggtatgcgaaaaaaattcgtagtgaaacaaaaatcggagaaaatcctgtatcggtcgcttacgctgcggtctttctggcctctaaaattttcgaagatcttagttccaagaaagccttgttaattggcgctggcgaaaccatttcactagtgacagaacatctcaaaaaagccggcatcaaagacttaactatcgcaaataggacattggaaaacgcgcaagaattggcttttcaacaaggtacagacgcc

SEQ ID NO: 216333 - DNA, 812 bp, Unknown
  Bacterial polypeptide expressing nucleotide sequence isolated from the Sargasso Sea
catgaaaagcttggcgagccgcactcgttcgggtgaggctgttattgtgtctacctgtaaccgcacagaactttactgtaataatgctgataaaaaagacattatagagtggctagaagactatcatcagctcaatcacgatgatttaataccgtgcatttatgcttatgaagatcaagttgcagtgaagcatttaatgcgcgtcgcttcagggttggactcattagtgttgggtgaaccacaaattttaggtcaagttaagcaagcttttgtaaaagcaaaagaggccggaacaacagcagtaacaatcgatcgcttatttcaaaacacgttttcggtggctaaaaaagttcgaaccgataccgagattggcgctgctgctgtgtcggtagcatttgcagctgtcagtatggcgaagcatattttctcgtcgttaagcacaactaaggtgctgctaattggtgctggtgaaaccatagagctggttgctaaacatctaaaagacaatggcgtggcggcaatggtggtggcaaacaggaccattgagcgcgctcaagcgatgtgtgaggaattcaatgcgactgcaattaccttacaacaaataccagattttctcgctaaagctgatatcgtgatatcctctactgcaagtcctttacccattttaggtaaagggatggttgaaaaagcgttaaaacaacgtcgtcaccaaccgatgttgttagttgatattgcagttccgagagatattgaagcagaagtcggtgagttagacgacgcattcctttatactgtcgatgatctgcatacca

SEQ ID NO: 216334 - DNA, 643 bp, Unknown
  Bacterial polypeptide expressing nucleotide sequence isolated from the Sargasso Sea
gctgagcaatttggcggcgcaatttgatgcggaagcgattctgctggcggatgtgactgagcggttgcccgacgccgatattgtcatcagttcgaccggtagccagttgccccttttgggtaagggcgcggcagaagaggcggtcaaagcccggcggtggcggccgatgctcatgattgatttggcggtgccgcgggatattgagccgcaggtggccgaaattcccgatatttatctctacaccgttgatgacatgcgtgaggtcatcgaggaaaacctgcgtctgcgtgcgtcagaggcgagcaaggcagatgaaattgtcgcctcaggcatcgaggctctgaaagatgggttacttgaacggcaatcagccgatgtggtgaaaacctaccgcgactccgcgctggccctgcagcaagtcgagctcgataaagcgctaaaaatgctggagaaaggcgctgacccggaggaggtgctgggacgccttgcgagagatttgaccaataaattgattcacgcccccactgcgggccttcgacaactcgcgaaggaaggcggcaagcgcgatgtctccaaaatggccgccatgttggggctcacagacatcgatgacgagcgggacgagggcgcgaccctccagtaa

SEQ ID NO: 216335 - DNA, 799 bp, Unknown
  Bacterial polypeptide expressing nucleotide sequence isolated from the Sargasso Sea
tatgcagcttctaacgatcggaatcaatcaccacactgcgcctgtcgccttgcgcgaacgcgtggcgtttccgctcgaacagatcaagcctgcactggataccttcaaaagcgtctggctcggccgcaccgcccgcacggcgccggaagcggcgattctgtccacctgcaaccgcaccgagctctactgtgcgaccgacgacctggccgcgcgtgaagccgcgatccagtggttctcgaaataccacaacctgcccatcgacgaactcgcgccgcatgtctacgcgttgccgcagtcggaagccgtgcgccacgcttttcgcgtcgcgtccggcctggattcgatggtgctgggcgagacgcaaatcgtcggacaaatgaaagatgctgtgcgcacggcgtctgaagccggcgcgctcggcacctacctgaaccagttgttccagcgcaccttcgccgtcgcgaaggaagtgcgcagcacgaccgaaatcggcgcgcagtcggtttccatggcagcagcagccgtacggctcgcgcagcggattttcgacaaggtctcgaaccagcgcgtgctgttcatcggcgcgggcgaaatgatcgagttgtgcgccacgcacttcgccgcgcagcagccgcgcgagctggtcgtcgccaatcgcaccgccgaacgtggcagccgcctcgccgaacgcttcaacggccgggccattccgctgtcggaactgccggcgcgcatgcacgagttcgacatcatcgtgtcgtgtaccgcttccaccctgccgatcatcggtctgggggcg

SEQ ID NO: 216336 - DNA, 433 bp, Unknown
  Bacterial polypeptide expressing nucleotide sequence isolated from the Sargasso Sea
aatgagtgtcttcgtatacggcataaattttaaaacagcacccgttgaaatcagggaaaaaaccgtattgtctggcgagaaactcgaatcgagccttatagaaatcagaaagaaactcgctaacattaatgagattttcattgtatcaacctgcaatcgaaccgaattttattattctaccagcagtgacgcttcatctaataacctcgaagcttggttatctgaaacaagcggcctatcccaatcgatccttaaagacatctcatatcaacactctgcagaaaaagtcattaaacactttatccgtgttgcttcaggattagactcccaggtattgggcgaaccccaaattctgggtcaagtaaaagagagcttcgataaagcagagggcgcgggttgcgttgggaaagaactgacctctctgttcaagtag

SEQ ID NO: 216337 - DNA, 1261 bp, Unknown
  Bacterial polypeptide expressing nucleotide sequence isolated from the Sargasso Sea
atgagtttgcttgccctcggaatcaaccacaacaccgccagtgtcgccttgcgggagcgggtcgccttcggcccggactgcatcgatcgcgccttgcgtgagctggtcgcccaacccggtgtaagcgaggcggtgatcgtctcgacctgcaaccgcaccgagctttactgcagcctggcgcaggggcagggcgagcaggtgttgcagtggctgcagcgtttccacggtctggatgcggccgaggtggtctccgccatctaccagcatcaggacgaggaggcggtccgccacctgatgcgggtggcctgcgggctcgactccctggtgctgggagagccgcagatcctggggcagatcaagcaatcctacgcccatgcccagcagtcagaggcggtgaagggatcgctggagcgtttgttccagaaatccttctcggtggccaagcgggtgcgtaccgataccgagattggcgccagcgccgtgtcggtggcctttgccgcggtgagcctggggcggcggatcttctccgatctctcccagaccaaggtgctgctggtcggtgccggcgagaccatcgaactggttgcccgccacctgcgcgagcagaacgtcacccagatgatggtggccaaccgcaccctgcagcgggcccagttgctggccgaggagttcggcgcccaggtgatgacgctcgaagagatcccggactacctgcacgaggcggacatcgtcatcagctccaccgcgagccccctgcccatcatcggcaagggcatggtggagcgcgcgctcaaggcccgccgcttcaagcccatgttcctggtggacatcgccgtgccccgcgacatcgaggcggaggtggacgagctctcggacgcttatctctacacggtggatgacctgcagggcatcatcgagcagaatctcgagacccgcaaacgggccgccgccgaggccgagctcatcgtgcaggaagagcgcgacgacttcatgggctggtatcgcagccagcactcggtggatctcatccgcgattaccgccaccagtcccaacaggtagccgacgaagagctgcagcgcgccctgctggccctgcagcagggcgagaatgccgagcaggcgctcaaggcgctggcccaccgcctcaccaacaagttgatccacgcaccgacccaggccctgcgtcatgccgccgcccagggggatcaccaccagctggcccagttgcgccaggtgctggggttgtcacaagagtcatagt

SEQ ID NO: 216338 - DNA, 1174 bp, Unknown
  Bacterial polypeptide expressing nucleotide sequence isolated from the Sargasso Sea
gatcggaatcaatcaccacactgcgcctgtcgccttgcgcgaacgcgtggcgtttccgctcgaacagatcaagcctgcactggataccttcaaaagcgtctggctcggccgcaccgcccgcacggcgccggaagcggcgattctgtccacctgcaaccgcaccgagctctactgtgcgaccgacgacctggccgcgcgtgaagccgcgatccagtggttctcgaaataccacaacctgcccatcgacgaactcgcgccgcatgtctacgcgttgccgcagtcggaagccgtgcgccacgcttttcgcgtcgcgtccggcctggattcgatggtgctgggcgagacgcaaatcgtcggacaaatgaaagatgctgtgcgcacggcgtctgaagccggcgcgctcggcacctacctgaaccagttgttccagcgcaccttcgccgtcgcgaaggaagtgcgcagcacgaccgaaatcggcgcgcagtcggtttccatggcagcagcagccgtacggctcgcgcagcggattttcgacaaggtctcgaaccagcgcgtgctgttcatcggcgcgggcgaaatgatcgagttgtgcgccacgcacttcgccgcgcagcagccgcgcgagctggtcgtcgccaatcgcaccgccgaacgtggcagccgcctcgccgaacgcttcaacggccgggccattccgctgtcggaactgccggcgcgcatgcacgagttcgacatcatcgtgtcgtgtaccgcttccaccctgccgatcatcggtctgggggcggtcgagcgagccgtgaaagcgcgccgccaccggccgattttcatggtcgatctggccgtgccgcgcgacatcgaacccgaggtcggccagctcgaagacgtgttcctgtacacggtggacgacctcggctcgatcgtgcgggaaggcaatgcgtcgcggcaagccgcggtggcgcaggccgaggcgatcatcgagacgcgggtgcagaatttcatgcagtggctcgacgcgcgcagcatcgtgccggtgatccgccacatgcatacgcaagccgatgtgttgcgtcgcgccgaggtcgaacgcgcgcagaaaatgctcgcccgcggcgaggatcccgcagcggtgctcgaagcgctttcgcaatcgctcaccaacaaactcatccacggc

SEQ ID NO: 216339 - DNA, 901 bp, Unknown
  Bacterial polypeptide expressing nucleotide sequence isolated from the Sargasso Sea
atgaccatatcagttatagggcttaatcataaatctgctagtttagatataagagaaaaatattcttttacaggcgatgcttgctctttgttgcttcgaagaataaaaaaaatgcctgaaataaatgaggtccttattgtttctacatgcaatagaaccgagatttatacagatagtgaatcaggatctgataatattcaaaattggttagcaggagaaaaagaatatcgaccttttataagtcatatgtatgtttatcgagaggaggatgcaataagacacttatttaaagtagtttccggacttgattcgatggtagtaggtgaaagcgaagttttaggacaagtgaaaacgtcttataagattgccctagaaaataaaacaatagatagtaaattgaaaaggttgtttgaatattcgttttctgttgcaaaaaatgttagaacaaatactgatataggtggtaatgctatatctttcatgtatacatcaattctacttgtcaaaaaaatattctctaatatcgaagaaaaaaaatgtttattaattggcgcgggtgaaatgactcaactcgcattaaaatatctaaaatcaaataatgtaaacgacattactatatgtaatagaaaagaagaaaaaggtaaaaaattagccttcgaaaataattgtagatattctcatttaaataatttatccaatatcattcatgaatacgatataataattacatcaacgtcaagctcccttccgcttataggcaaaggtaatattgagagcgctctagacaaaaggaataaccaatccatagctcttattgatcttggtgtgcctagagatatagaatctcaaattaaaaatctggataatgtatatctctataccattgatgatctcggcgaaa

SEQ ID NO: 216340 - DNA, 913 bp, Unknown
  Bacterial polypeptide expressing nucleotide sequence isolated from the Sargasso Sea
atgagtcttataatagtaggaatcaaccataagacagcagatgtatcgctcagagagaaagttgctttcccgccagagataataagtgacgctctaacagaggttcaaggtttagctgatatttccgaagtggttcttttgtcgacgtgcaatcgcacagaactatacgtagatggtcttagtgtcaaatcttccggtgctgatcaaagtcaaaattgggaacgtcctctaattcaggagaaaattgatgagattattgattggctggcgggttatcacaagcttcaacctaaccaacttagaacaagtatttattcctttactggcgaggaagttgttaagcatctgatgaaggtttcttgcggtttagattcattgattctcggagagccacaaatccttgggcaaataaaatctgcttttgcattatctaaagaattaaaattgattggtccatcactaagtcgcacgttcaatgccgctttttctatcgccaaagaagttcgaacagatacggcgatcggtgagagtcctgtctctgttgcttatgcggcaacattgctagcggagcgaatcttttctgatttagaatctttgtcaattctcctgattggggctgggcgaaccatcgagcttgtggcgaggcacttcgcagagaagagtgtatctagaattacagtcgcaaacagaaccttagataacgctcttgaagttgcagataaatttaatggtaaaggggttttgctttcggacatccctgagcaaattggtggtgctgatatagttgtttcatctaccaatagccaattaccaatattaggcaaaggctccgtagagcgggcattatggcgaaggaagcaccgaccgatgttgctaattgacttagctgtgcctagagatatcgaaacccagg

SEQ ID NO: 216341 - DNA, 1255 bp, Unknown
  Bacterial polypeptide expressing nucleotide sequence isolated from the Sargasso Sea
atgcatcttctcacattaggccttaaccaccgcacggcggctgtcgatctgcgcgaacgaactgcgttctcgccggagcagctgcccgatgccgtgcgctcgctgacggcgtcctcggatgttacagaggccacgatcctttcaacgtgtaaccgtaccgaaatctactgtcgacaggaaaatccggccagcgctccggtgcttgactggctcagggattacggcgatctcccctccgacttcctcaacagttcgacttatgcgctgcccggcgaacaggccgttcagcatgcctttagagtggcttctggactggactcgatggtgctcggcgaaccccagattctgggtcagatgaagtccgccttttctgttgcgcatcaggccggaaccaccggcaagattctgaaccggctgtttcagcatactttctcggtagcaaaacagattcggaccgacactgccattggcgcgagcgcggtctcggtggcgttcgcggctgtcgatctcgccaaacgcatcttctcgagtctcaatgaacaaacggtgcttctgattggcgcgggggaaaccatcgagctcgttgcgcgtcacctcaaacagaatgaagttcgtcacattattgtggccaatcgctccatcgagcgggcccaagccttgacggaacaactgggcagcgaggccatctctctggccgagatacccgaacgccttcaccaggcagacatcgttgtggcgtccacagcaagcactctgccgattctgggaaaaggcacggtggagacggccttgcgtcaacgccgtcaccgacccatgtttctgattgatcttgcagtaccgcgcgacatcgaggcccaggtggacgaactggaagacgtattcctttacacggttgacgatctgcataaagtcgtcgccgaaaatcaggcgtcccggcaagaagcggccgttgaggcggagaaaatcatcgacttccaggtggtgcgcttcatgcactggatgcgctcgctcgactccgtacccaccattcgatccttacgtgatcaggttgaaacactgcgggaagcagaactggctgatgccaagcgccggctggccaacggggagaatcccgaacaggtactggaacacttctcgcgcaacctgtcacgcaagttttcccatgcccccagccaggcgcttaagcaggccagtcaggaaggaaacgcaagcctgatcagcagcacccgccggctgttcaaactcaaaccataac

SEQ ID NO: 216342 - DNA, 966 bp, Unknown
  Bacterial polypeptide expressing nucleotide sequence isolated from the Sargasso Sea
aatgactttactcgccctcggtattaaccacaaaacagcaccagtagcacttcgcgaaaaagtggcctttacaccagattctctggtggaagcgcttgcgagtttaaaaaagctggaaggcgtagatgagtctgtcattgtatcgacctgtaaccgcactgagctatacgtcaatactcaagacgacacaggccaaaagcttctacaatggttaagtgacttccatcacttggatgtagaagagattgccaataacagctatgtgctcgcgcaggatgaagcggtaaagcacattatgcgtgtagccagcggacttgattcactgatcttgggagaacctcaaatcttaggtcaggtgaagcaggcgtttggtgatgcaaaacactcaggtatggtgagcagcgaatttgataagctgtttcaacatacgttttcggtggcgaagcgagttcgcagtgaaacagatataggtgcaaacgcggtaagcgtggcatatgcagccgttcagttggccaagcatatattcgctgaactaccaaaacgttcagtgttattagtgggagctggcgaaaccattgaacttgtggctcagcatttgaaagagcagggcgtgagctgtttggcggtggcgaacagaaccgtagcgcgagcagaagccttagctgaaacattagatgcgagtgtgtttaccttatcgcaagtgccagagcacttaaaagactttgatatcgtgataagctctaccgctagccaactgcccttaattggcaaggggatggtggagaaagcccttaaacagcgcaaaaatatgccgatgtttttggtggacttggcggtaccacgagatattgagtcagaggttaacgagctgggcgatgcctatctttatactgttgatgacctgcagcatattgttcagaagaatttagaaaaccgcgagcaagcagcaaaagaagcggataagct

SEQ ID NO: 216343 - DNA, 1240 bp, Unknown
  Bacterial polypeptide expressing nucleotide sequence isolated from the Sargasso Sea
gatgaattttaccctcctcggctggaatttccgcagtaccccacttgaaatacgagaccggctatcgctgacggaacaggaacaactcgaactggtccaacagatcaatgcacgctgtgggattcaggaaagcgtcctgctcagcacctgcaaccggacggaactttatctatacaacatggagcggcctgcggaggaattgctggagctgcttcagaaacgctggggaattcccgaacttctggagacacattatttgttgaaagatgaagaagccgtatttcatctatttcgtgtggcttccagcctggattcgatggttgtgggggaaccgcagattctcgggcagttgaaagatgctttcggacggtttcaggaaaacggtttaaccggtcgatttctctatgcgatgtttacccgcgctttttcgattgcaaaaaggatccgcacggagacttcgatcggggataatgcagtttcaatcagttatgcggcggtggaactggcgaagcggatttttgacgacatccgccagcagaaggtgcttgtgatcggcgccggggaaatggcggaacttgcgatccggcatctgctgcgaaccgggattcatcaactcaaggtcaccaaccgtacttttgccaatgccgccaaactggcagagcagttccatgccagtgttttcccttttgaaaaactctatgaagaacttcccgattcggacattgtgatcagctccaccggcgcccgtgaaccgatccttactccagaaagggtacgccagagcttacgtaagcgtagaggaagaccgatgtttttcatcgacattgcagtgccgagagacatcgatccaaccgtgaacgaactctcaggagtctactgttacgacatcgacgatcttcagggagttgttgagcagaaccgtgaagaacgcagagagcagtcgaatcttgcggaagaaatcatccgaaaagaactacaaaaggtcatgctctggtttgaaacccagtcggtcatccctaccgtcaaaagccttcgtgaatccttccgggaaactgtggatgtggagttagagaaaacccttacaaagcttggttcgttgaatgaaaagcagcaggctgaagttgaaaagatggtcagggttttgactaacaaactgctgcacaaaccatccacccggctcaagcatctgagcggccgtgaagatctgcacctctacctggaaaccctttcagaacttttt

SEQ ID NO: 216344 - DNA, 1219 bp, Unknown
  Bacterial polypeptide expressing nucleotide sequence isolated from the Sargasso Sea
tatgcatattgctgtcgtcggtcttagccatcgcacggcccctgtcgaagtgcgtgaaaagctaagtatcccagaagaactagttgagagatcgtttaataatttaaagaaaattgatcaaatattagaagtttccatattgagcacatgtaacagacttgaaatttacagcttagttaaggacccgcaattgggaatagaggcaattaaatcttttcttcttgaattctcgggccttgatgatgagattctttcacctcacttatttaattatgtccaagagaaagcagtttctcatgtgatgagagtttctgcgggtttggatagtttggttttaggagagggacagattctttctcaagtaaaaaaaatggtacgtcttggccaagatcatcacagtctaggtccaatcttgaatagattattaactcaggccgttagtacaggtaagcgcgtaagaagcgagacaaatcttggaacaggagcagtttctataagttctgcagctgtagaactagctcaattgaaacttggtcaagcgcatggaagagatcaattgatgactttagaaactgaaaaggtcgctgttgttggcgctggtcgaatgagtcgtttgttgcttcagcatctccaatcaaaaggatgttgttcactcacgcttctaaatagaacaagaaaaagggctgaggacctttcagcagcgtttcccgatattcaaattgattgtcaattaatagatgagcttgataattgtctctctctcagcactcttgtatttacgagcacagcggctaatgagccaattattgatgccgaaaaattgataaatatcgatagaaagcctttacttagacttatcgatattggagttccgaggaatatttcttctgatgcaaaatcagtttctggaattgaatctcatgatgttgatgatcttcaagaagttgtttcaagaaaccaagaggcaagacaaaagctcgccctagaagcagaaggattgatagaggaagaatgtcgtgtttttctagaatggtgggatagcttagctgctgttccgactattaattgccttagatctggtttggagtcaatcagaaaagaagaacttcagaaggcattaagcagaatggggcctgatttttccgctagagaacgaaaagttgttgaggcattaagcaagggaatcataaacaaaattcttcacactccagtaacaaaa

SEQ ID NO: 216345 - DNA, 1252 bp, Unknown
  Bacterial polypeptide expressing nucleotide sequence isolated from the Sargasso Sea
atgagccttgtagcaatcggtattaaccataaaacagccacggtagacctgcgtgagaaagttgccttctctccggacaaaattcatgatgccatgaagagtctggccagtcgtacacgctcgggtgaagccgttatcgtctcgacctgcaatcgcaccgaattgtattgtaacaatggcgatgaggccgacatcatagaatggcttgaagaatatcacggcctagatcatcaagatgtagcgccgtgcctctacaattaccacggtcaagcggcggtaaggcatttaatgcgcgtggcctccggtctcgactcgctgattttaggtgagccgcaaattctggggcaggttaagcaggcttttgtcaaagccaaagaagcgggtaccgttgcgctgacgatcgaccgcttgttccaaaataccttctccgtggcgaaaaaagtgcgtaccgaaaccgaaatcggtgccgcggctgtctcggtggcctttgccgccgtgagcatggcaaaacatatcttctcttcgctatcgaccactaaggtgctgttaattggcgccggtgaaaccattgagctggtggctaaacatcttaaggataacggcgttgcttctatggtggtggcaaaccgtacgcttgaacgtgcccaaagcatgtgtgaagagtttaatgccacggcaattacgctggcacagataccagattttctccctaaagccgatatcgtgatatcctctaccgccagcccgctaccaatccttggtaaaggcatggtagaaaaagcgctaaagcagcgtcgccatcaacctatgttattggttgatatagcagttccccgggatattgagccggaagtcgccgatttggacgatgcgtttctgtatacagtggacgacctgcatagcattattgaacagaataaggcttcccgtaaggaggccgccgagcaagctgaattaattactgaagaacaatcctacctgtttatggattgggtacgttctttagagtcggtcgacagtattcgcgagtatcgcagccaaagcatggcgataaaggatgagttagtggaacgcgccctgaataaattagcgcaggggggcgacactgagcaggtattgattgaactagccaatcgcctgacgaatagactcattcacgcaccaacccaagccctcacagtggcgagtcgtcagggtgatttgaataccttaggtcagttaagaacagcgctcggattagataaaaactaag

SEQ ID NO: 216346 - DNA, 1252 bp, Unknown
  Bacterial polypeptide expressing nucleotide sequence isolated from the Sargasso Sea
atgagccttgtagcaatcggtattaaccataaaacagccacggtagacctgcgtgagaaagtcgccttctctccagacacaattcatgatgccatgaagagtctggccagtcgtacgcgctccggtgaagccgttatcgtctcgacctgtaatcgcactgagttgtattgtaacaatggcgatgaggccgatatcattgaatggcttgaagaatttcatggcctagagcataaagatgtcgcgccctgcctctacaattatcacggacaagaggcggtgaggcatttgatgcgcgttgcttcgggtcttgactcgttgatcctgggtgagccgcagattcttggtcaagttaaacaagcctttgtcaaagccaaagaagccggcactgtcgccttaactattgaccgcttgttccaaaatactttctctgttgctaaaaaagtgcgtaccgaaaccgaaatcggtgccgctgctgtatcggtcgcttttgcggccgtgagcatggcaaaacatatcttctcttcgttgtcgaccactaaggtattgttaatcggtgctggtgaaacgatagagctagtagctaagcatcttaaagataacggtgttgcctcaatggtggtggcaaaccgtactttagagcgcgctcaaagcatgtgtgaagagttcaatgccacggcaattacgctggcacagataccagattttctccctaaagccgatatcgtgatatcctctaccgccagcccgctaccaatccttggtaaaggcatggtagaaaaagcgctaaagcagcgtcgccatcaacctatgttattggttgatatagcagttccccgggatattgagccggaagtcgccgatttggacgatgcgtttctgtatacagtggacgacctgcatagcattattgaacagaataaggcttcccgtaaggaggccgccgagcaagctgaattaattactgaagaacaatctcacctctttatggagtgggtgcgttctttagagtcggtcgatagtattcgcgagtatcgcagccagagcatggcgataaaggatgagttagtggaacgcgccctgaataaattagcgcaggggggcgacactgagcaggtattgattgaactagccaatcgcctgaccaatagactcattcacgcacccacccaagccctcacggtggcgagccgtcagggggatttgaatacattaggtcagttaagaacagcgctcggattagataaaaactaag

SEQ ID NO: 216347 - DNA, 1019 bp, Unknown
  Bacterial polypeptide expressing nucleotide sequence isolated from the Sargasso Sea
tatgcatattgttgtcgtcggactaagtcatcgcacggcacctgtcgaagtgcgtgagaagttaagtatccctgatcaatccataacagaatcattgaaagcattaaaagctttctctgatgtgttagaggtttcaattttaagtacttgtaataggttagaaatatatgcgctggtaaaagataaaaatacaggaatttcatcaattaaagaattcatatcagattattctggaattatttttgaagatttaaacccacatcttttttgcttcagacaagaagatgcagttttgcatttaatgaaagtttcggcaggactagatagcctcgttttaggcgaaggacaaattctttcgcaggtaaaaaaaatgatgagattgggtcaagagaatcaatctacagggcctattctaaatagattattaactcaatcagttagtacaggtaaaaaagttagatccgaaacaaatttaggaactggagctgtatcaatcagctcagcagcagtagaacttgctcaattaaaaattggacaagaaaatgggtttgatactcttgtaagtttggaatcagagaaagttctagtagttggggctggacgaatgagcagacttttaataactcatttgaaatcaaaaggatgtcataaacttattcttgttaatagaaatattgatagagcattgaatcttgcggaagacttcccagacttggaaattgtttgtaaaggtttaaacgaattagatgaaaatatatcaatatcttctcttgttttcactagtacagcttccgaagatccaataattgatcttgctaaaattgaaaaattaaatttaagtaatgaaattaaatttattgatattggtgtaccaagaaatatttctaatgatgttaaacaacatccatctgtaaaatcatttgatgtggatgacttacaagaggtcgtatcaagaaatcaagaatttaggcagaaaatagcaaaggaagcagaatctttagtagaggaagaaagaatca

SEQ ID NO: 216348 - DNA, 1309 bp, Unknown
  Bacterial polypeptide expressing nucleotide sequence isolated from the Sargasso Sea
aatgagtgtcttcgtatacggcataaattttaaaacagcacccgttgaaatcagggaaaaaaccgtattgtctggcgagaaactcgaatcgagccttatagaaatcagaaagaaactcgctaacattaatgagattttcattgtatcaacctgcaatcgaaccgaattttattattctaccagcagtgacgcttcatctaataacctcgaagcttggttatctgaaacaagcggcctatctcaatcgatccttaaagacatctcatatcaacactctgcagaaaaagtcattaaacactttatccgcgttgcttcaggattagactcccaggtgttgggcgaaccccaaattctgggtcaagtaaaagagagcttcgataaagcagagggcgcgggttgcgttggaaaagaactgacctctctgttccaagtagggattaggtatgcgaaaaaaattcgtagtgaaacaaaaatcggggaaaatcctgtatcggtcgcttacgctgcggtctttctagcctctaagattttcgaagatcttagctcaaagaaagccttattaattggcgctggcgaaaccatttcactagtaacagaacatctcaaaaaagccggcatcaaagacctaactatcgcaaataggacattggaacatgcgcaagaattggcttttcaacaaggtacaggcgccattcatcttcaagatattgcaggaaaactatcttctattgacataatagtgtcttcaactggttccgaagacgcgattttgaaaaaaagagatttcgaagaaatcatgaaatcaagaaagcgcaatccgatatttatagtcgacattgccgttcctagggatattgaagcctcagttcaagaaatcccaaatgtgtatctctatacaattgatcatctaacagaagtaatcaacttaaacatagataagcgacaacaagctgctgaggcggcagaggagtatgtttcacatgggtctaaaacttatctacaagaagaacgggttagatctggaaacgttctacttaaagagtatagaggccaagtagagtcaataagacaaagtgagcttgctaaaattaaaagtcttattagcttcaagaataatgacatagaagcaatcgagaattttagcaaatcgctagccaacaaacttacacacgaaatcacgaccctaattagatctgcgatcgcagagaacaacttggatttgcttgcagaattaaagcatctttataaactcgaaagtaaatccaccgagagcccaaaacataaagaaaaaaacgatgaacctctctaa

SEQ ID NO: 216349 - DNA, 1081 bp, Unknown
  Bacterial polypeptide expressing nucleotide sequence isolated from the Sargasso Sea
tatttctgatcttaataaaagtgcttacgttttacaaaatcttgaagcttccaaacatttgttcagtgttgcatccagtttagattctatggtaattggagagccgcaaatattaggtcagataaaagattcgtttcattattttagtgaggagggactttcaggtaaattgctacatccgcttttcacgcgcgcattttcaacagcaaaaagagtacgtacagagaccactgtagcaagtaacgcagtttctgtaagttatgctgcagtagagttggcaaagcatattttcgaagatttatccaaacaaagtgtaattgtgattggtgcaggagaaatggctgagcttgcagtccagcacctgataaggaatggtatttctcagttatttgttactaacagaacattctccagtgcagccgagttggcagaaaaatttcagggactcgctgttccttttgaacatctcaatcgacatctccatcaggcagacattgtaatcagctcaacaggatctcgaaaatatatcattactaaagaactagtaaaaaaatgcttgcatgatcgcaaaggcaatcctatattttttatagacattgccgttcctagggatattgacccagaaattaataagctccatggttctttctgctatgatatagacgatttacaagcagttgtttctcaaaaccaggaggaaagaaaacagcaatcctttaaggctagagaaataattgaggaggaattgtctaaattagatatatggttccggtcactttccgcagtcccgaccattagaagtttgcgtaaatctttccactctactgctgaagaagaaattcagaaaattcttctaagcaaaaagaaaatgtctgcctctgagcgtaaggaaattgaacattttgtgcacaagcttgtaaacaaacttttgcacggtccgtcacgaaatcttaaaaaacttgcacaggaagaagactcccatctccatatggaatcaatagtaaaattgtttgatttaagacctacttctttagaaaagatagtcaaccaaaagcccaaactaaaaatcataaaatcataa

SEQ ID NO: 216350 - DNA, 1243 bp, Unknown
  Bacterial polypeptide expressing nucleotide sequence isolated from the Sargasso Sea
atgagtttattcgcgttgggtttgaatcacaatacagcttctctggaaaaaagggaaaaggcttacttttccgataatgagtcaaaagagcttttaaaagaaatgcttagcttatcttttgtagaagaagcaatcatcttatcaacatgtaacagaactgagctctactgcgaattagaagacccggaatatatggacgagttatctaaatgggttctagattataaaggattagataaagagagttatgaggaattattttataaattgtctgatgataaagctgttaaacacgcattaaatgttgcatcagggcttgattctatggtcttaggtgagccgcaaattcttggccaactcaagattgcttacaagaatgctcaggaagttggcgctcttggtaaaaacttaaacagattatttcaatacgcattttcagctgccaaagaaataaggacagatacaaaaattggtcttaaccccttatcaattgccggtgttgcagtttcacttacagacgaattttataaggatctatccaataaaaatgctttactagttggttcaggagagacaatttttattgctgcgaaaaaactggctcaaaagaaaattgggaatataactatatgcaatagaagtaaacaaagtgcaaatgaaattgcaaaaaatatttcagcccaagtagcacacatatcagaaatttctaaattccttacacaggctgacatcataatttcagctacggcaagtaatttacctgtgattggtaaaggggcaatagaaactgcaatgagtaaaagaaagcataaaccaatttatattgtagatttagctgtgcctagagatgttgaacctgaagtgaaaagaattcctaatatttatctttatacaattgataatatccaagatcttgtatcggaaaattacgaaacaagagtaaaagccgccaatgatgcatcaagtatcattgacttaaaggttcaggattatatgaattggagaaaagcccaaacagcattttctgttataagaatgtatagaaattatgctgatcaaataaaaaatgagtcacttaaaaaagcacttcaacaattacgaaatggtaaagatcctgaagaagtaattaagcagttaagttccaacataacatcaaagttaacccataatcctacgcaagctctcaacaaagccggtcaatctagtgacagaaaagttattgaattaatttgtgatatctttt

SEQ ID NO: 216351 - DNA, 1258 bp, Unknown
  Bacterial polypeptide expressing nucleotide sequence isolated from the Sargasso Sea
tatgaatctagtcgctgtcggcgtaaatcacaccaccgcggatgtggaactacgcgaacgtctggcgttttcaacgcagcaggcggaggtggcgttggccagcttgcgtgagatgcccggggtgcgggaagctgcattgctgtctacctgtaaccgcaccgaactgtattgcctcactgacgacgtcactccaaattttgctcaatggctggcctctagccgcaatctgtccgtcgaacgactctccacggtgctgtatcagcataccggtgagcaggcgctggagcatatgatgcgggtagctggcggtctggattcgctggtactgggcgagccacaaattcttggtcagatgcgtgaagcctatgctcgagcccatgaggctggcttgctcaacggcgagttgtcgcgtttgtttcaggaagtcttttcggtagccaagcggatccgtacggaaaccggtatcggtgctaacccggtgtctgtggcctatgcggcagtttcgtttgcgcgtcacatttttgctgacctgaaaaaaagccgggcgctgctgattggtgccggtgaaatgattgagctggtggcgcgacatttgagtgagcagcaggtgcaggaaattaccattgccaatcgcactcaggagcgagcctcggagttggccgccgccgtgggggggcgtggtatcagcctagaagaattgccggtggcgctggagcgtgcggatatcctgatctcatgcaccgctgcgccgttgccgattatgggcaagggtatggtggagcgggcgctgaaaaaacgccgtcaccgacccatgtttatggtggatattgccgtgccacgggatatcgaaccggaagtgggcgaactgggtgatgtctacctgtatacggtggaccatctgcaagaagcgattcaggaaaatgtccgttctcgtcagcaggcggcccaggaggcctcagagctgattcgagatgccattgtgcgccaccgtcgtcagcgccgtgaacaggatgccgttaaggtgctgcgtgattatcgtgagcagcgcaaggctatggcggaaagcgaactggaaaaagcgttgcagcagttgcgcaatggtggcgatgcggagcaggtgctgcgcaggtttcagcattcgctggtgaacaagtggctgcattcccccagcgtgaccttgcgcaaaatggccgcggatggccgcgccgaagccctgttgctggctcgtgagttgctgctcgacgacgaccagtcgtag

SEQ ID NO: 216352 - DNA, 511 bp, Unknown
  Bacterial polypeptide expressing nucleotide sequence isolated from the Sargasso Sea
aaaaagcgccttagaaaacctatttttatggtagatctcgcggtccctcgcgatattgagccagaaatatcagaactacccgatatctatttatactccgttgacgaccttcgagagattaccgcacaaaatgtccagttgcgcgaggaagaaaaagtcttcgccgaatcaataattgacgaagccgttaaggaatatgaagccgaagctcgattgagcgatgatatttccttcatcaccgcttttcgcgacaaagccgagcagatcagacttcaggaactgcatagagcgatgaaacaaatcaataacggcaaagatccgactgaaatattaggagaaatgagcaggagcttgaccaataaacttattcactcccctacaagcgctattagacaggcatctcgagccggccgtcgggaaataatttcaaaccttaaagagatatatgagatctcggatctgaacacagtcaaaagtaacgaggtctcaagaaaaaccaccgaggaatagc

SEQ ID NO: 216353 - DNA, 1300 bp, Unknown
  Bacterial polypeptide expressing nucleotide sequence isolated from the Sargasso Sea
atgcaactcctcacgatcggaatcaatcaccacactgcgcctgtcgccttgcgcgaacgcgtggcgtttccgctcgagcagatcaagccggctctcgtcacgttcaagaacgtgtttctcggcccccaggcgcccaatacgcccgaagcggcgatcctctccacctgcaaccgcaccgaactctattgcgcgaccgacgatcgcgcggcacgcgaaggcgcgatccgctggctgtcggagtatcaccggatcccggtcggcgaactcgcgccgcacgtctatgcgctgccgcagtcggaagcggtccggcacgcatttcgcgtcgcatccggtctcgattcgatggtgctgggcgaaacccagattctgggccagatgaaggacgccgttcgcaccgcgacggaagccggcgcactcggcacctatctgaaccagctgttccagcgtacgttcgcggtagcgaaggaagtgcgcggcacgaccgaaatcggcacgcagtcggtgtcgatggccgccgccgcggtgcgcctcgcacaacggatcttcgaaaaggtgtcggatcagcgcgtgctgttcatcggcgccggtgagatgatcgagctgtgcgcgacgcacttcgccgcgcaaggcccgcgcgaactcgtcgtcgcgaatcgcacggccgaacgcggccagcggctcgccgaacgcttcaacggccgtgcgatgccgctcgccgacctgccgacccgcatgcacgagttcgacatcatcgtgtcgtgcacggcgtcgacgctgccgatcatcggcctcggcgcagtcgagcgcgcggtgaaggcacgccgccaccggccgatcttcatggtcgacctcgcggtgccgcgcgacatcgagcccgaagtcggcaagctgaaggacgtgttcctctacaccgtcgacgatctcggcgcgatcgtgcgtgaaggcaatgcatcgcgccaggctgcggtcgcgcaggccgagacgatcatcgaaacgcgcgtgcagaatttcatgcaatggctcgacacgcgcagcgtcgtgccggtgatccgtcacatgcatacgcaggccgacgcactgcgccgtgccgaagtcgacaaggcgcagaagctgctcgcgcgcggcgacgatccggccgccgtgctcgaagcgctgtcgcaggcgctgaccaacaagctgatccacggcccgacgagcgcgctcaaccgcgtgaacggcgccgatcgcgattcgctgatcgacctgatgcgcggcttctaccagcacgcaccgcgctcgaacgaccagtccggccactagc

SEQ ID NO: 216354 - DNA, 325 bp, Unknown
  Bacterial polypeptide expressing nucleotide sequence isolated from the Sargasso Sea
aatgattaatattcaaaattacataaatggggattttaaaagttcaataaataatcaaactataaatgatttaaaccctgcaacgggagaattaattgcgactatacctaaatcagattttaatgatattcaattagctgttgaggctgcagaaaatgcatttccatcatggtcaaaacttactcttaatgaacgtgccaaatggttaatggaaattgcagatgaactagaaaatagatttgatgaaattgcaaaattagaatctagagatactggaaagcctatttcattagcaaaaaaagttgatgcaaatagatcggtgaac

SEQ ID NO: 216355 - DNA, 496 bp, Unknown
  Bacterial polypeptide expressing nucleotide sequence isolated from the Sargasso Sea
aataggacctatagcaaataaagagcaatatgaatttattttatctaagatagaagctgcagaaaaaagaggtttaaaattattaattgatggaaggaaagaacaaaagtctgagggatattatattggaccaactatttttgataacgttccaaatgaagatgatttagctcaaaatgaagtatttggacctgttgcctcaatacaaacttgggaagatgaagatgaagtaattaaaattgcaaacgatagtatttatggtcttgcagcaggtatttggactaaagatactaataaagctataagattagctgaaaggattgaagctggaactgtctatataaataattattttaatgcttctactcaatctccagttggaggctacaagcaatcaggatacggtcgtgaaaatggatgggaaggaatgcaaagttacatgcagactaaatcaacatggttagcaaccaatccatctcaaccagatccattttaa

SEQ ID NO: 216356 - DNA, 843 bp, Unknown
  Bacterial polypeptide expressing nucleotide sequence isolated from the Sargasso Sea
gttggaatcaagagatacaggcaaaccaataactttagcaaaaacgcttgatattccaagatcagttctaaatatgaaattttttagtgaattttcaaaaaaatttaatttttctattgaattaacaaataaatattcaaaaaatacaataattagatcacctatgggtgtagtgggttgtatttctccatggaatcttccattatatctgttttcttggaaaatagcaccagctctgataacaggtaacacggtaattgcaaaaccatcagaaataacaccatttacagcttttaaattttctgaactatgccaaaagattggattacctcctggtgttttaaatatagttcatggggatggcgtacaaactggagaggctattgttgcacatcgtaggattaaagcaatatcatttacaggaggtacaaatacagggaaaaaaattgcccaaaaagcaattggatcgtttaaaaaattggctttagaaatgggggggaaaaatcctgcgattattttttcagattgtaactatgataatatgattcataatgttgtcaaatcatcctttatgaatcaaggacaaatttgtttgtgcacttctagaatactagtagaaatgtcaatttatgaaaaatttaaaagtgattttataaatcgaatttcaaatttaaaaattggagatccagcaaaaaaaacaactgaatttggagcaatatcatccttatctcaatttaaaaaggtaatgagctatattaaaagagcaaaaaatgaaggtgggaaagtgttaactggtggaagttcattaaagttcagtgggcttcataaaaatggatggtatat

SEQ ID NO: 216357 - DNA, 847 bp, Unknown
  Bacterial polypeptide expressing nucleotide sequence isolated from the Sargasso Sea
ccaggtgtaattaatgttgtaacaggatatggagatactgttggtgaacctttaattgaccatccagatgtaaaaatggtttcatttactggtggaactaatggagggcgagcagtagcttctattgccgcaagaaaaacaaagccaattgttatggaactgggaggaaagtctccccaaattgtttttccagacgcagatattgatttagctgttaatggtattatttctggtatctttcctccaggtggtcaaagttgcatttcaggatctcgaattctcattcataaatctattgttgaaaaatttacaaaaaagtttgtatctatttctaaaaaagctgtagttggtgacccattacttcaagaaactcaaattggcccaattgctaataaaaaacattatgaaagcatccttaaaaatatcataaaagcattgaacgatggtcacaatcttattttggacggaaggatacattgtaaaaagaaaggatatttcattggccctactattttttcaaatgttccaaatagttcttatttagctcaaaatgaaatttttggtccggttgcatcaacagagacttgggaagatgaagaagaagttattagaaaagctaatgacactatatttggacttgcggctggaatatggactaaagattctacaaaaggaatgatgatggcaaacaaaattgaagctggtacagtatatataaacaactattttaatgcggccacacaaagccctgttggaggttataaacaatcaggctatggtagagagaatggatgggaagggatgaggtgctttatgcaaacaaaatccgtttggctttctacaaatc

SEQ ID NO: 216358 - DNA, 859 bp, Unknown
  Bacterial polypeptide expressing nucleotide sequence isolated from the Sargasso Sea
agcccgcaccgtgtttgaacgcggggactggtcgcaggcatcacccgcagagcgcaaagcagtactgcacaaactcgccgatttaatggagctgcatcacgaggagctggcgctactggaaacgctcgacaccggtaaaccgattcgccatagcctgcgtgatgatattcccggcgcggcacgcgccatccgttggtacgccgaggcgatagataaagtctatggtgaagttgccactacctcggtgaacgatttagcgctgattgtccgcgaaccggtgggcgtgattgcggccatcgtgccgtggaattttcccctgctgctggcatgctggaagctcggcccggctctggctgcgggtaacagcgtgatcctcaagccttccgaaaaatcaccgctgaccgcgattcgcctggccgcactggctaaaaaagcaggtttgcccgatggcgtgctcagcattgtgagcggatacggtcacgaggcgggccaggcactgtcgctgcatccggatgttgatgtgatcacctttaccggctcgacccgcaccggcaagcaactgctcaaagatgctggcgacagcaacatgaaacgcgtctggctggaggccggcggtaaaagtgccaacatcgtatttgccgactgcccggatctgccgaaagccgccgctaatgcagcggcaggtattttctataaccagggccaggtttgtatcgccggtacacgtctgctgctggaagaaagtattgccgacgagtttatcgcgcttttaaaagagcaggcgaaaaactggcagccgggcaacccgctggatccggaaaccacgatgggcacgcttatcgacaacacgcatgccgac

SEQ ID NO: 216359 - DNA, 466 bp, Unknown
  Bacterial polypeptide expressing nucleotide sequence isolated from the Sargasso Sea
tgaatttattttatcaaaaatagataatgctgaaaaaagagggcttaaattattattagatggaaggaagctgagtaaatcagaagggtactacattggtccaactatatttgataatgtgcctaataatgatgatttagctcaaaaagaaatttttggacccgttgtttctattcatacttgggaagatgaaaaagaagttattaaaatagctaatgatagcgtatacggacttgctgctggtatttggacaaaagatgttaataaagctattcaaattgctgataaaatagaagcagggacagtctatataaataattattttaatgcatccactcaatcaccagtaggcggctataaacaatctggatatggtagagaaaatgggtgggaaggtatgcaatgttttatgcaaactaaatcaacatggttagctacaaaaccaaatcagcctgacccattttaa

SEQ ID NO: 216360 - DNA, 277 bp, Unknown
  Bacterial polypeptide expressing nucleotide sequence isolated from the Sargasso Sea
agacgaacaagaagtgattcaacgagcaaacaacacccacttaggccttgccgctggagtatttacccaagacatcacccgcgctcacggagtgatacatcaacttgaggcgggtatttgttggattaatgcctatggtgcctccccagctgaaatgcccgttggtggttataaaatgtctgggatcggccgcgaaaacggcagcgaaacattaaaagcctacactcaaattaaagccgtttatgttggcatgcagccacttgaaagcccattttag

SEQ ID NO: 216361 - DNA, 406 bp, Unknown
  Bacterial polypeptide expressing nucleotide sequence isolated from the Sargasso Sea
catgtcattaccgacttatcagaatttcattcacggcaagccgatggcaaacaaaagcaaagaaacctttgcagtaaccaaccccgcaaccggtgaggtaatttaccacgtagaagtggctgatgagtttattcaacaagaagcaattaaaagcgctaaagaaggtttttcagtgtggtcagcaatgatgccaattgaaagaacccgcattcttaataaagcggttgcattgcttcgtgagcgtaatgacgaactcgctaagcttgaagtactcgataccggtaagcctattcaagaagccgactgtgttgatattgaaactggcgctgatgtcatcgagtactatgccggccttgctcctactcaactaggtacccagcagcctgtgggtggcgacttcttttat

SEQ ID NO: 216362 - DNA, 913 bp, Unknown
  Bacterial polypeptide expressing nucleotide sequence isolated from the Sargasso Sea
aattgcatggaaagctgctccagctctagctgcgggtaattcagtaataataaaaccttcagaatatacacccctttctattttcagacttgctgagctttctataaaagcaggaatccctgatggaatatttaattatttgttaggtgaaggaggaaaaactggacatttattagttactcatccagatgtggaaaaaatagcttttacaggttcaaatttaactggagcaaaaattatgtctgaatctgcacttgcaggagttaaaccaattcatcttgaattaggaggaaaaacacctcaagttgtttttgaagatataagcgatattgatagcactgttgataaaattgctgcaggaatatttgtcaattcaggtcaggtatgtactagtggaacaagattaatagcacatcacaaaatattagatggtgttttagaaaagttaataaaaattggaaagagtaaaattcctggaccaacttgggatagtaatactacgctcccacctatagttagtaaaaaacaagctgatagaattgacagactagtgtcagagtctgttaatttaggtgctaaaattattgaaggtggggaatggtatgaaactaattatggcggttatttttataaacctacttttattgaaaatattaataaggaaatgccaatatttaaagaagaagtttttggtccagtaataaatgttgaaaaatttgaagatgaacaagaaggaatagaaaaggcaagtcatcccaattatggattagccgcttgtattcatacctctaatttaaacacagcaataaatatgtcaaaaaaaattgatagtggtatgatttggataaatcattggggttatccagatgagttttctcatccagcaggaggattaaaaatcaggcataggtaa

SEQ ID NO: 216363 - DNA, 814 bp, Unknown
  Bacterial polypeptide expressing nucleotide sequence isolated from the Sargasso Sea
catgatgacataagaatggttagttttactggcggaactgctggcggggttgctgctgcaacgacagcggcaaaaaaggtaaaacccatggtaatggagttaggggggaaatctccacaaattattttttccgatgctgatattgatttagctgttaatggtgtagcttccggtatttttcctgcaaccggtcagagctgtatttctggatcaagagttttagttcataaatcaatcgaagaagaattcgtaaataaattagttaatatttctaagaaggcaaaagttggagaccctttaaaccctgctactcaagttggaccgatcgcgaatggacctcattatgaaagagtattgcagaagatcaaagaggcagaattggcgggacacaaacttcttttagatgggcgttccttttgtagtgataaaggatattttattggcccaacaatatttaatgatgttccaaatgattctgaccttgcacaaaatgaagtttttggtccggtactatctattgaaacttgggagtctgaacaagaagtaatacgtctggccaatgattcagtttatggacttgcagcagggatatggacaaaagacattgcggttgccatgagaatagcagacagtattcaagctggtactgtttatataaataattactttaatgcagctacgcaaagtcctgttggaggttataaacaatctggatatggtcgcgaaagtggttgggaaggaatgcgctcttttatgcaggcaaaatcagtgtggctttcaaccaagccgcaccagctagatccatttctataaa

SEQ ID NO: 216364 - DNA, 1477 bp, Unknown
  Bacterial polypeptide expressing nucleotide sequence isolated from the Sargasso Sea
ttgaagcaatacaagaactttatcaatggccgattcgtcgagagcgacagaaggtttgccgggatcaatccagccaccggcattcgctttgccgatgttcatgaagccaccagggagatggtcgatgcggccgtcgaggcgggccacgaggcagtgcgcggctggggtgcgacgtcggtgatcgatagagccgacatgctctatcgcattgccgacgagatcgatcggcgtgccgatgatttcctggatgccgaagtgagcgataccggcaagccggtgtcactggcttccagattggacatcccgcgcggcgcagcgaatttccgcatcttcgccgacattctgaagaccgcgccattggacaccttccgcaccgagctgccgggcggtgcgcaggccatcaactacaccgtgcgcaagccgttaggtgttgtcggcatcatctccccctggaaccttcccctgctcttgttcagctggaaggtggccccggcgctggcctgtggcaatgccgtggtggcaaagccctcggaagaaacaccgggaaccgcgaccctgctcgccgaagtcacgcagactgccggccttcccccgggcgtcttcaatctggtgcatggcttcggacccgactctgccggagagttcatcagcacgcacccccgcatcaacgccatcaccttcaccggcgaatcgaagacgggcacggcgatcatgcacgcggccgcggagggggtgaagcccgtatcgttcgaactgggtggcaagaacgccgccatcatcttcgccgactgcgatttcgaaaagacggtggagggaatgacgcgcgcggcattcctcaacagcggccaggtttgcctgtgctcggagcggatattcgttgaacgccccatctacgaccgcttcgtgaaggcgctcgctgagcgagcaaaggcaatcaaactgggcgaccccaccgacgagacaaccggcatggggccggtcatctccgccgcccaccgcgacaaggtgctgagctactacgcactggctcgcgaggaaggcgccgagttcatcgtcggcggcggcatcccacgctttggcaaccaactcgatgatggtttctgggtggaacccacgctgattgcggggctggccgacgacgcgcgatgcgtcacggaagagattttcggacccatcggccacatctcgcctttcgattcggaggctgaggtcatccggcgcgcgaatgcgacaccctacggcctggctgcgacgatctggacaagcaatgtcaacaaggcgcaccgcgtcgcgcaatcgatgaacgtcggcattgcatgggtcaatacctggttcctgcgcgacctgcgtactcccttcggcggaagcggcttgtccggcatcgggcgcgagggcgggctgcattcgctgaacttctactccgaactcaccaacgtctgcgtccatgtagatgcgccggatgccgcccatgaatgaa

SEQ ID NO: 216365 - DNA, 1444 bp, Unknown
  Bacterial polypeptide expressing nucleotide sequence isolated from the Sargasso Sea
atggaactagttgaaaattttattaatggtcaatacgtttctagtgactcaagtgctttcatagatatatacgaaccggcaaccggagacatatacggaaaatttaaggattcaaacgcaaatgatatagatcatgcggtcaggtctgcaaagaatgcattccctgattggtcaggtctatccattcgtgaaagagcggttcatctaaataatattgctaatggtattgaacaaaggttagatgaatttgcagaatttgaatccagagatactgggaagcctattgcgcttgctcgttctcttgatattccaagatcagttcttaattttaaattttttgctgatcatgctatgcaatttgaattcaattttaatttaaatagtgaatcttcacaaaatcttatcaataggagccctcttggggttgtggcatgtatctcgccatggaatttgcctctttatctattcacctggaagatagctcctgcgttgatcacgggtaatacggttatcgcaaagccttcagagttgacaccctataccgcatatttattggggggtgtgtgccgagaaaaaggattacctcctggtgttttaaatattgtaaatggtagaggggatacctgtggagaactattggtcaaacatgaagatgtcaaagcgatctcctttacagggggaacagccactggtaaattgatctccaagagtgcatcaaaaacatttaaaaaattgtccttggagatgggaggtaagaatccagccattatttttgatgattgtgattatgattcaatgctagataatattgttaggtcatcattttcaaatcaaggacagatctgtttatgtagttcacgacttttgatcgaacaaacgatctatgaaaaatttaaaaaggaccttactctaaaagttttagaactagtaataggtgacccttcaaaaattgagactcaatttggttctgtttgctccgaggggcatctgcagaaagtgctcaattatattgcattggcaaaaaaagaaggtggcaaggtcatagctggaggtaaaatagttgaattggaaggccgatgtagtaatggatggttcattgagccaaccttgcttgaagacctaggcccttcaagcagagtgaaccaggaggagatctttggtccagtggttactttacaaccctttgattcagaagcagatgctattgaacatgctaataatacagattatggattatctgcgactgtttggacggaggatattgagaaaggaaaaagggttgccaaaagaattgatgcgggtgttatctgggtcaattgctggttactacgagatctcaggacaccttttggtggtatgaaaaattctggtttaggaagggaagggggtgatgatgcgctcaaattttttacagaagcaaaaaatatttgtgtacctgcatgaa

SEQ ID NO: 216366 - DNA, 1192 bp, Unknown
  Bacterial polypeptide expressing nucleotide sequence isolated from the Sargasso Sea
gatggaactgatacaaaattttattgatggtcagcatatttcaagtgactcaagtgaatctttagatatttacgagccagcaactggggatatttacggacagttaagggattcaaatgcaaatgatatagatcatgcggtcaggtctgcaaaaacagcatttgccctctggtcaaatctaaccgtacgtgagagagcggttcatctaaataatattgctaagggtattgaaaaaaggttagatgaatttgcagaaattgaatccagagatactggaaagcctattgcactttcacggtcactcgatattccaagatcagtccttaattttaaattttttgctgagcatggcgagaattttgaattcaattatgatctaaataacgagacatcacaaaatcatatcaacagaagcccgctcggggttgtggcatgtatctcaccatggaatttgcctctttatttattcacctggaagatagctcctgcattgattacgggtaataccgtgatagcaaaaccatcagagttggcaccctataccgcgtatatgttaggaaaagtgtgtcaagaggttgggctacctcctggtgttttaaatattgtaaatggcatggggagtacctgtggagaattattggtcaaacataaagagataaaagcaatctcctttacaggaggaacatccactggcaaattgatctctcagagtgcatcgaagacatttaaaaaattatcgttggagatgggaggtaaaaatccagccattatttttgaggactgcaattatgaattgatgcttgaaaatattttaaggtcttcattttcaaaccaaggtcagatctgtttatgtagttcacgtctattgatagagcgatcgatctatgaaaaatttaaaaatgatctttccttgaaagtttcagagcttttaattggcgatccttcaaaaacagagacccagtttggttctatctcatcgaaaggtcattttgataaagttgtcagttatattgatatggtgaaagaagaaggtggtaagatcatagctgggggaaaatcagttaagttagaaggtcgatgtagtaatggctggttcattgaaccaactttagttgagggtctatctccatctagtagattgaaccaggaggagatctttggtcccgttgtgaccttgcaatcttttgaaaaa

SEQ ID NO: 216367 - DNA, 799 bp, Unknown
  Bacterial polypeptide expressing nucleotide sequence isolated from the Sargasso Sea
tcttgctaaccaaagcggtgaaacttttgatgtaactaaccctgcaacaggtgaagttatttacagtgtcgaagttgccgatgaatttgttcaaaacgcagccattgaaagtgcaaagcaaggttttgcacagtggtctaaaatgacacctattgaacgcagccgtattttattaaacgctgtggcaatacttcgcgaacgtaacgatgagcttgccttaatagaagtgcttgataccggtaagccaatgcaagaagcaaactgtgttgatatagaaaccggcgccgatgtaattgaatactttgcaggcctagcccctgcgcaagtaggccaacaacaaatggtaggcgaagacttttactatacacgtaaagagccattagggatttgtgccggtattggtgcgtggaactacccgctacaaatagcatgttggaaatcaggcccagcccttgctgctggcaacgcatttatatttaaaccatctgaagaaacgccactaggcgctattaaacttgccgaaatttttgtagaagcgggcgtacctgctggcgtatttaatgtagtacaaggtgcgggtgatgtaggccaatggctaactgcacatagtgagattgacaaagtgtcgttcactggcgaagtaggcacaggtaaaaaagtagtcgcaagtgcttcaggcacattaaaagacgtaaccatggagcttggcggtaagtcgccgcttgttgtgtttgatgatgcaaatatagagcaagcagtcagcgctgccatgctaggtaacttttatacccaaggcgaa

SEQ ID NO: 216368 - DNA, 768 bp, Unknown
  Bacterial polypeptide expressing nucleotide sequence isolated from the Sargasso Sea
ggcgctgatgtcattgagtactatgccggcctagctcctactcaactaggtacccagcaacctgtgggtggcgatttcttctacacgcgcaaagaagcgctaggtatctgtgccggtattggcgcatggaactaccctattcaaatcgcttgctggaaatcaggccccgcccttgccgcaggtaatgcgtttatatttaagccgtcagaagaaaccccgatgggtgcgcttaaactggctgaaattttcaccgaagctggcgtacctgacggcgtatttaatgtggttcaaggcgcagcacaagtaggccagtggcttacaaacagccctgacattgagaaagtatcgtttactggtgaagtaggcacaggtaaaaaagtgatgcaaagcgccgctgcgtcgaacttaaaagacgtgacaatggagcttggcggtaagtcaccgcttgtggtattcgaagatgccgacattagccaagctatcagcgccgctatgcttggtaatttttatacccaaggtgaaatctgcactaactgcacccgtgtttacgttcaacgttctgtttatcaagcctttattgatgagcttaaagcccgtaccgaaaacaacattgttatgggcgatccacttgaccccaacgtaaacctgggcgcacttatttctaaaaagcaccaagagctagtacttagctatattgcaaaaggaaaagaagaaggtgcgacgctgttaaccggtggtaacgcggcctctccggcatctgcaccaaat

SEQ ID NO: 216369 - DNA, 821 bp, Unknown
  Bacterial polypeptide expressing nucleotide sequence isolated from the Sargasso Sea
catgtcattgccaacttatcagaatttcattcacggcaagccgatggcaaacaaaagcaaagaaacctttgcagtaaccaaccccgcaaccggtgaggtaatttaccacgtagaagtggctgatgagtttattcagcaagaagcgatcaaaagtgctaaagaaggctttgcagcatggtcagcaatgatgccaattgaaagaacccgcattcttaacaaagcggttgcactgcttcgcgaacgtaatgatgaactcgctaaattagaagtacttgataccggtaagcctattcaagaagctgattgtgtagatatagaaactggcgctgacgttatcgagtactatgccggccttgctcctactcaactaggtacccagcaacctgtgggtggtgatttcttctacacgcgcaaagaagcgctaggtatctgtgccggtattggcgcatggaactaccccattcaaatcgcttgctggaaatcaggccccgcccttgccgcaggcaatgcgtttatatttaagccgtcagaagaaaccccagtgggtgcgcttaaactggctgaaattttcaccgaagctggcgtacctgacggcgtatttaatgtggttcaaggcgcagcacaagtaggtcagtggcttacaaacagccctgacatagagaaagtatcgtttactggtgaggtaggcacaggtaaaaaagtgatgcaaagcgccgctgcgtcgaacttaaaagacgtgacaatggagcttggcgggaaatcaccgcttgtagtgttcgaagatgccgacattagccaagctatcagcgccgctatgctta

SEQ ID NO: 216370 - DNA, 447 bp, Unknown
  Bacterial polypeptide expressing nucleotide sequence isolated from the Sargasso Sea
aagggattgaagaaggcgcaacactgcttactggtggttcaacgctttcacctgaatcagcgcctaatggctactttgttgcacctaccgtgtttattgattgcaacgatgaaatgacgattgttaaagaagaaatattcggcccagtaatgagcgtactcgtttttgaagacgaagacgatgtaattgcacgggctaatggtactcacctaggcctagctgcaggcgtatttactagcgatattaaacgcgcacaccgtgttattcatcaattagaagccggtatttgttggattaatgcctatggtaactcacctgctgaaatgcctgttggtggttataagcaatctggtattggccgtgaaaatggcatagaaacacttgatcattacacgcaaaccaagtctatttatgttggtatggccgacatagaaagcccattttaag

SEQ ID NO: 216371 - DNA, 730 bp, Unknown
  Bacterial polypeptide expressing nucleotide sequence isolated from the Sargasso Sea
atgtcagcgttagtcacttatcaaaattatgtgcacggtaaatacatatctaatggcagtggagaaaccttcgaagtcattaaccctgctactggcagtgtcagttatttagttgaagttgcaacagatgcagttaagcaagctgccatcgacagtgcaaaagcaggctttgcggtttggtcaaaaatgaccccaatgcagcgcagccgaattttattaaaagcggtcgcgttattacgtgagcacaatgatgaacttgccgctggcgaggtgctcgacacaggtaagccatggcaagaagcttctgttgttgatgtagtcacgggtgccgattcaattgaattttttgccggccttgccccaagtattgaaggaaaccagcaacctgtgggcaatgacttttactacactcgccgtgaaccattaggcatttgcgcaggtataggtgcatggaactacccattgcaaattgcatgttggaaagcggcgccagcactcgcatgtggcaatgtcatgatttttaaaccgtctgaagaaaccccacgcggtgccatgcgattagccgaaatattcacccaggctggtgtacctgacggtgtatttaacgtagtacagggtgatggccgtgtcggtgcatggttaacgacccacgatgacatcgccaaagtatcgtttacaggcgaagtcggtactggcaccaaagtcatggctgcagcgtcaagcagttaaa

SEQ ID NO: 216372 - DNA, 904 bp, Unknown
  Bacterial polypeptide expressing nucleotide sequence isolated from the Sargasso Sea
cagcatcaacccggccaccggcgaggtgctggccaaggtgcaacgtgccagccaggccgatgtcgaacgggccgtggccagcgccaccgaggggcagaaggtgtgggcggcgatgaccgccatgcagcgttcgcgcatactgcgcaaggccgtggacatcctgcgtgagcgcaacgacgagctggccgagctggaaaccctcgacactggcaagccactgtcggaaacccgctacgtcgacatcgtcaccggcgccgacgtgctggagtactacgccggcctgatcccggccatcgagggcgagcagatcccgctgcgcgagacctctttcgtctacacccgccgtgaaccgctgggcgtggtcgccggcatcggcgcctggaactacccgatccagatcgccctgtggaaatccgccccagcgctggctgccggcaacgcaatgatcttcaagcccagcgaagtcacctcgttgaccgcgctgaaactggccgagatctacaccgaggccggcctgccagcaggcgtattcaacgtgctcaccggtagtggtcgtgaggttggccagtggctgaccgaacacccgggcatcgagaagatttccttcaccggcggcaccgtcaccggcaagaaagtcatggccagcgcctccagctccagcctcaaggaagtgaccatggagctgggcggcaagtcgccgctgatcgtgttcgaggacgccgacctggaccgcgccgccgacatcgcggtgatggccaacttctacagctccggccaggtgtgcaccaacggcacccgcgtgttcgtgccgcgcatgttgcaggcgcgcttcgaggccaaggtgctggagcgagtcaaacgcatccgcctcggcgatccgctggatgacgcccaccaatttcgg

SEQ ID NO: 216373 - DNA, 778 bp, Unknown
  Bacterial polypeptide expressing nucleotide sequence isolated from the Sargasso Sea
cgcgcccccgggcctgttcaacgtcgtgcagggcaagggcggcgtcggcgcgccgctggtcacgaccccgcgcattgccaaggtctcgctcaccggctcggtgcccacggggcgcaaggtctatgccgccgccgccgagggcatgaagcatgtcaccatggagttgggcggcaaatctcccatggtggtctttgacgatgccagccttgaggatgccatctcgggcgcgatcctggggaatttctattccacgggccaggtctgttccaacggcacccgcgttttcgtgcataaatccatcaaggaagtcttccttgcccgcatggccgagcgcctgaaaggcgcggtaatcggcgacccgctggacgaggccaccagttttggcccgatggtcagcgaggcacagttgcagatcgtgcttggcttcattgaggcgggcaaggccgagggcgcgcgcctcgtgacggggggcaaccggatcgacaggccggggttctggatcgaaccgacggtctttgccgatgtcagcgacgatatgaccatcgcccgggaagagattttcggcccagtcctgagcgttctggatttcgaagacgaggacgaggtgatcgcgcgtgccaatgccacgccctacgggttgtcggcgggcgtctacacccgcgatctgcaacgcggccaccgggtgatcgggcaattgcaggcgggcagttgtttcatcaactcctacaacgacgccccggtcgaggtgccctttggcggggtcaaatcctcgggcgtg

SEQ ID NO: 216374 - DNA, 614 bp, Unknown
  Bacterial polypeptide expressing nucleotide sequence isolated from the Sargasso Sea
ccttgctccaactcagttaggcacgcaacaacaggtaggcagcgattttttctacacccgtaaagaggcacttggtatttgcgcggggatcggtgcgtggaactaccctcttcaaattgcatgctggaaatctggccctgctctagctgctggcaacgcatgtattttcaaaccatcagaagaaacgcctcttggtgctataaagttagccgaaatatttacggaagccggcgtacccgatggtgtcttcaatgttgtacagggcgctgcagaagttgggcagtggctgacaaccaaccctgatattgagaaggtgtcgtttaccggcgaagtgagcacgggcaaaaaagtaatgcaaagcgccgcctctaaccttaaagacgtcacgatggaactgggcggcaaatcaccccttattgtgtttgacgatgccaatgtaagccaagcggtgagtgcagctatgcttggtaacttttatacccaaggcgaagtatgcactaactgcacccgtgtttttgtgcaccgctcaggtgtatcatatcgtttgttgatgaacttatttcacgtaccaatagcaacatcattgccggtgatcctctcgacccagaggtgaa

SEQ ID NO: 216375 - DNA, 1453 bp, Unknown
  Bacterial polypeptide expressing nucleotide sequence isolated from the Sargasso Sea
atgatcatagacggtaagtatacaaatagcataacagaaaagacaattgaaattgaatgccctgcaaacaagaggatatttgctagtgttccacggggtaatgaggctgacgttgatatcgctgtaaaatcatctctgaaagcattcagatcgtggtcaaaagtaatgcctaaagagagaggaaaaatacttctccaaattgctgatgctatagaaattgaaaaagaagatattgcaaaaattattgcaactgaaactggaaatgcaataaagacccaagcaaggccagagattaatcttgttgttgatatatttagatattttggtggattatcctctgaattgaaaggtgaaaccatcccacttggagaacatgtgttgagttataccaggcgtgaacccttaggtgtagtcggtgcaataattccttggaatgctccggtcatgcttggtgcatgcaaaattgcacccgcattatgtgcaggcaatacaattgtaatgaaggccgctgaagatgccccgttggcaattctaaaagttgctgagatttgtcaaaaattcataccgccgggtgttctaaaccttctaacaggaactggtcctgaatgtggtgagccgcttgcatatcaccctgaaataaataaattatccttcacgggatcaactggagttggaaagctggtaatgagggcagctgctgagaggatactgccagtgtctcttgagctcggaggaaaaagtccttcaatagtttatccagatgtaaatgaagattggacagttgatggaattattggcgccatgagatttacaaggcaaagccagtcttgcacagcaggctcaagattattcctacacaaaaaaatatttgacagctttattggtaaactgtcagaaaaacttgataaactaatcatcggcaacccactcgatgatgatactgacataggcactatcataaataacaaacaatttacaaaagtttgtgactacatttctgacggtttaaataataaaaatacagaagttatttgtggaggtctgcctcctgaagatggcccccttagcgaagggtattttacaataccaactatcttcagaaataaatcaaatgaatggcgtcttgcgaaggaagaaatttttggtcccgtccttgttgcaatcccatgggatgacgaagaagaagtcataagaatggcaaatcagagtcactacggcttagccgcatatgtttggactcgagatattactagaggcataaatgcagctcatgcaattgaatctggctgggtacaggttaatcaaggcctggcgcaagcccctggacattcatatggtggatttaaacaatcgggtattggccgtgaattttcacttgaaggtatgctcgatagcttcactcaaagaaaaaatattagtataaacctaaatactccatcaaaagaaatctaat

SEQ ID NO: 216376 - DNA, 1444 bp, Unknown
  Bacterial polypeptide expressing nucleotide sequence isolated from the Sargasso Sea
ctgtccgacaacgttcggacgcgctttttcatcaacggagagtggtgcgcgccgaagggctcagaggagttcgagctggtttcgcccattaccgaagaggtgatcttccggttgcccgccgcatcgattgaagacgctggtgctgccgttaaggtggccagggatgcattcgatacaggctcctgggcgtgtagcccgtctgtggaaagggctgtagtgcttcggaggattgcgtcggagatgcgggatcgtctcgccctttttggcaggctttggacggcgcaggtcggggcgccgagctggtttgcgagccagtttaccgggatcgcaccggcatacttcgacttttacgcggacctgatttcgcaatcttcgttcgaggatgagcgcacggtgccaacgggacgggtaaaagtcgttcgggagccggtaggcgtatgtgcgctgatcgtaccgtggaatgcccctcttgttctgctgacgcaaaagctggccgccgcgctcgcagcaggttgcaccgttgttgcgaagcccagcccggaaacgccgttggacgcattggtacttgcggagtgtgtcgccgccgctggacttcctccaggagtattcaacgtcgtgccggctggtcgtgaggtcggtgactggttgattcgccaaccgatgatcgacaaggttagctttactggctcgaccgtggcaggaaagcacattgcacaggtctgtgcagacaggctcgcgcgagtcagcctggaacttggtggaaaatcggcctcagtcatctgtgacgatgcggacattggagcctggattgcgaacgtagcgccgttcacaatgccgttcagcggtcagatctgtttttcgcaaacacgtgttctggtgccgcgcaagcggcacgatgaattcatgagcgcatacatccgcgcgattgatgggatgaaggttggaagcccatgggacccggacacgatgatcggacccgtggcaacctccaatcaataccggcgcgtgctggacttcattgacgtggcaaaacgtgagggtgccaaccccgtcattggcggaggccgcgccccggggcacgagcacggttactttgtcgcccccactgtgttcgacaacgtccatagcgatatgacgatcgctcgtgaggaggttttcggtccagtcgtctcgatcatatgccacgacggagacgaagacgctatccgcattgcaaacgacagtctgtacggtctcagcggcactatattctcggctgatatcggtcgagccgagcgcatcgcacgacgaattcgcacgggaaacctcacggtcaacgggcttcagctcgatccttcaattccctttggaggattcaaacagtccggtatcggacgggaaggtggtcccgagggcctggaaacgttcacggagacgaaggcgatctactttcccgccgtttgat

SEQ ID NO: 216377 - DNA, 1480 bp, Unknown
  Bacterial polypeptide expressing nucleotide sequence isolated from the Sargasso Sea
atggctgatattaaaaagtataaatattttcattccaacgaatggcatgaacccatttcaaacaaatggtttaatagtgaaaatcctgcaaatggtaaagtgtgggcaacagtacctgattgcagtaaaaaagatattgatatggcagtacaggctgcaaaaaaagctttttatgatgggccttggggcaaattaatgccagcagaaagagggcgtattcttcgaaaaataggtgatgttattagcaaaaatgctgaccgcataggtgctattgaaacaagagataatgggcaattaccatcacaaataactccctcactcagagagggtgcatggcttttagatagttggtattattatgcgggaatgtgcgataagtttgaaggaaaattaattccagcagagctaccagatatgcataattatatgaagtgggagccctttggtgttgtcgctcaaatattgccttggaactctccaattggaacattaatatggaaacttgctccttgtttagcagctggaaacaccgtggttttaaaaccatctgaacaagcaagttgttctattttggaattgatggatatacttttagatgcagatataccaccaggagttttaaatgttgttacaggatatggccatacaacaggagaacctttaattgatcatcctgatgttagaatggtttcatttacaggtggtactaatggtggaaaagcagctgctaaaatagcttcacagcaagttaaacctatcgtaatggaattaggaggtaaatcacctcaaattgttttaccagacgctgatattgatcttgccgtaaatggggttgcatctggaattttcccagctggtggacaaagctgtatatcaggttcccgcttattaattcactcttcaataattgataaatttactgaacaattagtaaaagtttgcaaaagagctactgtcggagatcctttacaagagagcactactattggtcctattgcaaatagagttcactataaaagaattttagacaatatcgataaagctcaaaaagagggtcataacttagtcttggatggaagaaatgaatgtagagattatggattttatatcggaccaacaatttttaaagatgttccaaatactacatacttagcacaaaatgagatttttggacctgttgtatcaactgaaaaatgggataatgaagatgaagttataaaaacagcaaatgatacaatttttggtttagctgctggcatatggtccaaagatattacaaaagctatgaaaatagctgataatatagaagcaggaactatttatataaataattacttcaatgctgccgctcaaagtcctgtgggaggatataagcaatcaggttacggtcgtgagaatggttgggaaggcatgagatgctttatgcaaacaaaatctgtttggctatcaacaaatcctaatcaaccaagtcctttttaaa

SEQ ID NO: 216378 - DNA, 187 bp, Unknown
  Bacterial polypeptide expressing nucleotide sequence isolated from the Sargasso Sea
tgttatccaccagctaaaagccggaatatgttggattaatagctacggaaattcacccgctgagatgccagtaggtggttataaacagtcgggtgtaggtcgtgaaaacggcgttgaaacacttaatagctacacgcagaccaagtctgtctatgtgggtatgactgacattgaaagcccgttttag

SEQ ID NO: 216379 - DNA, 1492 bp, Unknown
  Bacterial polypeptide expressing nucleotide sequence isolated from the Sargasso Sea
atgaatcaaccgacattcgaagactggcaggcccgcgcggccgtgctgcgggtcgaagggcgcgcgttcatcgacggcgaggcgcgccacgcgcacaccggcgcgaccttcgcctgcgtgagcccgatcgacggtggcgtgctcgcgcacgtggccgattgcggcaccgacgacgtcgacctcgcggtgacggccgcacgccgcgcgttcgacgcgcggagctgggccggcatgaatccgcgcgcccgcaaggcggtgctgcagcgctgggccgcgctgatgcgcgagcatctcgacgagctcgcgctgctcgagacgctcgacaccggcaagccgattgccgataccacggcgatcgacgtgccggctgccgcgcattgtgtcgactggtatgcggaagcgatcgacaagatcggcggcgaagtcgcgccagtcgaccatcatctggtcgggctcgtcacgcgcgagccgatcggcgtcgtcgcggccgtcgtgccgtggaatttcccgctgctgatggccgcatggaaattcgcgccggcgctcgcggccggcaacagcgtcgtgctcaaaccgtccgagaaatcgccgctcaccgcgatccgggttgcgcagctcgcgtgcgaggccggtattccgcccggcgtgttcagcgtcgtgccgggtggcgctgagccgggcagggcgctcgcgctgcatcgcgacgtcgactgcatcgcgttcaccgggtcgacgcgcacggggcagcagatcatggcgtgcgccgcgcagtcgaacctgaagcgtgtgtggctcgaactcggcggcaagtcgccgaacatcgtgctgcgcgactgccccgatctcgaccgtgccgcgcaggcggccgccgacgcgatcttcttcaacatgggggaagtgtgtacggccggctcgcgtctgctcgtgcatcgcgacatcaaggacgcattcgtcgcgaagctggtcggcgcgtcgcggcgcttcgcgcccgggcacccgctcgatccgtcggtgacgatgggggcgatcgtcgatcgtacgcagctcgatcgcgtgatggggtatatcgatgccgggcgcgacgaaggcaggctcgtcacgggcggcgcgcgcgtgcgagaggagacgggcgggttctatgtcgagccgacggtgttcgaggtgaagccggatgcgaagatcgcgcgcgaagagatcttcgggcccgtgctgtcggtgatcgtgttcgacgatgtcgacgaggccgtgcagattgccaacgacaccaagtatgggctggccgcggccatatggtcggcggatctctcgaccgcacacgctgtggcacgacgtctgcgcgcgggcaccgtgtgggtcaactgctacggcgacggcagcgatgacatgaacttcccgttcggcggttacaagctgtcgggcaacggtcgtgacaaatcgctgcatgcgctcgacaagtacaccgagctgaagtcgacggtcgtgcggttgtaat

SEQ ID NO: 216380 - DNA, 1456 bp, Unknown
  Bacterial polypeptide expressing nucleotide sequence isolated from the Sargasso Sea
atggatgagcagcatctggtgtaccttagcaattacatcggaggcagtttcgtagagcactctggtcaggactggatggatgtattagagccagccaccggacgagtatacggaaaggtcccgctatcggactctggggcgatagattcggctgtcgaggctgctcgtgaggctcagcccggatggggctcccttagtccggatgaaagggctgattggctggacaagatagcagactaccttgagtcgtcgtacgaagagatagcggcactagagagcagggacaccggtaagccgatttcacttgctagatcccttgatgccagcaggtctgtcactaacttccgattctttgcaggcatgatcagggagcaggagccggagatcttcgagaatgatgactccaccaattatgtcctgtacaagccagtcggcgtaggagcactgatcacaccttggaacctccccctgtacctattgtcatggaaggttgctcccgcgataggcatgggcaacacagtggtctgcaagccaagcgagctgacccccatgacagctgacctcctgatgagagcggtggacagcgtcggcctaccggccggagtggtcaacctcgtccacggtgacggtatcggagccggtgcccccctcgtggagcatcctgacgtggacctggtctctttcacaggcggcacttcgacaggagagaaggtggcctcctccgccgctccgatgttcaagaagatgagcctcgaactcggggggaagaactccagcattgtcttcgcggactgcgacatggagggcaccgtcgccggagtcgtcaggtctgggttcctcaaccagggacaagtttgcctgtgcggctctagggtgctcgtcgaggattcgatttacgatgagttcgaggagaagttcgttgaggcggtagaggccctgaccatcggagacccgtcagatgaatccacccaactaggggccctgatttcgaaggaacacctccagaaggtcaggggttacgtcgacctagcgctcgaagagggagggacagtcctgacgggcggggagccgtgcctaccatccgatctcggtggcgggaactggatggctccgactgttatctcgggcctttctcccgactcgaggtgctccaccgaggagatcttcggaccggtggttacgcttcacaggttcgagaccgatgatgaggcactggaaatagcgaactgcactagctacggcctcgcaggaagcatctggactagcgacctagagaggggcaggaggttctcggaatcaattgagaccgggatggtatggattaacgcctggcttcacagggacctccgagtaccgttcggaggggtgaaggacagcggagtcgggagggaaggcgggaagtggagcctgggattcttctcggaggccatgaacgtgtgcgtgaagcacgactagt

SEQ ID NO: 216381 - DNA, 1468 bp, Unknown
  Bacterial polypeptide expressing nucleotide sequence isolated from the Sargasso Sea
atgtcattaccgacttatcagaatttcattcacggcaagccgatggcaaacaaaagcaaagaaacctttgctgtaaccaaccccgcaaccggtgaggtaatttaccacgtagaagtggctgatgagtttattcaacaagaagcaattaaaagcgctaaagaaggtttttcagtttggtcagcaatgatgccaattgaaagaacccgcattcttaataaagcggttgcattgcttcgtgagcgtaatgacgaactcgctaaacttgaagtactcgataccggtaagcctattcaagaagccgactgtgttgatattgaaactggcgctgatgtcattgagtactatgccggcctagctcctactcaactaggtacccagcaacctgtgggtggcgatttcttctacacgcgcaaagaagcgctaggtatctgtgccggtattggcgcatggaactaccctattcaaatcgcttgctggaaatcaggccctgcccttgccgcaggtaatgcgtttatatttaagccgtcagaagaaaccccgatgggtgcgcttaaactggctgaaattttcaccgaagctggcgtacctgacggcgtatttaatgtggttcaaggcgcagcacaagtaggtcagtggcttacaaacagccctgacatagagaaagtatcgtttactggtgaagttggcacaggtaaaaaagtgatgcaaagcgccgctgcgtcgaacttaaaagacgtaacaatggagcttggcgggaagtcaccgcttgtagtattcgaagatgccgacattagccaagctattagcgccgctatgcttggtaatttctacacccaaggtgaaatctgcactaactgcacccgtgtttacgttcaacgttctgtttatcaagcctttattgatgagcttaaagcccgtaccgaaaacaacattgttatgggcgatccacttgaccccaacgtaaacctaggcgcacttatttctaaaaagcaccaagagctagtacttggctatattgccaaaggaaaagaagaaggcgcaacgctgttaaccggcgggaacgctgcctctccggcatctgcgccaaatggctattttgttgagccaacaattttcactgactgcactgacgatatgactatcgttaaagaagagatcttcggaccagtgatgagcgtgttagttttcgatgatgaagacgaagtgatcgcacgcgcgaatgacactgagctaggtttagctgccggtgtatttagtaaggatatccagcgcgcgcaccgcgtcatccaccagcttcaagccggtatttgctggataaatgcatatggtaactctccggctgaaatgcctgtaggcggctacaaacagtctggcattggacgtgaaaacggcgttgaaacgcttaatagctacacacagaccaaatcggtttatgtaggtatgagccaaattgagagcccgttttaag

SEQ ID NO: 216382 - DNA, 934 bp, Unknown
  Bacterial polypeptide expressing nucleotide sequence isolated from the Sargasso Sea
gggggcgaaggacgcgatgacggaggttgtgcgatcggcggatttgatcgattacaccgcggaagagggggtgcggttgctgggggaggggaagctgttgatgagcgatagttttccaggaaattcgagaaataagctgtgcctggcgagcaaggtgccggtgggcgtcgtgttgtgcattccgccgttcaactatccggtgaatctgtgcgtgagtaagattgcgccggcgctcatcgcggggaacgccgtggtggtgaaaccgccgacgcaggggtgcacggcgacgctgaagatgattcagtgtttcatcaaggctgggttcccggcgggcgtcgtgcaggcggtgacgggacgaggcggtgaaatcggcgattacctcacgacacacccggaagtgaatgggatttcgttcactggaggtgaaaccggcgtgcgggtcgcgcaaaaggcgggcatggtggctttacaaacggaactcggcggtaaggatgcgtgcatcgttttgccagacgccgatttggatttggcggcgaagagcatcgtcaagggtggattttcatacagtggacagcgatgcacggcggtgaaactcgtcgcggtgtatgaggaagtcgcggacgaacttttgcaaaaggtgaatgaccagattgcgaaattaagcgtcggcttacccgaagacgacgccaccatcaccgccgtcgtgtccaagagctcagctgacttcatccagtccttagtcgtagacgctgagagtaagggcgcgaagctttgccaagagtggaaaagagaggataatctcatctggccgctcgtgatcgataaaatcacgcacgatatgaagatttgctgggaagaacctttcggcccggtgcttccagtcgtgcgcgtcaaatccgacgaggaggcgctcacgttggtcaacaactcgaga

SEQ ID NO: 216383 - DNA, 760 bp, Unknown
  Bacterial polypeptide expressing nucleotide sequence isolated from the Sargasso Sea
atgaattttattgaagcaataaataatggattagatgaagcaatggaaaaagatgaagatattttcatgatgggtgaagatataggtatttttgaaggagcatttaaagctacaaagggattatttgaaaaatatggagaatcaagagttctagataccccaatatcggaaggtggcttcatgggagctggagttggggcagcattagcgggaaaaaaacctgtcattgagttacagttttttgattttgtttacccagcgttagatcagatcactacagaagcagctaaatattattggaaagcagggaaagcagttcctttggtagtcaggggtcccactggagcagggactcgttctggtccatttcactcaattagtccagagtcattgttagcacatcacccaggaattaaggttgttgctccttctaatccatatgatgcaaaaggattattagttgcttcaatttttgatccaaacccagttatgtatcttgaacataaaaagctgtatagaaaaccagatttaaaaatggatgttcctctaggtttatatgaagtagaactaggtaaaggaaaagttgttaaaacaggggatgacgttacagttgttgcttggtcaggaatggtgccaacagcgattgaagctgctgaggaattaaaaaaagataatatctcagttgagatagttgatttaaggacaattttcccattagatgaagagataattttgaagtctattgaaaaaacatcaaact

SEQ ID NO: 216384 - DNA, 553 bp, Unknown
  Bacterial polypeptide expressing nucleotide sequence isolated from the Sargasso Sea
aaagtaattgtcccatctaatccttatgatgctaaaggattattaaaatctgcaatcagggatgatgacccagtaatatttatggaatctgaacagatgtatggagacaaaggagaaattccagaaagtgaatatacacttcctataggagtagctgatattaaaagaaaaggaaaagatgtaactatagtttcttttggtaagataattaaagaagcatatatagcagctgataaattagcagatgaaggtgttgaatgtgaagttattgaccttagaacaattagacccctagattatgatgcaatatttgactctgttaaaaaaacaaatagattagtaattcttgaagaagcatggccttttggaaatatatcaactgatatttcacatactgttcaaagtaaactttttgattatttagatgctccaattgaaaaggtaaataatgcagacactcctacaccatactctcctgtacttttaaaagaatggcttccagatagtaaagatgtttataaagcggttaaaaaagtactctacttaaagtaaa

SEQ ID NO: 216385 - DNA, 640 bp, Unknown
  Bacterial polypeptide expressing nucleotide sequence isolated from the Sargasso Sea
ccagttgtctttagaggtcctaatgggtctgctttgcaagttgctgctcaacatagccatgatttaagttcattatttactaatataccaggcttaaaagtaattgctccttatgatagtgctgatgcaaaaggtttgcttaaatctgcaataagagaccctaatccagttatatttttagaaaatgaattactttataatgaagtttttgagcttcctgagatagattattccgttccaataggtgctgctaatattaaaaggtcaggtaatgatattacaattacagctttctcgagaggagtttatgcagctttaaaagcagcagaattacttgaaaaagaaaatataagtgctgaagttatagatttaaggactttaagacccttagatattgaaactataataaaatcagttaaaaaaacaaatagacttgtttcagtagaagaaggttggatgagttcaggaataggagctgaaattatttctttagttacatcaaaggcttttgattaccttgatgcccccccagaaagaatagcggcaatgaatgttccattaccttatgccagtaatttagaaaaattatgtttaccagataaggacaatatatttaagttatgtatgaatttattttaat

SEQ ID NO: 216386 - DNA, 813 bp, Unknown
  Bacterial polypeptide expressing nucleotide sequence isolated from the Sargasso Sea
agcaaggaataacgagggcccaagtctaattgagcttgttacatttagacatcatggacatgcaggacatgatcctgctgaatatgttgaagaagaggttagagaattttggataaaaagggacccaataacaagatttgaagatgccttagttgaagaaggattatttacaaagaatgattttgaaacactatcagaagaaattgacaatgagattaaaagtacaattgaatgggcaaaagaacaagacgatcctaatcccgatgaagaaattgaagacatgtttgctactcgtacgtcccaagtatttacaaatgatgaatcaagtactgaaacaatgaattttattgaggctataaataatggattagatgaagcaatggaggaagataaagatattttcatgatgggtgaagatattgggggttttgaaggagcatttaaagctacaaagggactatttgaaaaatatggagagtccagagttctagatactcctatatcagaaggtggttttatgggagctggagtaggcgcagcattagctggaaaaaaacctgtgattgaattacagttttttgattttgtttatccagctttagatcaaattactacagaagcagctaaatattattggaaagcagggaaagcagttcctttggtagtcagaggccctactggagcagggactcgttctggtccatttcactcaattagtccagagtcattgttagcacatcacccaggaattaaggtcgtcgctccttctaatccatatgatgcaaaaggattattagttgcttcaatttttga

SEQ ID NO: 216387 - DNA, 799 bp, Unknown
  Bacterial polypeptide expressing nucleotide sequence isolated from the Sargasso Sea
aatggctcgaaaaataacctttcagcaagcaattaacgaagcgctggatcaagaaatggcccgtgacgaagatgtcgtgataatgggagaagacgtagtaggcggagctggtacccagggagaaatggatgcctggggaggagttctcggagtcactaaagggctttggggtaagtatggtgatcgaataatggatactcccatcagcgaatccgggtttgttggcgcagccgtgggagccgcaacagccggactgcgacccgtttgtgagctcatgttcattgacttcatgggcgtatgttttgaccagatatataatcaagccgcaaagtttagatacatgtttggaggaaaagcagaaaccccggtagtcattcgaacaatggttggcgcgggtttcagagcagctgcacaacattcacaatgtctatatcctatgttcacagcagtccctggtttaaaagtagtcattccgtcgaacccttatgatgccaagggcctcttgatacaggctataagagacaacgatcctgttatattttgcgaacataaggtgctctacacagttgaaggcgaagtgccagaagactcctacactatagcattcggggaggcagacattgcccgcgaaggaaaggacattactgtagtcgcgcttggaagaatggtgcaccaggcattagaggccgctaacacactgtcttccgacggaatctcttgcgaagtagtagatttgagaaccacgtccccactagatgaggaaacaatcttagaatcagtggagaatacgggccgcttg

SEQ ID NO: 216388 - DNA, 1729 bp, Unknown
  Bacterial polypeptide expressing nucleotide sequence isolated from the Sargasso Sea
atggagattgaaacaataaaaagaaaaggctattcaaagagtttaaacaaagaagaactttgggagatatacaaatcaatgaaaacccaacggcttcttgaagaaagattattaaagctttataaggggggacagctctctggtgctgtatatccaggtataggtcaggaagcttcaatggctggaattggagctggtatgggaaaagatgatatatttggtggaacacacagggatttaggtgttcaaatgatgagaggagtttctttagaggaaataggcttaaatttctttggaaagaaacatggaccctctaaaggcagggatggaaatagccattttggagttgtagataaaggaacattaatggtagtttctccactgcctgactcagcacctgttgcggttggatgggctttagcttcacagcaatctaacagcggcgtggttgcaattgccaattgtggagaaggagctactgctactggaacatggcatgaaagtataaacatggcaggcgttcataatttacctattgtttttactgtacagaataatcaattcgcttattcctctccgaatgaagttgaatttggcacacctaatgttgcggatagaggagcaggctacggcatagagtcaaaaattatagatggcaatgatatttatcaagtaatagacacaatgcacgacgcttgcgagaaagcaaggaataacgatgggcctagcctaattgagcttgttacatttagacatcatgggcatgcaggacatgaccctgctgagtacgttgaagatgaggtaagagaattttggataaaaagagatccaataacaagatttgaagatgccttacttgaagaagggctatttactaatagtgattttgagacactatcagaagaaattgagaaagagattaaaactacaattgattgggcaaaagaacaagatgaccccaatcctgatgaagaaattgatgatatgtttgctactcgtacgactccggtgtttacaaatgatgaatcaaatactgaaacaatgaattttattgaagcaataaataatggattagatgaagcaatggagaaagatgaagatattttcatgatgggtgaagatataggtatttttgaaggagcatttaaagctacaaagggattatttgaaaaatatggagaatcaagagttctagataccccaatatcggaaggtggcttcatgggagctggagttggggcagcattagcgggaaaaaaacctgtgattgaattacagttttttgattttgtttatccagcgttagatcagatcactacagaagcagctaaatattattggaaagcagggaaggcagttcctttggtagtcaggggtcctactggagcaggtactcgttctggtccatttcactcaattagtccagaatcactgctagcacatcatccaggcattaaggttgttgctccctctaatccatatgatgcaaaaggattattagttgcttcaatttttgatccaaacccagttatgtatcttgaacataaaaagttatatagaaaaccagatttaaaaatggatgttcctctaggtttatatgaagtagaactaggtaaaggaaaagttgttaaaacaggggatgacgttacagtagttgcttggtcaggtatggtaccaacagcgattgaagctgctgaggaattaaaaaaagataatattctcagttgag

SEQ ID NO: 216389 - DNA, 831 bp, Unknown
  Bacterial polypeptide expressing nucleotide sequence isolated from the Sargasso Sea
gagagaaaagaatcctcgataccccaatttcagaagaaggaattgtgggttgcgcagtgggatccgccatgactggtctaagacctgtcgtagagttaatgtatgttgactttgtaatgttggccatggatcaattggcaaaccaagcagcaaagatccgctacatgtttggaggtcagataagcgttcccatggtaatgcgagcacaggggggaacaggtcgctcaggtgcagcacaacactcccaaagtcttgaagcctggatgatgcataccccagggttgaatcttgctatgcctgctacagtaaatgatgcctaccttttgttgaaacatgctttaaaactttctgatcctgttgtattcattgaacataagatgctttacactcttaaaggagacgtgaataaaagtgaatccatctcctggggacaggcagcaatcctccgatcaggttctgatttcactcttgtaacctactccaggatggttcatcgagctttagaagctgctggaaaactggctgaactgggaattcaagcagaggtcattgatttaaggacactatatccattagatacagaaactatcaattcatctgtaaagaaaacaggccgtgccttagtagttactgaggattgtctgactgcaggagtcagcgcagaattgtcctcaagaatcatggaaggtgctttcgaatttttggaagaacctgtgttgcgactggcaggcgaagacatcccaatccctgttgctccaagtatggaaaaagaggctgtcccaagtgtagataggattatctctacagcaaaacttttacttcgaaaatgaa

SEQ ID NO: 216390 - DNA, 902 bp, Unknown
  Bacterial polypeptide expressing nucleotide sequence isolated from the Sargasso Sea
catggggcttggacctatttctgcaatctatcaagctcatgtgatgaagtatcttcatgcgaggggattaaaagatttaggtgatagaaagatttgggggttttggggagatggtgaaatggatgaacctgagtcattaggagcaatcggtttagctgcaagagaaaaattagacaatttgatttttgttataaattgcaatctacaaagactcgatggtccagtaagaggaaatggaaaagtaatacaggaattagaaagacagttcagagggtctggctggaatgttattaaagttgtttggggccgactttgggatcctattattgcaaaagacaaaggaggacatcttcaaaaaataatggatgaagtcgtagatggtgaaatgcaaaattttaaagctaaaggaggagcgtatactcgtgaaaatttctttggtaaacatcctgaagcacttaaattagttaaaggtttatctgatgaggagatctataaattaaatagaggtggtcatgatccatataaggtttatgccgcctatcatgaagcagttaaccataaaggagctcctacagttattcttgctcttacaacaaagggctatggtgttgggtcaagagaagcagacaataccactcatcaggtaaagaaactttcgcttgataatattaagatttttagagatcgatttgatatacctgtttctgatgatgagatagaagatcttccatatgtaaggccaaaagaagattctcctgaaataaaatatcttaaggagacaagagaaaaacttggtgggtcaatcccaaaaagaagagagcattctgaaacccttaaattaaaaaataaagatgccttcaaggttcttcatgaaggtagcggtgaaagaaaggtatcaaact

SEQ ID NO: 216391 - DNA, 928 bp, Unknown
  Bacterial polypeptide expressing nucleotide sequence isolated from the Sargasso Sea
gccagagtctcttggcgcattggtttggctgctcgtgaaagtttagataacttaatatttgtcgttaattgtaacttacaaagactagatggtcccgttagaggtaatggaaaaataattcaagagcttgaaggtatatttagaggagctggatggaatgtttcaaaagttatttggggttcatattgggattcacttcttgcaaatgataaaactgggcatctagttaagataatgaatgagacagtagatggtgaatatcaagcttttaaagctagaaatggactttatgtaagagaaaaattttttggtaaatatcctgaaactttagacttggtatcatctatgtcagatacagatatttggcgtttaaatagaggtggtcatgatccgcacaaagtttatgcagcttatgataaggctgtaaatcatataggaagtccaacagtaattattgctaaaacaattaaaggttatggaatgggtaaaagtggcgaaagtgtaaacactactcatcaacaaaagaaattagatgttgatgatttgttgtattatagagatagatttgatgttcctttaactgatgagcaggtaaaaaatatagaatattttaagccagatgaaaattctgaagagataaagtatttgaaaaaaagaagattggagttaggaggatttattccagagagaacctcttattcaaaacctataaaagttccaagtaaagatatttttgattttatgaaaacttcaacaggaacaaaagaaatgtcaacaacaatggcattggtgagaatgttgattaatttattaagagataaaaacgttgcacctaaactagttccaataattcctgatgaggctagaacgtttggaatggaaggtttttttcaaaaagttggtatatacgcgcacgagggtcaaaaat

SEQ ID NO: 216392 - DNA, 955 bp, Unknown
  Bacterial polypeptide expressing nucleotide sequence isolated from the Sargasso Sea
gctgctacctcctacagtaatcaaggattccctttaattcctttctatattttttattcgatgtttggttttcaaagagtgggtgatctgtgctgggcagcaggtgatctgcaagcgagaggtttccttttgggtggaactgccggtagaacgactctcaatggtgagggtcttcaacatcaagatggacacagtcatgttctcgcctctactgtaccgaactgtgtatcttatgaccctgcttattcgtatgagttggccgtgattattcaccatggccttaatttaatgtttgtttcgcaaagagcttgctatttttacataactgtaatgaatgaaaactacattcatcctgagatgccgcgaggggtggaaaagggcattatcaaaggcatgtatctattagaaaaaaattcaaaccttaaatcgaagttagtcgttcagttgctaggctcaggcgcgattttacgagaggttctgcaggcagcgaaattacttgaagaatataacgttatcgcggatatctggagtgtcactagctttaatgagcttggtcgtgaaggggagtcaacggcgcgctggaataggttgcatccgctagagaagcctcgcgagagctacgtggagaagtgtttgcagactagtaaggggccagttattgcatcgactgactacatgaaaagttatgcagaacagattcgcagttatgttgggcgcggttacactgttttaggtactgatggctttggtcgtagtgatactcgtgaaaagttacgacagttcttcgaagtcgatagataccatatagctgtggccgcactcgaagccctatcgaaagaaaacaagattgatgtgagcgttgtagaaaaagccataaacaagtttggaatcgatccagagaaatcccatccggtggaaagtataagacatgggtacagaaatatttgttcctgat

SEQ ID NO: 216393 - DNA, 868 bp, Unknown
  Bacterial polypeptide expressing nucleotide sequence isolated from the Sargasso Sea
agttgatggagagtatcaggcagctaaagcaagagatggcgcgtatgtaagagaaaaattttttggaaaatatgctgaaacttcagaattagtatccagtctttctgataaagacatttggagattgaacagaggagggcatgatcctcataaagtttatgccgcatatgatcgagcaactaagaatcaaggaagtcccacagtcatcattgctaaaactattaaagggtatggtatgggaaaatctggagaaagtgtaaatacaactcatcaaacaaaaaaattagatgttgatgacttaatgtactacagagatcgatttgatgtgccgttgactgacgagcaggtaagaaacattgaatactttagaccagatgaaaaatctcaggagattaaatatttaaaagagagaagaattaaattaggtggatttttaccagaaagatcaacctttgcgaaacctattaaagcaccctcaaaggatatttttgactttatgaaagtatcaactggtgaaaaagaaatgtctacaacaatggctcttgtcagaatgctgactagtttaatgagagataaaaatatctctccaagattagtgcccatcattccagatgaagcaagaacatttggtatggagggtttttttcaaaaaatcggaatttacgcgcatgaaggtcaaaaatatgaaccagaagactctgctcaattaagctcatatagggaggaaaaaagtggacaagttttagaggaaggaattaatgaggcaggtgcaatgtcttcatggattgctgctgcaacagcatatactaatcatgatatcgaaatgatccctatttatactttttattctatgtttggttttcaaaga

SEQ ID NO: 216394 - DNA, 992 bp, Unknown
  Bacterial polypeptide expressing nucleotide sequence isolated from the Sargasso Sea
agttatttggggtagttactgggatgaacttcttgcccgcgacaaatcaggcaagctcattcagcttatgggcgaaaccgtagacggtgaataccagaactgtaaagcgaagggcggtaagtacacccgcgaaaacttctttaacaagtacccagaaacgaaagcgttagtggctaactattcagatgaagacatctggcgcttaaatcgtggtggtcacgatccggttaaggtatttgcagcatatcaaaaagccatcgataccaaaggtcgcccaacggttattcttgcgaaaaccgttaaaggctttggtcttggttcatcgggtgaagcacagaacgtggctcacaacgtgaagaaaatggaagtggaatcgattaagaaattccgtgaccgtttcaacattcctattgaagacgacaaaattgccgatcttccgtactaccgctttccagaagacagtgaagaacttaagtatctgaaagagcgccgtgaggcccttggcggatatcttccagcgcgcagagaacaagcagaagagcagttagaagtaccagagttaaaagcctttgacgctattttaaaagggtcaggcgatcgtcaagtgtcatctactatgacctttgttcgcgtacttaacgcgctgcttaaagataagaaaattggcaagcgcattgtgccaattattcctgatgaagcccgtacattcggtatggaaggtctgttccgtcaggtaggtatttacgctaatgagggacaaaaatacgttccacaagacgccgaccaagtggcttactatcgcgaagataagaaaggccaggtattgcaagagggtattaacgagctaggcgctatggcgtcttgggtagcggcgggtacgtcttactcaacgtgtaacgcgaccactattcctttttatatctactactcaatgttcggtttccaacgtgttggcgacttagcttgggcagcgggtgatagtcaggcccgtg

SEQ ID NO: 216395 - DNA, 929 bp, Unknown
  Bacterial polypeptide expressing nucleotide sequence isolated from the Sargasso Sea
aatggatgaacctgagtcaatgggggcaattggtttagccgctagagaaaatttagataatttaatttttgttattaattgcaatctccaaagactagatggacctgtaaggggtaatggaaaaataattcaagaactggaaggaagttttagagggtctggttggaatgtgataaaagtcatttggggctcttattgggattcgctacttgctaatgataaatcaggccatttagtaaaacttatgaatgagaccgttgatggagagtatcaggcagctaaagcaagagacggcgcctatgtaagagaaaaattttttggaaaatatgctgaaacttcagaattagtgtccagtctttctgataaagacatttggagattgaacagaggaggccatgatcctcataaagtttatgccgcatatgatcaagcaactaagaaccaaggaagtcccacagtcatcattgccaaaactattaaagggtatggtatgggaaaatctggagaaagtgtaaatacaactcatcaaacaaaaaaattggatgttgatgacttaatgtactacagagatcgatttgatgtgccattgactgacgagcaggtaagaaacattgaatactttagaccagatgaaaaatcccaggagattaaatatttaaaagagagaagaataaaattaggtggatttttaccagaaagatcaacctttgctaaacctattaaagcaccctcaaaggatatttttgattttatgaaagtttcaactggtgaaaaagaaatgtctacaactatggctcttgttagaatgttgactagtttaatgagagataaaaatatctctccaagattagttcccatcattccagatgaagcaagaacatttggtatggagggattttttcaaaaaattggaatcctacgcgcatgaa

SEQ ID NO: 216396 - DNA, 958 bp, Unknown
  Bacterial polypeptide expressing nucleotide sequence isolated from the Sargasso Sea
gcaaaatgacgatatgggataccttttacgcaaaatgaatactactgtagatggagattatcaaacactggctgcatcttctggagattacataagacaaaatttctttggacctgaaaaagaacttcagaaattggtcgaacatttagatgataaaactcttacaaaattgagaagaggagggcatgactcaaccaaaatatttgcagcctataaagaagctgtagaacataaaaatcagccgtctgtaattttagcaaaaactgtcaaaggttgggctcttggaaaaggatttgaagctagaaacatgacgcatcaaaagaaatccttagaaaaatctgattggcaatactttagagatttattggaaattccatttactgactcagaattggaagaaatgccttattacaaaccaggaaccgacagtgaagaaatacaatatcttaaagagcgtagagaaaaattaggtggatatttaccaacacgaaaagctacctacagcggattccatatgccaaaaaaagatgcattcactgaattcgataaaggaacaccaaaagaccaggaagtatctacaacaatggcttttgtaagattattacggaatctaatgaaagatgaaaaaatcggagatttgatagtcccaattgtccctgatgaggcaagaacatttggtatggaagccctttttactgaatttaaaatatataatgctcaaggtcaaatatacacgcctgtagattcacaacttcttttaagttataaagaatctgaaagcggtcaaatactagaagaagggatctcagaagctggagctatgagcagtttcactgcagctggaatggcctattctactgttggaaaacctacaattccattttacatatactattcaatgttcggatttcaaagagtcggagaccaaatatggtgtgctgctgactctcgagctaaa

SEQ ID NO: 216397 - DNA, 946 bp, Unknown
  Bacterial polypeptide expressing nucleotide sequence isolated from the Sargasso Sea
agcagatggctcatcaagagctggttatttacttaaaaaagtaattgatgaagcatacacacagggattaactttacctgacactagaactactccttatataaatacaatacctgccagtgcagatattagatcgccgggagatcaaaatttagaaagaaaaattagagcttacataagatggaatgcagctgccatggttgtaaaggcaaataaaaaaaatccagaactaggaggccacatcggtacttttgcttctgcagcaacattatatgacgtcggtatgaatcatttttggagagcaaaaaataataaatttggtggtgatttagtttatttccaaggtcatagcgcaccaggtatgtatgcaagagcttttttagaaggaagaattacagaaaaacaattggataaatttagacaagaagttgagaaaggtggactgtcttcttacccacatccttggttgatgcctaagttttggcagttcccaactgtgtccatgggacttggtcctatgatggcaatctatcaagcaaggtttactaaatatttaataaatagaggtcttttaaaagatcaagataggaaaatttggtgtcatctaggtgatggtgaaatggatgaacctgaaagttttggggctgtagggctagcagcaagagagaaattagataatttgatttttgtaattaattgtaatcttcaaagattagatggacctgtaagaggaaatggaaaaattattcaagaacttgaaggaagatttagagggtcaggttggaatgtgattaaggtaatttggggatcttactgggatcagcttttgtctaaagataaaactggtttactagttaaaagaatgactgaagcagttgatggagaatatcaggcattcaaagcaaaaggtgggtcttacgtaagagagaaattttttggtaatatc

SEQ ID NO: 216398 - DNA, 894 bp, Unknown
  Bacterial polypeptide expressing nucleotide sequence isolated from the Sargasso Sea
ggagatggcgagactgatgaacccgagtcattaggtgcaattggcttagcagctagagaaaaattagataatttgatttttgtagttaattgtaatttacaaagattagacggacctgtaagaggaaatggtaaaataattcaggaactagaaggaatttttagagggtctggttggaatgttataaaagtaatttggggatcatattgggatcagttgttagcaaaagataaaactggtcatttagttaaattgatgaatgaaacagttgatggcgaataccaagcttataaagctagaaatggcctatatgttagagaaaaattttttggcaaatatcctgaaacaaaagaattagtatctgctttatcggacaaagatatatggaggttaaatagaggtggtcatgatccacacaaagtttatgcagcgtatgatcaggcttcaaaaaatgttggaagtccaacagttattatagcaaagactataaaagggtatggaatgggtaaaagtggagagagtgttaataccactcatcagcaaaaaaaaatggatactgatgatttgatgtattacagggataggttcgatgttcctttaaccgacaagcaagttcaagaaattcagtattttagaccagatgaaaattctccagaaataaaatatttgaaggaaagaagacttaatttaggtggctttattccagaaagaacaacttatgctaaaccaattaaggctccaccaaaagatatttttgattcctttaaagtatcaactggacagaaagaaatgtctacaacaatggtttttgttagattattaacaaatttgctaagagataaaaatgttgctccaagacttgttccgataattcctgatgaagcaagaactttt

SEQ ID NO: 216399 - DNA, 1084 bp, Unknown
  Bacterial polypeptide expressing nucleotide sequence isolated from the Sargasso Sea
aaaattattcaagaacttgaaggaagatttagagggtcaggttggaatgtaattaaagtaatttggggatcttactgggatcaacttttatctaaagataaaactggtttactagttaaaagaatgactgaagcagttgacggtgaatatcaggcattcaaagcaaaaggtggtgcttatgtaagagagaaattttttggtaaataccccgaattaaaagacctggtggcaaatatgactgatgcggacatttggaaactaaatagaggcggacatgatcctcataaagtttactcggcttatcatgctgctgttcaatgcaaaggtaagccaactgtcattatagctaaaacaattaaaggttatggaatgggtaaatctggtgagagtataaatacaacacaccaacaaaagaaattagacgaggaagatttgttattttatagagatagatttaatgtgccgcttactgataaacaggttaaaaatattgaatattacaaaccagcagaaaattcaccagaaataaagtatttaaaaaattgtagagttaagcttggtggacacattcctgagagaactacttttgctaaacctgttaaaacaccccctcaagacatctttgaaagttttatgaagtccacgggtgataaggaaatgtcaactaccatggcccttgtaagaatgcttgcgaatttacttagagataaaaatgttgctccaagactagtgccaatcattgcagatgaagcaagaacttttggtatggaaggtttttttcaaaaaattggtatctatgcgcatgaaggtcaaaagtatgaacctgtggactctgagcaattaagttcttacagagaagataaaagtggccaagttttacaagaaggtattacagaggcaggagcaatgtcatcatggattgcagctggaacttcttacacaaaacatgatttagaaatggttcccatttatttattttattcaatgtttggttttcaaagaattggagatttagcatgggctgctgcagattctcagaccagaggttttttgattggagcaacatccggaaaaaacactttag

SEQ ID NO: 216400 - DNA, 907 bp, Unknown
  Bacterial polypeptide expressing nucleotide sequence isolated from the Sargasso Sea
atgaaatctggtaaagattttgatcctatcgaaacaagagagtggatcgaatctcttgatgatgtaattgacgatcagggaactgatagagcatcatttcttttaaatgagttagctaaacacctcatggataagggggcggtaccttcttataatttaacaacaccattcaaaaacacgatcgctcctgaaaatgaggcaatgatgcctggcgatttgtttatggagagaagaattagatcacttataagatggaatgctcttgctaccgttttgagggctaacaaaaatgatgatgagcttggcggacatattgctactttttcttcagcagcaatgctttatgacattggctttaattatttctttagggggcaagaaagcgaaaatgatgatttggtatattttcaaggacattcttcaccaggcatttatgcaagaagttatgttgaaggacgtttaaatgaggaggatttagataactttaggagagaagttgataaaccaggtctttcctcatatccgcatccatggctgatgccagattattggcaatttccagttgtttcaatggggcttggacctatatctgctatttatcaagctcatgtgatgaagtaccttcatgcaaggggcttaaaaaatctaggtgatagaaagatttggggattttggggcgatggtgaaatggatgagcctgaatctttaggagcaattggtttagccgcaagagaaaaattagataatttgatcttcgttattaattgcaaccttcaaagacttgatggtccagtaagaggaaatggaaaagtaattcaggagctagagagacaatttagaggatctggctggaatgttattaaggtagtttggggaaggctttgggatcctattatgcaaaagataa

SEQ ID NO: 216401 - DNA, 913 bp, Unknown
  Bacterial polypeptide expressing nucleotide sequence isolated from the Sargasso Sea
agaactgatgaaccagagtcattaggtgctattggattagccgcaagagaaaaattagataatttaatttttgtaataaattgtaatcttcaaagactagatgggcctgtaagaggtaatggaaaaataatccaagagcttgaaggaatatttagaggagctgggtggaatgttataaaagtcatatggggatcttattgggatcctttattagcaaaagataaatcgggtttattgataaaaagaatgggagaagctatagatggagaatatcaagcatttaaagctaaaggtggagcatatgtaagaaataaattttttgggaaatatcctgaattattagatttagtatcacaaatgacagataaagacatatggaagcttaatagaggcggtcatgatcctcataaggtttatgccgcatattattcagcaatgcaaaatgaaggaacacctacagtcattttagcaaaaacaatcaaaggctatggtatgggaaaatcaggggaaagtataaatataactcatcagcaaaaaaaattggatgaaaatgatttactctactatcgagatagatttgatgtgccactaacagacaaacaggtaaaaaatgttgagtattacaaaccaccagaaaattctccagaaattaaatatttaaaagaatgtagattaaaattaggaggtaatttgccagaaagatcatcttttgcgaaagctattaaaactcctcactcagatatttttagtaacatgaaaaagtcaactggtgaaaaagaaatgtcaactacaatgattttagttagaatgttaacaagtttactaagagataagaatgtagcaccacgtttagttccgatcataccagatgaagctagaacgtttggaatggaaggtttttttcaaaaatagg

SEQ ID NO: 216402 - DNA, 736 bp, Unknown
  Bacterial polypeptide expressing nucleotide sequence isolated from the Sargasso Sea
aatggttagtagtaacgacgatattgatcctgttgaaactaaagagtggttagactccttaagtgcagttttgcaaaatgatggctctgaaagagctcattttttaattaaacaattaattgatcaatcttataaagctggatctaaaattcctcatacacaaactactccttacgttaatacgataccacctgaagaagaaaaaagatcacctggagaccaaaacatagaacgtaagttaagatcattaattagatggaatgctgctgcaatggtagtaagagcaaataaaaaatatcccgaacttggtggccacatagggacatttgcatcagctgcaacattatatgatgttgggatgaatcatttttggagagcaaaaaataacaaatttggaggtgatctagtatattttcaaggtcatagtgcaccaggaatgtacgcaagagcttttctcgagggaagattaaatgaaaagcagttagatagatttagacaagaagtacaaactggtggactttcatcttatcctcatccttggctaatgccaaacttttggcagtttccaacagtttcaatgggtattggtccaatgttagcaatatatcaagcaagatttatgaaatatcttattaatagaggattaattaaagatgaaggaagaaaagtttgggcttttcttggagatggagaaatggatgaacctgagtcacttggggcgattggtttagaaggg

SEQ ID NO: 216403 - DNA, 1087 bp, Unknown
  Bacterial polypeptide expressing nucleotide sequence isolated from the Sargasso Sea
tgcgactgttaccatattaacgaaagataaagaaataggaaaaaacgttgtaccaataattcctgatgaggctagaacttttggcatggaccctctttttaggcagctcggcatatacgcacacaacggccagctttatgagcccgtagattcagaccagtttctttattataaagaatcaaaagatgggcaaattcttgaagagggtataaatgaagccggagccgtatcatcttttatagcggctggaacaagctatagcttaaatggcgtaaacatgatccctttttatatttactattctatgtttgggtttcaaagaatatgggattttatatgggcagcaagcgacatgagagcgagggggtttttaattggaggaacagcaggaagaacaacattaaacggagaagggttgcaacaccaagatggacacagtcatttagcagccgcagtaactccaaacatcaaagcttatgatttatcttatgggtacgaaattgcaacagttgttcattacggattaaaagatatgtatgaaaaaaataacgattgtatttattatattactgtagaaaatgaaaattataaacacccgcaaatacctaaagatgtttctgcggatatcgtaaaaggtttatataaaattaaatcgacaaaaacccccacgattagactgttggggagtgggccgctgatgaatgaaacactaaaagctgcagagctattaaaaaaagactggggagtagagccgggaatttggaacgtaacaagttttagcgaactaagaaaagacgcagaagaaacagaaagatggaacttaattcacccaaacaaaacacagagaaaatcacacattgaaaaatcacttagcaaacacaaagttccaaccgttgctgtttcagattatgttaaaatgttatctgaacaaatagcgccatatgtaccaggccctttttactctcttggaacagacggttttggaagaagcgacacaagagagagccttagacatttttttgaaatagacaggtattatataacgctaaccgctttacgagcactagcagatgaaggggttataaaa

SEQ ID NO: 216404 - DNA, 882 bp, Unknown
  Bacterial polypeptide expressing nucleotide sequence isolated from the Sargasso Sea
gctgccacatcatatactaatcatgatatcgaaatgatcccaatttatattttttattcaatgtttggtttccaacggataggagatctagcttgggcagcgggagatagtcaggctagaggatttttggtaggcgcaacagctggaagaacaacattagctggagaaggtttacaacaccaagatgggcatagtcatttgatagcatcaacaattccaaattgtgtaacttatgatcctacatttcattatgaattagcggtaatttttcgagaaggtctaagaagaatgcatgagaaaaatgagaatgttttttattatattacaacaatgaatgaaaattactcacatccagaaatgccaaaagataaaaattgtgaggaaggcattttaaagggcatgtataaaataaaagaatttaacaaatacaaaaaaactaaaatccaacttttaggatcaggaacaatcttaagagaaatgatgtttgctgcagagattttacaaaatgattatcaaattgacagtgagatatggagtgtaacaagttttaatgaattaagaaaagatggaatggaggtagaaagatttaatcttttgaatcctgataaagaacctaaaaaatcttatgttgagcaatgccttggccaaacagagggcccaattatggctgcatctgattatatgagaatgaattcagatcaaatcagaccttatactaataaaagcttttattcattaggagcagatggttttggaagaagtgatacaagaaaaaatttaagaaaattttttgaggtagataaagaacatttggttgcttatggtttaagtattttagcaaaagaacagcttatttcttccaaacatgcaaaagatgcaatg

SEQ ID NO: 216405 - DNA, 929 bp, Unknown
  Bacterial polypeptide expressing nucleotide sequence isolated from the Sargasso Sea
gaagcattcactgaagggttgtcatcatacccacatcctcgactcatgcctgactattgggaatacccatctgtaagtatggggttgggagcgatgactgcgattcgtcaagcgagattcaatcgctatcttcacaatcgtggattggtggacacctctgagagcaccacttggtatttcatgggagacggggaatcagatgagcctgaatctctctcagaattgacccttgcttctcgagaaaatttggataacatcgtcatggttgtcaactgtaatttgcagcgcttggatggccccgtgcgagggaatagcaagattgtccaagagttggctgcgagatttaccggagcggggtggaatgtcatcaaatgcttgtggggctcaaagtgggatgccttgtttgccaaagatcgtgatggacttttagccgcacgccttgaagcattggctgacggcgatgaacaacgcatcatgacggatgaagggtcggtaattcgagccgaattgttcaattctccagaattggccgaattggtttctgatctctcagatgaggacttagaagatttagcgggcaatgttggcggacatgatcccatcaaagtattcgccgcatataccgcagcccgagcacacaagggtaggcccacggtcatccttgctcgaaccatcaagggttggggacttggaccctcgtttgccggtcgaaattcaacgcatggcaaaaagaaagccgaccaatctgtattgcagtacatgcgggatgaattggggctaacgtttaccgacacacaattagagaaactaccttatttgcaacccgcaaactatcctgaagaagttgaatatcttcttgagagacgcgagaaactaggtggattttgtccagaacgcagaaccccgacagtggatttggaacttcctaa

SEQ ID NO: 216406 - DNA, 917 bp, Unknown
  Bacterial polypeptide expressing nucleotide sequence isolated from the Sargasso Sea
gatgaatgaccttgacccccaggaaaccctggaatggatcgaggccatggaggccgtcattgagcgagacggtttcgaacgagcccagtttcttttacgaaaattggccgatagagccgtaacttccggcgtagatgcgccatatacggcttacaccccgtacctcaacaccattcctccggaactcgaggtccgatcatccgggaatcaggagctggagtctaaaatccgctctatcatccgctggaatgcggctatgatggttatgcgtgccaatcgtgactcttctgaactcggtggccatattgccagttttgcttcttctgccctgctttatgacataggtttcaaccacttctggaatgcccccggtccagaacatggtggggacctggtctacatccagggacattcggctcctgggatctatgcaagggcttttctcgaaggtcggatcacagaagaacagatgaatcacttccgccaggaatctaccggaaaaggagtttcatcctatccccacccctggctgatgccggaattctggcaatttcccacggtctcgatgggtttgggtccgattatggcaatttaccaggcccgctttctaaaataccttcacaaccgtgaattgttggatactgaaccaaggaaagtctggtgctttcttggggacggagaaaccgatgagcctgaatcgatgggtgccatccatctcgcagcccgggaaaaactggacaatcttatttttgtcatcaactgcaatctccagcgactggacggcccagtccgcggaaacggcaaaatcatccaggaactggaaggagagttcaggggcgcaggttggaatgtgatcaaagtcctgtggggttcctactgggatccacttctggccaaagacgaccagggactctttg

SEQ ID NO: 216407 - DNA, 928 bp, Unknown
  Bacterial polypeptide expressing nucleotide sequence isolated from the Sargasso Sea
gatcttttgtctgctgtagtacattccgaaggacctgagagagctcattttttaattaaacaattaattgatcaggcatataaagagggatcaaatataccctacacacaaaatacaccatacataaacaccataccagcagatgaagagataaaatctccaggcgatcaaaatatcgaaagaaaaatcagagcactaattcgatggaattcagcagtgatggttgtgagagcaaacatgagagatccttcattaggaggtcacattgggacatttgcttcagcagcaactctttatgatataggaatgaatcatttttggagggctaaaagcaataaatttggtggagatttaatttatttccaaggacattcagcgccaggtatttatgctagagcttttttggaaggaagacttgacgaaaagcaattagatagattcagacaggaagtttacccaggaggtttgtcgtcttatccccatccatggctgatgcctaaattttggcagtttccaactgtttctatgggtcttggaccaatgatggcaacctatcaggcaagatttatgaaatatcttattaatagaaaattaataaaagatgagaatagaaaagtttggtctttcttaggggatggtgaaatagatgagccagaagctctaggatctattggtttagcagcaagagaaaagttagataacttgatttatgttgtgaactgcaacctacaaagattagatggcccagtaagaggtaatggtaaaataattcaagaattagagggaatttttagaggagctggctggaatgtaataaaagtcatttgggggtcatattgggatcctttacttgcaaatgataaatcaggtttacttgtaaaaagaatgaacgaagcagttgatggagaataccaagccttaaagcaaa

SEQ ID NO: 216408 - DNA, 367 bp, Unknown
  Bacterial polypeptide expressing nucleotide sequence isolated from the Sargasso Sea
atgtcagatttaaatcaaaattattttgaaaaaattacttatagagatgcgttacgtctagctatgcatgatgcaatgaaagaagataaaaaaattatcgtaatgggtgaggatgtagctaattacggaggagcctatggcgcaactaaagatttgttgaaattatttggaaaagaaagggtaattgacacacctatttctgaaccagcaattgtaggtgctgcagttggagctgcaatgtctggtttacgtcctattgcagaattaatgtatgtagatttttttggtatgtccatggatcaaattgcaaatcagttagcaaaaattcgatatatgtttggtggaacaattagtgcaccgatggttt

SEQ ID NO: 216409 - DNA, 782 bp, Unknown
  Bacterial polypeptide expressing nucleotide sequence isolated from the Sargasso Sea
gttggaagccactgaagttgaggaatggacagagtcgctggattctgtattgagggttaatggtcccgcggccaccagccagttactcaggcacctctccgagcacgcacaaagcgcccgagttccgctgcccagcgccattacgacaccttttcgcaacaccatctcgccgcaggacgagcggtccatgccaggtgatctttttatggagcggcgtattcgctccttggtgcggtggaacgcgatggccatggtgatgcgggccaacgacaacgaggacggactgggcggacatatttcaagcttttcatcgagcgcgacgctctatgacgtggggatgaatcacttttttcggggaactgcaaatggccatcccggcgacttggtgtattaccaggggcacagcgcgccggggatgtatgcgcgatcatatctagagggcgtgctcagcgaggcgcaactcgaaaactttcgtcgcgaagtgggtggacaggggctgtcctcatacccccatccctggctaatgcctgactactggcagtttccaactgtttcgatggggcttggcccgatacaggcgatttaccaggctcacgtcatgaaataccagagtaagcggggactgatagatcatcgtgaccgcaaaatttggtgtttcctcggagacggcgagtgcgatgagcccgagtcactgggtgcgattgcgctggcaggtcgggagcgcctcgggaacttgcactttgtcgttaactgcaatttgcagcgccttgatggtcctgtca

SEQ ID NO: 216410 - DNA, 613 bp, Unknown
  Bacterial polypeptide expressing nucleotide sequence isolated from the Sargasso Sea
acgtttactactaccatcaccacgctgaacgaaaactaccacatgccggcgatgccagcaggcgccgaggaaggtatccgtaaaggtatctataaactcgaaaccgttgaaggtagcaaaggtaaagttcagctgctgggctccggttctatcctgcgtcacgttcgtgaagcagcgcagatcctggcgaaagactacggcgtgggctctgacgtgtactccgtcacctccttcaccgaactggcccgtgatggtcaggactgtgagcgctggaacatgctgcacccgctggaaactccgcgcgttccgtacatcgctcaggtgatgaacgacgctccggctgtagcatcaaccgactatatgaaactgttcgccgagcaggtccgtacttatgtaccggctgacgactaccgcgtgctgggtactgatggcttcggacgttccgacagccgtgagaacctgcgtcaccacttcgaagttgatgcttcttatgtggtggtagcggcactgggcgaactggctaaacgtggcgaaatcgataagaaagtggtggcagatgccatcatcaaattcaacatcgatgcagaaaaagttaacccgcgtctggcgtaag

SEQ ID NO: 216411 - DNA, 356 bp, Unknown
  Bacterial polypeptide expressing nucleotide sequence isolated from the Sargasso Sea
aatgaactatgatttaaatttattagaagaaatgtataaaaaaatgcttctaattagaagatttgaagaaaaggctggccaattatatggaatggggcaaattggaggtttctgccatttatatattggacaggaagcagtagttgttggtattcaatctgctcaaattgatggtgatagcattgttacatcatatagagatcatggtcatatgctagcatgcgatatggatcctaaaggtgtaatggcagagcttactggtagaaaagatggttattcaaaaggtaaaggtggatcgatgcacatgttcagccgcgaaaagggtttttttggtggacatggtatagttgcagctc

SEQ ID NO: 216412 - DNA, 801 bp, Unknown
  Bacterial polypeptide expressing nucleotide sequence isolated from the Sargasso Sea
ccgcagccgcatgctgcccctgggatctacgctagagcctacttggaaggtcgactcgataaccaccatctcaaacattatcgtagagagctgcaaggacaaggaggactgagttcctatccgcacccaagaagcatgcctggtttctgggaaatgccgaatgcgtcgatggggctctcaactcctgcggcgatctatcaggcgagattcactaagtatttagaaaatcgcggcttaaagtctaagtctaaatcgaaggtttggtgttttataggcgatggtgaatctgatgaacctgaggtattgggtaccatcaacattgcggctcgagagaaattagataacttaattttcgttattaactgtaatctgcagaggctggacggccctgtacgcggaaatggaaagatcattcaagaattagaaagggtttttcgcggcgcagactggaacgtgattaaggtgatctggggtagtggctgggatggtttgctcgcgagagactcccaaggagtgctcaggaagagaatggatgattgcttagatggcgattatcagatgtattcagttttgccgggagatgttcagcgggagcactgggtagagggaaatccagaacttgaaatgatgatgagctcgttgaccgatgaagaggttaagcagatcaagcgaggcggtcaggatcataaaaaaatatatgcggcattcgatcaagcgaccaaaacagagggtaagcctacggttttattgatcaaaacagtcaagggtgacggaatgggcgctcaaggcaaaaatactgcg

SEQ ID NO: 216413 - DNA, 802 bp, Unknown
  Bacterial polypeptide expressing nucleotide sequence isolated from the Sargasso Sea
atgcgtcccctcgcagagattcaatttggaggatttgcggcacttgccctcaatccgttgttaaataatgccgctcagttaagatggaggtggggggcagaggtgcccttaacagttagaattccattgggagctaaaactagaagcggcccatatcacgcaaatatgattgaatcctggatggctaatgatcctggactgattttggtcgccccaagcaatccacaggatgcatatgatttattgatagagtcccaccaacttccagatcctgtggttttcctagaacacattggactttacggtttgagaggtggattaactggttggggggataatatcaaccaaatggtggatacaaatgctgtccaaaatagggtttcaaaagggcagctctcaattggagaggcgcgggttctaagaggtggtagagatataacaatagtaacatggggagctatggtccatgtggctctaagagcatcagaagaagctgcaaaaaatggaaccgaggtcgaggttatcgatcttagaactctacttccttttgatgcagatacgtgcatccaatctgtaatcaggaccggtagggtgatagttctgcaggaagcccaatggaccgggggtttcgggcacaccgtggccagtaggattgtagaagagtcattttggagattagagtctgcacccgtggtggtgggagcacttgataccccagtacccttctctccaaccttggaagaccatacaatccctagtatggagattgttttgagacatattcggaaatctttggattgac

SEQ ID NO: 216414 - DNA, 865 bp, Unknown
  Bacterial polypeptide expressing nucleotide sequence isolated from the Sargasso Sea
aaacaaggcagaaaaatttggaccttcatgggagatggagagtgtgacgaaccagagtctcttggtgcaataggtttggctgccagagaaaatctagataatttaatttttgttattaactgtaatttacaaagattggacggaccagttagaggaaatggaaaaataatccaagaacttgaaggtacctttagaggtgctggatggaatgttcttaaagttatttggggttcatattgggaccctctcttgcaagctgataaaacaggtttgttaatgaaaagaatggatgaatgtgttgacggtgaataccaagcttttaaagctaaaggtggaaaatatgttagagaaaaattctttggcaagtacccagaactaaaacaactagtttcgaatcttactgatgaagatatttggagattaaatcgaggcggtcatgatcctcataaagtttatgcggcctatgatgctgccatgaagcacaaaggacaaccgacagtaattttaacaaaaacaattaaaggttatggaatgggtaaatctggtgaaagtattaatacaactcaccagcaaaaaaagctcggtttagatgatatgtattattttagagaccgttttgatattccattaacagataagcaagtagaaaatttagaattttatagacccgatgagaaatctgatgaaatacaatatttaaaagaaaaaagagcagctctaggaggctttatcccttcaagatcttcaaattctaaacagattaaaatttcagatccaagtatttttgactcttcaatgaaaagctctggtcaaagggagctttcaactacaatggcactagttgctattttaggtaaaatattag

SEQ ID NO: 216415 - DNA, 482 bp, Unknown
  Bacterial polypeptide expressing nucleotide sequence isolated from the Sargasso Sea
gcgtttactcggcggcggcacgattttacgagaagcggttgcggcggcggagcgtttgagcgctgagtttggggtgagtgcggatgtgtacagcgtgacgagttttaacgagttacgtcgcgattgtgaatccgttgcacgttataatcgctttcatgccaaagcgaaaaagagctgggtgactaagcaattgcaaggtgatgtgagccccattgtggcagcgaccgattacatgaagttgtatgcggagcaaattcgacaagatatcgatgcaccttatactgtgttgggcaccgatggctttgggcgcagtgatagccgagcggcattgcgacgatattttgaagtggatgctgacatgattatttacacggcgttgcgcgcgttggtgaatcaaggcgagtggacgcaagagcaattaacggcggcgaaaaagacattaacggtggatactcgacgtatcgatccggacaaaggttaag

SEQ ID NO: 216416 - DNA, 887 bp, Unknown
  Bacterial polypeptide expressing nucleotide sequence isolated from the Sargasso Sea
gggcctgggcccgctggccgccatctaccaggcgcagttcatgcgctacctggaaaaccgtggcctgatcgagaagtccgaccgcaaggtgtggtgcttcatcggtgacggcgagagcgacgagccggaaaccctcggcgccatcgcgctggccggccgtgaaggcctggacaacctgatcttcgtggtcaactgcaacctgcagcgactcgacggcccggtgcgcggcaacggcaagatcatccaggaactggaaggcgtgttccgtggcggcggctggaatgtcatcaagctgctgtggggcggttactgggatgccctgctggccaaggacaccaacggcgttctgcgcaagctgatgatggaaaccgtcgacggcgaataccagaactgcaaggccttcggcggcgcgtacacgcgcgagcatttcttcggcaagtacccggaaaccgcggcgatggtggccggcctgtccgacgacgacatctggcgcctcaaccggggtggccacgacccgcacaaggtttacgccgcctaccaccaggccgtgaacaccaagggcatgccgacagtgatcctggccaagacggtcaagggctacggcatgggcagcgccggcgaggcgctcaaccccacccaccagaccaagaagctggacgacgaagccgtcaagcacttccgcgaccgcttcaacatcccggtcaccgacgcgcagctggccgacggccaggtgccgttctaccacccgggcccggattcgccggaagtgcagtacctgcaggagcgtcgcgccgcgctgggtggctacctgccgcagcgtcgccgcaaggccaccaagagcttcaacgctccgaagctggaaacctacgagcgcctgctcaagagca

SEQ ID NO: 216417 - DNA, 843 bp, Unknown
  Bacterial polypeptide expressing nucleotide sequence isolated from the Sargasso Sea
agaggtcttctaaaaaatcaagatagaaaaatatggtgtcacttaggtgatggtgagatggatgaaccagaaagttttggcgctgtaggtttagctgctagagaaaaactagataatttaatttttgttgtaaattgtaatttacaaagacttgatgggcctgtcagaggaaatggaaaaataattcaggaattagagggtagatttagaggtgcaggctggaatgtaataaaagtgatttggggctcttactgggatcagcttttgtctaaagataaaactggtttgttaattaaaagaatgaatgaagctgttgacggcgaataccaagccttcaaagcaaaaggtggggcttacgtcagagaaaaattcttcggtaaatatcctgagttgaaggaattagtagctaatatgacagatgcagacatttggaagttaaatagaggtggacatgatccgcataaagtttattcggcttataatgctgctgttcgctgcaaaggaaagccaacggtaataattgctaaaacaattaaaggttatgggatgggtaaatctggtgaaagtataaacactacacaccaacaaaaaaaattagatgaagaagacttactattttacagagatagatttaatgtacctcttactgataagcaggttaaaaatattgaatattacaagccagcagaaaattcacctgaaataaagtatttaaaaaattgtaggcataagcttggtggaaatattcctgaaagaacgacttttgcaaaaccagttaaaacaccacctaaagatatctttgaaagtatcatgaagtctacaggtgacaaggaaatgtctact

SEQ ID NO: 216418 - DNA, 925 bp, Unknown
  Bacterial polypeptide expressing nucleotide sequence isolated from the Sargasso Sea
aaaggatggtgcttacgtaagagaacatttttttggtaaatatccggagactgctgctttggtggagggtatgactgaccaagaaatttttgccttgagaagaggggggcatgacccatcaaaaatttatgcggcctacaagaatgcggagaaaaccacaggtcaaccgacagtcattttggctaagaccgttaagggttatagtatgggagaggctgctgaaggtaagaatgtcgcacatcaggtaaagaagatggatttgaccgcagtcgaacatttgcgaaatcgattacgcctgaatgatttagtttcagatcaagatatctcaagtttaccatatttaaccttcaaagaagattctaaggaacatgaataccttcatgcgcgccgcaaagctttaaagggatatcttccctcaaggcgaacgagatcttcggtcgatgtaaaagtgcctgaattggctgacttcaaatcactcttaacagaacagaagcggcagatttctaccacactcggctttgtgcggctattgaatatcctcctaaaaaatgaggatttcggtaaaaacattgttccaatcgttgctgatgaggcgcgtacttttggaatggaaggtctcttccggcagattggcatttataatccagcagggcagaattatacaccgcaggatcgcgaagcagtttcctattacaaagaagatgaatcagggcaggttttgcaggagggcatcaatgaggctggggccatggcctcctgggtggccgctgccaccagctatagtacgcatgatctgcctatgattccgttttatattttttattcgatgtttgggtttcagcggattggagatttaacctggttggcaggcgatcaacaggcgcgtggtttcctattgggtgctacggccggcagaacgacacta

SEQ ID NO: 216419 - DNA, 916 bp, Unknown
  Bacterial polypeptide expressing nucleotide sequence isolated from the Sargasso Sea
gggagcaattggattagctgcaagagaaaatttagataatttaatatttgtaataaactgtaatcttcaaagattagatggtccagttagaggtaatggaaaaattattcaagagcttgagggaagttttagaggatcaggatggaatgtaatcaaagttatttggggatcatattgggattcattaattgcaaatgacaaatctggtcatttaataaaagctatgaatgagacagtcgatggtgaatatcaagcaatgaaagctaggaatggtgcatacgttagggaaaaattttttggaaaataccctgaaacgctagaattagtatcaagcatgtcagatacagatatttggagacttaatagaggtggtcacgatcctcacaaagtttttgctgcatatgatcaagcgtctaaacatcaaggaagtccaacagtaataattgcaaaaactattaaaggttatggaatgggaaaatcaggagaaagtgtaaatactactcatcaaactaaaaaattagatgttgatgacttgatgtactatagagatcgatttgatgttcctttaacagatgaacaggtaagaaatattgaatactttaggcctgacgaaaaatctccagaaatacattaccttaaagaaaaaagaattaaattaggtggatatttacctgaacgttcaactttcgctaaaccaattaaagcaccctcaaaagatattttcgatttcatgaaagtatcaactggtgaaaaagaaatgtctactactatggccttagtacgaatgttgacaaatttattaagggataaaaatatatctcctagactggttcctattattcctgacgaagcaaggacgtttggtatggaaggattttttcaaaaaatagggatttatgctcatgaaggacaaaaa

SEQ ID NO: 216420 - DNA, 820 bp, Unknown
  Bacterial polypeptide expressing nucleotide sequence isolated from the Sargasso Sea
ccatagaggtcatggtatatttatcgcaagaggaggagatccaaaaaaaatgatggcagaaatcgctggaaaaaaagatggatattgcaagggaaaaggtggctcaatgcatattgcagatatgaaactaggacatttaggagcaaatgctatagttggaggtggaatacctacagttgttggagcaggactaagttctaaatatttagaagaagaaaaagtatcagttgcattttttggagatggagcaatgcaacaaggaattttatatgaaagtatgaatatggcctctctatggaaattacccgtagtattttgttgtatcaataatcaatatggcatgggaacaaagattgacaatgccgctggtcttaaagagttttcgaaaagagcagcttcttttggtttaaatacattacatattgatgatttagatattgagaatgcatatgtcaaatcaaaggaaattattgataaagcaagaaattttgaacctggttttatagaagttgagtgttatagattttttggtcatgcgagaatggataaaagtccctatagaagtgaagaagaagaaatcaagatgagaaagtcagatccaatctcatatgcttctaatcaaatgataaaaaataaaattatgaatgaagatgaaattaaaaaaataaatgaaaaaatttctattgaaatggatgaagcgatggattttgctattaattcacctcttaacaatcataaagaaatttttactgatgtatatgatgaaaatcagcccttgcctattagtgttgaagaaagaataaataaaattttatcttaa

SEQ ID NO: 216421 - DNA, 910 bp, Unknown
  Bacterial polypeptide expressing nucleotide sequence isolated from the Sargasso Sea
aagaacctctgggattggtggtcatatttctacttatgcatctgctgcgacgctatatgaggttgcgtttaatcacttctttaaagggttagagcaccccgatggtcaagatttaattttttttcaagggcacgcttctccaggaatatattcccgcgcttttcttgagggccgtctttcctcaaaaaagcttgataattttagacatgaattatcagatggtggggggctgtcttcatatccccacccatatttaatgcctgatttttggcaattcgcaacagtttcgatggggttagggccaattatgggaatttaccaagcaagatttatgcgatatatgattgatagaggatttataaaagataccggaagaaaggtttttgtttatacaggtgatggtgaaatggatgaacctgagtctctcggagccctaaccttagcatccagagaaaaccttgataatttaatctttgttgtaaattgtaatcttcaaaggctagatggacctgttcgcggtaactcaaaagtgattcaagagctagaaggtgcgtttaggggtgcgggttggaatgttataaaagttatatggggctcagattgggatgaactatttcaaaaagatgcaaatggaacacttgtaaaaaggttgagtgagttagtagatggggatttactaaaatatactgtggagggtggagaatattttagaaaagaattttttggcaaggacccagagctattagaaatggttaaagatttatctaatgaggacttagagcaaatgcttgcaggtgggcacgatcctataaaaatgtattcagcctatcatgaggcaatgcattgtgcaggcaaacccaccgcgattctagcaagaacaattaaaggctatgggctcggacaggctggt

SEQ ID NO: 216422 - DNA, 925 bp, Unknown
  Bacterial polypeptide expressing nucleotide sequence isolated from the Sargasso Sea
cctgaaactacagaattagtttcatcaatgtcagatactgatatttggaggcttaatagaggaggccatgatcctcataaagtttatgctgcatacgataaagcggtcaatcataaaggaagccccacagtcataatagccaaaactataaaaggctatggtatgggtaaaagtggtgaaagtgtaaacactactcaccaacaaaagaaattggatgttgacgatttaatgtattacagagataggtttgatgttccattaacagattctcaagtaaaaaatattgaatatttcaagccagatggaaattctgaagaaattaaatacctaaaaaaaagaagattggaacttggtggatttataccagagagaacatcatattcaaagccgattaaagcaccagttaaagatatttttgattttatgaaaaagtctaccggcgaaaaagaaatgtctacaacaatggcactagtaagaatgttaactaatcttttgagagataaaaatgttgcaccaaaattagttccgattattcctgacgaagctagaacatttggaatggaaggattctttcaaaaaataggtatttatgctcatgaaggtcaaaagtatgaaccagaggactcagcgcaactttcatcttatagagaagaaaaaagtggtcaagtattagaagaaggtattacagaagctggttcaatgtcttcttggatagcagcaggaacagcttatacaaatcatgacattgaaatgataccaatttatcttttctattctatgtttggttttcaaagaataggggattttgcttgggctgcaggagatagtcaagcaagaggctttttaattggtgcgactgcaggaagaaacacacttgcaggagaaggtcttcaaacacaagatggtcatagtcatttgctagcat

SEQ ID NO: 216423 - DNA, 808 bp, Unknown
  Bacterial polypeptide expressing nucleotide sequence isolated from the Sargasso Sea
catgcctaaattttggcagttccctatagtttcaatgggactaggtccaatcatgtcaatttatcaagcaagatttacaaaatacttaattaacagaggtttattaaaagatgaaggaagaaaaatttggacattcttaggagacggagaaacagatgaaccagaatctttaggggccattggattagcggcgcgagaaaaattagataatttaatatttgtgatcaattgcaatttacagagactagacggccccgtaagaggaaacggaaaaattattcaagaactagaaggtatttttagaggagcggggtggaatgtaataaaagttatttggggttcatactgggatcctttattagcaaaagataaaagtggcttgttagttaaaagaatgaatgagtgtgttgatggagaataccaagcttttaaagcaaaaggaggagcttatgtacgggaaaaattttttggtaaatatcctgaattaaaagatttagtatcgacaatgaccgatagagatgtatggaaacttaatagaggtgggcatgatcctcataaggtttatgcagcttatgatgcagccatgaaaactaaaggtcaaccaacagtaattttagccaaaaccataaaaggttatggaatgggtaaatcaggagaaagcacaaatataacgcaccaacaaaaaaaattgggagaagaagatcttctttattatagagatcgttttgatattcctcttactgataagcaagtcagaaacattgagttttataaaacagacgaaaaatctgaggaaataaatatataa

SEQ ID NO: 216424 - DNA, 811 bp, Unknown
  Bacterial polypeptide expressing nucleotide sequence isolated from the Sargasso Sea
gttttagaagaaggtattaacgaagctggttcaatgtcatcgtggattgcagcaggaacagcatattccaatcatgatattgaaatgataccaatttatcttttttactctatgtttggatttcaaagaacaggtgattttaattgggccgctggtgatagtcaagctagagggtttttgataggagcaacagcaggaagaacaacgctcgccggtgaaggtttacaacatcaagatggccatagtcatatgttggcatcaacaataccaaattgtaaatcttatgatccaacatttgcatatgagcttgctgtaattttcagagaaggattaaaaaggatgcatgaaaaaaaagaaaatattttttattatataacaacgatgaatgaaaactatccccacccagcgatgccagtagataaaaactgtgaagacggaatcctgaaaggaatgtataaaattaaagaattctcaaagtataaaaaaacaaaaattcaattaatgggctcaggtacaattctaagagaagtattagctggtgcagaaatattacaaaatgaatatcaaattgatagtgaggtatggagtgtaactagtttcaatgaattggctagagaaggaatggaagctgaaagatataatcttttaaatccagataaaaatcaaaagatatcctatgtagaagaatgtttaggaaaaaaagagggtccaattttagctgcttcagattatatgagaagtcactcagaccaaataagaccttatataaaaaaaaagtttttatactttaggtacggatggtttcggtaga

SEQ ID NO: 216425 - DNA, 325 bp, Unknown
  Bacterial polypeptide expressing nucleotide sequence isolated from the Sargasso Sea
aatgaaaaaactatctaaaagtgaccatttaaaaatattctcatatatgcttaaaattaggcgatttgaggaaagatctgcacaactatatggaatgggccacataggtggtttttgccatctatacataggtcaagaagctgttgtggttggagtattaatgacaattaaaaaaaatgactctgttgtgaccacatacagagatcatgggcacatgattgctagggggctagatccaaaaaaaattatggctgaactaactggaagagctgaaggctattcttctggtaaaggtggttctatgcatatgttttctaaagaaaat

SEQ ID NO: 216426 - DNA, 895 bp, Unknown
  Bacterial polypeptide expressing nucleotide sequence isolated from the Sargasso Sea
aatttatcaagcaagatttactaaatatttaataaatagaggattattaaaagacgaaggaagaaaaatttggtgttttttaggtgatggagaaacagatgagccagaatctttaggtgcaattggtttagctgccagggaaaaattagataatttaatttttgttgttaattgtaatctacagagactagatggccctgtcagaggtaatggaaaaattattcaagaattggagggaatatttagaggagctgggtggaatgtaattaaagttatatggggctcatattgggattctttattattaaaagataaatcaggattattgattaagcgtatgaacgaagcagttgatggagaatatcaagcatttaaagctaaaggtggagcttttgttagagaaaagttttttggtaaatatccagaattattaaacctagtttcacaaatgactgataaagacatatggaaactaaatagaggcggacatgatccgcataaggtttatgcagcataccattcagcaacgcaaaacactggaacaccgactgtaattttagcaaaaacaattaaaggttatgggatgggtaaatctggagaaagcattaacaccacacatcaacagaaaaaattagatgaaaaagatttgttatactatcgtgatagatttgatgttcctctaacagatcaacaagttaaaaatattgaatattataagccacctgacaattctccagaaataaaatatttaaagaaatgtagatttaaattaggtggaaatttacctgaaagatcctcttttgctaaaccaattaaagctcctcctccagatatatttaaagcaatgaaggaatctacaggaaaaaaagaaatgtctacaacaatgggtgtttag

SEQ ID NO: 216427 - DNA, 811 bp, Unknown
  Bacterial polypeptide expressing nucleotide sequence isolated from the Sargasso Sea
atgtcaatctatcaagctagatttaataaatatttaattaacagaggattgttaaaagatgaaggaagaaaaatttggtgcttcctaggagatggtgaaaccgacgaaccagaatctttaggagccataggattagcagctagggaaaaactagataacttaatttttgtagttaattgcaacttacaaagactggatggtccagtcagaggtaatggaaaaattattcaagaacttgaaggaatatttagaggagctggttggaatgtaattaaagttatttggggttcttattgggatcaattgttggctaaagacaaatctggattattaattaaaagaatgggagaagcagttgatggagaatatcaagcattcaaagcaaaaggaggaaaatatgtaagagagaaattttttggaaagtataaagaacttttagatatggtttctcaaatgacagatagagatatttggaaacttaataggggtggacatgatccacacaaagtttatgctgcttatcattctgctatgcagaataaaggcacaccaaccgtaattttagctaaaactatcaaaggctatggaatgggtaagtcaggcgaaagtatgaatacaactcaccaacaaaaaaaattagatgaagaagacttgttgtattatagggatagatttgatgtgcctttaacagatgaacaagtaagaaatattcaatattatagacctgatgataattcaccagaaataaaatacttaaaagaatgtagaattaaattaggtggaaatttaccagagagatcatcatttgcta

SEQ ID NO: 216428 - DNA, 667 bp, Unknown
  Bacterial polypeptide expressing nucleotide sequence isolated from the Sargasso Sea
agctacaatttttaaagaaggtttaagaagaatgcatgaaaaacatgaaaatattttttactacattacaacaatgaatgaaaattattctcatccagagatgcccaaagattgtgaagaaggcatattaaaagggatgtataaaataaaagatttcagtaagaataaaaagaataagattcaactgttgggttcaggaacaattttaagagagatgatggaggctgcagaaattttacaaaatgaatatcaagtagatagtgaagtgtggagtgttaccagctttaatgaattaagaagagatggacttgaaacagaaaggtataatttgcttaatccaggaggagagaaaaaaatctcttacgttgaaaaatgccttggaaaaaccgaaggtcccattttagcagcttcagattatatgagaatgaattctgaccaaattagaccttacataaataaaagtttttattcattgggtacagatggatttggtagaagtgatacaagaaaaaatctaagaaaattttttgaagtcgataaagagcatatagttgcatatggcttaagtattttatctaatgaacaattaattgcttctaaacatgcggtagatgcaattaaaaaatataaaattgataaagataagcctatgcccacaaaattataa

SEQ ID NO: 216429 - DNA, 818 bp, Unknown
  Bacterial polypeptide expressing nucleotide sequence isolated from the Sargasso Sea
gatgattcctatatatattttttattctatgtttggttttcagagaataggagattttgcctgggcagctggtgataaccaaacaagaggttttttaattggagcaactgcaggaagaactacattagctggcgaaggattacagcatggtgatggacatagccatattatgtcatctgtaatacctaattgtaagtcatatgatccaacatttgggtacgaacttgctactatttttagagaaggattatacagaatgtatgaaaagcaagaaaatattttttattacataacaacaatgaatgaaaattatacccacccagcaatgccaaaagagaaaaacattgaagaaggaataattaaaggaatgtatttatttaaagaatttaataattttaagaaaacaaaaattcaatttcttggatctggtacaattttaagggaaatgataaaagcagcagaaatactacaaaaagaatatagaattgatagcaatgtatggagcgtaacaagttttaatgaactaagaaaagaagcacttgaagttgaaagatataatttgcttaacccagataaaaatcaaaaaaaatcatatattgaaaattgtattgcaaataccgagggaccgatattagcggcatcagattacataagattgaatactgatcaaattagaccatttattaataaaagtttttattcattaggaacagatggatatggtagaagtgacacaagaaaaaatttaagaaaattttttgaggtagataaagaacatatcgtaacttatgctttaagtgttctgagcaaagaacaac

SEQ ID NO: 216430 - DNA, 963 bp, Unknown
  Bacterial polypeptide expressing nucleotide sequence isolated from the Sargasso Sea
aggacgcggtggtcatgaccctaaaaaggtatatgccgcataccataaggctatgacgcataaggggcaaccaactgtgattttagccaaaaccattaaggggtatgggcttggtgaggctggtgaagggaaaaatatttcgcatcagcaaaagaaaatgaacgagaaagagttaagagaatttcgagagcacttaaatgttcctatattagatgaagaaattgttgatacgcctttttttagaccaaaagaggggactaaagagtattcatatataatggatcgtcgttctgaattaaaaggtcctgtacctgagagaaaagaacgcatccatgcattcggttataaaccatcttatgaaaagcatatgaaagggtctggagatcgagcattgtcgacaacgatggcgtttgttcggtacttatcagagctattaaaagataaaaaatttggtgatcgtattgtacctattgttccggatgaagctcgtacctttggaatggaggctctgtttcggcaatatgggatttatgctccatttggtcaattatatgagcctgttgatagcgagtctttactatattatcgtgaagaaaaaaacgggcagattttacaagaaggaattaatgaagccggtgcaatgtcgtcttttattgctgcagccacaagttattcaacgcatggagaagtaatgattcccttttatatatattattcaatgtttggttttcaacgtattggtgatttagcttggttggcggcggatatgagatctagaggttttttatgtggtggcacatctgggcgtacaaccttaaatggcgaaggtttacaacatcaagatgggcatagtttattattggcgagtactatcccatccattcaaacatatgataccgcttttggttatgaaattgtgaccatttattatgatggtttgaagcgtatgtatgttgatgatga

SEQ ID NO: 216431 - DNA, 838 bp, Unknown
  Bacterial polypeptide expressing nucleotide sequence isolated from the Sargasso Sea
tgccgcacatcctataccaatcacgacattgaaatgataccaatctatactttttattctatgtttggatttcaaagaataggtgatcttgcttgggcagcgggagacagtcaagcaagaggttttttgataggtgccacagcgggaagaacaactttagctggagaagggttacaacatcaggacgggcatagtcatttgatagcatccacaataccaaattgtgtaagttatgatccaacatttcattatgagttagctacaatttttagggaaggtttgagaagaatgcatgagaaaaaagaaaatgtcttttactatatcacaacaatgaatgaaaattactctcatcctgaaatgcctaaagataaaaaaatagaagaaggaattttaaggggaatgtataaaattaaagaatttaataagtacaaaaaaactaaaattcaacttttaggctcaggctcaattctaagagaaatgatatctgcagctgaaattttacaaaaagattatcaaattgatagtgatatctggagtgtaacaagttttaatgaacttagaaaagatggaatggaggttgaaagatttaatctactaaatccagataaagaaaaaaaaatatcttacgtggaggagagtttaagtaaaacagagggccctataatggctgcatcagattatatgagaatgaattcagatcaaattagaccatataccaataagagcttttattctttagggaccgatggatttggaagaagtgatacaagaaagaatttacgaaaattttttgaagttgataaagagcatctagtagcctatggcttaagtatacttg

SEQ ID NO: 216432 - DNA, 877 bp, Unknown
  Bacterial polypeptide expressing nucleotide sequence isolated from the Sargasso Sea
tttgcatttcttggtgatggagaaatggatgaaccagaatcaaaaggggcgttaacactagcctccagagagaatctagacaatctggtttttgttgttaattgcaacctccagagattagatggtccggtccgcggaaattcaaaaatcattcaagagcttgaagctgcttttagaggtgctggttggaacgttattaaaaatatatggggctcagactgggacgaccttttcgcaaaagacacttctggcgctttgcttaatagggttgaggaggttgtagatggggatctcctaaagtacgttgttgaaggtggcgcgtacatgagagaacatttcttcggggaaaacccagatttaaaagaattagtaaaagacctttctgatgaagaactggaaaaaatgaaagcagggggacacgacccggttaaaatgtactcagcgtataaagaagcaactgctcataaaggatccccaaccgttattttagcaagaacaattaaaggttatggtctaggagaagctggcgaaggaagaaatattactcacaatcaaaagaagctaagtgacaacgagatgatttattttcgtgacagatttaatatccccgtttctgatgatgacgcgaccaaaggaaaatttcaaaagtttgatgacagttctgatgaataccaatacctaatggaacaaagaaaaaagcttggagggcctatcccagtcagggttaatcaaccaaaagcactcaaggttccagatgtatctatttttaaagagctattagatggaactggtgaaagagaagcatccacaaccatgtcttttgttcggctgctttccatattgactaaggataagtctattggtaaaccatgttgtg

SEQ ID NO: 216433 - DNA, 742 bp, Unknown
  Bacterial polypeptide expressing nucleotide sequence isolated from the Sargasso Sea
attgtcaaaaccttacaaagatacagacccacaagaaacccaagagtggattgagtcgatcgacgatgccctagaagagcacggatatgaacgagcgcgctttcttcttgaagagcttattgagtatgcgcaatcaaaaggtgcaaggttaccttttaatacaaatacaccttttataaatacaattctacccaaagaccaacccgattaccctggtgatagagaaatagaaagaaagataaagtcttttgtgcgctggaacgcaatggcgatggttgtaagagcaaataccaacacacctgggattggtgggcacatttccacatatgcatcttcagcaaccctatatgaggttgcttttaaccacttttttaaaggccctgaacacccaaatggtggtgacttaatcttttatcaggggcacgggtctcctgggcaatactcaagggcatatcttgaaggaagattgaccaaagagaaccttgaatcttttagaagagagcttacaccaggtgggctttcttcatatccacacccttatttaatgcctgatttttggcagtttgctacagtatcaatgggtttgggacccattatggcaatttatcaagcaaggtttttaaactatatggtagaccgggaaatgatcaaggaaacaggaagaaaggtttgggcttttcttggtgatggagaaatggatgaaccagaatctaagggcgcacttacacttgcttcaaaggaa

SEQ ID NO: 216434 - DNA, 787 bp, Unknown
  Bacterial polypeptide expressing nucleotide sequence isolated from the Sargasso Sea
ttggaaagaaagattagatccttgattagatggaatgcagcagccatggttgttagggcaaacaaaaaaaacccagaacttggaggtcatattggaacttttgcctcagctgctactttatatgacattggtatgaatcatttttggagagcaaaaaataataaatttggtggagatttaatttacttccaaggtcatagcgcgcctggaatgtatgcaagagcttttcttgaaggcagaattaacgaaaaagaattagaccgttttagacaagaagttaaaccaggtgggttatcttcctaccctcatccctggttaatgccaaaattttggcaatttcccacagtgtcaatgggtcttggcccaataatgtcaatctatcaagctagatttaataaatatttaattaatagaggactgctaaaagatgaaggaagaaaaatttggtgcttcttgggagatggtgaaaccgatgaaccagaatctttaggagccataggattggcagcaagagaaaaactagataacttaatttttgtagtaaattgtaacttacaaagactggatggtccagtaagaggtaatggaaaaattattcaagaacttgaaggaatatttagaggagcaggttggaatgtaattaaagttatttggggttcttactgggatcaattgttagccaaagataaatctggattgttaattaaaagaatgggagaagcagttgatggggaatatcaagctttcaaagcaaaaggaggaaaatacgttagagagaaatttttgg

SEQ ID NO: 216435 - DNA, 829 bp, Unknown
  Bacterial polypeptide expressing nucleotide sequence isolated from the Sargasso Sea
gagaatgttaacaaatttattaagggataaaaatatatctccaagactggttccaattattcctgacgaagcaagaacttttggtatggaaggattttttaaaaaaataggcatttatgcgcatgagggacaaaaatatgaacctgaggatgcagctcaattaagttcttatagggaagataaaagtggtcaagttttagaggaaggtatcaatgaagcaggtgctatgtcttcatggattgctgctgctactgcatatactaatcatgatatcgaaatgataccaatttatattttttactcaatgtttggtttccaaagagtaggagatctagcttgggcagctggggatagtcaggctagaggattcttggtgggtgcaacagctggaagaacaacgttagctggagaaggcttacaacaccaggatggacacagtcatttaattgcatcaactattccaaattgtgtaacttatgatcctacatttcattatgaattagcggtaatttttcaagaaggtctaagaagaatgcatgagaaaaatgagaatgttttttattatattacaacaatgaatgaaaattactcacacccagaaatgccgaaagataaaaattgtgaggaaggcattctaaagggtatgtataaaataaaagaatttaacaaatacaaaaaaactaaaatccaacttctaggatcagggacaattttaagggaaatgatgtctgctgcggagattttacaaaatgattatcaaattgacagtcagatatggagcgtaacaagttttaatgaattaagaaaagatggaatggaggtagaaaga

SEQ ID NO: 216436 - DNA, 864 bp, Unknown
  Bacterial polypeptide expressing nucleotide sequence isolated from the Sargasso Sea
aggtgagaacatgattcctttttatatttattattccatgtttgggtttcagcgcgtgtgggactttatttgggctgccggtgatatgagagctcggggttttttacttggcggaaccgctggcagaaccactttaaatggagagggtttacaacaccaagatggccacagtcacctggccgccgctgctactccaaatattaaagcgtatgacttagcatacgcatatgaaatagctgtagttataaaacatggtataaaagaaatgttttatgagcagaaagatgttatatactatctaacattagaaaacgaaaactatgtacatcctaaaatgcctgaaaaaattgaaaaagatattattaaaggaatgtataaaattagaaccacgaaaaacccaacaataagattacttggaagcggcccacttctaaacgaggtaattgccgcagcagacttattgaaagatgaatggggtatagatcccggtatttggaacgtaacctctttcacggaacttcgtagggaggctgaggaaatagaaaggtggaacctgataaacccagagcagaaacaaaaacaatctcacatagaaaaagctttaaacaaaaacccagtaccaaccatagcggtttcggactatgtgaagatgtcatcagaacaaatctcaccatatgtttcaggcgcatactatgcattgggaaccgatggttttggcagaagtgatacaagggaaaacctaaggcacttttttgaagttgataggcattacattgttcttactgcggttcgggcgttagcaattgaaggtgtcttagaaatgagtatagcaaacaaggtaataaaaaagtataatatagattc

SEQ ID NO: 216437 - DNA, 865 bp, Unknown
  Bacterial polypeptide expressing nucleotide sequence isolated from the Sargasso Sea
gatgaaggaagaagaatgggcttttttaggtgatggcgagatggatgatcctgagtcaatgggagctattggattagctgctagagaaaatttagataatttaatatttgtaattaattgtaatcttcaaagattagatggtccagttagaggtaatggaaaaataattcaagagcttgagggaagttttagaggatctggctggaatgtaattaaagttatttgggggtcatattgggattcattgcttgctaatgataaaactggtcacttaataaaaattatgaatgaaacagtagatggtgagtatcaagcaatgaaagcaagagacggtgcttatgtaagagaaaagttttttggaaaatctcctgaaacattagaattagtctcaagtatgtctgataaagatatatggcgactcaacagaggtggtcacgatcctcataaagtttttgctgcatatgataaagcgaccaaacatcaaggaagcccaacagtgattattgcaaaaactatcaaaggttatggaatgggaaaatcaggagaaagtgtaaatactactcatcaaactaaaaaattagatgttgaagacttgatgtactatagagatcgatttgatgttcccttaacagatgaacaggtaagaaatattgaatattttaggcctgacgaaaaatctccggaaataaaatacattaaagaaaaaagaattaaattaggtggatatttacccgaacgttcgactttcgctaaaccaatcaaagcaccctcaaaagatatttttgatttcatgaaagtatcaactggtaaaaaagaaatgtctactactatggccttagtaagaatgttaacaaatttattaagg

SEQ ID NO: 216438 - DNA, 905 bp, Unknown
  Bacterial polypeptide expressing nucleotide sequence isolated from the Sargasso Sea
tttgatattatccattaatactcaaaacggagagacaaaatcaacgataccttctgtgacagagaagattatccaagaggctgaaaaaagtttagaaccagaaaatcaaattaaaaataataataatttacagaaattagaaacaaaaaaagaggatgaaagaatttctataaatgatagtagtgatatagatcctttagaaaccaaagagtggttagaatctttaaatgcagttgtagattacgcgggcaatgagagagcacattttcttttaagacaattaattgatcaatcatatagaaaaggatctagaatcccatttattcaaaatacaccttacataaatacaattccgccagatgaggaggaaaaatcttcaggggatcaaaatattgagagaaaaataagatctttaattagatggaatgcagcagcaatggtagtgagggcaaacaaaaaatttccagaacttggtgggcacataggtacttttgcatcagctgcaactttatatgatgttggaatgaatcatttttggagagcaaaaagccatcaatttggtggtgatcttatttattttcaaggtcattcagctccaggagtgtattctagagctttcttagagggcagacttacaaaagagcaattagataatttcagacaagaagtaggacctaacggattatcttcatatccccatccatggttaatgcataaattttggcaatttccaactgtatcaatgggtcttggtccgatgttggcaatatatcaagctcgttttatgaagtaccttattaatagaggtttaataaaggatgaaaatagaaaggtgtggacatttcttggagatggagaaatggatgagccagagtcattaggagcatttgcattagcatcaagaa

SEQ ID NO: 216439 - DNA, 756 bp, Unknown
  Bacterial polypeptide expressing nucleotide sequence isolated from the Sargasso Sea
aacatcaggatggtcatagtcatatgctagcttctactatacctaattgtgtatcttatgatccaacatttggttatgaattggcagtaatttttagagaaggattaaagagaatgcatgaaaaaaaagaaaatattttttactacataacaacaatgaatgaaaattatcctcacccagaaatgccaaaagataaaaattgtgaagaagggatattgagggggatgtataaaattaaagaatttaataaatttaaaaaaacaaagatacaattactaggttctggaactatattaagagaaattattgctggtgcagaagttttgcaaaatgaatatcaaatagacagtgaagtatggagtgttacaagttttaacgaattaagaagagacggtatggaaacagaaagatataaccttttaaacccagataaaaaacagaaagtttcatatgttgagaaatgccttggaaaaacagaaggaccaattttatctgcatctgactacatgagaagtcattctgatcaaatacggccatatgtcaaaaaaagtttttattcacttggcactgatggattcggtagaagtgatacaagggaaaatctaagaaaattttttgaagtagataaaaaacatattgtaacctatgcacttagtattctttctaaagaacaattaatagcatcgaaatatgcacaagaagcgatcaaaaaatataatatagaaactgaaaaaccgtttccaagtaaattataat

SEQ ID NO: 216440 - DNA, 882 bp, Unknown
  Bacterial polypeptide expressing nucleotide sequence isolated from the Sargasso Sea
tttaggagctataggcttagctgctagagaaaaattagataacttaatattcgttgtaaattgtaatctacaaagattagatggtccagtaagaggaaatggaaaaataattcaagaattggaaggaatctttagaggtgcaggatggaatgtaatcaaagtcatatggggatcttattgggactcattattaacaaatgataaaacaggtcatcttgtgaaaacaatgaatgaaacggttgatggcgagtatcaagctatgaaagcaagagatggtgcgtatgtaagagaaaatttctttggcaagtatttagaaacaaaagagttggtatcaaatctgtctgataaagatatttggagattaaatagaggtggtcatgacccacataaagtttttgctgcttatgatcaagcttctagaaatgttggaagtccaacagtaataattgctaaaactattaaaggttatggaatggggaaaagtggagaaagtgtgaatacaactcatcaaactaaaaaattagatattgatgacctcatgtattatagggataggtttgatgttccattaactgatagtcaagtaagaaacatcgaatattataaacctgatcaaaaatccccagaaataaaatatattaaagaaagaagactcaagcttggaggttttataccagaaagaaccacttacgctaaacccattaaagctcctccaaaagatatttttgacaacatgaaagactctactggtaaaaaagaaatgtcaactactatggctttagtacgaatgcttactagtcttcttagagataaaaatgtagctccaagattagtgccaattattcctgatgaggcaagaacttttggtatggaaggtttttt

SEQ ID NO: 216441 - DNA, 841 bp, Unknown
  Bacterial polypeptide expressing nucleotide sequence isolated from the Sargasso Sea
attgaaaaaaaatcaaaaacaatacgcatcaacacaaataattacaaaagaaaagcctaagataattcaaactgtaaatgaaggagacattgatccactagagacaagtgaatggcttgagtcactttctgatgttataaaaaaagatggtaatcatagagcacattatttgattaaagaactaattaataaagcatatatggaaggagccaatattccatacacgcaaaacactccttatataaacacgattcctgtaagtgaagagaaaaaatctaatggtgatcagaatattgaaagaagaataagatctttaataagatggaatgccgctgcaatggtagtaagagcaaataaaaaatttcctgaacttggtggtcatattggaacttttgcatcagcagcaactctttatgatgttggtatgaatcatttttggagagctaaaaataacaaatttggaggtgatttagtttattttcaaggccatagtgctccaggcatgtatgcaagagcatttcttgaaggtagattaaatgaaaaacaattagatagttttagacaagaagtaaatcctggtggtttatcgtcttatccacatccatggttgatgccaaatttttggcaatttccaactgtatcaatgggattaggaccgatgttagcaatctatcaagctagatatatgaagtatttaataaaccgaggattaataaaagatgaaggaagaaaagtttggacgtttttgggtgatggagagatggatgagccagaatctttaggtgctattggattagcagcaagagagaaattagataacttaatatttgtagttaattgt

SEQ ID NO: 216442 - DNA, 565 bp, Unknown
  Bacterial polypeptide expressing nucleotide sequence isolated from the Sargasso Sea
tatgaatacaaaaattttaatgccggcattatcaccaactatgactgagggtaatttatcaaaatggctagttaaagttggagatgaagttaaggctggagatgtgattgcagaaatagaaacagataaagcgacaatggaaatagaatctgttgaagaaggttatgtaaaagagttgttatttctaaatggagaaaaagacatacctgtaaatacaccaattgcaattatttcaaattcactgaaaaataaatcgcaagaagaaaaaatacaaattgctgaaatacataaagtggtaaatattgatcaaaaatcagaaaataaatcaactaaagaaaaattagattcagaaattaaaaataaaaaggaaaaaactaattatatatctatgagagaagctattagagatactattgctgaagaaatgcgtcttgataaaaaaatatttctattaggcgaagaggttgctcaatatcaaggagcatacaaagtaacacaaggtttgcttgaagaattcactaataaaaggattattgatacgccaatatctgaacaaggattacag

SEQ ID NO: 216443 - DNA, 451 bp, Unknown
  Bacterial polypeptide expressing nucleotide sequence isolated from the Sargasso Sea
ggttccgataaatcattaggagatttaatatattttcagggccattcatctccaggaatatatgcaagatcttttttagaaggtcgattaacctctgaacagcttgataatttcagacaagagataaaaggtcagggcttatcttcatatccacatccatggttaatgcctgattattggcaatttccaacagtctcaatgggtctagggccaatttttggtatttttcaagctcatgtaatgagatatctagaaaaaagaggcttgattgaatcaattgacaatagaaaagtttgggttttttgtggtgatggagagatggatgaaccagaatcgatgggttctataagtttagccggaagagaaaaactcaataaccttgtatttgttgttaattgtaatttgcagaggctagatggccctgttagaggaaattctaaaattattactg

SEQ ID NO: 216444 - DNA, 913 bp, Unknown
  Bacterial polypeptide expressing nucleotide sequence isolated from the Sargasso Sea
gcagaagagatgagacgtgatagctctgtatttttaatcggcgaagatgttgcagaagcaggtactcctttcaaaattacttctggcctagtggaggaattcggaactcaaagagttattgatactccaatttccgagccaggctttatggggctcgccgttggcgcggctatgaccggatcacggccaattgtggatattatgtttggtgattttctttttttgataatggatcagctttgtaatcaggctgcaaaggcccattatatgtctggtggtaaattaaatgtacctctagttgtccgtacaaaccttggggctaccagaaggtctgcagctcagcacagtcaatcgctgcatgctttagtatctcatattccgggtcttaaggtcgctatgccttcttccgcttatgaggccaaaggcctgcttaaaacagcaatcagagatgataatccggtggtaatatttgaagataaattgatgtatcaagataaagccaatgtgcccgaagatgagtatctaattccctttggagaagccgctgtcctgcaagagggaaaccaggtcaccctaatagggacgtcttcaatgcgacaggtttgtgaagacgctgctcgaattcttgggaatgaagagattagtgttgagataatagatccaagaactttggttccactagatgaaaagacaattttaaattcagcaaaaaaaacaggcagagtaattgtagttgatgaaggtcatcaaaattttggtgttactgcagaaatagcttcgcgcatttctgaaaaggctttttactatctggatgccccggtaattagaatgggggctatggatgttcctgttcctttcagtcctgttttagaggatttgaccgttccaactgccgagaaagttgcttcgaatg

SEQ ID NO: 216445 - DNA, 830 bp, Unknown
  Bacterial polypeptide expressing nucleotide sequence isolated from the Sargasso Sea
tgaaacattagaattagtttcaagcatgtctgatatagatatatggcggctcaatagaggtggacatgaccctcataaagtttttgctgcatatgataaagcaactaaaagtgtaggaagtccaacagttattattgctaaaactattaaaggttatggaatgggaaaatctggggaaagcgtgaatactacacaccaaacaaaaaaattagatgttgacgatttgatgtattatagggatcgctttgacgtccctctaacagatgatcaagtaagaaatattgaatactttaggcctgacgagaaatctccagaaacaaaatacataaaagaaagaagaattaaattaggtggatatttacctgaacgttcgactttcgctaaaccaatcaaagcaccttcaaaagatatttttgatttcatgaaagtatcaactggtgaaaaagaaatgtctaccactatggccctagtaagaatgttaacaaatttattaagggataaaaatatatctcctagattggtcccaattattcctgatgaggcaagaacatttggtatggaaggattttttcaaaaaataggaatttatgcacatgaaggacaaaaatatgaacctgaagattctgctcaattaagttcttatagagaggataaaagtggtcaagttttagaggaaggtataaatgaagctggcgcaatgtcatcatggatagcagctgctactgcatatactaatcatgatattgaaatgattccaatatatattttttattctatgtttggatttcaaaggacaggagatttagcttgggcggctggagatagtcagg

SEQ ID NO: 216446 - DNA, 630 bp, Unknown
  Bacterial polypeptide expressing nucleotide sequence isolated from the Sargasso Sea
tatgtcagatcttaatcaaaattattttgaaaaaattacatatagagatgcacttcgtttagctatgcatgatgcgatgatggaagataaaacaattataattatgggtgaagatgtagctaattatggaggagcttatggtgccaccaaagatttattaaaactatttggaaaagaaagagtaatagatacaccaatttctgaaccagcaatagtaggtgctgcagttggtgctgcaatgtcaggtttgagaccaattgcagaattaatgtatgtagatttttttggaatgtctatggatcaaatagcaaatcagcttgcaaaaattcgctatatgtttggagggcaaattagtgcgccaatggtgctaagaactcagggaggaactggaagatctggaggtgcacaacattctcaaagtctcgagtcttggattatgcatacccctggactttttctaagcatgcctgcaaaacctcatgatgcttatcatttgttaagacatgcccttaaaattgataatccaacaatttttattgagcataaactcctttataattcgactggcacattggataaaagtgataaaataactccttttggaaaagcaaatattttaaaaaagggaaa

SEQ ID NO: 216447 - DNA, 937 bp, Unknown
  Bacterial polypeptide expressing nucleotide sequence isolated from the Sargasso Sea
aacccatcttttaagagacaaaaatatagcacctaggttagtaccaattatacctgatgaagcacgaacttttggtatggaaggtttttttagaaaaattggtatctatgctcatgaaggacaaaaatatgaaccagaggactctgaacaattaagttcttacagggaggataaaaaaggccaagtattggaggaaggtatcacagaaactggggctatgtcttcctttatagctgcagggacctcatacacaaatcatgatttagaaatgataccagtatataccttttactcgatgtttggttttcaacgagttatggatcttatttgggctgcaggagattctcaaacaagaggttttttaataggagcaacatcaggcagaactactttagcaggggaaggtttacaacatcaagatggacatagtcatttgctagcttcaaccattcctaattgtgttagctacgaccctactttcgcatacgaattagcaattatttttagagaaggtctaaaaagaatgcatgataatcaagaaaatattttttattatttaacaacaatgaatgaaaactatgcacatccagaacttccaaaaaattgcgaagaaggcattcttaaaggaatgtacttatttaaacaatttaataacaaaggtaaaataagagttcaacttttagggagcggaacaattttaagagaaatgatttctgcagcagaaatactaagtaaagattatgatattgatagtgatatatggagtgtaactagtttcaatgaattaagaaaagatggtatggaaattgaaagaaaaaatttgcttaatccatcagaaaagcctgaaaaatcatatgtagaaaaatgtttaggtaatagagatggaccaattattgctgcatcagattatatgagaagttttgctgatcaaataaga

SEQ ID NO: 216448 - DNA, 922 bp, Unknown
  Bacterial polypeptide expressing nucleotide sequence isolated from the Sargasso Sea
ttgggggcaattggtttagctgcaagagagaaattagataatctcatatttgtaataaattgtaatcttcaaagactagatgggcctgttagaggtaatggaaaaatcattcaagaattagagggaatttttagaggagcaggatggaatgtgataaaagtaatctggggttcatattgggactcattgttacttaatgataaaactggacatcttgttaaaactatgaacgagactgttgatggtgaatatcaagcaatgaaggccagagacggagcttatgtaagagaaaaattttttggaaaatacgcagaaactaaagaactagtttccagtctttcagataaagatatttggagactaaatagaggtggacatgatcctcataaagtttttgctgcatacgataaagcatctaaaaatattggaagcccaacagtagttattgctaaaactattaaaggttatggtatgggtaaaagcggagaaagtgtgaataccactcatcagaccaagaaattagatattgatgatttaatgtactatagagacagatttgatgttcccttgacagatcaacaggtaaaaaatattgagtattacaaacctgatcaaaattctccagagataaaatatatcaaagaaagaagacttcaattaggtggatttattccagaaaggactacatatgcaaaatcgattaaaactcctcctaaggatatttttgacaatatgaaagtttcaactggtaaaaaagaaatgtctactacaatggcattagtgagaatgctaacaaatctattgagagataaaaatgttgcaccccgactggtccctattattcctgatgaggctagaacatttggtatggaaggcttttttcaaaaagtccgggtatatatgctcatgaagggcaaaaata

SEQ ID NO: 216449 - DNA, 547 bp, Unknown
  Bacterial polypeptide expressing nucleotide sequence isolated from the Sargasso Sea
gcccatcgtcttccgcgggcccacggcgcggcggcgggcgtggcggcgcatcactcgcagtgcttcgccgcgtggtactcgcactgcccggggctcaaggtggtggcgccgtactcggcggaggacgcgcgcgggctgctgaaggcggcgatccgcgacgacaaccccgtctgcttcctcgagaacgagatcctctacggcatgagcttcgacgtctccgaggagtgcaagggcgccgacttcacgctgccgattggcgagtgcaaggtgatgggcatgggcacatgggcacatgggcgcatgtacacgggcatgggcacgtgtgcgcgtgcgtgcgtgtgcatcctcccacgtggacgcgcgcccgtgcacgtgcgcacgcaggtcgagcgcgcgggccctagcatgcaccccatgcatgtaggagtacacacatgtgcatcctctcatgtgcatcctctcatgtgtatggcatgtgcaggtcgagcgcgcgggcaccgacgtgacgctcgtctcgtactcgcgcggcgtgcacacgttgcctgat

SEQ ID NO: 216450 - DNA, 888 bp, Unknown
  Bacterial polypeptide expressing nucleotide sequence isolated from the Sargasso Sea
tctgttttagaaatggtaaaggatttaagtgatgaagatatttacagacttaatagaggtggtcatgacccttataaggtatatgctgcatatcataaagcggttaattcaaaaggtgccccaaccgtaatattagctttaacaactaaggggtatggaactggctcaagagaagctgataacaccacacatcaagtaaagaaattatcgttagaaaatattaaatcttttagagataaatttgatataccaatcccagattccgagatagaaaaattaccttatgttaggccagcagaagattctccagaaattcaatatttaaaaaaaactagaaaagcattaggagggtttattcctagaaggagaacgtcttcagaaattttaaaaatgccaaataaaaaaatatttgaaaaattatatcaatcaagtggtgatagaaaaatttctactaccatggcaattgtgagaattatcacagatttattaaaagataataatattggagaaagagttgttcctattgtcccagatgaagcaagaacttttggcatggaggcgctatttagacaggttggcatatattcatctcaaggtcagaaatatgaaccagaagatgcagataaagttatgtggtacaaagaatctaaagatggtgtcatgctggaagaagggattacagaggcaggagcttttagtgcttggactgctctagcaacagcatatagtaattatgatctccctatgattcctttttatttattttattcaatgtttggatttcaaagagttcatgatttgtcctgggctgcgggtgatgcccaggctagaggttttttaattggagcaacttctggaagaacaacacttaatggtgaaggtttgcaa

SEQ ID NO: 216451 - DNA, 975 bp, Unknown
  Bacterial polypeptide expressing nucleotide sequence isolated from the Sargasso Sea
ctttacgagccggtagactctgaccaatttttatactataaagaagctaaagacggtcaaattttagaagaaggaatcaatgaggctggcgcaatttcatcttttatagcggctggaatgagctatagcaatcatagtgttcatatgatcccgttttatatctattactcgatgtttggctttcagcgagtgtgggattttatctgggccgctggagatatgagagttagagggtttctgcttggaggcacagcaggaagaaccacccttaacggtgaaggcttgcaacatcaagatgggcatagtcacctggctgctgcagcaacgccaaatattaaagcgtatgatcttacatatgcttatgaaatagcggttgttgtaattaaaggtgttgaagaaatggtaaacgaagacaaagatgtcatttattatataacactagaaaatgaaaactatgctcacccgtcaatgccagaaggcatcgaaaaagacatcataaaagggctttataagatgcgttctacgaaaagtccaaagattcgactattgggaagtgggcctttaatgaatgaagtcttgtttgctgcggatttattgaaagaagattggggaatagaacctggagtttggaacgttacaagctttagtgaactaagaagagattcagaaatgacaagtcgttggaacttagtccacccaggctctatgcctaaacaatctcatttggaaaaatgtttaagtgtaaatcgggttccgaccatagcggtatctgactatgtaaaaatggtttctgagcaaatagcaccctatgtccccggttcatactactctcttggaacggacggtttcggaagaagcgatacaagagaaaacctaaggcgcttctttgaaattgacagatattatattgttttaacagctatacgagcactagttgacagtggagagtttgaaaaaaaacatgatagaaaaagt

SEQ ID NO: 216452 - DNA, 912 bp, Unknown
  Bacterial polypeptide expressing nucleotide sequence isolated from the Sargasso Sea
aatgtcttcatggattgcagctggaacggcttatacgaatcatgacttggaaatgataccaatttatattttttactctatgtttggctttcaaagagttggtgatttagcttgggcagctggagactctcaagcaagagggtttttaataggagctactgctggtagaacaacattagcaggagaaggactacagcatcaagatggtcatagtcacttattagcctctaatattccaaattgtgttagttacgatccaacatttgcttatgaaatggcaactatatttagagatggtattaaacgtatgcatgaaaaaaaagaaaatgttttttactatataacagccatgaacgaaaattacactcatcctgaaaaaccaaaaggttgtgaagcaggtattctcaaaggaatgtatttatttaaagaaaataataaaaaaggaaaaactaaagttcaacttttaggatctgggacaatattaagagaaattatttcagcttcaaaaattttatcagatgattatggaattgattcagatgtatggagtgttactagttttaacgagttaagaagaaacggtatggaaacagagagatggaaccttttaaatcctgatgaaaaaatgaaaaaatcttacgttcaaaagtgtttagaaaaaagagatggtcctatcattgctgcatcagattatactagatctttttcagaccaaataagaccttatactgaaaaatcattttattcgttaggaactgacgggtatggaagaagtgatactagaaaaaatctaagaaagttttttgaggtagataaagagcacattgttgcctatacattgagtgctcttgcaaaagaacaattaattgaaactaaacaagcagaaagggcaattaaaaaatataaaataga

SEQ ID NO: 216453 - DNA, 256 bp, Unknown
  Bacterial polypeptide expressing nucleotide sequence isolated from the Sargasso Sea
taccgctaaaactctttatatgtctggagggcaaatgaaagctcctatagtttttcgtggtcctaacggagcagcctctagggtcgcagcacagcactctcaatgttttgccggctggtattcccattgtcctggtttaaaggtagttgctccttattctggggctgatgctaaaggtttgctgaagtcagctattaaagatcctaatcctattgtttttcttgaaaatgagcttttatatggtcaatctgtttga

SEQ ID NO: 216454 - DNA, 883 bp, Unknown
  Bacterial polypeptide expressing nucleotide sequence isolated from the Sargasso Sea
caagagaaaattagataatttaatatttgttattaattgtaatttgcagagactggatggtcccgtcagaggcaatggaaaaattattcaagaactagaaggtatttttagaggagcaggctggaatgtaataaaggttatttggggttcatattgggaccctttaatagcaaaagataaaagtggtttattagttaaaagaatgaacgagtgtgtagatggagaatatcaagcttttaaagctaaaggtggagcttatgttagggaaaaattttttggaaaatatcctgaattaaaagatttagtatcagccatgacagacagagatgtatggaaacttaatagaggaggacatgaccctcacaaggtttacgctgcctatgatgcagctacaaaaactaaaggccaaccaactgtaattttagctaaaactatcaaaggttatggaatgggaaaatctggtgaaagtactaatataacccaccaacaaaaaaaattaggagaagaagatcttctttattatagagatcgatttgatatccctcttactgataaacaggtaaaaaatatagaattttacaaacctgatgaaaaatcagaagaaataaaatatattaaagaaagaagaatgaagcttgggggaaatttaccagagcgtagttcttatgcaaaacctataaaaaaaccttcaaaagatatttttgaaaacatgcttcaatcttcaggagatcgtgaaatgtcaacgacaatggctcttgtaagaatgttaaccaatttgttaagagataaaaatattgctgcaagattggtgccaatcattccagatgaagctcgaacctttgggatggaaggtttttttcaaaagattggtatttatgcacat

SEQ ID NO: 216455 - DNA, 788 bp, Unknown
  Bacterial polypeptide expressing nucleotide sequence isolated from the Sargasso Sea
aatgtcatcatggattgctgctggaacctcttacactaatcatgatttagaaatgattcctatttatttgttttactctatgtttggttttcaaagaattggggacttagcttgggccgcagcagactctcaggcaagaggttttttaattggagcaacatctggaaaaacaactttagctggtgagggtttacaacaccaggatggacatagtcttcttatggcgtctgcaataccaaattgtgtaagttatgatcctacattttcatatgagatggcagttatttttagagatggattaaaaaggatgcacgagaaaaaagaaaatatttattactacataactgcaatgaacgaaaattattctcatcctgaaaagcctgccggttcagatcagggaattttaaaaggattatatttatttaaaaactacaaaggaaagggcaaagctaaagttcaaatgcttggttcaggatcaattttaagagaagttataaaagctgctgagactttatcaaaagattacgggattgactgtaatgtttggagtgctactagtttcaacgaattaaagaaagatggtatggaaattgaaagaagaaatttattaaatccaaaagataagcctaagaaaagttatgtacaaaaatgtttagactcacaagagggcattgtatttgcagcatcagattatataagatcgcatacagatcagataagaccatatcttaacaagccattttatactttaggaactgatggttttggaagaagtgatacaagaaaag

SEQ ID NO: 216456 - DNA, 835 bp, Unknown
  Bacterial polypeptide expressing nucleotide sequence isolated from the Sargasso Sea
tttggaatggaaggattttttcaaaagataggaatttacgcacatgagggtcaaaaatatgagccagaggactctgctcaactaagttcgtataaagaggaaaagagcggtcaagttttagaagaaggaattaatgaggctggagcaatgtcatcgtggatagccgctggaacttcatataccaatcatgatattgaaatgatcccaatttaccttttctattcaatgtttggctttcagagaattggggattttgcttgggcaggtgcggatagtcagtctagaggatttttgattggagctactgctggaagaacaactcttgctggagagggtttacaacatcaggatggtcatagtcatttaatggcttcgactattcctaattgcatatcatatgatccaacatttcattatgagcttgcagtcatttttcgagaaggtttaagaagaatgcatgagaaaaaagaaaatattttttattacattacaactatgaatgaaaattatcctcatccagaaatgccaaaatataaatcatgtgaggagggtattttaaaagggatgtacaaaataaaggagtttaataagtataaaaaaactaaaattcaatttcttggatctggtacaatactaagagaaatgatagctggtgcagaaatattacaaaatgaatatcaaatcgatagtgagatttggagtgtaactagctttaacgaattaagaagggacggtcttgaagtagagagatataatcttctaaaccctgataaagaaccaaaaaaaagctacgtagaaaaatgtttaggtaacgctgaaggaccaattttagcag

SEQ ID NO: 216457 - DNA, 845 bp, Unknown
  Bacterial polypeptide expressing nucleotide sequence isolated from the Sargasso Sea
caataatttaccaatgattccattttatatcttttactctatgtttggttttcagcgtacccatgatttagcttgggctgctggagattctagagcaagaggatttttacttggtgcaacatcaggcaggacaacattaaatggtgaaggtttgcaacatcaggatggacatagtcatattcttgcatcaacaatacctaattgtcgctcatatgatccatgttactcatatgaattgtcagcaataatacaagaaggtataaatgatatgtatgtaaatggcaatgataggtactattacattactttaatgaatgaaaattattctcacccagccaaaccaaaaaaacttaaaaatgaagagattcttaagggagcttataagctgaaagaaaataaaaatacaaaccttagaatattagcttcaggtgttactctaaattttgcattggaagctgaaaaagaacttaaaaattatggtattaatgctgatatttggtccataacaagttttaatgaactgtacagagaaggtatagagatagaaagacaaaatagattaaattcaacatcaaataaatcttatgttgaggattgttttagtgatgaaataccaacaattgcagtttctgagtatcaaaaagcatatccaaatcaaataagagaatggattaatggagagtataagattttaggaacagatggttttggcaggagtgatacaagagaagaattaagagatttttttgaaataagtaaagagcacatagttttaaatagtttattgctgcatgggaaaaagaaagaagcagaaaaatttattaaagattctggtatggttttaa

SEQ ID NO: 216458 - DNA, 913 bp, Unknown
  Bacterial polypeptide expressing nucleotide sequence isolated from the Sargasso Sea
cccacatccttggttaatgccaaaattttggcaattcccaactgtttcgatgggacttggtcctatgatggcaatttatcaggcacggtttacgaaatatttaataaatagaggtcttttaaaagatcaagatagaaaaatctggtgccatttaggtgatggtgaaatggatgagcccgagagctttggcgcagtaggattagcagcaagagaaaaattagataatttaatatttgtaattaattgtaatcttcaaagattagatggtcccgtaagaggtaatggaaaaattattcaagagcttgagggtagatttagagggtcaggctggaatgtaatcaaagtaatttggggctcttactgggatcaacttttatcgaaagacaaaactggattacttgtcaaaagaatgaatgaagctgttgatggtgaatatcaagcatttaaggcaaaaggtggtgcttatgtaagagaaaaattttttggaaaatatactgaactaaaggaattagtagcaaatatgacggatgcagatatttggaaattaaatagaggtggacacgacccacataaagtttattcggcttatcacgctgctgttcgatgcaaaggaaagcctacggtcataatagctaaaacaattaaaggttatggtatgggtaaatctggtgagagtataaatacgatacatcaacaaaagaaattagacgaagaagatttattattttatagagatagatttaacgtgccacttactgataagcaggtaaaaaatattgaatattacaaaccgccagaaaattcaccagaaataaagtatttaaaaaattgcagacataagcttggtggaaatattccagagagaaccacttttgcaaaaccagttaaaacaccgcctcaagatatattgaaa

SEQ ID NO: 216459 - DNA, 835 bp, Unknown
  Bacterial polypeptide expressing nucleotide sequence isolated from the Sargasso Sea
tatttacttaaaaaagtaattgatgaagcttatactcaaggattaattttacctgatacaagaactacaccttatattaatacaataccatcagcggctgatgtcagatctcctggagatcaaaatatagaaagaaaaattagagcctatataagatggaatgcagctgccatggtagtcaaagctaataaaaaaaatccagagttaggtggtcatataggtacttttgcctctgcagcaacattgtatgatgttggcatgaaccatttttggagagcaaaaaataataaatttggtggtgatttagtttatttccaaggccatagcgcaccaggtatgtatgcaagggcttttttagaaggaagaattacagaaaaacaattagataaatttagacaagaagttgagaaaggcggattgtcttcttacccacatccttggttgatgcctaagttttggcagttcccaactgtgtccatgggacttggtcctatgatggcaatctatcaagcgaggtttactaagtatttaataaatagaggtcttttaaaagatcaagataggaaaatttggtgtcatctaggtgatggtgaaatggatgaacctgaaagttttggggctgtagggctagcagcaagagagaaattagataatttgatttttgtaattaattgtaatcttcaaagattagatggacctgtaagaggaaatggaaaaattattcaagaacttgaaggaagatttagagggtcaggctggaatgtaattaaagtaatttggggatcttactgggatcagcttttgtctaaagataaaactggtttattagtaaaag

SEQ ID NO: 216460 - DNA, 873 bp, Unknown
  Bacterial polypeptide expressing nucleotide sequence isolated from the Sargasso Sea
tatcggtttagctgcaagagaaaatttagataacttaatctttgttattaactgcaatcttcaaaggctagatggtcccgtaagaggaaatggaaaaattattcaagaattggaaggtagttttcgaggagctggatggaatgtaataaaagtaatttggggctcttattgggacgcattaatagctaatgataaaactggtcatttagtaaaaataatgaatgaaacagttgatggtgaatatcaagcaatgaaagcaagagatggagcatacgttagagagaaattttttggaaagtattctgaaacaagtgaattagtttctagtttgtcagataaagatatttggagactaaatagaggcggtcatgatccacataaagtttttgccgcatatgataaagcctctaaaaaccaaggaagtcctacagtcattatagctaaaaccataaaaggctatggaatgggaaagacaggtgaaagtgttaatacaactcaccaaacaaaaaaattagatgttgatgatttgatgtattacagagatcgatttgatgtacctttaacagatgaacaagtgagaaatatcgaatattttaaacctgatgataaatcacctgagattaagtatttaaaagagcgaagattaaacttaggtggttttttgccagaaagaacaacttacgctaagccaattaaaacgccatctaaagatatttttgattttatgaaagtttcaactggtgaaaaagaaatgtctaccaccatggctttggtaagaatgttgacaaatttattaagagataaaaatatttcaccacggcttgttccaattatccctgatgaagcaagaacttttggtatggagggattttt

SEQ ID NO: 216461 - DNA, 736 bp, Unknown
  Bacterial polypeptide expressing nucleotide sequence isolated from the Sargasso Sea
tcacttaatcgcttcaacaataccaaactgtatttcatatgatccaacttttcattatgaattagctgtaatttttagggaaggcctaaaaagaatgcatgaaaaaaatgagaatattttttattacattactacaatgaatgaaaattatacacatccagaaatcccaaaagataaaaaatgtgaagatggaatacttaaaggtatgtataaaattaaagagtttaataagtataaaaaaacaaaaatccagtttcttggatcaggaacaattttaagagaaatgatggctggagcagaaatattacaaaaagaatataaaatagacagtgaagtttggagcgtaacaagttttaatgaattaagaagaaatgggttagaagtagaaagatataatcttttaaatccagacaaagagaaaaaaaaatcttatgttgaaaaatgtttagagaatacagaaggacctgtattagcagcttctgattatatgagaatgaactccgaccaaataagaccttatgtgaataagagcttttattcattaggaactgatggatttggaagaagcgatacaagaaaaaatttgagaaaattttttgaagtagacaaagaacacatagttgcttacggattaagtgttttagcaaaagaacaacttttaacatctaaatatgcaacagatgcaattaagaagtataaaattgatactgaaaaattaatgccaacaaaattataa

SEQ ID NO: 216462 - DNA, 855 bp, Unknown
  Bacterial polypeptide expressing nucleotide sequence isolated from the Sargasso Sea
gtcaacaacaatggcattggtgagaatgcttaccaaccttttaagggataaaaatgttgcatctaggttagtacctattattcctgatgaagcaagaacttttggtatggagggtttttttcaaaaaattggtatttatgcacatgagggacaaaaatatgaaccagaagatgctgcgcaattaagttcttatagagaagaaaaaagtggacaggtcttagaggagggaattaatgaggctggggctatgtcatcgtggattgcagctggaacttcatacacaaatcatgacattgaaatgattcctatttatcttttttactcgatgtttggttttcaaagaataggtgacttcgcttgggcaggggctgacagtcaagcaagaggttttttaattggtgctactgctggaagaacaacattagcaggagaaggtttacaacatcaggatggacatagtcatttaatggcatcaactattcctaactgtaaatcttatgacccaacttttcattatgaactagcaactatttttagggatggactaaaaagaatgcatgagaaaaaagaaaatattttttattatataacaacaatgaatgagaactatcctcatcctgctatgccaacagataaatcatgtgaagaaggcattttaaaaggaatgtataaaataaaagaattcaacaaatacaaaaaaactaaaattcaattcttaggctctgggactattctaagagaaatgttagctggtgcagaaatattacaaaaggaatatcaaattgatagtgaagtttggagcgttacaagttttaatgaattaagaagagatggattggaagttgaaaggtataa

SEQ ID NO: 216463 - DNA, 847 bp, Unknown
  Bacterial polypeptide expressing nucleotide sequence isolated from the Sargasso Sea
catgatattgaaatgataccaatttatcttttctattctatgtttggctttcaaagaattggagattttgcttgggctgcaggagatagtcaagcgagaggctttttaattggtgcgactgcaggaagaacaacacttgcaggagagggtcttcaacaccaagatggtcatagtcatttgttagcatcaacaattccaaattgcatttcttatgatccaacattccattatgaattagctgtgatttttagagaaggtttaagaaggatgcatgaaaaaaacgaaaatattttttattatattacaacaatgaacgaaaattactctcacccagcaatgccagatgattgtgagaatggaattctcaaaggaatgtacaaaattaaagagacatcaagttctaaagatgcaaaaattcaattattaggctcaggaacaatactaagagaaatgatggcagcatcagaaattctcaaaaaagaatatcaggtcgatagtgaagtttggagtgttactagttttaatgagttaagaaaaaatggaatggaagtcgaacgatttaaccttctaaatcccgcagaaacaagtaaaaaatcatatgtagaggaatgtttaggcaaacaacaaggtcctatccttacagccactgactatatgagaataaatgctgatcaaataagaccttttacaaaaaagagcttttattcattaggtacggatggatatggaagaagtgatacaagaaaaaacttaagaaatttttttgaagtagataaagaacacatagttgcttatagccttagtgttttagcgaatgaacagcttgttgcatcaaagtatggctgaa

SEQ ID NO: 216464 - DNA, 796 bp, Unknown
  Bacterial polypeptide expressing nucleotide sequence isolated from the Sargasso Sea
tatgagtaaagataatttaagtaaaaaagaacttttgaagcttcaagagaaaatgattttaattagagaatttgaagaagcttgtggtgagaattatgcaaaaggttttattagaggatttcttcatctttatataggtgaagaagcaatagcagtaggtgctatttcttcattggaaaaagaagattatgttgttacacattatcgagatcatgggcatgctttagcacgtggattaagtactgaatctgttatggcagaattattcgggaaatctactggtgtaagtaaagggaaaggaggatcaatgcatttgtttgatgttgaaaaaaattttatgggtggacatgcaatagtaggtgctcaattgcccttagcattaggcattgcattagcatgtaaatataagaaagaaaataatgttgttttagtattttttggtgatggtgcggtaagccaaggaactttccatgaaacattgaacttagcttcactttgggaacttccggtactatttttcttggagaataatctttatggtatgggttctcatgttgaaaatactagagctgaaggtagagatatttattcttcagctgatgcttatggtattcaagcagaaattgttgatggaatgaatgtattggaagtattagatatcacaaaaaaatcactagaaagtatacgaaataatagtaaaccgattttaattgaagcaaaaacttttcgtttttcaggtcattctatggctgatccagcaaaatatagatctaaagatgaattgaattattggttg

SEQ ID NO: 216465 - DNA, 840 bp, Unknown
  Bacterial polypeptide expressing nucleotide sequence isolated from the Sargasso Sea
aattgggctgcggggagatagccaagcgagaggatttttgataggagcaacagcaggaagaacaactcttgctggcgaaggtttgcaacatcaagatggtcatagtcatatgctggcatcaacaattccaaattgtaaatcttatgatccaacttttgcatatgaacttgctgtaatttttagagaaggattaaaaagaatgcatgaaaaaaaagaaaatattttttattacataacaacgatgaacgaaaattatcctcacccagcgatgccagtagataaaaactgtgaagagggaatcttaaaaggaatgtataaaattaaagaattcaccaagtataaaaaaacgaaaattcaattaatgggttcaggtacgattttgagagaagtgttagctggtgcagaaatattacaaaaagattatcaaattgatagtgaagtatggagtgtaaccagtttcaatgaattagctagagaaggaatggaagccgaaagatataatcttttaaatccagataaaagtcaaaaaatatcttatgtagaagaatgcttagcaaaaaaagaaggtccaattttggctgcttcagattatatgagaagtcacgctgaccaaataagaccttatataaaaaaaagtttttatactttgggcaccgatggttttggtagaagcgatacaagagaaaaacttagaaaattttttgaagttgataaagaacatattatttcatatgctctaagtgttctttcaaaagaacaactaattccaacaaaatatgcgaaagaagcaattaaaaaatataaaattgatccagaaaaaccttttccgagcaaaatata

SEQ ID NO: 216466 - DNA, 778 bp, Unknown
  Bacterial polypeptide expressing nucleotide sequence isolated from the Sargasso Sea
agtgttggtcttgctatgaaagaaaaagatacttttactacacatcatcgaggtcacggtatatttattgcaagaggtggtaatccaaaaaaaatgttagctgaaattgctggaaaaaaagatggttattgcaaaggtaagggtggatctatgcacattgcggatatgaaattaggccatttaggagctaacgcaatagttggaggaggaattccaacagttgttggagctggaattagttataaatttcttaaagaaaaaagagtatcagttgctttttttggagatggtgcaatgcagcaaggtattctttacgaaagtatgaatatggcttcgttatggaagctcccagtagtattttgttgtattaacaatcaatatggaatgggcacaaaaattgacgatgcagttggttttaaagatttttcaaaaagagctgagtcatttggattaaattcattgcatataaatgatttagatgtcgagaatgcttaccataaatcaaaagaaataattgaagacgcaagaaaatttaaaccaggttttattgaaattgaatgctacaggttttttggacatgctcgaatggataaaagcccatacagaaatgattgtgaagaaaaagagatgaggaaattggatcccattaattatgccaaaaataaactgattaaagataatatatttaatgaagaagaaattttaaaaattgataatgacattttaaaagaaatggatagcgctatggagtttgccattaaatcacctgttaatgata

SEQ ID NO: 216467 - DNA, 805 bp, Unknown
  Bacterial polypeptide expressing nucleotide sequence isolated from the Sargasso Sea
aggttttttgattggagcacatctggaaaaacaactttagcaggagaaggtttacaacaccaagatggacacagtcttctcatggcatccgcaatacctaactgcgtaagttatgaccctactttttcgtatgagatggcagttatttttagagacggattaaaaagaatgcatgagaaaaaagaaaatatttactactatataactgcaatgaacgaaaattatactcatccagaaaaacctgctggttcagatcagggaattttaaaaggaatgtatttatttaaaaactataaaggaaaaggtaaagctaaagttcaaatgcttggttcaggatcaattttaagagaagttattaaagctgctgagactttatcaaaagattacgggatagattgtaatgtttggagtgctactagtttcaatgaattaaagaaagatggtatggaagttgaaagaagaaatttattaaatccaagagagaagcctaaaaaaagttatgtgcaaaaatgtttagactcacaagagggtattatatttgcggcatctgactatattagatcccatgctgatcaaataagaccttatacgaacaaacctttttacacattaggaactgatggttttggaagaagtgatacgagaaaagaattaagaaaattttttgaggttgataaaaaacatattgttacatacactttaagtgctttggcaaaagagcaattactagaaagtaaacatgcagaaaaagcgattaagaaatacgatatagatcaagaaaaggtatttccaacaaaattataaa

SEQ ID NO: 216468 - DNA, 268 bp, Unknown
  Bacterial polypeptide expressing nucleotide sequence isolated from the Sargasso Sea
tatacttgaagttcaaacttaccgctataaaggtcattcgatgtctgatcctgcaaaatacagaactaaagaagaattggagtcttataaagttaatgatcctataattttagcttctaaagaaattttaaaaaagaaaatattatctaaaaaagatctagaaaaaataaattcagaaatagtccaagaaattagagatgctgcccaatatgcaattgatagcccgtttcctgaggagaaagaattatttactaacgtttatttataa

SEQ ID NO: 216469 - DNA, 628 bp, Unknown
  Bacterial polypeptide expressing nucleotide sequence isolated from the Sargasso Sea
cactaatcatgacattgagatgattccaatttatcttttctattctatgtttggctttcaaagaattggagatttcgcatgggcagctggagacagtcaagcaagaggttttttaattggcgcaacagctggaagaacaactcttgcaggagaagggcttcagcatcaagatgggcatagtcatttactcgcatctacaattccaaactgtatatcttacgatcctaccttccattatgaattagccgtaatttttagagaaggtttaagaagaatgcatgaaaaaaatgaaaatattttttattatattactacaatgaatgaaaattattctcatcctgaaatgccaaaagattgtgaagatgggattctgaagggaatgtataaaataaaagagtcatcaagttcaaaagaagctaagattcaattattgggatctggaacaatacttagagaaatgatggcagcatcagatatactcaaaaaagaatatcaggtagacagtgaagtttggagtgttacaagttttaatgagttaagaaaaaatggaatggaagttgagagacaaaacttattaaacccctcagaaacaaacaaaaaaatcgtatatagaggagtgcttgggaaa

SEQ ID NO: 216470 - DNA, 244 bp, Unknown
  Bacterial polypeptide expressing nucleotide sequence isolated from the Sargasso Sea
agtgtccaaaactgaaatgtccactaagtcttctccgcatggcgttccggctcatgtggtagatggccaggatgtactcgcgacttacgcttttttccgcgagttaactgctcaagttcgggaaggtgccgggccgcagtatgtggacctgcagacgtatcgtttccacgggcactccatgtcggatccggtttccggaacgtatcgctcggtggaggaggtagagcaagccaaagatgagcgt

SEQ ID NO: 216471 - DNA, 415 bp, Unknown
  Bacterial polypeptide expressing nucleotide sequence isolated from the Sargasso Sea
ggaaggtctgcagcaggaggtgagttgtacgaacgagcaactgtattcggcattaaaggtgaaaaagtagacggtatgaatttttttaatgtaagtgagtcagctataagggcaagagaatatatcgaaaaaaattccaagccctacattattgaaatggatacatatagatatagaggccattcaatgtctgaccctggtctttacaggactaaagatgaagtgaataaaatgaaagagatagaccctgtgttaatgatgaaagaaactttattaaatgattataaaattcaagaggacacgattaaagatattgaaagtgatattaagaaacaaattaaagaagtagaaaaattttcacttgagtcgccgcttccagatttaaaagaattatacaccgaggtatatttatgaa

SEQ ID NO: 216472 - DNA, 251 bp, Unknown
  Bacterial polypeptide expressing nucleotide sequence isolated from the Sargasso Sea
ttaccgttacagggggcattcaatgtctgatccagctaaatacagaactcgatccgaggttgacgctgtccgtcaacaaaaagattgtattgaaaatttaaaggaagttttacaagagcaaaaagtaactgatcaagaacttaaaaatattgacggtgaaattaaatcattagtaacgaaagcatcagattttgctttagagagtaaattacctgatgacaatgaattgttaacagatatttatttgtaaa

SEQ ID NO: 216473 - DNA, 637 bp, Unknown
  Bacterial polypeptide expressing nucleotide sequence isolated from the Sargasso Sea
actctttatgatgtaggaatgaatcatttttggagagcaaagaataataaatttggaggagatcttatttattttcaaggtcatagtgctccaggtatgtatgctagagcttttttagaaggcagattaaatgagaaacaattagataaatttaggcaggaagtaaaaccaggtggcctgtcatcatatcctcatccatggttaatgccaaatttttggcagtttccaaccgtatcgatgggtataggaccaatgctagctatttatcaagctaggtttatgaaatatttaattaatcggggattaattaaagatcaaaatagaaaagtttgggctttcattggagatggcgagaccgatgaaccagaatcattgggtgcaattggtttagcagctagagaaaaattagataatttaatttttgtagttaactgtaatttacaaagattagatggacctgtaagaggaaatggcaaaattattcaggagttagaagggatttttagaggatctggttggaatgttataaaagtaatttggggttcatattgggatcaattattagcaaaagataaaactggtcatttagttaaactaatgaacgagacagttgatggagagtaccaagcttacaaag

SEQ ID NO: 216474 - DNA, 796 bp, Unknown
  Bacterial polypeptide expressing nucleotide sequence isolated from the Sargasso Sea
aatcataattttccaatgatgcctttctatatattttattcaatgtttggttttcaaagaattggagatttgatatgggctgcagccgatcaaatgccaagaggttttttaattggtgcaacagctggacgaacaactttagcaggagagggcttgcaacatcaagacggacaaagtcaggtaatcgcctcaaccttcccaaatttaaaatcctatgatccatgttttgcaaatgagttagcagtaattttcgatgaaggaatgagaagaatgatgactgaatgtagggatgaattttattatgttacagttaacaatgaaaaatatactcatccaaaaattgatttatcaaataaagagggaataattaaaggtggttatttattcaaagatctatcaaataaagaattaaatattaatttactaggatctggaccaatatttagagagtgcattgaagcggcaaacatacttaaagaagattatggtattggatcaagattatatagcataactagttattcagaattggaaaaagatgctaagtcaattttaagacaaaacacactttcaccttcaaataaaaaacagaattatcttcaacaactaatatcaaataatgatcctattgttgcgacttctgattatgtgagagcttattcacaattaatttcaagttatactgataataaatttttagctctaggaacagatggatttggaagaagtgatacaagaaaaaatcttagagatttttttgaagtagatagcaagcatattgttgttagttctttgt

SEQ ID NO: 216475 - DNA, 474 bp, Unknown
  Bacterial polypeptide expressing nucleotide sequence isolated from the Sargasso Sea
ttttagaaaatgaaattctatatggtaaatcctttagcgttgaagataaaaaagaatccttggagcctataggtaaggcaaaaattttaagaactggcactgacgtaacaattgtaagttatggtattggagttatgcattccctggaagccgaatctaaacttgctgatatgaaaataaaagcagaggttatcgaccttagaactataagacctattgattttgatacgataatagaatccgttaaaaaaacaaatagatgcattactgtagaagaatcattcccagtttgttccataggaagctacatagcctctcaaataatggttaaagcttttgattatctagatgcacctgttctgagctgttcaggtaaagacgtgccaatgccatacgcagaaaacctagagaaagcagccttaataaccacagatgaaataatatctgctgtaaaagaagtaatatactcttaac

SEQ ID NO: 216476 - DNA, 540 bp, Unknown
  Bacterial polypeptide expressing nucleotide sequence isolated from the Sargasso Sea
tatgagaaaactaaagtttaatgaagcaataagagaatctacatctattttaatgaaaaaaaataaaaatgtaatagttgtaggattaggtgtatctgatccaaaaggaatttttggaacaacttcaaatttacataagttatatggatctaaaagagtttttgaaattcctatatctgagaatgcaattaccggaataattattggagcctctattaatggtatgaggccaattttatcgcatcaaagagttgagttttcattattatctatagaacaaatatttaatcaagctgctaaattattttatatgaccggtggtgctattaatgtacctatagttataagaattatcataggtagaggttggggaaatggtgcgcaacatactcaaagtttagaatctattttttcacatgtacctggacttaaagtagtagtcccttcaaatgcttatgacgctaaaggattactcgctgcatcagttaaagacaacaatccagttgtttttttagaacatcgttggctacacaatacaac

SEQ ID NO: 216477 - DNA, 568 bp, Unknown
  Bacterial polypeptide expressing nucleotide sequence isolated from the Sargasso Sea
tcaaactactccttacgtgaatacgatacctcctgaagaggaaaaaagatcatctggagatcaaaacattgaacgtaagttaagatctttaattagatggaatgctgctgcgatggtagtaagagcaaataaaaaacatcctgaacttggcggtcacataggaacatttgcatcagctgcaaccttgtatgatgttgggatgaatcatttttggcgagcaaagaacaataaattcggaggtgatctagtatattttcaaggtcatagtgcaccaggaatgtatgcaagagcttttcttgagggaagattaaatgaaaaacagttagatagatttagacaagaagtacagactggaggactttcatcttatcctcatccttggctaatgccaaacttttggcagtttccaacagtttcaatgggtattggtccaatgttagcaatatatcaagcaagatttatgaaatacctaatcaatagaggattaattaaagatgagggaagaaaagtttgggcttttcttggagatggagaaatggatgaacctgaatctcttggggcaattggt

SEQ ID NO: 216478 - DNA, 928 bp, Unknown
  Bacterial polypeptide expressing nucleotide sequence isolated from the Sargasso Sea
tgcgcgacgtcttatgctaaccacgatcaaccattgatcccattttatatctattactcgatgttcggccatcagcgtgtgggtgacttggtctgggcggctggtgatattcaggcaaaagggttcctcttgggtgcgacctctggccgcacgacattaaacggagagggcctgcagcatcaggatggccacagccatgttctggccggaacagttccgaatcagcgctcctatgacccaacctacagctacgaggtcgctgtaatcgttcagcatggtctcaagcagatgtatgacgagaatcagagtgtgttttattacatcactttgatgaacgagaattatggtcatccggatatgcctgagggtgcagaagccggcatcatcaagggaatgtatctactgaggccggcggttccgaagatgagacacaccatccgtctgctaggttcgggcacaatcttgagagaggttgaagcggcctgcgaactgctcgctgattttgaagtggcggccgaggtttacagcgcgactagcttcaacgagttgcgtcgtgatggtcagtcggcagctcgctataacctcctgcatccggaagagaaaacggcgcgtattagtcatgttgaggcactgcttggtggttcggacgctcccgttgttgctgcgaccgatcatattcagttgtattcggagcaaattcgtccgttcctcggccggactacctatatcacgctggggacagacggtttcggccgttcggattcgcgaaagaaattacgtgagcactttgaggtggatcgtcgatttgtgaccatagccgcgctgcgagccttatcgatggacggtaagatcgatccgaagatcgttacgaaagcgatcaaggaattcggtatagaccctgatcgtctcgatccggtgatattgtagg

SEQ ID NO: 216479 - DNA, 882 bp, Unknown
  Bacterial polypeptide expressing nucleotide sequence isolated from the Sargasso Sea
actataccatcaacatcagatgtcagatctcctggagatcagaatttagaaagaaaaattagagcttatataagatggaatgcagctgcaatggtggttaaagcaaataaaaagaatccagaattaggtggccacataggcacttttgcatcagcagcaacattgtatgacgttggtatgaaccatttttggagagccaagaataataagtttggtggtgatctagtttattttcaaggtcacagtgcgccaggtatgtatgctagagccttcttagaaggaagaatttcagaaaaacaattagataagtttagacaagaagttgaaaaaggtggtttgtcttcttaccctcatccttggctcatgccaaaattttggcagttcccaacagtgtctatggggcttggtcctatgatggcaatttatcaggctcgctttacgaaatatttaataaatagaggtctattaaaggatcaagatagaaaaatctggtgtcatttaggtgatggtgaaatggatgaacctgaaagttttggtgcagtaggactggcggcaagagaaaagcttgataatttaatttttgtaattaattgtaatctccaaagattagatggtcctgtaagaggtaacggaaaaattattcaagagcttgaaggtagatttagagggtcgggctggaatgtaatcaaagtgatttggggttcttactgggatcagcttttatctaaagataaaactggtttacttattaaaagaatgaacgaagctgttgatggtgaatatcaagcctttaaggcaaaaggtggtgcttacgtaagagaaaaattttttggaaaatatcctgaactgaaggaattagtagcaaatatgacagagcagata

SEQ ID NO: 216480 - DNA, 553 bp, Unknown
  Bacterial polypeptide expressing nucleotide sequence isolated from the Sargasso Sea
gagagagattagatcgttaattagatggaatgcagcagcaatggtagtaagagcaaataaaaagtttcctgagctaggcggccatataggaacatttgcatcagcagcaactttatatgatgtaggaatgaatcatttctggagagcaaagaataataaatttggaggggatttaatttatttccaaggacatagtgcacctggaatgtatgcgagggcatttcttgaaggtagacttaatgaaaaacagttagatagttttagacaagaagttaacccaggaggtttgtcttcttatccgcatccgtggttgatgccaaagttttggcagtttccaactgtatcgatgggactaggacctatgttagcaatctatcaagcgagatatatgaagtatttgataaatagaggtttaatcagagatgaaggtagaaaagtctgggcatttttaggagacggagaaatggatgaaccagagtcattaggagctattggcttagccgctagagaaaaattagataatttaatttttgtagttaactgtaatttacaa

SEQ ID NO: 216481 - DNA, 775 bp, Unknown
  Bacterial polypeptide expressing nucleotide sequence isolated from the Sargasso Sea
attagcaggagaaggtttacaacatcaagatggacatagtcatttaatggcatcaactatcccaaattgtaagtcctatgacccaacatttcattatgagcttgcaacaatatttagagaaggtttgaaaagaatgcatgaaaagaaagaaaatattttttattatatcacaacaatgaatgaaaattatcctcatcctgcaatgccagctgaaaaatcgtgtgaagagggtattttaaaaggaatgtataagataaaagaatttaacaaacataaaaaaaccaaaattcaatttttaggatcaggcacaattttaagagaaatgatagctggtgccgagattctacaaaaggaatatcaaattgatagtgaggtttggagtgtaactagttttaacgaattaaggagggatgggctggaggttgaaaggtataatttattaaatcctgaaaaagaaccaaaaaaatcatatgttgaaagctgtctaggcaaaactgaaggtccaattttagctgcatcagattatatgaggatgaattcagaccagataagaccttatattaataagagcttttactcgttaggaacagacggatttggtcgaagtgataccagaaaaaatttgagaaagttctttgaggttgataaagaacatgtcgttgcatacggactaagtgttttagctaaagagcaattaattgcatctaaatatgctcaagaagcaataaataagtatcaaattgataaagataaaccaatgccgacaaaactataa

SEQ ID NO: 216482 - DNA, 946 bp, Unknown
  Bacterial polypeptide expressing nucleotide sequence isolated from the Sargasso Sea
gtcttcatggattgctgctgccactgcatatactaatcatgatatcgaaatgatcccaatttatattttttattcaatgtttggtttccaaagagtaggagatctagcttgggcagctggagatagtcaagctagaggatttttggtgggtgcaacagctggaagaacaacactagctggagaaggcttacaacatcaggatgggcatagtcatttaattgcatcaactattccaaattgtgtaacttatgatcctacatttcattatgaattagcagtaatttttcgagagggtctaagaagaatgcatgagaaaaatgagaatgttttttattatattacaacaatgaatgaaaattactcacacccagaaatgccaaaagataaaaattgtgaggaaggcattttaaagggaatgtataaaataaaagaatttaacaaatacaaaaaaactaaaatccaacttttaggatcaggaacaattttaagggaaatgatgtctgctgcagagattttacaaaatgattatcaaattgacagcgagatatggagtgtaacaagttttaatgaattaagaaaagatggaatggaagtagaaagatataatcttttgaacccagataaagaacctaaaaaatcttatgttgagcaatgcctgggccaaacagagggcccaattatggctgcatctgattatatgagaatgaattcagatcaaatcagaccttatactaataaaagcttttattcattaggagcagatggttttggaagaagtgacacaagaaaaaatttaagaaaattttttgaggtagataaagaacatttggttgcttatggtttaagtattttagcaaaagaacagcttattacttccaaacatgcaaaagatgcaatgaagaagtataatattgatactaacaaaccaatgccaacaaaattataa

SEQ ID NO: 216483 - DNA, 919 bp, Unknown
  Bacterial polypeptide expressing nucleotide sequence isolated from the Sargasso Sea
ctaaaaggagttatggaaagcgatggtccttctagagctggctatcttattaaaaaaataatagatgaggcttactctgagggattaactttgccagatacaagaacgactccatatattaatactattccagcattagcagatgtcagatctccaggagatcaaaatatagaaagaaaaatacgagcctacataaggtggaatgctgcagccatggtcgtgagagcaaacaaaaaaaatcctgaactgggaggtcacataggaacatttgcctctgctgcaactttatatgacgttggaatgaatcatttttggagagcaaaaaataataagttcggtggagatttaatttattttcaaggtcactgttcacccggaatgtatgctagagcttttttggaaggaagaattaatgaaaagcagttggataggtttagacaagaggtagagcctggcggtctttcatcgtatcctcatccttggttaatgccaaagttttggcaatttacaacagtttcgatgggcctgggcccaatgatggcaatttatcaagcaagatttaccaagtaccttatcaatagagggcttttaaaaaatcaagatagaaaaatctggtgccatataggagacggagaaatggatgaacctgaaagtttaggggcaataggtttggctgctcgagaaaaattagataatttaatttttgtagtaaattgtaatttacaaagacttgatggtcctgtcagaggtaatggaaaaataattcaggaactagagggcagatttagaggtgcaggttggaatgtaattaaagtaatttggggatcatattgggatcctcttttatcaaaagataaaactggtttacttgttaaaagaatgactgaagctgttgatggcgaatatcaggcattttaag

SEQ ID NO: 216484 - DNA, 841 bp, Unknown
  Bacterial polypeptide expressing nucleotide sequence isolated from the Sargasso Sea
gcttgggcaggcgccgatagtcaatctagaggatttttaattggagctactgcaggtagaacaaccttagctggtgagggactacaacatcaagatggccatagtcatttgatggcatcaacgattccaaattgtgtctcatatgatccaacttttcattatgaattagctattatttttagagaaggactgagaagaatgcatgaaaaaaaagagaatgttttttattatattaccactatgaatgaaaattattcacatccagaaatgccaaaagataaaaaatgtgaagagggaattttaaaaggaatgtataagattaaagaatttaacaagcataaaaaaacaaaaatacagtttcttggttctggtacaattttaagggaaatgatagctggtgctgaaattttacagaaagaatataaaatagatagtgaagtctggagtgttacaagttttaatgaattaagaagagatgggctagaaattgaaagatataaccttcttaatccagataaagatcaaaaaaaatcatacgttgaaatatgcctgggtggcactgaaggcccaatattagccgcttcagattatatgagaataaattcagatcagataagaccttatgttaataaaagcttttattctttaggaacagatggatttggaagaagcgacacaaggacaaaattaagaaaattttttgaggtagataaagaacatatagtagcatatggattgagtatattagcaaaagaacagcttcttgcatctaaatatgcaaaggatgcaataaaaaaatataaaattgatactgaaaaaacaatacctacaaaattataaa

SEQ ID NO: 216485 - DNA, 592 bp, Unknown
  Bacterial polypeptide expressing nucleotide sequence isolated from the Sargasso Sea
aatgaagaccgaaattttaatgccctctctatcacccactatggaagaaggtagtctggctaaatggtacgtgagccctggggatagagttaaaccaggtgatatcatagctgatattgaaacagataaggctctaatggaatatgaaagtattgaggaaggtaccattattgaacttattgtgaaggaaggaacagagaatataaaggttaattccttgattgccatacttgaaaccgaaggtgctgaggagattaatataagaaaagtcgacggtatcgagaaatctgagtttgtgactattgataacaacgaagaagttttgagcttagaagataaggttgatagtgaggatacgacttttgaagaaagtgaaagactcaatagagagacaaccgaaagccaagtagtgaatgaattaactgttagggaagccataaatagtgcaatcgctgaagagatgagacttgatgaagatgttttcctgatgggtgaagaggtaggagagtatcaaggagcatataaagtaagccaaggcttgcttgatgagtttggatcggaaagagtaatagatactcctatcactgagcac

SEQ ID NO: 216486 - DNA, 913 bp, Unknown
  Bacterial polypeptide expressing nucleotide sequence isolated from the Sargasso Sea
tatgcttcatctgtcgattggggaagaagctgctgctgtcggtgtaggcgaagtgatgaagtctggagacggttttactacccatcacagaggtcatggtattttccttgcccgtggtgcagacccaaagagaatgatggcagaaataggtggtaaggaaaatggctattgccgtggtaaaggcggttctatgcacattgccgacaacgatcttggacatcttggagctaatgccattgttgggggaggaatttcacatgttgtcggtgccggattaagttatcaatatcttggtaaagaccaggctgcagtagctttttttggtgatggagcaatgcagcagggaggactttatgaaagtatgaatcttgcggcactatggaaacttcccgtcatgttcgtatgtattaataacgaatacggtatggggacacgactagaccgtgcaagtgcttcattggaatttgccaaaagagcagaaacttttggtttaaatggattggaagtggatggattagatgtttctcaggtgctttacaatgctcaagtattgatggatggtgtgcgaaatggacgcccagcatttttaaaggtaaattgctatcgttttcacggtcatgctcgaaaagataagagtcattaccgagaagaggcagaggagcataaaggcagggagaaagacccaattgtccatattgaaaatcaattggttaaaaataaattagtggccactgacgatatagaggagatcaaatcacagattgatattgagatggacgaggccatggagtttgctttaaattcttctgaacctgaaacaattcaaagatttcaagatgtatatgcaccagagtctccagaacctcttcctgtggatgaaagaatacttcaagctctaaggtcctataactga

SEQ ID NO: 216487 - DNA, 903 bp, Unknown
  Bacterial polypeptide expressing nucleotide sequence isolated from the Sargasso Sea
tattttgctcaaaaaagtaattgatgaagcttacacgcagggattaactttgcctgacactagaactactccttatataaacacaatacctgccactgcagatatcagatcgccaggagatcaaaatttagaaagaaaaattagagcttacataagatggaatgcagctgccatggtcgttaaggctaataaaaaaaatccagaattaggtggtcacataggtactttcgcctctgcagcaacattatatgacgttggtatgaatcatttttggagagcaaagaataataagttcggcggtgatttagtttattttcaaggtcatagcgcaccaggaatgtatgcaagagcatttttagagggaagaattacagaaaaacaattagataaatttagacaagaagttgagaaaggcggattgtcttcttacccgcatccttggttgatgcctaagttttggcagttcccaactgtgtccatgggacttggtcctatgatggcaatctatcaagcccggtttactaagtatttaataaatagaggtcttttaaaagatcaagataggaaaatttggtgtcatctaggtgatggtgaaatggatgaacctgaaagttttggggctgtggggctagcagcaagagagaaattagataatttgatttttgtaattaattgtaatcttcaaagattagatggacctgtaagaggaaatggaaaaattattcaagaacttgagggaagatttagaggatcaggctggaatgtaattaaagtaatttggggatcttactgggatcagcttttgtctaaagataaaactggtttactagttaaaagaatgactgaagcagtcgatggtgaatatcaggcattcaaagcaaaaggtggggcttatgtaaggga

SEQ ID NO: 216488 - DNA, 769 bp, Unknown
  Bacterial polypeptide expressing nucleotide sequence isolated from the Sargasso Sea
aaatttagataatttgatatttgtagtgaattgtaatcttcaaagattggatggtccagttcgaggtaatggaaaaattatacaagaattagagggaatttttagaggagcaggatggaatgtgatcaaggtaatttggggttcatactgggatccgctattagcgaatgataaaacaggacatttagtaaaaacaatgaacgaaactgttgatggagagtatcaagcaatgaaggctagagatggcgcttatgtgagagaaaaatttttcggtaaatatctagaaacaaaagagttagtatcaagtctttctgataaagatatatggagattaaatagaggtggacatgatcctcataaagtttttgctgcctacgataaagcatcaaaaaatattggaagtcccacggtagtaattgcaaaaactataaaaggttatgggatgggaaaaagtggagagagtgtgaacacaacgcatcaaacaaaaaaactagatatagatgatttaatgtattacagagacaggtttgatgtgccacttacagataatcaagtaaaaaacatagaatattacaaaccagatcaaaattctcctgagattaagtatcttaaagaaaaaagacttcaattaggtggttttattccggagagaactacgtatgcaaaaccgattaaggctccaccaaaagacatttttgataacatgaaactgtctacaggaaagaaagaaatgtctactactatggctttagttcgaatgcttacaaat

SEQ ID NO: 216489 - DNA, 987 bp, Unknown
  Bacterial polypeptide expressing nucleotide sequence isolated from the Sargasso Sea
agatcttcattcgcaaaacaaataaaagctcctcctaaagaaattttcgataactttatgaaatctacaggagataaagaaatgtcaactacgatggcattagttagaatgcttactgcattattaagggataaaaatatatcaccaagattggttcctatcatcccagatgaagcaagaacttttgggatggaaggttttttccaaaaaataggaatatatgctcatgaaggtcaaaaatatgagcctgtagactcagaacagttaagctcttacagggaagataaaagtggccaagtattagaagagggaataaatgagtcaggagcaatgtcatcttggattgcagctggtactgcttacacaaatcacgatttagagatgataccgatttatattttttactctatgtttggttttcaaagggttggagatttagcgtgggccgctggagactctcaagcaagaggtttcttgattggggctactgcaggaagaactactttagctggagaaggacttcagcaccaagatggtcatagtcatttattagcatcgaatattccgaactgtattagttatgatcctacatttgcttacgaaatggctgtaatattaagagatggactaaaaagaatgcatgagaaaaaagaaaatattttctactacataactgcaatgaacgaaaattattctcacccagaaaagccaaagggttccaatgaaggaattttaaagggaatgtatttatttaaagaaaataacaataagaataaaactaaggtgcagcttttaggttcgggaacaattttaagagaaataattgctgctgcagaaattttatcaaaagattatggtgtagactctgatgtatggagtgtaactagcttcaatgaattaagaaaagacggtatggaaactgagagatggaacttattaaatccaaatgaaaaaaagaaaaaatcatatgttcaaaagtgtttagaa

SEQ ID NO: 216490 - DNA, 1002 bp, Unknown
  Bacterial polypeptide expressing nucleotide sequence isolated from the Sargasso Sea
attggtctggctgcaagagaaaatttagataatttaatttttgttgttaactgtaaccttcaaagattggacggtccagttagaggtaatggaaaaattattcaagaacttgagggaagttttagaggagctgggtggaatgtaataaaagttatttggggatcatattgggactcattgcttgctaatgataaaactggtcacttaataaaaattatgaacgagactgtagatggtgagtatcaagcaatgaaagcaagagacggtgcttatgtgagagaaaagttttttggaaaatctcctgaagcattagaattagtttcaagcatgtcagataaagatatttggagattaaataggggtggacacgatcctcacaaagtttttgcagcatatgataaagcaaccaaaaatcaaggaagtccaacagtaattatcgctaaaactattaaaggttatggaatgggaaaatcaggtgaaagtgtgaatactacccaccaaactaaaaaattagatgttgatgatttgatgtattacagagatcgatttgatgttcctttaacagatgaacaggtgagaaatattgagtactttaggcctgacgaaaaatctccagaaataaaatacattaaagaaagaagaattaaattaggtggatttttacctgaacgatctacttttgcaaaaccaatcaaagcaccaaccaaagatatttttgattttatgaaagtatcgacaggtgaaaaagaaatgtctactacaatggcacttgtgagaatgttaactaatttattaagagataaaaatatatctccaagattagttccaattattccagatgaagccagaacttttggtatggaaggttttttccaaaaaatcggaatttatgcgcatgaggggcaaaaatatgaacctgaggatgcagctcaattaagttcttatagagaagataaaagtgggcaagttttagaggaaggtatcaatgaagcaggtgctatg

SEQ ID NO: 216491 - DNA, 571 bp, Unknown
  Bacterial polypeptide expressing nucleotide sequence isolated from the Sargasso Sea
atgaaaaataattatttaagatttgatgaggcaattaataagacattgcattctgaaatgtttaaaaataagaagacaatttattttggattaggtgcagatgattcatcaagaatttttaataccactaatggattaagagaaaaatatggaaatttaagagtttttgatactccgatatcagaaaattctatgaccggtgtggcagttggcatgtgtttaaatggcttctctacaataatgtctcatcaaagaatggattttttcttattggcaatggatcaattggtaaattcagcagcaaagtggaattttatgtttgggaatcaaaataaaattaatttgacaataagacttatagttggaagaggatggggtcaaggaccaacacactcacaaaatttacaaagttggtttgctcatatacctaatttaaagattgtaagcccttcgtttccttcaacagctgcagcattactatcacaatcaatcagagacccttatccaactttatttattgagaatcgatggtgtcatcaattaaaggagggttttcaatcttataacaaaa

SEQ ID NO: 216492 - DNA, 967 bp, Unknown
  Bacterial polypeptide expressing nucleotide sequence isolated from the Sargasso Sea
aaaaattattgaagaaaaattaccaccagatactgaaaaaattattaatgaagcagaaaaaactttaatactaaaaaaagaagtagttgagaaaaaagataaaaaaattaataatgaaattagcaaaattcaaattactaaagatggcgatattgatcctatcgaaacaaaagaatggttagagtcactttcagcagttctgcaaaatgacggaaaaaatagagctcaatttttaataaaacaattaattgagcattcttacaaagaaggttcagatttagttttatcaagaaatacaccatatataaattcaatacctcccgaagaagaacaaaaatctcctggagatcaaaatcttgagagacgaataagatcattaatcagatggaatgctgcagcaatggtagtcagagcaaacaaaaagaatccagaacttggtggtcatataggaacatttgcatcagcagctactctttatgatgttgggatgaatcatttttggagggccaaaaataataaatttggtggagatttaatttattttcaaggacatagtgctcctggaatgtatgccagagcatttctcgagggaagaattacttcaaaagaactagataaatttagacaagaagttgatcctggaggactttcttcttatcctcatccttggctaatgccaaagttttggcagtttccaactgtttcaatgggacttggcccaataatgtcaatttatcaggcaagatttaataaatatttaattaatagaggtcttttaaaagatgaaggaagaaaaatttggtgtttcttaggagatggagaagctgacgaaccagagtcattaggagcaattggcttagcagctagagagaatttagataatttaattttcgtagttaattgcaatcttcaaagattagatggccctgtaagaggaaatggaaaaatcattcaagaattagaggga

SEQ ID NO: 216493 - DNA, 726 bp, Unknown
  Bacterial polypeptide expressing nucleotide sequence isolated from the Sargasso Sea
atggtttcaaaggcaaataagaattttgcaggattaggtgggcatatctctacatacgcctctgctgcaagtttatacgaagtaggtttccatcatttcttcaaaggtaaagagcaagggattggtgatttcatttattaccagggtcatgcttcacctggaatatactcaagagcttatctagaaggacgtctaaatgaaaaacagctggaccatttccgaagagagtcctttgcagatggattatcaagttatccacatccaagattaatgcctgatttctgggagtttccgacagtgtctatgggattagggcctactaatgcaatttatcacgctagatttctcagatatcttcaagaaagaggtattgcagatacatcaaacagcagagtatgggccttccttggtgatggggagtgcgatgagcctgaaacactacatgcattacatttagcccacagagaaaaattagataatcttacttttgttgttaactgtaatttgcaacgattggatgggcctgttaggggtaacggaaagattatacaggaacttgaagcaatattcagaggttctggatggaatgttatgaaagttctgtggggcagagattgggatcctttattacaaaaagacgaaatgggtcacttactcaaaagaatgaatgaaactgtagatggagactatcaaacattagctgcatcatctggcgattatatcaga

SEQ ID NO: 216494 - DNA, 925 bp, Unknown
  Bacterial polypeptide expressing nucleotide sequence isolated from the Sargasso Sea
ttcaagagcatttcttgaagggcgcttatcaaaagaaaatgttcataattttagaagagagctttcagaagaaggaggcttgtcttcatatccacacccatacttaatgcctaagttttggcagtttgcaacggtttctatggggcttgggccaataatggcgatatatcaagcaagatttatgcgctatatggtagatcgtggctttattgaagaaacagggcgaaaagtgtttgcatatttaggtgatggtgaaatggatgaaccagagtcaaaaggagcgttaacacttgcctcaagagaagagctagataatttaatatttgtgataaactgcaaccttcaaagattagatggtcctgttaggggaaactcaaaagttatacaagagctagagggtgcatttcgtggtgcagggtggaatgttataaaagttatttggggttccgggtgggacgacctacttagtaaagacagcaaaggtttattactttctaggatggaagaggttgttgatggtgacttgttgaaatacactgttgaaggaggttcttattttagagaacattttttcggaaagagtcaaggcttgcttaaccttgtaaatcacctaacagacgaacagttagaagagttaaaacccggaggtcatgacccagagaaagtttatgccgcttttaatgaagcgataaatcacaaaggagcgccgtcagtaatattggcgagaacaattaaaggatatggcatgggcgatgctggtgagggtaaaaatataacccacaatcagaaaaagttagacgaaaaatcccttgtctactttaaaaacagatttaaaatggacatgggcgataaaaaagcacaagatgcggaaatatttgaattgcacaaagaaacagaagagtttaaatacttaattgagaaacga

SEQ ID NO: 216495 - DNA, 899 bp, Unknown
  Bacterial polypeptide expressing nucleotide sequence isolated from the Sargasso Sea
gatgggagaatatcaagcaatgaaagcaagagatggagcttatgttagagagaaattttttggaaaatatcctgaaacttcagaactagtttctaatctttcagataaagatatttggaggctaaacagaggtggtcacgatcctcacaaagtttatgctgcatacgataaagcaatgaggaataaaggaagtcctacagttataattgccaaaactatcaagggatatggaatgggaaaatcaggagaaagtgttaacacaacccatcaaacaaaaaagttagatgttgatgatctaatgtactacagagaccgttttgatgttcccttaacagatgagcaggtaagaaatatcgaatactttaggccagatgaaaattctccagaaattaagtatttaaaagaaagaaggttaaaattaggtggatttttaccggagagatctacttttgcaaaaccaattaaagcaccttcaaaaaatatttttgattttatgaaggtttctacaggagaaaaagaaatgtccacaacaatggctttagtcagaatgcttactagcctaatgagggataaaaatatttctccaaggttggttccgattatacctgatgaagcaagaacttttggtatggaaggtttttttcaaaagattggaatttatgctcatgaaggacaaaaatacgagccagaagatgcagctcaattaacctcatatagagaagaaaaaagtggacaagtgttagaggaaggtattaacgaggcaggagcaatgtcatcatggattgctgctgcaacagcctacacaaatcatgatatcgaaatgataccaatatatactttttattctatgtttggattccaaagaattggagatcttgcatgggctgctggagacagtc

SEQ ID NO: 216496 - DNA, 896 bp, Unknown
  Bacterial polypeptide expressing nucleotide sequence isolated from the Sargasso Sea
tatgagagcaaatcttgtattaaaaaagttaattgatcatgctcatagcttgggtctgaacgctatatcaggagttaatactccgtatctcaatacccattcattaggtgaacctgcagctacggctttgccaaatgattttagtgtgtgcgaccgtattttgtcttacacgcgctggaacgccttagccatggtaatgcgatcgggtaggatatcatctgaacttggcggccacttggcgacttattgttcgtcggccactttgtttgaggtcggttttaattatttttttcgctcctcatgttctgagcacaatgcagacgttgttttttttcaaggtcacgcgtcaccgggtgtctatgcccgagcgtttcttgagggcagattcagtgaagaccagctcattaattttcgtcaagaagcatttaatgatggattatcatcttaccctcacccgtggttgatgccttctttttggcaaatgcctactgtttcaatgggactggggcctttaactgccatttatgtggctcaatttttcaagtacatggctgcaaggcgtataggaagaacggagtctcagcgtgtatgggctttttgtggagatggtgagttaggtgagccagagtccttgggagcgcttaatattgcggccagagataagttagataacttgattatagttgtgagttgtaatttacaacgacttgacggacctgtttctggtaatggtcagattattcaagaatacgaaggtgtttttcgtggtgccggttggaatgtcataaagttaatatggggttctgattgggaagaattgttacaaaaagatacctctggtattttacagaaaagaatggaagagttggttgatggcgaacaacagagctatgcca

SEQ ID NO: 216497 - DNA, 553 bp, Unknown
  Bacterial polypeptide expressing nucleotide sequence isolated from the Sargasso Sea
atgagagaacttagcctttcgcaagcagtcaacgaggctatcgccgaagagatgcgtcgagatcccaaagtaatactcatgggtgaggatgttgcggaagctggtacaccattcaaagttttatccggtttagtggaagagtttggaactgaacgtgttatagatactcccatatcggaaccaggattttccggcatcgctgtaggcgcagcaatgactgggttgaggccaattgtagacttgatgtttggagactttttgtttcttgtaatggatcaaatttgtaaccaggcggctaaaactcattatatgtctggtggaaagctgaaagtgcctatggtattgcggaccaaccttggtgcgacaagaagatctgctgctcaacatagtcaatctttgcacgcactagtggcacacatacctggcttgaaggtagctatgccttcatccgcctatgaggcaaaggggcttttgaaatctgcagtcagagataacaatccggtagtaatctttgaagataaactaatgtatcaagataaggctaatgttcctg

SEQ ID NO: 216498 - DNA, 961 bp, Unknown
  Bacterial polypeptide expressing nucleotide sequence isolated from the Sargasso Sea
aaagaaagaagaacttcaattaggaggatttatcccagagagaactacttatgcaaaacccattaaagctcctccaaaaaatatttttgacaatatgaaagagtcaacaggtaaaaaagaaatgtcgactacgatggcattagtaagaatgcttactaatcttctgagagataaaaatgttgcctcaagattagtaccaatcattcctgatgaggcgagaacatttggtatggagggtttttttcaaaaaattggtatttatgctcacgagggacaaaaatatgaacctgaggactcagcacaattaagttcatatagagaagaaaaaagcggacaagttttggaggaaggaattaatgaggcaggtgcaatgtcctcatggattgctgcaggcacttcatacacaaatcatgatattgaaatgatccctatctatcttttttactcaatgtttggttttcaaagaataggtgattttgcttgggcaggagcagacagtcaatcaagagggtttttaattggtgccactgcaggtagaacaacattagcgggagaaggtttacagcaccaagatggacatagtcatttaatggcatcaactattccaaactgtaagtcttatgatccaacatttcattatgaactagcaacaatctttagagaaggattgaaaagaatgcatgagaagaaagaaaatattttttattacattacaacaatgaacgaaaattatcctcatcctgctatgccaactgaaaaatcatgtgaagaaggcattttaaaaggaatgtataaaattaaagaatttaacaaatataaaaaaactaaaattcaatttctaggatcaggcacaattttaagagaaatgatagctggtgcggagatactacaaaaggaatatcaaattgatagtgaagtttggagcgttactagttttaatgatttaggagagatggcttag

SEQ ID NO: 216499 - DNA, 928 bp, Unknown
  Bacterial polypeptide expressing nucleotide sequence isolated from the Sargasso Sea
aatgaaggataaaacgggacttctaataaaaagaatgaacgaatgcgtggatggagaatatcaggcctttaaggcaaaaggtggtgcatatgttcgagaaaagttttttggaaagtacgaagatctgaaagatttagtctcaacaatgacggatcaggatatttggaaattgaatagaggtggacacgatccacataaagtgtacgcagcctatcacgctgcaatgcaacacaaaggttccccaactgttatattagctaaaacaatcaaaggttatggtatgggaaaatctggtgaaagtataaacacaacacatcaacaaaaaaaacttgatgaacaagatcttctttactacagagacaggtttgatgtccctctaactgataagcaagtcaagaatattgaatattataaaccgagcgaaaattcagaagaaataaaatatctcaaagacagaagagcaaaacttggtggatttattcctgaaagatcctcattcgcaaaaccaataaaatctccaccaaaagatatcttcgatagttttatgaaatcaactggtgacaaagagatgtcaacaacaatggctttagtaagaatgcttacagcgttattaagggataaaaatgtttcaccaagattggtcccgattattccagatgaggctagaacttttggtatggagggatttttccaaaaaataggtatatacgcacatgagggccaaaaatatgagcctgtggactcggagcagctgagttcttacagagaggataaaagtggtcaagttttagaagaaggtattacagagtcaggcgcgatgtcttcatggatagccgctggaactgcatatacaaatcatgatttggaaatgataccaatttatattttttattcaatgtttggatttcaaagggtcggtgatttagct

SEQ ID NO: 216500 - DNA, 841 bp, Unknown
  Bacterial polypeptide expressing nucleotide sequence isolated from the Sargasso Sea
cctcttatcccacccttggttgatgccaaagttttggcagtttcctacagtgtttatgggtctaggacctattatgtcaatctatcaagctagatttaataaatacttaattaatagaggattgttaaaagatgaaggtagaaaaatttggtgcttcctaggagatggtgaaactgatgagcctgagtctttaggagctataggtctagcagcaagagaaaaattagataatttaatcttcgtagtaaattgtaatcttcaaagattagatggacctgtaagaggtaatggaaaaattattcaagaactcgaagggatatttagaggagctggttggaacgttattaaagttatttggggttcttactgggatcaattattagcaaaagataaatctggattattaataaaaagaatgggtgaagcagttgatggagaatatcaagcatttaaagcaaaagggggatcttatgtgagagagaaattttttggaaagtacaaagagcttctagatatggtttctcaaatgacagacagagatatatggaaacttaataggggtggacatgatccacataaagtatatgcagcatactattctgcaatgaaaaacaaaggaactcctacagtaatattagctaagacaattaaaggatatggaatgggtaaatctggagaaagtataaacaccactcatcagcaaaaaaaactagatgaggaagatcttttatattatagagatagatttgatgttcctttaacagataatcaagttaaaaatattgaatattataaaccaaaagaaaattctcctgaaataaaaatatttgaaagaatgtag

SEQ ID NO: 216501 - DNA, 691 bp, Unknown
  Bacterial polypeptide expressing nucleotide sequence isolated from the Sargasso Sea
gttttgtcgagaaatacaccgtacatcaatacaatatctccagaagaagaggtgaaatctccaggagatcaaaatttagaaagaaagattagatctttaataagatggaatgctgctgcaatggttgtaagagcgaataaaaagtatcctgaacttggaggtcatattggaacatttgcttctgcagctactctttatgatgtaggtatgaatcatttttggagagcaaaaaataataaattcggaggtgatttagtttatttccagggccatagtgctccaggaatgtatgctagagcatttttagaaggaagaattaattcaaaagaattagatcgatttcggcaagaagttaaacctggaggactatcttcatacccacatccatggttaatgccaaatttttggcagtttccaactgtttcaatgggattaggacctataatgtcaatataccaagctcgatttactaaatatttaattaacagaggtttaatcaaagatgaaggaagaaaaatttggtgctttttgggtgatggagaaacagatgaaccagagtcgctcggtgcaattggattggcagctagagaaaaattagacaatttaatctttgttgttaattgtaacttacaaagattggatggaccagttagaggaaatggaaaaattattcaagaattagaaggaattt

SEQ ID NO: 216502 - DNA, 783 bp, Unknown
  Bacterial polypeptide expressing nucleotide sequence isolated from the Sargasso Sea
tgcttcttctgccctgctttatgacataggtttcaatcatttctggcatgcccctggaccagatcacggtggagacttggtctacatccagggacattcggctcctgggatctatgccagggcttttctagaaggtcggatcacagaagaacaaatgaatcacttccgccaggaatccaccggaaaaggagtttcatcatatccacacccctggctgatgccagaattctggcagtttccaacggtctcgatgggtttgggtccgatcatggcaatttaccaggcccgctttctaaaataccttcacaaccgtgaattgttggataccaaaccaaggaaagtctggtgctttcttggggacggagaaaccgatgagcctgaatcaatgggtgccatccatctcgcagcccgagaaaaactgaacaatcttatttttgtcatcaactgcaacctccaacgactggacggcccagtccgaggaaacggcaaaatcatccaggaactggaaggagagttcaggggcgcaggttggaatgtgatcaaagtcctatggggttcctactgggatccgcttcttgcaaaagacgaccaagggctcttgcggaagagaatggaagaagccatcgacggggaatatcaggccttcaaagcaaagggtggtgcttatacacgcacccatttttttggcaaatatccggaactcctgcaaatggtctccaatatgagtgatgaggatatatggagactgaatcgcggaagccatgatccacataaagtttatgc

SEQ ID NO: 216503 - DNA, 817 bp, Unknown
  Bacterial polypeptide expressing nucleotide sequence isolated from the Sargasso Sea
tggagaaatggatgagccggagtctatgggagcaatcggtttagctgcaagagaaaaattagacaatttgatctttgtaataaattgtaatcttcaaaggcttgatgggcctgttagaggtaatggaaaaattattcaagaactcgaaggaagttttagaggaactggatggaatgtgatcaaagttatttggggatcttattgggataagcttctaatgaaagataagtctagcttacttgtaaaaagaatgaacgaatgtgtcgatggtgagtatcaagctttcaaagcaaaagatggatcgtatgtaagagagaaattctttggaaaatatcccgaactaaaagaaatggtgtcaacaatgacagataaagatatatggagattaaatagagggggtcatgatccacataaagtttatgctgcctatcattcagcaatgcagcatactggttctccaactgttatacttgctaaaacaattaaaggttacggtatggggaaatctggtgaaagtattaatacaactcaccagcaaaaaaaattagatgaggaggatttactttattacagagatcggttcggtgtgccgctcactgataaacaggtaaaaaatattgagtattacaaaccagatgaaaactctgaagaaattaaatatctaaaagatcaaagaattaagcttggtggttttatcccagaaagatcatcatatgcaaaacaaataaaagctcctcctaaggaaattttcgataactttatgaaatctacaggagataaagaaatgtcgactacgaaaacattagtaagaatgcta

SEQ ID NO: 216504 - DNA, 295 bp, Unknown
  Bacterial polypeptide expressing nucleotide sequence isolated from the Sargasso Sea
gttgttggacattcagacttaccgattcaaggggcacagcatgagcgaccctcagaagtaccgcaccaagaacgaagtggcgtcgttcgtcgagcgcgacccaatcggccacgtgcgctcagtgttgctcgacaacaactgggccaccgaggagtcgttgaaggcgttggagaaagaaatcaaagcccaagtggaggaggccatcaagtttgcggaggagagtccccttcccgacccgtccgagctgtacgaggacgtgtacgtacaaaccgattacccatttgtgaaggactga

SEQ ID NO: 216505 - DNA, 797 bp, Unknown
  Bacterial polypeptide expressing nucleotide sequence isolated from the Sargasso Sea
agtagaagatttaaatagaggaggacatgatccaactaaaatttacaatgcttatcgcttagcatatgaggaaaaggatagaccgacagtaattcttgcttttacgataaaaggttatggtattggttcaagacaggcagataatacaacccatcaggtaaaaaaacttacgaaagagaatctagaagattttattgataaatttaatctaccaataaaaaaagaaagcttagacaatccaaattttcttaccctaaacagagataaaaaggttaaggaatatttactttcaagaagacaagaattggggggcttattgccttcaagaaaagtctctaaggaaaaattaatagcaaaaaaagaatctttcttagatttcgataaaaaattagatagagagcagtcaacaacaatggtttttgtgagactgctaactaagcttttaagagatgaagcaataggttcaagagttgtgccaattgttccagatgaggcaagaacatttggcatggacgctttatttagacaatttggtatttattcctctgaaggtcaaaagtatgagccagaagatgcagataaagtaatgttttatagagaaagtgagtctggaataatgcttgaggaaggcattaatgaagccggtgcattttcagcatggctagctttagcaacttcttattcaaataataacttaccaatgattccgttctatatcttttactctatgtttggttttcaacgtactcatgatttagcttgggccgctggagattctagagccaagggttttttac

SEQ ID NO: 216506 - DNA, 997 bp, Unknown
  Bacterial polypeptide expressing nucleotide sequence isolated from the Sargasso Sea
gcaagagaaaaattagataatttgatttttgtaattaactgtaatcttcaaagattagatggtccagttagaggaaacggcaaaattattcaggagctcgagggaagatttagaggtgctggatggaatgtgataaaagtgatttggggctcttactgggatcagcttttatccaaagataaaaccggtttacttattaaaagaatgaatgaagcagttgacggtgaatatcaagcctttaaggcaaaaggtggtgcatatgtaagagaaaagttttttggaaaatatcctgagttgaaagaattggtggcaaatatgactgatgcagatatttggaaattaaatagaggtggacacgatcctcataaagtttactcagcttatcatgctgctgttcaatgcaaaggtaagccaactgtcataatagctaaaacaattaaaggttacgggatgggtaaatctggtgagagtataaatacaacacaccaacaaaaaaaattagacgaggaagatttattattttacagagatagatttaatgtgccacttactgataatcaggttaaaaatattgaatattacaaaccagcagaaaattcaccagaaataaagtatttaaaaaattgcagagttaagcttggtggacatattcctgagagaactacttttgcaaaaccagttaaaacacctcctcaagatatatttgaaagttttatgaagtccacaggtgataaagaaatgtctactacaatggctcttgtaagaatgcttgcgaatttactaagagataaaaacgttgcgccaagactagttcctataattgcggatgaagcaagaacttttggtatggaaggtttttttcaaaaaattggtatctatgctcacgaaggccaaaagtatgaaccggtcgactctgaacaattaagttcttatagagaagacaagaacggacaagttttacaagaaggtattacagaagcgggagcaatgtcatcat

SEQ ID NO: 216507 - DNA, 787 bp, Unknown
  Bacterial polypeptide expressing nucleotide sequence isolated from the Sargasso Sea
tgcttgggcaggagcagatagtcaatcaagaggatttttaattggtgctactgctggaagatcaacattagcaggagaaggtttgcaacaccaagatggacatagtcatttactcgcatcaactattcctaattgtaagtcctatgatccaacatttcattatgagctggcaaccatttttagagaaggattaaaaagaatgcacgagaaaaaagaaaatattttttattatattacaacaatgaacgaaaattatcctcatcctgctatgccaacagaaaaatcatgtgaagaaggtattctaaagggaatgtataaaattaaagaatttaataaatataaaaaaactaaaattcaattcttggggtcgggtacaattttaagagaaatgatagctggtgctgaaattttacaaaatgaatatcaaattgatagtgaggtttggagtgtaactagttttaatgaattaagaagagatggtttagaggttgagaggtataatttattaaatcctgaaaaagaacctaaaaagtcatatgttgagaattgtttaagtaaaactgaaggtcctattttagcagcttctgattatatgagaatgaactcagaccaaattcgaccttatgttaataagagcttttattctttaggaacagatggatttggtcgaagcgacacaagaaaaaatttaaggaagttttttgaagttgataaagagcatattgttacttatggactaagtgttttagctaaagagcaattaacagcctctaaatacgctgaagag

SEQ ID NO: 216508 - DNA, 770 bp, Unknown
  Bacterial polypeptide expressing nucleotide sequence isolated from the Sargasso Sea
cgtttttaattgcaatttacaaagattagatgggcctgttaggggcaatggaaaaatcattcaagaattagaaggtatttttaggggagcaggctggaatgtaataaaagtaatttggggttcttattgggatcctttaatagcaaaagataaaagcggtttattagttaaaagaatgaatgagtgtgtagatggggaataccaagcttttaaagccaaaggaggagcttatgtaagggaaaaattttttggtaaatatccagaactaaaagatttagtatcatctatgaccgacagagatgtatggaaacttaacagaggtgggcacgatccgcacaaggtttatgctgcatatgatatggctatgaaaaccagaggtcaaccaacagttattttagccaaaacgatcaaaggttatggcatgggcaaatctggagaaagcaccaatattactcaccaacaaaaaaaattaggtgaagaagatcttctttattatagagatcgatttgatatcccgcttactgataaacaggttaaaaatattgaattctacaaaccaggggaaaaatcagaagaaataaaatatattaaagaaagaagaatgaagcttggaggaaatttacctgagcggacttcttatgcgaaacctataaaaaaaccttcaaaagatatttttgaaaacatgcttaaatcttcaggagatcgtgaaatgtctacgacaatggctcttgtaagaatgctaactagtttattaagagataaaaatattg

SEQ ID NO: 216509 - DNA, 834 bp, Unknown
  Bacterial polypeptide expressing nucleotide sequence isolated from the Sargasso Sea
gtaattaattgtaatcttcaaagactggatgggcctgtaagaggaaacggaaagattattcaggaacttgagggaagttttagaggtactggttggaatgtaatcaaagtgatttggggttcgtattgggatcagttattagccaaagacaaaactggattacttgtaaaaagaatgaatgagtgtgtagatggtgaatatcaagcttttaaagcaaaaggtgggtcatatgttagagataaatttttcggaaaatatcctgaattaaaagaattagtatctgcaatgactgataaagacatttggagattaaatagaggaggacatgatcctcataaggtttatgcagcatatcatgcagcaatgcagcacaaaggttctcccactgtcatcctggcaaaaactattaaaggttatggtatgggtaaatccggagaaagtatgaacactactcatcaacaaaaaaagctcgatgaaaaagatttgctttactacagagatagatttggtgttccgcttaccgacaaacaagtaaaaaatattgaatattttaaaccagatgaaaattctgaggaaataaaatatttaaaagataaaagattgaaacttggaggttttattccagaaagatcatcttttgctaaagcaataaaaacaccgcccaaagatatttttgagccttttatgaaatctacaggtgataaagaaatgtcgacaactatggcgcttgttcgaatgctcactgcacttcttagagacaaaaatctttcaccaagaatggtaccaattattcctgatgaagcaagaacttttggtatggagggttctttcaaa

SEQ ID NO: 216510 - DNA, 565 bp, Unknown
  Bacterial polypeptide expressing nucleotide sequence isolated from the Sargasso Sea
atgagtattaaatcttttagacaatctatcaatgaagcaataaggctcgaaatgagaaaagatgaaaatgttgttttaatgggtgaagatgttgctggaggagctggctctaatggggaacaagatgcatggggaggacctcttggtgttacaaaagggcttttaggagaatttggtagagagagaattattgatactcctattactgaaacagctctattaggaatggcttctggagcggcacttacaggattaagacctattgctgaattaatgtttattgattttatgggagtgtgttttgatcaaattttaaatcaaactgctaaattcagatatatgtttggaggaaaagcagttacaccaataacaattagatcaatgtttggtggaggaacaagagctgctagtcaacatagtcaatgtttatatccaatttttactcatgtcccaggtttaaaagttgttattccttcatgcccttatgatgctaaaggtttgttaattcaatcaattagagataatgatccagtaatttttcttgaacacaagaaatatgtatgat

SEQ ID NO: 216511 - DNA, 736 bp, Unknown
  Bacterial polypeptide expressing nucleotide sequence isolated from the Sargasso Sea
atatttgatggcaatgatctagatccaactgaaactaaagagtggctagagtctttatctgcagttcttcaaaatgatggtaaagaaagagctcaatatttaataaaacaattaattgagcattcttataaagaaggctcagatttagtcttatctcgaaatacaccttacataaatactattcctcatgaagaggataaaaaatcttcaggggatcaaaacattgaaagaaaaataagatctttaattaggtggaatgcagctgctatggttgtaagagctaataaaaaaaaccctgatcttggcggtcatataggaacctttgcctcagctgcaacattatatgacgttggtatgaatcatttttggagagcaaaaaataataagttcggtggagatttaatatatttccaaggtcatagtgctcctggaatttatgcaagatcttttttagaaggaagattaactgagaaacaattagactcttttagacaagaagtcctaccaggtggtttatcctcttatcctcatccttggctgatgccgaactattggcagtttccaactgtatcaatgggtcttggcccaatgttagcgatctaccaagcaagatttatgaaatatttaattaatagaggtttgattaaagatgagaatagaaaagtttgggcctttttaggagatggggaaatggatgaaccagagtctttaggtgcaattggattagcatccagag

SEQ ID NO: 216512 - DNA, 895 bp, Unknown
  Bacterial polypeptide expressing nucleotide sequence isolated from the Sargasso Sea
actacagaattagtttcatcaatgtctgatactgatatttggaggcttaatagaggtggccatgatcctcataaagtttatgctgcgtacgataaagcggtcaatcacaaaggaagccccacagtcataatagccaaaactataaaaggttatggtatgggtaaaagtggggaaagtgtaaacactacacaccaacaaaagaagttggatgttgatgatttaatgtattacagggataggtttgatgttcctttaacagactctcaagtcaaaaatattgaatatttcaagccagacgaaaattctgaagaaattaaatacctaaaaaaaagaagattagaacttggtggattcattccagagagaacatcatattcaaaaccgattaaagccccagttaaagatatttttgattttatgaaaaagtctactggcgaaaaagaaatgtctacaacaatggcattagtaagaatgttaactaatcttttgagagataaaaatgttgcaccgaaattggtcccaattattcccgatgaagctagaacattcggaatggaaggtttcttccaaaaaataggtatttacgctcacgaaggtcaaaaatatgagccagaggactcagcacaactttcatcttatagagaagagaaaagtggtcaggtattagaagaagggattacagaagctggttcaatgtcttcttggatagcagctggaacagcatatacaaatcatgatattgaaatgataccaatttatcttttctattctatgtttggctttcaaagaattggagattttgcttgggctgcaggagatagtcaagcgagaggctttttaattggtgcgactgcaggaagaacaacacttgcaggagaaggtcttcaacaccaag

SEQ ID NO: 216513 - DNA, 922 bp, Unknown
  Bacterial polypeptide expressing nucleotide sequence isolated from the Sargasso Sea
gataatttaatttttgttgtaaactgcaatcttcaaagattagatggaccagtaagaggtaatggaaaaattattcaagaacttgaaggaatttttagaggagctggttggaatgtaatcaaagttatctggggttcttattgggatcaactattagctaaagataattcaggtttattaataaaaagaatgggagaagcggtagatggagaatatcaagcatttaaagcaaaaggtggagaatatgtaagagataaattttttggaaagtatccagaattattagacatggtatcccaaatgacagatagagatatatggaagcttaacagaggtgggcacgatccacacaaagtttatgcagcttatcatgctgccatgcaaaacaaaggtacaccaacagtaattcttgcaaaaactattaaaggttatggaatgggtaagtcgggcgaaagtatgaatacaacccatcaacaaaaaaaattagatgaagaagatttgttgtattatagagatagatttgatgtgcctttaaccgataaacaagtaagaaatgtacaatattataagcctgacgataattcaccagaaataaaatatttaaaagaatgtagaattaaattaggtggaaatttgccagaaagatcatcatttgcaaaagctataaaagctcctcctcaagatatttttagcaaaatgaaagagtcgactggtgataaagaaatgtccactacaatgattttagttagaatgttaacaaatttaatgagagataaaaatgtttctccaagattagtgcctattatacctgatgaagcaagaacatttggaatggaaggtttttttcaaaaaataggtatttatgcacatgaaggacaaaaatatgagccagtagattctgagcaattaagttcatacagag

SEQ ID NO: 216514 - DNA, 886 bp, Unknown
  Bacterial polypeptide expressing nucleotide sequence isolated from the Sargasso Sea
tgaagctcgcatgcccggcgacctgttcatggaacgccgcattcgctcgctggtgcgctggaacgccctggccatggtgatgcgcaccaacctggacgacccggatctgggcggccacatttccagcttcgcctcctccgcgacgctgtatgacatcggtttcaactacttcttccaggccccgaccgacgaacacggcggcgatctggtgttctatcagggccacgccagccctggcgtctacgcccgcgccttcatggaaggccgcatcagcgaagaccagatgaagaacttccgccgcgaagtggatggcaaaggtctgtcgtcctacccgcacccctggctgatgccggacttctggcagttcccgaccgtatccatgggtctgggcccgatccaggcaatctaccaggcgcgtttcatgaagtacctggaagcgcgtggtttcattccggccggcaagcagaaagtctggtgcttcatgggcgacggcgagtgcgacgagccggaatccctcggcgccatctccctggctggccgcgagaagctggacaacctgatcttcgtcatcaactgcaacctgcagcgcctcgacggcccggtacgtggtaacggcaagatcatccaggaactcgaaggcgtgttccgtggtgcccagtggaacgtcaacaaggtggtctggggtcgcttctgggatccgctgttcgccaaggacaaggacggcgccctgcagcgtcgcatggacgaagtggtcgacggtgaataccaaaactacaaggccaaagacggcgcctacgtgcgcgaaaacttcttcaacaccccggaactcaaggagatggtcaaggacctttccgatgacgagatctggaagctcaaccgtggcggc

SEQ ID NO: 216515 - DNA, 358 bp, Unknown
  Bacterial polypeptide expressing nucleotide sequence isolated from the Sargasso Sea
ggtgaaaaagtgatgggcatgaatatttttaaagtaattgatgctgcagatagagcaggaaaatatgttagagaagggaatggtccatatataatagaagtacagacatatagatatagaggtcactctatgtcagatccagcaaaatatagaaccaaagaagaattggataactataaagagactgatccaatagaaattgtaaaaaaagagatgattgagaaaaagtttgctaccgaaaaggagattgaaaaaatcaataaagatacactagaggaaattaaaaatgcagctgattttgctttaaaaagtaattaccctaatgacagtgaattatatacggatgtttacatttaaa

SEQ ID NO: 216516 - DNA, 835 bp, Unknown
  Bacterial polypeptide expressing nucleotide sequence isolated from the Sargasso Sea
gttcccaactgtatcaatgggacttggtccaatgatggctttttaccaggctcgttttactaagtatctgataaatagaggtcttcttaaagatcaggatagaaaaatatggtgccacttgggtgatggtgaaatggatgaaccggaaagttttggcgccgtaggtttagctgcaagagaaaaattagataatttgatttttgtaattaactgtaatcttcaaagattagatggtcctgttagaggaaatggcaaaattatccaagaacttgagggcagatttagaggtgctggatggaatgtaataaaagtcatttggggctcctactgggatcagcttttatccaaagataaaaccggtttacttatcaaaagaatgaatgaagctgttgacggtgaatatcaagcctttaaggcaaaaggtggtgcttatgtaagagaaaaattttttggaaaatatcctgagctgaaggaattagtagcaaatatgacagatgcagatatttggaaattaaatagaggtggacacgatccacacaaagtttattcggcttatcacgctgctgtgcgttgcaaaggaaagccaacggtcataatagctaaaacaatcaaaggatacggtatgggcaaatctggtgaaagtataaacactacgcaccaacaaaaaaaattggatgaagaagatttactattttatagagataggtttaatgtacctctaactgataagcaggttaaaaatattgaatattacaaacctgcagaaaattcccctgaaattaagtatttaaaaaattgtaggcataagcttggtggaatattcctgagagaacta

SEQ ID NO: 216517 - DNA, 868 bp, Unknown
  Bacterial polypeptide expressing nucleotide sequence isolated from the Sargasso Sea
tcatgggtcttggtccataatgtcaatctatcaagctagatttaataaatatttaatcaatagaggattgttaaaagatgaaggaagaaaaatttggtgtttcttgggagatggtgaaactgacgaaccagaatctttaggagccataggattagcagctagagaaaaactagataacttaatttttgtagtaaattgtaacttacaaagactggatggtccagtaagaggtaatggaaaaattattcaagaacttgaaggaatatttagaggagctggctggaatgtaattaaagttatttggggttcttactgggatcaattgttagccaaagacaaatctggattgctaattaaaagaatgggagaagcagttgatggagaatatcaagcattcaaagcaaaaggaggaaaatatgtaagagagaaattttttggtaagtataaagaacttttagatatggtttctcaaatgacagatagagatatttggaaacttaacaggggtggacatgatccacacaaagtttatgctgcttatcatgctgctatgcagaataaaggtacaccaactgtaattctagctaaaactatcaaagggtatggaatgggtaagtcaggtgaaagtatgaatacaactcaccaacaaaaaaaattagatcaagaagatttgttatattatagagatagatttgacgtacctttaacagatgatcaagtaagaaatattcaatattatagacctgacgataattcgccagaaataaaatacttaaaagaatgtagaattaaattaggtggaaacttaccagaaaggtcatcatttgctaaagctatcaaaactccaccaaaagatatatttgcaaaa

SEQ ID NO: 216518 - DNA, 887 bp, Unknown
  Bacterial polypeptide expressing nucleotide sequence isolated from the Sargasso Sea
ccaggcgtatggcgagctgggcggtcacatcgccagctacgccagtgcggcggatctgtttgagagcggcttcaaccacttcttccgcgcccgcgaggggctgggcgaggggcaacaccggggcgatctggtgttcttccagccacacagcgcgccgggtgtgtatgcgcgggcttttctggaagggcgtttgtccgagctggacctgcagcactatcgccaggagctgacagcgccgggcgcaggcgcgcaggggctgtcgagctatccgcacccctggctgatgccggatttctggcagttccccaccggctccatgggcatcggccccatcagcagcatctaccacgcgcgcttcatgcgctacctcacgcaccgcaacctgctcaactgcgagggccgcaaggtgtggggcgtgtttggtgacggcgaaatggacgagcccgagtcgatgagtgcgcttacgctcgctgcgcgcgagggcctcgataacctcgtctgggtggtcaactgcaacctgcagcgcctggacggcccggtgcgcggcaacggccgcatcatcgacgagctggagcgcctgtttgcaggcgcaggctggaacgtggtcaagctggtctggggcagcgactgggacggcctgtttgcccgcgacctgaccggtgcgctggtgcgcacgctggaaggcacggtggacggccagatgcaaacctttgcggccaaggacggccgcttcaaccgcgacaacttcttcggccagaaccccgagctggccgccctggcccagggcatgacggacgagcagatcgaccgcctgaagcgcggcgggcacgacctcgtcaagatccacgccgcgtacgccgccgccgctgcgcacaagggccagccca

SEQ ID NO: 216519 - DNA, 847 bp, Unknown
  Bacterial polypeptide expressing nucleotide sequence isolated from the Sargasso Sea
gagagagaaaaatcagatactattgaagtaataaaagatggtgatttagatcctatagagactagtgaatggctagactctctctcagcagtaattcaaaaagacggaaatcaaagagcccactatttaattaaagaattaattaacaaatcttacatggaaggtgctaatattccttatactcaaaacactccatatattaatacaattccagttaatgaggaaaaaaagtctaacggtgatcagaatatagagagaaggattagatctttaattagatggaatgccgctgcaatggttgtgagggcgaataaaaaatttccagaacttggtggtcatataggaacatttgcatccgcagcgactttatatgatgtaggaatgaatcatttttggagagctaaaaataataagtttggaggagatttaatttattttcaaggacacagtgcaccaggtatgtatgcacgagcatttcttgagggtagacttaatgaaaaacaattagatagttttagacaagaagttaatcccggtggtttatcatcatatccacatccttggttaatgccaaaattttggcaatttccaactgtttcaatgggactaggaccaatgctggcaatttatcaagcaagatatatgaaatatttaattaatagaggtttgattaaagatgagggtagaaaagtttgggcatttttaggagatggtgaaatggatgaacctgagtctttaggtgctattggattggccgcaagagagaaattagataacttaatatttgtgattaattgtaatttaaaaagattagatggaccagttcgtgggaatgggaaaattatac

SEQ ID NO: 216520 - DNA, 896 bp, Unknown
  Bacterial polypeptide expressing nucleotide sequence isolated from the Sargasso Sea
attagaagaaggtataaatgaatctggagcaatgtcatcttggattgccgctggaacttcttacaccaatcatgatttagaaatgataccaatttatattttttactctatgttcggttttcaaagagtcggtgacttggcatgggctgctggggactctcaagcaagaggttttttaattggagctactgctggaagaacgactttagcaggtgaaggcctccagcaccaagatggtcatagccatttattagcatccaatattccaaactgtataagttatgatcctacatttgcgtacgagatggctgttatacttagagatgggttaaaacgaatgcatgaaaaaaaagaaaacgttttctattatattactgcaatgaatgaaaattattctcacccggaaaaaccagagggttcggatgcgggtattcttaaaggaatgtatttgttgaaagagaataacaataagaataaaactaaagtacagcttttaggatcaggaactattttaagagaaataattgcagcatcagaaattttatcaaaaagttatggtgtagactccgatatttggagtgttacaagttttaacgaattaagaaaagatggtatggaaactgaaagatggaatcttttaaaccctaatgaaaaaagaaaaaaatcttatgttcataagtgtttagaaaaaagagatgggccaatcatagctgcatcagattatacaagatcgttttcagatcaaataagaccttacacagaaaaaccattttactcacttggaacagatggatatggaagaagtgatacgagaaaaaatttgagaaaattttttgaggtcgataaagaacatatagtcgcttatacttttagcgctttggcaaaagagcaattga

SEQ ID NO: 216521 - DNA, 762 bp, Unknown
  Bacterial polypeptide expressing nucleotide sequence isolated from the Sargasso Sea
aggttcagatttaatattgtctagaaatactccttatattaatacaataaaaccagaggaagagataaaatctccgggagatcaaaatttagaaagaaaaattagatctttcattagatggaatgcagcagcaatggttgtaagagcaaataaaaaaaatccagaacttggaggtcatattggaacatttgcctcggctgctactttatatgatgttggcatgaatcatttctggagagcaaaaaataataaatttggaggagatttaatttattttcaaggtcacagcgctcctggaatgtatgcaagagcttttcttgaaggtaggattaatgaaaaagaattagaccgatttagacaagaaataaaacctggagggttatcttcttatcctcatccttggttaatgccaaaattttggcaatttcctacagtctcaatgggactaggaccaataatgtcaatctatcaagctagatttaataaatatttaattaatagaggattattaaaagatgaaggtagaaaaatttggtgtttccttggagatggagaaactgacgaacctgaatctttaggagcaataggattagcagcaagagaaaaattagataatttaatttttgtagtaaattgtaacttgcaaagattggatgggccagtaagaggtaatggaaaaattattcaagaacttgaaggaatatttagaggagctggttggaatgtaataaaagttatttggggctcctactgggatcaatt

SEQ ID NO: 216522 - DNA, 896 bp, Unknown
  Bacterial polypeptide expressing nucleotide sequence isolated from the Sargasso Sea
atgggtaaaattattcaagaactagaaggcctatttaaaggcgctggttggaacgtgattaaagttgtatggggaagcggttgggatattctgctagctaaagatacaacaggtaaattactacaattgatgaacgaaacaattgatggtgactaccaaacatataaagcaaaagatggcgcgtacgttcgtgagcatttctttggtcgttacccagaaacagctgcccttgttgcagatatgacggatgacgaaatttttgcgcttaagcgtggtggtcatgagccatcaaaactttatgctgcatttaaaaaggccgagcaaactaacgaccgtcctactgtgatacttgctaaaactgtaaaaggttacggcatgggtgaagcagctgaaggtaaaaacattgcgcaccaagtgaaaaaaatggacatgagccatgttgaacacttacgtgaccgtttaggcctacaagacttagtctctgaagaagcaattaaagacttaccttatttagagcttgatgaaagctctgaagagtacaagtacttacacgctcgtcgtaaagacttagaaggttatacaccaacacgtatagctaagttttctgaaaaattacagttgccagaagtttcagcatttaagccgctacttgaagagcaaaaacgtgatatttcaaccacaatgggctttgttcgtgctcttaatattttattgaaagacaaaggcattggtaaaaacattgtaccaattattgccgatgaagcgcgtacctttggtatggaaggtttattccgtcaaattggtatttacaacccacatggccaaaactacacccctcaagaccgtgatattgtttcttactacaaagaagctacatcagggcaagtacttcaaga

SEQ ID NO: 216523 - DNA, 931 bp, Unknown
  Bacterial polypeptide expressing nucleotide sequence isolated from the Sargasso Sea
gaaatggatgagccagagtcactcggtgctatcggattagcagctagagaaaatctagataatttaatttttgtagttaactgtaatttacagagattagatggtccagtaagaggaaatggaaaaataattcaagaactcgaaggtatttttagaggagcaggatggaatgttttaaaggtaatatggggatcttattgggatactttattggcaaatgataaaactggatatttaatcaaaataatgaatgaaaccgttgatggtgaatatcaagcatttaaagctagaaatggactgtatgtcagagaaaaattttttggtaaatatccagaaactttaaaattagtttcaacaatgtctgataaggatatctggagattaaatagaggcggtcatgatcctcacaaagtttatgcagcgtatgataatgctgtaaataatattggaagtccaacagttattattgctaaaacaattaaaggttatggtatgggaaaaactggagagagcgtaaacacaactcaccagcaaaaaaaactagatgtagatgatttgttatattttagagatagatttgatgtaccacttaatgatgaacaggtaaaaaatgtagaatattttaaaccagatgaaaactcagaagaaatcaaatatttaaaacaaagaagaattgaattgggtggctttattccagagagaacatcttattcgaaaccaattaaaactccaaacaaagatatttttgattttatgaaaaaatcaacgggccaaaaagaaatgtcaacaactatggctttggttagaattttaactaatctattaagagataaaaatgttgcttcaaaattagttcctataattccagatgaagccagaacttttggaataaaaggtttttttcaaaaaaattggtatttatgcgcatgaa

SEQ ID NO: 216524 - DNA, 600 bp, Unknown
  Bacterial polypeptide expressing nucleotide sequence isolated from the Sargasso Sea
tgaatgaaaattatgcacatccagaaatgccaaaagataaattttgtgaggaaggaatattaaaaggcatgtataaaattaaagaatttaataaatacaaaaaaactaaaattcaatttttgggatcaggtacaattttaagagaaatgatttcagctgctgaaattcttcaaaaagaataccaaatagatagtgaagtttggagcgtaacaagctttaacgagttgagaagagatggtttagaagttgagagatacaatcttctgaatccagacaaagaaccaaaaaaatcttatgttgaaaaatgtttaagtaaaacggaaggacctattttagctgcttctgattacatgagaatgaattcagaccaaatcagaccttatgtaaataaaagtttttattcactaggaacagatggttttggaagaagtgatacaagaaaaaatttaagaaatttttttgaagttgataaagagcacgtggttacttacggattaagtgtactatctaaagaacaactcatagcatcaaaacatgctaaggaagctataaaaaaatacaaaattgataaagataaaccaatgccaacaaaattataat

SEQ ID NO: 216525 - DNA, 328 bp, Unknown
  Bacterial polypeptide expressing nucleotide sequence isolated from the Sargasso Sea
ttgaaatttgatagagattctcttgtcgctttctatcgagatatgctccttattcgacgtttcgaggaacgtgcaggccaattgtatggtatgggacttattggcggattttgtcatttgtatattgggcaagaagctgtcgtagttggaatgcaaaatactataactgacaatgatgccgtgattacaagctatcgagatcatggtcatatgttagcctgcggaatggatcccaaaggagttatggccgaacttacaggtagggaaggaggctattcgcgaggaaaaggcggatccatgcatatgtttagtgcggataaaaactttt

SEQ ID NO: 216526 - DNA, 757 bp, Unknown
  Bacterial polypeptide expressing nucleotide sequence isolated from the Sargasso Sea
aaatatcttattaatagaaaattaataaaagatgagaatagaaaagtttggtctttcctaggagatggtgaaatagacgagccagaagctttaggatctattggtttagcagcaagagaaaagttagataacttgatttatgttgtgaactgcaacctacaaagattagatggtccagtaagaggcaatggtaaaattattcaagaattagaaggaatttttagaggagctggctggaatgtaataaaagttatttgggggtcatattgggatcctttacttgctaatgataagtcaggtttacttgtaaaaagaatgaacgaagcagttgatggagaataccaagcctttaaagcaaaaggaggtttatacgttagagataacttctttgggaaataccctgaacttaaaaatctagttgcaagttatacggatagcgatatttggaaattaaatagaggcggtcacgacccgcataaagtttatgctgcttatcataaagccattaatacaaaagacagaccaacagtcatattagctaaaacaattaaaggatacggtatgggaaaatctggcgaaagtataaatacaacccaccagcaaaaaaaattaggtgtagatgatttgctatattatagagatagatttgatgttccattaacagatgaacaagtcaaaaatatagaatactttagacctgatgaaaattcagaggaaattaaatacttaaaaaaaagaagattagctttaggaggat

SEQ ID NO: 216527 - DNA, 899 bp, Unknown
  Bacterial polypeptide expressing nucleotide sequence isolated from the Sargasso Sea
cccagagacaaaagaattagtttcaagtttatctgacaaagatatttggagattaaatagaggtggacatgatccccacaaagtttttgctgcttacgataaagcttctaaaaatattggaagtccaactgtagtaattgcaaaaactattaaaggttatggaatgggtaaaagtggagaaagtgtaaatacaactcatcaaacaaagaaattagatataaatgatttaatgtattatagagatcggtttgatgttcctttgacagatgatcaagtaaagaatatagagtattataaaccaactgaaagttcggttgaaataaagtatcttaaagagagaagactccaactcggtggatatattcctgagagaactacatacgctaaacccataaaaacacctccaaaaaatatttttgaaaatatgaaagaatctacaggtaagaaagagatgtcaaccacaatggctttagttagaatgttaacaagccttctaagagataagaatgtagcttcgaggttagttccaattattcctgatgaggcaaggacttttggaatggaaggattttttcaaaaggttggaatttatgctcatgagggacaaaagtacgagcctgaggactctgctcaacttagctcttatagagaggaaaaaagtggccaagttttagaagaaggaatcactgaggcaggtgcaatgtcctcttggatcgctgcaggaacttcttatacaaatcatgatatagaaatgattcctatttatttattttattctatgtttggatttcaaagaataggagatttagcatgggcaggagcagacagtcaatcaagaggttttttgattggagccacagctgggaagaactacattaggctggtgagggtctgcaaca

SEQ ID NO: 216528 - DNA, 858 bp, Unknown
  Bacterial polypeptide expressing nucleotide sequence isolated from the Sargasso Sea
tctggtgctttcttggggaggagaaaccgatgagcctgaatcaatgggtgccattcatctcgcagcccgtgaaaaactggacaatcttatttttgtcatcaattgcaacctccagcgactggacggcccagtccgcggaaacggtaaaatcatccaggaactggaaggagagttcaggggcgcaggttggaatgtgatcaaagtcctatggggttcctactgggatccgcttctggccaaagacgatcaagggctgttgcggaagagaatggaagaagccatcgacggagaataccaggccttcaaagccaagggtggggcttatacacgcacccatttttttggcaagtatccggaactgctggaaatggtctccaacatgagtgatgaggatatttggagactgaatcgcggaggccatgatccacacaaagtttatacagcctatcaagctgcagtcaaacataccgggcaacccacggtgatattagcaaaaaccgtaaagggttacggaatgggcggatccggagaaggtgccaacatcactcaccaacagaaaaaaatccgtcctgaagatctcttggtgttccgtgatcgttttcaccttccactctccaatcagcaggtggaacagatggagttcttccatccaggagattcgtcccaggaagtcgaatacctgcatcagcaacgcgaaaaactaggaggttaccttccctcccggagaactcgtggtgatgatttaaaaactccggaacttccattttttgagcggctgctgaaaagcaccgaggagcgtgaaatctcaacaactcaggctctggttcaagctatgaccttattgtgtcgggatgaaaa

SEQ ID NO: 216529 - DNA, 942 bp, Unknown
  Bacterial polypeptide expressing nucleotide sequence isolated from the Sargasso Sea
aaaattgcttcagaaaaatataatttatcaaaaaatagtgaagatattgatataactgagacaaaagaatggatagattcactttcagcagtattagaaacagatggaagtaaaagagcacaatttttaattaaacagttaattgaacattcttataaacaaggatctgatttagttctttcaagaaatacaccatatataaatacaatatctccagataaagaagcaaagtcaccaggagatcaaaatattgaaagaaaaattagatccttgattaggtggaacgctgcagcaatggttgttagggcaaataaaaaatttcctgaattaggagggcatataggaacatttgcatctgctgccactctttatgatgtaggaatgaatcatttttggagagcaaagaataataaatttggaggagatcttatttattttcaaggacatagtgctcctggtatgtatgctagagcttttttagaaggtagattaaatgagaaacagttagataaatttaggcaggaagtaaaaccaggtggcctgtcatcttatcctcatccatggttaatgccaaatttttggcagtttccaactgtatcaatgggtataggaccaatgttagctatttatcaagctaggtttatgaaatatttaattaatcggggtttaattaaagatcaaaatagaaaggtttgggctttcattggagatggtgagacagatgaaccagagtcgttaggtgcaattggtttagcagctagagaaaaattagataatttgatttttgtagttaactgtaatttacaaagattagatggacctgtaagaggaaatggtaaaattattcaggagctagaagggatttttagaggttctggttggaatgttataaaagtaatttggggatcatattgggatcagttattagcaaaagataaactg

SEQ ID NO: 216530 - DNA, 808 bp, Unknown
  Bacterial polypeptide expressing nucleotide sequence isolated from the Sargasso Sea
cttaatagaggtggtcatgatcctcacaaagttttcgctgcctatgataaggccactaaacatcagggaagcccaacagtaatcatagcaaaaactattaaaggttatggaatgggaaaatctggtgaaagtgttaatactacccaccaaactaaaaagttagatgttgatgatttaatgtattacagagatcgatttgatgttcccttaacagatgaacaagtgagaaatattgaatattttaggcctgacgagaactccccagaaataaaatatataaaagatagaagaattaaattaggtggatatttgcctgagcgttctacttttgcaaaaccaattaaagctccatcaaaagatatctttgatttcatgaaagtatcaactggtgaaaaagaaatgtctactactatggccttagtaagaatgcttactaatttgttaagagataaaaatatatctcctagacttgttccaattattcctgatgaagcaagaacatttggtatggaaggattttttcaaaaaataggaatttacgctcacgagggtcaaaaatatgaacctgaagatgctgctcaattaagttcttatagagaagataaaagtggacaagttttagaagaaggcatcaatgaagctggtgctatgtcgtcatggattgctgctgccactgcatatactaatcatgatatcgaaatgattcctatttatatcttttattcaatgtttggatttcaaagagtaggagatttagcttgggcggctggagacagccaggccagaggatttttggttggtgcaacag

SEQ ID NO: 216531 - DNA, 784 bp, Unknown
  Bacterial polypeptide expressing nucleotide sequence isolated from the Sargasso Sea
actgatatttaggcgattaaatagaggaggtcatgatcctcataaagtttatgctgcttatgataaagcggtcaaccacaaaggaagtcccacagttattattgctaaaacgattaaaggttatggtatgggaaaaagtggagaaagtgtaaatactactcaccagcaaaaaaaattagatgtagatgatttgatgtattacagggatagatttgatgttcctttaacagatgcccaagtcaaaaatattgaatatttcaaaccagacgaaaattcagaagaaataaaatatttaaaaaagagaaggatagaattgggtggttttattccagagagaacatcttactcaaaaccaattaaagctccaagtaaagatatttttgattttatgaagacttctactggtgaaaaagaaatgtctacaacaatggcactagtcagaatgttaactaatcttttaagagataaaaatgttgctcctaaattagttccaattattccagacgaagctagaacttttggaatggaaggtttctttcaaaaaataggaatttatgctcacgagggtcaaaagtatgagcctgaagattctgcacaactttcttcttacagagaagaaaaaagtggtcaagtattagaagaaggaattacagaggcaggatctatgtcatcttggattgctgcaggtactgcttacactaatcatgacattgaaatgataccaatttatcttttctactctatgtttggctttcaaagaattggagattttgcttgggcagcc

SEQ ID NO: 216532 - DNA, 875 bp, Unknown
  Bacterial polypeptide expressing nucleotide sequence isolated from the Sargasso Sea
catgggtcttggacctattttaggtatatatcaggcacatattatgagatatctttctgctcgaggtttagtcccaagaaatgataggaaggtttgggttttttgtggcgatggagaaatggatgagccagaatcaaaaggagcaattggtttggctggaagagaagagcttgaaaatctaatttttgttgttaattgtaatttacaaagattagatggccctgttaggggtaatggaaaaattattcaagaacttgagggctcttttagaggagagggttggaatgtcataaaagtggtttggggaagattttgggatccaattattgccaaagatactgaaggtaaacttcaagaaattatggatgctgtggttgatggagaattgcaaaacttcaaggcaaaaggaggtaaatatacaagagaaaatttctttgcaaaagatccttctgtactagagatggtaaaagatttaactgatgaagatatttatagacttaacagaggaggtcatgatccttataaagtttatgcagcatatcataaagcatcaaattcaaagggcgcaccaacagtaattctagccttaacaacaaaaggatatggcactggctctagagaagccgataatacaactcatcaagtaaaaaaattatcaatggaaaatattaaatcatttagagatagatttgacattcctgtttcagattctgaaatagaagatcttccatacgttcgtcctcctgaagattcaccagaaattcagtatcttaagaacaccaggaaaaaacttggtgggtttataccacgaagaagaacatcttctgaaaaattaaaaatgcctaatagcaaagtgtttgaaaaatcttatgatt

SEQ ID NO: 216533 - DNA, 916 bp, Unknown
  Bacterial polypeptide expressing nucleotide sequence isolated from the Sargasso Sea
catccttggctaatgcctaaattttggcagttcccaactgtttcaatgggattagggcctattatgtcaatttaccaagctcgatttacaaaatatttaattaatagaggattattaaaagatgaaggaagaaaaatttggtgtcatttaggtgacggagaaactgatgaaccagaatctttaggtgcaataggcttagctgccagagaaaatttagataatttgatttttgtaattaattgcaatctccaaagactcgatggacctgtaagaggtaatggaaaaattattcaagaactcgagggaatatttagaggagctggatggaatgtaattaaagttatatggggttcatattgggatcctttaattgcaaaagataaatcaggattattaataaaacgtatgggcgaggcagtagacggtgaatatcaagcgtttaaagctaaaggaggggcatttgtaagagaaaaattttttggaaaatatccagaacttttaaatttagtatctcaaatggatgacaaagatatatggaaattaaatagaggtggtcatgatcctcataaagtttatgcagcttataattctgcaatgttacacaagggtagcccaactgtaattttggccaaaacaatcaaaggatatggcatgggtaaatcaggagaaagtattaataccacacatcaacaaaagaaattggatgaaaaagatttgttatattacagagataggttcgatgttcctttaactgataaacaagttaagaatgtagaatattacagaccttcagaaaactctcttgaaataaagtatttaaaacaatgtagattaaaattaggaggaaatttacctgaaagatcttcatttgcaaaatctattaaaactccttctgaagatatatttaaagcaagaa

SEQ ID NO: 216534 - DNA, 909 bp, Unknown
  Bacterial polypeptide expressing nucleotide sequence isolated from the Sargasso Sea
gttagataacctcatctttgtagtgaattgtaatcttcagagattagacggccctgtgcgcggcaacgggaaaatcattcaggagttagaaagtgtttttcgtggagcgggttggaacgtcattaaagttgtttggggaaggatgtgggatcagctattcgaaaaagacgagctcggattattacaacagagaatggatgaagccgttgacggagactatcaaaactataaaagccatgatggtggttacacgcgggaacatttctttgggaaacatcctgaactattgaagatggtcgaacatttatcggatgaggatatttaccgtcttaaccgtgggggacatgacccctacaaggtatatgcagcctacgctgccgcagttgaacatagggatcaacctactgtcattctcgcaaaaactgttaaaggatatggtcttggactggcaggtgaagcacaaaatatcactcattctgtaaaaaagttggatcttgaggcgctacgagaattccgagatcgatttgatatccccctaccagatactgatctggcagaagtaccttattacagacccccggaagacagcacggagatccgatatcttaggggccgccgagctttattgggaggttccatgcctgctcgcaaatctgattttgggaagctcaccattcctgcactctcggcatttgagaatatcaccggcggctcaggtactcgcgagatctccactacaatggcattcactcgtattcttatgactttggttaaagacgagcacttagggaagcttgtggttccaatagttcctgatgaggcgcgcacctttgggatggagggcatgtttcggcaacttggtatttactcctcagtgggacagctttacgagccagtagatacaggaca

SEQ ID NO: 216535 - DNA, 930 bp, Unknown
  Bacterial polypeptide expressing nucleotide sequence isolated from the Sargasso Sea
aaaaataatgaagttcaaaagaaagccataatacccaaagatacagaaaatattattgaagaagcagaaaaaacattatcagaagaaaaagaagtacaagaaaaaactttatcagtagagaaagaaaaagttgataaaccaataaaaattgcagaagaaaaaaataatttatcaaatattaattctgatattgatccaactgagacaagagagtggatagactctctttcttcagttctagaaaatgatggaagcaatagagctcaatttttaataaaacaacttattgaacattcttatagacaaggatctgatcttgttttgtcaagaaatacaccatacatcaacacaatacccccagaaaaagaattcaagtctccaggagatcaaaacttagaaagaaaaattagatctttaattagatggaatgctgcagcaatggtggtcagagcaaacaaaaaatttcctgaacttggagggcatattggaacatttgcatcagcagcgacactttatgatgttggaatgaatcatttttggagagctaagaataataaatttggcggtgatctaatttattttcaaggtcatagcgctccaggcatgtacgctagagcttttttagagggcagattaaatgaaaaacaattagacagttttcgacaagaggtaaaagcagatggtctttcatcctacccacatccatggttaatgccaaaattttggcaatttccaacagtctcaatgggtcttggtccaatgttagcaatatatcaagctaggttcatgaaatatttaattaatcgtaaacttatcgaagaccaaaatagaaaagtatgggcatttttgggagatggcgaaatggatgagccagaatctttaggagcaattggattagcggccagagaaaagctagataatttaattttt

SEQ ID NO: 216536 - DNA, 862 bp, Unknown
  Bacterial polypeptide expressing nucleotide sequence isolated from the Sargasso Sea
aatttaatatttgttgttaactgcaatttacaaagattagacggtccagtaagaggaaatggaaaaataattcaagaattagagggtatttttagaggaggtggctggaacgttctaaaagttatttggggatcttattgggactcacttttagcaaatgataagacaggacatttagtaaaaattatgaatgagaccgtagatggtgaatatcaagcatttaaagcaagaaatgggctttatgtgagagaaaagttttttggcaaataccctgaaactacagaattagtttcatcaatgtcagatactgatatttggagacttaatagaggaggccatgatccacacaaagtttatgctgcatatgataaagcggttaatcataaaggaagtcccacagtcataatagctaaaactataaaaggttatggtatgggtaaaagtggtgaaagtgtaaacactactcaccaacaaaagaaattggatgttgatgatttaatgtattacagggataggtttgatgttcctttaacagattctcaagtcaaaaatattgaatattttaaaccagacgaaaactctgaagaaattaaatacttaaaaaaaagaagattagaacttggtggatttattccagagagaacatcatattcaaaacctattaaagccccagttaaagatatttttgattttatgaaaaagtctactggtgaaaaagaaatgtctacaacaatggcattagtaagaatgttaactaatcttttgagagataaaaatgttgcaccaaaattggttccaattattcccgatgaagctagaacatttggaatggagggtttctttcaaaaaataggtatttatg

SEQ ID NO: 216537 - DNA, 544 bp, Unknown
  Bacterial polypeptide expressing nucleotide sequence isolated from the Sargasso Sea
tgctatgtcgtcatggattgcagcaggaacatcatacacaaatcatgatattgaaatgatacctatttatttattttactcaatgtttggttttcaaagaataggtgactttgcttgggcaggagcagatagtcaatcacgtggttttttaatcggtgccactgctggtagaacaactttggctggagaaggactacaacaccaagatggtcatagtcatttattatcttcaacaataccaaattgtatttcatacgatcctacatttcattatgaactggctgtaatttttcgagagggtttaaggagaatgcatgagaaaaaagaaaatattttttattacattactacaatgaatgaaaattatcctcacccagaaattccaagagatagaaattgtgaggaaggaattttaaagggtatgtataaaattagagagttcaataaatataaaaaaacaaaaattcagtttcttggatcaggaactattttaagagaaatgattgctggtgctgaaatattacaaaaagaatatcaaatagat

SEQ ID NO: 216538 - DNA, 805 bp, Unknown
  Bacterial polypeptide expressing nucleotide sequence isolated from the Sargasso Sea
agggggggcagatccgaaaaaaatgatggctgaaatcgcaggcaaatcgactggctactgcaggggaaaaggcggatcaatgcatattgcggatcgaggtttaggtcacctgggtgcaaatgcgatcgtgggtggaggcatcagtcatgtggttggagccggactgacctaccagatgaagcatcacggaaacgctgctgtggctttttttggagacggtgcaatgcagcaaggagttctttatgaaagtatgaatctctccgcactttggaagcttcctgtcttgtttgtctgcgttaacaatgaatatggaatggggacccgtcttgaccatgcaagtgcatccctggaatttgaaaaaagagcagaaacctttggactgttggccgcagaggtggatgggattgatgtttttgaagtttacaaccaatcaaaaaaccttcttgaagacgtaagaaagggaaagccagcgtttttgaaagtcaacagttaccgttttcacggccatgccagaatggacaaaagtccataccgtgatcagcaggaagaggaagaaggaagaaaaaaagacgcgattgcttttcttagagatcgcatcgtcaaatctggctggtatcaggaaaccgaatgcgacgagattgtggaggaagtcaaacaagaaatggatgaagccctgaaccatgcccgaaatgctgcagatccgggagcagacgaaatgtatgaagatattttcgacccgcaaacaaccaaaccgttcccggtggattctcgaatcagagaatcacttcatctaccccaagcctga

SEQ ID NO: 216539 - DNA, 775 bp, Unknown
  Bacterial polypeptide expressing nucleotide sequence isolated from the Sargasso Sea
agataaaaatatatcaccaagattagttcctatcatcccagatgaggcaagaacttttgggatggaaggttttttccaaaaaataggaatatatgctcacgaaggtcaaaaatatgagcctgtagactcagaacagttaagctcttacagggaagataaaagcggccaagtattagaagaaggaataaatgagtcaggagcaatgtcttcttggattgcagctggtactgcttacacaaatcatgatttagaaatgatacctatttatattttttactctatgtttggttttcaaagggttggagatttagcgtgggcagctggagactctcaagcaagaggtttcttgattggggctactgcagggagaactactttagctggagaaggacttcaacaccaagatggtcatagtcatttactagcatcaaatattccaaactgtattagttatgatcctacgtttgcttatgaaatggctgtaatattaagagatgggctaaaaagaatgcatgagaaaaaagaaaatattttctactatatcactgcaatgaatgaaaattattctcacccagaaaagccaaagggtgccgatgagggaattttaaagggaatgtatttatttaaagaaaataataacaagaataaaactaaagtgcagcttttaggctcgggaacaatcttaagagaaataattgctgcttcagaaattttatcaaaagattatggcgtagactctgatgtgtggagtgtaactagttttaatgaactaaga

SEQ ID NO: 216540 - DNA, 822 bp, Unknown
  Bacterial polypeptide expressing nucleotide sequence isolated from the Sargasso Sea
ctgtatctatgggccttggaccaatgatggcaacatatcaggctcgttttatgagatacatggaacacagggggctcactgaaccaagcgatagaaaaatctggtgttttttgggtgatggtgaaatggatgagcctgaatctctaggttcgattacgatgccagtgagagaaggattggataatttaatctttgtggtgaattgtaatcttcaacgcctggatggtcctgttagaggaaatggaaaaataatccaggaacttgaggcagcatttggtggagcgggatggaatgtcattaaactcatatggggttcaaggtgggatcctcttttagctagagaccgacaagggttattgcaacaaataatggaagaatgcgtcgacggtgaatatcaaaattttaaatcaaagggaggtgactacgttcgagaacacttttttggaaagtatccagaaacaaaagagatggttgctaatatgtccgatgaggatatttggcgtctcaaccgaggtggtcatgatgctaggaaggtattttcagcttatcagaaagctgttaatcacagagagagacccacaattatcctagctaaaactgtaaaaggtttcggtcttggctcagtcgctgaaggtcagaatacagctcatcagcaaaagaaattagatctaaatgcattaaaggaatttagggataggtttaatatccccatcacagacaaaaaactaaaagatgttccgtatttcatgccgaaaaaaaatagccaggaactagagtatctgcatgaaagaagaaagtcacttgggggttatataccctaag

SEQ ID NO: 216541 - DNA, 932 bp, Unknown
  Bacterial polypeptide expressing nucleotide sequence isolated from the Sargasso Sea
aaaatatgaacctgaggatgcagcgcaattaagttcttacagagaagataaaagtggacaagttttagaagaaggtattaatgaagctggtgcaatgtcttcatggatagctgctgcaacagcatatactaatcatgatatcgaaatgattcctatttatatcttttattcaatgtttggatttcaaagagtaggagatttagcttgggcagctggggacagtcaggctagaggatttttagttggtgcaacagctggaagaacaactctagcaggtgagggcttgcaacaccaggatggacatagtcatttaattgcatcgaccattccaaattgtgttacttacgatcctacatttcattatgaattagcagtaatttttcgagaaggtctaagaagaatgcatgagaaaaatgagaatgttttttattatataacaacaatgaatgaaaattactcacacccagaaatgccgaaagataagaattgtgaggaaggtattctaaagggcatgtataaaataaaagaatttaacaaatacaaaaaaactaaaatccaacttttaggatcaggtacaatcttaagagaaatgatatctgctgcagagattttacaaaatgattatcaaattgacagtgaaatatggagtgtaacaagttttaatgaattaagaaaagatggaatggaagtagaaagatataatcttttgaacccagataaagaacctaaaaaatcttatgttgagcaatgcctaggtcaagcagaaggcccgattatggctgcatctgattacatgagaatgaattcagatcaaatcagaccttatgctaataaaagtttttattcattaggagcggatggttttggaagaagcgatacaagaaaaaatttaagaaaattttttgaggtagataaagaacattttagtgctt

SEQ ID NO: 216542 - DNA, 920 bp, Unknown
  Bacterial polypeptide expressing nucleotide sequence isolated from the Sargasso Sea
agaagaaggtataaacgaaagtcgggagcaatgtcattcttggattgcagctggtacagcttacacaaatcatgatttagaaatgatacctatttatatcttttactctatgtttggttttcagagagttggtgacttagcttgggccgcaggtgactctcaagcaagaggtttcttaattggggctactgctggtagaacgactttagctggagaaggacttcagcaccaagatggtcatagtcatttactagcatcaaatattcctaactgtattagttatgatcctacgtttgcttatgaaatggctgtaattttaagagatggactaaaaagaatgcatgagaaaaaagaaaatattttctattacatcactgcaatgaatgaaaattattctcacccagaaaaaccaaagggatccgatgaaggaattttaaagggaatgtatttatttaaagaaaataataacaagaataaaactaaagtgcagcttttaggatcaggaacaattttaagagaaataattgctgctgcagaaattttatcaaaagattatggagtagactctgatgtatggagtgtaactagcttcaatgaattaagaaaagacggtatggaaactgagagatggaatttactaaatccaaatgaaaaaaagaaaaaatcatatgttcaaaagtgtttagaaaaaacagatggaccagttattgctgcatcagattacactaggtctttttcagatcagataagaccttacacggaaaaacctttttactctttagggacggatggttatggaagaagtgatacaaggaaaaatttaagaaagttttttgaggtcgataaagaacatatagttgcttacacattaagtgctttagcaaaagagcaattaattgagaccaagaaagctgaaagtg

SEQ ID NO: 216543 - DNA, 883 bp, Unknown
  Bacterial polypeptide expressing nucleotide sequence isolated from the Sargasso Sea
agcaagagaaaaattagataatctaatttttgtaattaattgcaatcttcaaagattagatgggcctgtgagaggtaatggaaaaattattcaagaacttgaaggaagatttagagggtcaggttggaatgtaattaaagtaatttggggctcttactgggatcaacttttgtctaaagataaaactggtttgctagttaaaagaatgacagaagcagttgatggcgaatatcaagcattcaaagcaaaaggtggggcctacgtaagagaaaaatttttcggtaaatatcctgaattaaaagatttagtagcaaatatgactgatgcggatatttggaaattaaatagaggcgggcatgatccgcataaggtttattctgcttatcatgctgctgtacgttgcaaaggaaagcctacagtaataatagcaaaaacaattaaaggttacggtatgggtaaatctggtgagagtataaatacaacacaccaacaaaagaaattagatgaagaagatttattattctacagagatagatttaatgttcctctcactgataagcaggttaaaaatattgaatattacaaaccacctgaaaattcggaagaaattaagtatttgaaaaattgtagagttaagcttggtggaaacattcctgagagaaatacttttgcaaaaccggttaaaacaccacctcaagatatctttgaaagttttatgaagtctacaggtgataaggaaatgtctacaacaatggctcttgtaagaatgcttgcaaatttacttagagacaaaaacgttgcgccaagattagtccctatcattgcagatgaagcaagaacttttggtatgaaaggtttttttcaaaagattggtatttacgcc

SEQ ID NO: 216544 - DNA, 748 bp, Unknown
  Bacterial polypeptide expressing nucleotide sequence isolated from the Sargasso Sea
aataaatcaagttataaatgaaggagatattgatccattagaaacaagtgagtggcttgagtcactttcagcagttatagaaaaagatggaaatcaaagagcacattacttaatcaaagaattaattaataaatcgtacatggaaggagcaaatattccatatacacaaaatactccatatataaatacaattcctgttagtgaagaaaagaaatctaatggtgatcagaatatagaaagaagaattagatcattaataagatggaatgctgcagctatggtagtgagagctaataaaaaatttcctgagcttggaggtcatattggaacatttgcatcagctgcaactctttatgatgtagggatgaatcacttttggagagcaaaaaataataaatttggaggtgatttagtttattttcagggtcatagcgcacccggtatgtatgcaagagcttttattgagggaaggcttagtgaaaaacaattagatagttttagacaggaagttaatcctggtggtttatcatcttaccctcatccttggttaatgccaaagttttggcaatttccaacagtatcaatgggattgggcccgatgttagcaatctatcaagctagatatatgaagtatttaattaacagaggattaataaaagacgaaggaagaaaagtttgggccttcttaggggatggggaaatggatgaaccagaatctttaggtgctattggattagcagcaagagaa

SEQ ID NO: 216545 - DNA, 968 bp, Unknown
  Bacterial polypeptide expressing nucleotide sequence isolated from the Sargasso Sea
catccatggttaatgccaaaattttggcaattcccaactgtttcaatgggtcttggaccaataatgtcaatctatcaagctagatttaataaatatcttataaatagaggtttattaaaagatgaaggaagaaaaatctggtgctttcttggagatggagaaactgacgaaccagaatcgttgggtgcgattggattagctgcgagagaaaaattagataatttaatttttgtaattaattgtaacctacaaagacttgacggacctgtaagaggcaatggaaaaataattcaggagcttgaaggaatatttagaggagcagggtggaatgtaatcaaagtcatctggggttcgtactgggattctttacttgctaaagataaatcaggattattaataaaaagaatgggagaagccgttgatggtgagtatcaagcatttaaagctaaaggaggagcttacgtaagagaaaaatttttcggaaaatatcctgagttattagatttggtatctcagatgacagatagagatatttggaaacttaatagaggtggacatgatcctcataaagtttattcagcttacgatttggcgatgagaaataaaggtacgccaacagttatccttgcaaaaacaatcaaaggatatggaatgggtaaatctggagaaagtataaatataacccatcaacaaaaaaaattagatgaaggagatttattatattatcgagatagatttgatgtcccattaacagatgagcaagtaaaaaacattgaatattataaacctcctgaaaattctgcagaaataaaatacttaaaagaatgtagaattaaattaggaggctatcttccagaaagatcgtcttttgcaaaagctataaaaactccgccagaagatgtttttagcgcaatgaaagagtctactggtaaaaaagaaatgtctacaactatgataatgggtaagaa

SEQ ID NO: 216546 - DNA, 668 bp, Unknown
  Bacterial polypeptide expressing nucleotide sequence isolated from the Sargasso Sea
aggacaattcccgtgtccaattgtatttagaggaccaactgcttcagcaggtcagttagctgcgactcattctcaagcttttgaaagttggtttgctaattgccctggtttaaaagttattgttccatcaaacccatatgatgcgaaaggtttactgaagtcagctataagagatgacgacccagtaatttttatggaatcagaacaaatgtatggtgataaaggggaagttccagatgaggagtatttattacctattggtgttgcagatattaaaagaaaaggaaatgatgttacaattgtatcttttggtaaaattattaaggaggcatttaaagcggcagatgaattggaaaaagaaaatataagttgtgaaattattgatctaagaacaataagacctttggattataaagttatctttgaatctgttaagaaaactaataggttagtaattttagaagagtcgtggccttttggaaatatttcaactgaagtaacttatcaggttcaaaatgaaatttttgattatttagattcacctattgaaaaaatcaatactgcagatactccagctcctttctcacctgttttgctcaaagaatggttgccaaacagtttagatgttattaaagccgtaaaaaaagtaatttaccataaacaataaa

SEQ ID NO: 216547 - DNA, 682 bp, Unknown
  Bacterial polypeptide expressing nucleotide sequence isolated from the Sargasso Sea
cgaagtagcagttatcgttcaagacggtctacctcgcatgtacggtaataacgagaatatcttctattacctaacattgatgaacgagaactatcagcatcctgcaatgccagaaggtgatgatgttgctgaacagatcatcaaaggcatttacaagctagagcgtgttgaaaatgacaagtctaagctgaatgttcagttgatgggctcaggcactatcttaaacgaagtgcgtaaagcggcacagattctttgtgacgactacaacgtatcttctgacgtttactctgtgacttcattcaacgagctagcgcgtgaaggtcaagacgtagcacgctggaacatgctaaacccagaagctgagcaaaaagtaccttacattggtcaggtaattacgaaagatgcaggtcctgcgatttctgccactgactatgtgaagaactactcagaccaagtacgtgcgttcatcgaaactgaataccgctgcctaggtacagacggtttcggtcgaagcgatagccgtgaaaacttgcgtactcactttgaagttaatgcgtcatacattgtggtggcatcactttacgaattggctcagcgcggcgacgttgagaagaaagtggtagcagaagccattaagcgttttgaaattaacgctgaaaaacttaacccactttacgcgtaa

SEQ ID NO: 216548 - DNA, 925 bp, Unknown
  Bacterial polypeptide expressing nucleotide sequence isolated from the Sargasso Sea
tcttcaatgtcagataaagatatttggcgattaaacagaggagggcatgatcctcacaaagtttttgcagcatacgataaagcagtaaatcacaaaggaagtcctacagttataattgcaaaaactataaaaggttacggtatgggaaaaagtggagaaagtgtaaatactactcaccagcaaaaaaaattagatgtagatgatttaatgtattacagagatagatttgatgtacctttaacagattcacaggttaagaatattgaatattttaaaccagatgaaaactctaaagaaataaaatacttaaaaaaaagaagagtagaattaggtggctttattccagagagaacctcatactccaaacctattaaagctccaagtaaagatatttttgattttatgaaaaaatctactggagaaaaagaaatgtctacaacaatggcattagttagaatgttgactaatcttttaagagataaaaatgttgcaccaaaattagttccaattattcctgatgaagctagaacttttgggatggaaggtttttttcaaaaaatcggtatttatgctcatgagggtcaaaagtacgagccagaggactctgcgcaactttcatcttatagagaagaaaaaagtggccaagtattagaggaaggaattacagagtcaggatccatttcatcttggattgcagcaggtacggcatatacaaatcatgatattgaaatgataccaatttatcttttttattctatgtttggttttcagagaatcggagattttgcatgggcagcaggagatagtcaagcaagaggatttttaattggtgcgactgcaggtaggactacacttgctggagaaggactacaacaccaagatggacatagtcatttactagcatcaacaataccaaactgcattc

SEQ ID NO: 216549 - DNA, 823 bp, Unknown
  Bacterial polypeptide expressing nucleotide sequence isolated from the Sargasso Sea
atcaatagaggtttgttaaaagatgaaaatagaaaaatctggtgtcatataggtgacggagaaatggatgagcccgaaagtttgggggccataggtttagctgctcgagaaaaattagataatttaatttttgtagtaaattgtaatttacaaagacttgatggtcctgtcagaggtaatggaaaaataattcaggaactagagggtagatttagaggcgcaggttggaatgttattaaagttatttggggttcttattgggatcaattattggcaaaagacaaaactggtttacttgttaaaagaatgaccgaagctgttgatggtgaatatcaggcatttaaagcgaagggtggtgcctacgtaagagaaaaattttttggaaaatatcctgaattaaaggagctggttgctaatatgactgatgcagatatttggaaattaaatagaggtgggcatgaccctcataaggtttactcagcatatcatgcggcagtgagatctaagggaaaaccaacggtaataatagctaaaacaatcaaaggttatgggatgggaaaatcaggtgaaagtatgaatactacccatcaacaaaaaaaattagatgaaaaagatttgctgtattacagagatcgtttcaatgttcccttaaccgacaaacaggtaaaaaatatagaatattataaaccaccggatagctctgaagaaattaaatatcttaaaaattgcagaacgaaactcgggggtaatatcccagaaagaacaacgtttgcaaaatcaattaaaacacctcctgtagatatttttgaaagttttatgaaat

SEQ ID NO: 216550 - DNA, 892 bp, Unknown
  Bacterial polypeptide expressing nucleotide sequence isolated from the Sargasso Sea
ttgatgatggttatgagagcgaatatggctaacgttgaactgggaggtcatattgccacctatgcatcaattgccgatctttttgaagtgggcttcaatcatttttttgtcgctccgtttgatgaccatccaggtgatttggtttattttcaaccacatgcagcacctggcatctatgcccgagcttatcttgagggtagactgagtgaagagaatctcatctatttccgtcgtgaggtaagtggtggcattggtaaaggactatcatcttatccccacccgaccctgatgccagatttctggcagttcccaacaggttctatgggattgggtcttctttctgccatctaccaagcacgttttcagcgttatttggagaatcgagaactccttgagccaagtgctagaaatgtttgggcctttgttggtgacggagagatggatgagccggaatcactagcaggtatatctcttgccgcgagagagcagctagataatcttactcttgttgtaaactgtaacttgcagcgtttagatggcccggtgcgtggaaatggcaatatcgtccaggaacttgagactctatttgctggagcgggttggaacgttatcaaatgtctttggggttctaactgggatgtactctttgcccgggacaaagatggctggattttaaaacgcatgtctgaagccatagacggagagttccagaagctttccgccactgatgggatgtataaccgggagaatttcttttcaaaatatgaagagttggcggccttagtagcaaatatgtctgattctgagattgatatgttgcaaaggggggggcatgaccctatcaaaatttatgcagcttacaagagtgctatgttgcataaaggtcagccaa

SEQ ID NO: 216551 - DNA, 856 bp, Unknown
  Bacterial polypeptide expressing nucleotide sequence isolated from the Sargasso Sea
ctggttgctaatatgactgatgcagatatttggaaattaaatagaggtggacacgaccctcataaggtttattcagcatatcatgcggcagtgagatctaagggaaaaccaacggtaataatagctaaaacaatcaaaggttatgggatggggaaatcaggtgaaagtatgaatactacccatcaacaaaaaaaattagatgaaaaagatttgctgtattacagagatcgttttagtgtccctttaactgacaaacaggtaaaaaacgttgaatattataggccaccaaacagctctcaagaaattaaatatcttaaaaattgcagaacgaaacttggaggtaacatcccagaaagaacaacgtttgcaaaatcagttaaaacacctcctgtagatatttttgaaagttttatgaaatcaactggtgaaaaagaaatgtcaaccactatggttttggtaaggatgttagctaatttgcttagggataaaaatgtagcaccgagattggttcctataataccggatgaagcaagaacctttggtatggaaggattttttcaaaaaataggaatttatgctcacgagggacaaaaatatgaacctgtggactctgaacaattaagttcctatagagaagataaaagtggccaggttttgcaggaaggtataaccgaagctggcgcaatgtcctcatggatagcagcaggaacggcctacacaaatcatgatattgaaatgattccaatttatctattttattcaatgtttggatttcaaagaattggtgatttggcttgggcagctgcagacactcagacaagaggttttttaattggtgctacctctggtaagacaa

SEQ ID NO: 216552 - DNA, 1123 bp, Unknown
  Bacterial polypeptide expressing nucleotide sequence isolated from the Sargasso Sea
aaagttatttggggatcttattgggactcacttttagcaaatgataagacgggacatttagtaaaaattatgaatgagaccgtagacggtgaatatcaagcatttaaagcaagaaatggactgtatgtgagagaaaagttttttggcaaatatcctgaaacaacagaattagtttcatcgatgtcagataccgatatttggcgtcttaatagaggaggtcatgatcctcataaagtttatgctgcatatgataaagcggtcaatcacaaaggaagccctacagtcataatagccaaaactataaaaggctatggtatgggtaaaagcggtgaaagtgtaaatactactcaccagcaaaagaaattagatgtagatgatttaatgtattacagggataggtttgatgttcctttaacagattctcaagtcaaaaatattgaatatttcaaaccagatgaaaattctgaagaaattaaatacctaaaaaaaagaagattagaacttggtggatttataccagagagaacatcatattcaaaaccgattaaagccccagttaaagatatttttgattttatgaaaaagtctactggggaaaaggaaatgtctacaacaatggcattagtaagaatgttaactaatcttttgagagataaaaatgttgcatcaaaattggttccaattattcctgacgaagctagaacattcggaatggagggtttcttccaaaaaataggtatatatgctcatgaaggtcaaaaatatgagccagaggactcagcacaactttcatcttatagagaagaaaaaagtggtcaggtattagaagaaggtattacagaagctggttcaatatcttcttggattgcggcaggaacagcatatacaaatcatgatattgaaatgataccaatttatcttttctattctatgtttggttttcaaagaataggagattttgcttgggctgcaggagatagtcaagcgagaggctttttaattggcgcgactgcaggaagaacaacacttgcaggagaaggtcttcaacaccaagatggtcatagtcatttgttagcatcaactattccaaactgcatttcttatgatccaacattccattatg

SEQ ID NO: 216553 - DNA, 1156 bp, Unknown
  Bacterial polypeptide expressing nucleotide sequence isolated from the Sargasso Sea
cttggcaattatagacgggggaacagaaaaaaaagatataaatcccaaacctataatcgaaacaaaagaaattataaaagaagagaaaaaatctaatggattaaaaaatggtaaacaaaaaatttatgctcaacctgtttcaaaagacgatattgatccagccgaaactcaagaatggatagattcactcaaagccgttttaaaaactgacggttcacctagagcggggtatctacttaaaaagattatagatgaagcttattctcaaggtttggttttgcctgacaccagaaccaccccttatattaatacaattcctgctgccgcagatattagatctccaggggatcaaaatttagaaagaaagatacgagcatacattaggtggaatgctgcagccatggttgttaaagcaaataaaaaaaatccagagcttggaggtcatataggaacttttgcgtctgccgcaactttatatgatgttggtatgaaccatttttggagagcgaaaaataataaatttggaggagatctaatatattttcagggacatagtgcgccgggaatgtatgcaagagcttttttagaaggaagaatttcagaaaaacaattagataaatttagacaagaagttgagaaaggtggattatcctcgtacccacatccttggttaatgccaaaattttggcagttcccaactgtttcaatgggacttggtccaatgatggcaatttaccaagctcgtttcactaagtatttgataaatagaggtcttctaaaagatcaagatagaaaaatatggtgtcacttgggcgatggtgagatggacgaaccggaaagttttggagctgttggtctagcggcaagagaaaagttggacaatttaattttcgttattaattgtaaccttcaaagattggatggtcctgtaagaggaaatggcaaaattattcaggaacttgagggcagattcagaggtgctggatggaatgtaataaaagtgatttggggctcttactgggatcagcttttatctaaagataaaaccggtttacttatcaaaagaatgaatgaagcagtcgatggcgaatatcaggcattcaaagccaaagggggggcttacgtaagagagaaattttttggtaaatatccttga

SEQ ID NO: 216554 - DNA, 1384 bp, Unknown
  Bacterial polypeptide expressing nucleotide sequence isolated from the Sargasso Sea
catgtcagctcagcccgaccctcaggccggtttcggcatcggttccgacaccgaccagcaagagacccgtgaatggatggacgcgctgtccgccgtcatcgacaaggagggcccggagcgcgcccacttcctgttggaacaacttcttgaacacgcccgccagagcagcatcgatctgccgttctccgcgaacacgggctacgtcaacaccatcgagcctgaaaaagaggcccactgccccggcaacatcgccatcgaaaagcgtctgcgcgcctacatgcgctggaacgccatggccatggtggtgcgtgccaaccgcctgaaccccgccgatggcggcgacctgggcggccacatcggttcgtttgcttcggtggccagcatgtttggcgccggtttcaatcatttctggcatgccgagagcgaaggccacggcggcgacctgctttacatccagggccacagcgctcccggcatctacgcccgtgcctacctcgaaggccgcctgaccgaagagcaactcgatagcttccgccaggaagtcgatggcaagggcctgtcaagctacccgcatcccaagctgatgcccgagttctggcagttccccacggtgtccatgggcctgggcccgctgatggccatctatcaggcacgcttcctcaagtacctgcacgcccgtggcatcgctaacaccgaaaaccgcaaggtctgggtgttctgcggcgacggcgaaatggacgagcccgaatccctgggcgcgatcggtctggccgcgcgtgaaaacctcgacaacctggtcttcgtcatcaactgcaacctgcagcgcctggacggcccggtgcgtggcaacggcaagatcgtgcaagaactcgaaggcgagttccgtggcgcgggctggaacgtgatcaagctgctgtggggcaatggctgggacgagctgctgcgccgcgacaagagcggcaagctcaagcagctgatgatggaaacgctggacggcgactatcaggccatgaaggccaacgacggtgccttcgttcgcaagaacttcttcggcaagtaccccgaaaccctcaagctcgtggagcacatgaccgacgaagaggtgttcgagctgcgccgtggcggccacgagcccgccaaggtgtacgcagccttccacgccgccaacgagcacaagaaccagcccaccgtgctgctggtcaagaccgtcaagggctacggcatgggcaaggccggtgaaggcaagaacaccgtgcaccagaccaagaagctgtcggacgaagacatcaagtacatccgtgaccgcttcaacatccccatccctgacagccagctggccgagatcccgtactacaagcctgccgacgacacgccggaaatgcag

SEQ ID NO: 216555 - DNA, 934 bp, Unknown
  Bacterial polypeptide expressing nucleotide sequence isolated from the Sargasso Sea
tgccgcaggaacttcatacactaatcatgatatagagatgatccctatttctttattctattctatgtttggatttcaaaggattggtgattttgcatgggcaggtgccgatagtcaaactagaggatttttaatcggagctacttctggcagaacaacattagctggagaaggactacaacatcaagatggtcacagtcatttgatcgcatcaacgattccaaattgtatttcttatgatccaacttttcattatgaattagctgttatttttagggatggattgagaagaatgcatgaaaaaaacgagaatgttttttattatattactacaatgaatgaaaattattcacatccagaaatgccaaaagatagaaaatgtgaagaaggaattttaaaaggaatgtataagattaaagaatttaacaaatataaaaaaacaaaaatacagtttcttgggtctgggtcaattttaagagaaatgatagctggtgcagagatattacagagagaatatcagatagatagtgaagtttggagcgttacaagttttaacgaattaagaaaagatggattagaaattgaaagatataaccttcttaatccagataaggatcaaaaaaaatcatttgttgaaaaatgtttaggcaatactgaaggtccaatattagcagcctcagactatatgagaatgaattcagatcagataagaccttatattaataaaagtttttattccttaggaaccgatggatttggaagaagtgatacaagaacaaaattaagaaagttttttgaggttgataaagagcatatagttgcatatggattaagcatattagccaaagaacagctattaacatctaaatatgcaaaagatgcaataaaaaaatataaaattgatactgaaaaaccaatgcctacaaaattataa

SEQ ID NO: 216556 - DNA, 1543 bp, Unknown
  Bacterial polypeptide expressing nucleotide sequence isolated from the Sargasso Sea
agcgtacaaagaagcaaccgctcacaaaggatctccaaccgtgattttagcaaggacaattaaagggtatggactaggagaggctggagaagggagaaacattactcacaatcaaaagaaactaagcgacaatgagatgatttattttcgtgacaggtttaatatccccgtttccgatgacgatgcaactaaaggaaagtttcaaaagttcgaagacaactcagaggaatacgaatacctaatggaacaaagaaaaaagcttggtgggtcaatccccgttaggattaatcagccagaagcactcaaggttccggacgtatctatttttaaagaactattagatggaactggtgaaagagaagcgtctacaactatgtcttttgttcggttactttccatactaacaaaggacaagtctataggaaagcatgttgtgcctattgttcctgatgaggctcgcacctttggtatggacccactatttagacagcttgggatatacgcacattcgggacagctgtatgacccggttgattcggatcagtttttatattacaaagaagaaaaaaatggacaaattcttgaagagggtataaatgaagcgggggctatctcctcttttattgccgccggaatgagctacagcaatcatggagttcacatggttccgttttatatatactattccatgtttggatttcaacgagtttgggatcttatttgggctgccggagacatgcgagtgcgaggcttcctattgggcggtactgccggaaggaccactctcaatggagaaggccttcaacatcaagacgggcatagtcatctcgctgcggctgctacaccaaatgttaaatcttacgactgcgcctatgcctatgaaatagcaattattgttcaaaggggaatggtagaaatggtagaagagaatagggatgtgatatactaccttacgcttgagaatgaaaactatattcaacctagtaaaccagaaggagtttctgatggtgtggttagagggttgtacaaaatgcggggcaccgaccaacctaagattagactattaggaagcggtccattaatgcgagaggttttatctgctgcagagttattaaaggaagattgggggatagaacctgcaatttggaacgttacaagtttcagtgagctaaggagagaagcagaggcagtagaaagatggaacctaacccaccccgatgaaacaccgagggtgtcttatgtagaagagttgcttagcaaaaacgctgttccaaccgtggctgtgtctgattatatcaaactagtttctgatcagattaggccatatgtcccgggagactattactgtttaggaactgacggatttggcagaagtgatacacgtgaagggctgagaagattttttgaggtagacaggtattacgttgttttgactgcgataaaagcactggtttatgctggagaattagaagccagtatggtcgatgcggcccttaaaaagtatggtctagatccagaaaaaccaaaccccgtaacggtttaa

SEQ ID NO: 216557 - DNA, 734 bp, Unknown
  Bacterial polypeptide expressing nucleotide sequence isolated from the Sargasso Sea
tttgattgcttcaactatacctaattgtgtagcatatgatccgacatttcattatgaactcgcagtaatttttagagaaggcataagaagaatgcatgaaaagaaagaaaatatattttattacataactactatgaatgaaaactattcacaccctgaaatgccaaaggataaaaattgtgaagaagggattcttaaagggatgtataaagttaaagagtttaataaatataaaaaaactaaaattcaacttttaggctcaggtacaattttaagagagatgatttcagctgcagaaattttacaaaatgaatataaaatagatagtgaaatttggagcgttactagctttaatgaactaagaaaagatggaatggaagttgaaagatataatcttttaaatcctgataaagagcaaaaagtttcttttgtagaaaaatctttgggtaaatctgaaggtccaataatggctgcctcagattatatgagaatgaattcagatcaaatcagaccttatacaacaaagagtttttattctttaggcactgatggttttggtagaagtgatactagaaaaaatcttagaaatttttttgaggtagataaagaacatttagttgcttatggtttaagtatattagcaaaagaacagcttatagcctcaaagtacgcaaaagatgctatgaaaaaatataatatagatagtaataaaacaatgcctactaaattataaa

SEQ ID NO: 216558 - DNA, 967 bp, Unknown
  Bacterial polypeptide expressing nucleotide sequence isolated from the Sargasso Sea
agagggaataaatgagtcgggagcaatgtcatctttgattgcagctggtacagcttacacaaatcatgatttagaaatgataccgatttatatcttttactctatgtttggttttcagagagttggtgacttagcttgggccgcaggtgactctcaagcaagaggtttcttaattggggctaccgctggtagaacgactttagctggagaaggacttcaacaccaagatggtcatagtcatttattggcatcaaatattcctaactgtattagttatgatccaacgtttgcttatgaaatggctgtaatattgagagatggactaaaaagaatgcatgagaaaaaagaaaatattttctattacatcactgcaatgaatgaaaattattctcacccagaaaaaccaaaaggatccgatgaaggaattttaaagggaatgtatttatttaaagaaaataataacaagaataaaactaaagtgcagcttttaggatcaggaacaattttaagagaaataattgctgctgctgaaattctatctaaagattacggtatcgactctgatgtttggagcgttacaagttttaatgaattaagaagagacggaatggagacagaaagatggaatcttcttaatccagatgaaaaaagaaaaaaatcttatgtacaaaaatgtttatcaaaaagagatggtcctattgttgctgcatctgattatacaagatcattttctgatcaaataagaccatatgttgaaaaaccgttttactctttaggtacagatggttatggaagaagtgacacgagaaaaaatctaagaaaatttttcgaagtagataaagaacacatagttgcttatactttaagcgccttagcaaaagaacaattaattgaaactaaaaaagcggagaaagcgataaaaaaatttcagattgataaagatagagattttccatctaatttataa

SEQ ID NO: 216559 - DNA, 1441 bp, Unknown
  Bacterial polypeptide expressing nucleotide sequence isolated from the Sargasso Sea
aatggaaaataaattattagtccccgatataggcgattttgaaaaagtagaaatcatagaaattctagtaaaaaaaggtgataaaataaaaaagaacgattctatagttactttagaaagtgataaatcgagcgttgaagttccttcaacttctgaaggtgtagtagcaaatgtaaatgtaaagattggagataaagtttcaaaaggcgatttacttataactttaaaaattacaggccagcctgaggaaaaactaaaagaaactaatgaagaaaaaatacctccagttacagaacaaattattaaagaagcagaaaaaacattagttttaaaagaagaagttgaaaaaccaaaaataataaacaaaaaaaaagaaagtgttgaaaaagtcgagattgtaagaaatggagatattgatccaatagaaacacaagaatggatggaatcactttctgcggtacttgaaaaagatggaaaacatagagcacaatttttgatcaagcaattaatagaacattcttataaagaaggctcagatctagttttgtcaagaaatacaccctacattaatacaataccaccagaggaagaaataaagtctccaggtgatcaaaatattgaaagaaaaataagagccttgattagatggaatgctgctgccatggttgttagagcaaacaaaaaaaactcagagctgggtggtcacatagggacatttgcatcagctgctacactttatgatgttggtatgaatcacttttggagagcaaaaactaataagtttggtggagatttaatttattttcaaggacatagtgcacctggaatgtatgctagagctttccttgaaggcaggatcagtacaaaacaattagattcttttcgtcaggaagttaatcctggaggtctttcttcttatcctcatccatggttaatgcctaagttttggcagtttcctacagtttcaatgggactaggacctataatgtcaatttatcaggctcgatttacgaagtatttaattaatagaggattattaaaagacgaaggaagaaaaatttggtgtcatttaggcgatggagaaacagatgaaccagaatctttaggagcaataggattagctgccagagaaaaattagataatttaatttttgttgttaattgtaacctacaacgacttgatggtcctgtaagaggcaatggaaaaataattcaagaactagaaggaatatttagaggagctggctggaatgtgatcaaggttatttggggatcttattgggactcattgcttgcaaaagacaaaactggtttattaataaaacgtatggacgaagctgttgatggtgagtaccaagcatttaaagcaaaaggcggatcttttgtgagagaaaaattttttggcaaatatccagaacttttaaatcttgtttctcaaatg

SEQ ID NO: 216560 - DNA, 718 bp, Unknown
  Bacterial polypeptide expressing nucleotide sequence isolated from the Sargasso Sea
tatacctaattgtatatcttatgatccaacatttggctacgaactagcagtaatttttagagatggattaaagagaatgcatgaaaaaaaagaaaatattttttattatataacaacaatgaatgaaaattattctcatccagaaatgccaaaagataaaaattgcgaagaaggaatattaaaagggatgtataaaattaaagaatttaataagtttaaaaaaacaaaaatacaattaataggctctggaactatattaagagaaattattgctggtgcagaagttttacaaaatgaatatcaaatagacagtgaagtatggagtgttacaagttttaatgaattaagaagagatggtatggaaactgaaagatacaatcttttaaatccagataaaaaacagaaagtttcttatgttgaaaaatgtcttgaaagaacagaagggccaattttagctgcatccgactacatgagaagtcattccgatcaaatacgaccatatgtcaaaaagagtttttattcattaggtactgatggatttggcagaagtgatacaagagaaaatttaagaaaattttttgaagtagataaaaaacatattgtaacttatgcgcttagtattctttctaaagaacaattaatagcatcaaaatatgtacaagaggcgataaaaaaatataatatagaaactgaaaaaccgtttccaagtaaattataa

SEQ ID NO: 216561 - DNA, 1783 bp, Unknown
  Bacterial polypeptide expressing nucleotide sequence isolated from the Sargasso Sea
ggttcagaatgggatgatttccttgataaagacaaatttggacttttaataaaacgattagaagaaatggttgatggtgatagcttaaaatatgtagttgaaggtggaacttatataagagaaaacttttggggtaaatatccagaacttcttaaaatggttgagaaatatacagatgatgaattatggaaattaaaagttggtggccatgaccctgcaaaagtatatgctgcttttgctgaagctattaatcataaagatgctccgacagttatcttagctcaaactataaagggctatggactcggtgaggctggtgaaggaagaaacattacccatcagcaaaaaaaactaaacgaggaagaacttttacacttccgttctagattcaatataccattatctgatgaagaatgtgttaaagctccattttacaaacctggttcaaatagtgaagaaattaaatatttacagcaaaaacgaaaagatttaggtggctaccttccaagccgtaatgataaagctccatcattaaatataccttcaatatcaatcttgaatgagctatttaaggggtctgataaacgacaaatatcaacaactatggcctttgttcgtattctaactattcttacaaaagatagtgatataggtaaaaatatcgtaccaataattccagatgaagcaagaacttttggaattgacccactatttcgtgaattagggatatattctcactcaggacaagtttatgaccctgttgattcagatcaattcttatattacagagaagcaactgatggacaaattttagaagaaggtattaatgaagctggtgctatttcctcatttattgctgcaggaacatcttatagtaatcacaatattaatatgattccattttttatatactattctatgtttggatttcaaagagtaggtgattttatttgggctgctgcagatatgcgaacaaaagggtttctgttaggggctactgcaggtagaacgactctagctggagaaggtttacaacatcaagatggacatagccatcttatggcatcagttgtccctaatattaaagcatatgatccagcatacgcctatgaaattgcagttattattcatgatggacttaaacgtatgtacgttgatcaagaagatgtattttattatattactttagaaaacgaaaactacattcatccacccatcctaaaaaatacagaggaaggcataattaaggggatgtacaaatttaaagaaattaaaacagaaaaaaatctaaatattcaattacttgctagtggttccatgctaaatgaggtaatagaagctgcaaaaatattaaaagaagactggggaataggatcagatatttggagtgttactagctttagcgaactacatagagaagcagaagataaaagtagatggaatactctccacccaacctccaagcctaagcaatcatatctggagtcatgcataaaagataaaaatggtcccgttgttgctgtttctgactatgtaaaattagtggctgaacaaatagcaccctatttaaaatgtccttttatagcactcggcactgatggttttggcagaagtgaaacacgtgatgagttgcgaagtttttttgagattaatcgctattatataactatgacagctatagaatcattaagtaaagaagggaaaattgataaagttgaaattcaaaaagcaatagaaaaatataatttagaccctgaaaaatctaacccaacaactgtttaaa

SEQ ID NO: 216562 - DNA, 1172 bp, Unknown
  Bacterial polypeptide expressing nucleotide sequence isolated from the Sargasso Sea
ggaatttttcaagctcatgtaatgagatatttagaaaaaagaagtttaattgaatcaattgaaaatagaaaagtttgggttttttgtggtgatggagagatggatgagccagaatcaatgggttctataagcttagccggaagagagaagctcaataaccttgtatttgttgttaattgtaatttgcagagattagatggccctgttagaggaaattctaaaattattactgaactttctaaacagtttagtggagcaggttggaatgtcgtacatttaatctggggaagaaaatgggatgaattagtaaataaagataaagatggcctattgcaaaaaattatgaacgagacagttgatggagaatatcaaaattacaaagcaaaaggtggcaaatacactagagagaacttttttggcaaagatccagaagttcttaaaatgatagattcattaagtgatgaagaagtagaagatttaaataggggagggcatgacccaactaaaatttataatgcttatcgcttagcttatgaggagaaggataggccgacagttattcttgcttttacaattaaaggttatggcattggttcaagacaagcagataatactgctcatcaagtaaaaaaacttacaaaagagaatctggaagattttattgataaatttgatttaccaataaaaaaagaaagcttagataacccaaattttcttaacctaaataggaataaaaaggttaaagaatatttactctcaagaagagaagagttgggaggtctattaccttcaaggaaagtttctaagaaaaaattaatagcaaaaaaagaatctttcatagatttcgataaaaaattagatagagagcagtcaacaacaatggtttttgtgaggcttctaactaaacttttaagagatacggaaataggttcaagagtagtaccaattgttccagatgaagcaagaacgtttggtatggacgctttatttaggcagtttggtatttattcatctgaaggtcaaaaatatgaaccagaagatgcagataaagtaatgttttatagagaaagtgagtctggaataatgcttgaggaaggtattaatgaagccggtgcattctcagcatggctggctttagcaacttcttatttcaacaacaatctaccaatgat

SEQ ID NO: 216563 - DNA, 529 bp, Unknown
  Bacterial polypeptide expressing nucleotide sequence isolated from the Sargasso Sea
tgtacctttttgaaaaaatcagataaatcaaaagtacaaatacaattacttggctcgggtacaattttacgcgaagtcattgcagcagctgagctgctagaagaagactttggtatttcatcaaatatatggagtgtgaccagctttaatgagctgcgacgagaaggattatcgataaaacgacaaaatttattgcatcctgataagaagcagaaactctcatatgtcgagtctttatttaaagatgaaaatacgcctgtagttgcagcaactgattatatgaaaatttatgcagatcaaatacgtgagttcattcctaataaatatattgtattaggtactgatgggtttggaagaagcgatacaagaaatcaattaagaaaattttttgaagtaaatcgatattacatagttgtctctgcattaaaaggattagccgatgaaggaaaaatagaaataggtaagattaatgaggcaataaaaaaatataaaattgatccaaacaagcctgaaccaacaagtatctaaa

SEQ ID NO: 216564 - DNA, 758 bp, Unknown
  Bacterial polypeptide expressing nucleotide sequence isolated from the Sargasso Sea
tcagcatcaagatggtcatagtcatttaatggcatcaactatacctaattgtatttcatatgatcccacatttcattatgaattggcaataatttttagagatggtttgaaaaggatgcacgaaaaaaaagaaaatgtcttttattacataacaaccatgaatgaaaattatcctcacccagcaattccaaaagataaatcatgtgaagaaggaatactgagaggactgtataagataaaagaatttaacaaatataaaaagacaaaaattcagttcgtaggttctggaacaattttaagagaaatgatggcaggtgctgaaatacttcaaaacgaatatcaaatagattgtgagatttggagtgctacaagttttaatgaattgagaaagaatggattggaagtagaaagatacaatcttttaaatccagaaaaaaaaccaaaaaaatcttatgtagaagaatgtttgggtcaaacagaaggccccatattagcagcgtcagattatatgagaatgaattctgatcaaattagaccttttttaaataaaagtttttattctttagggacagatggatttggtagaagtgatacaagaaaaaacttaagaaaattttttgaagtcgataaggaacatatcgtcacttatggacttagtattctagcaaaagaacaacttattacttccaaacatgcatcagaagcaataaaaaaatataaaattgacattaataaaccgatgccaactaaattataat

SEQ ID NO: 216565 - DNA, 759 bp, Unknown
  Bacterial polypeptide expressing nucleotide sequence isolated from the Sargasso Sea
tatgacagtcggctataaagatcaagacccacaggaaacacaagagtggatcgagtccattgaagatgcgcttgaagagcacgggtacgaacgcactcggttccttttagaaacccttataagctttgcccaatctaagggggctcgcctacccttcaacacatcaacgccattttccaatacgatattaccaggacaggagcccaagtaccctggagacagagaactcgagcgtaaaataaaatccatagtaaggtggaacgcgatggcgatggttacaaaagccaacaaagaaacccctggtattggtggtcacatttcaacatatgcatcagcggcaaccctttacgaggttgcatataatcatattttaaaaggcgcagcccacccttctggccaagacatggtcttctttcagggtcacgcatcaccgggtatctatgcccgtgcttttctagaaaagcgattatcaaaagagaacctgcataattttcgtcgtgaactatctgaaggcggggggctctcatcatatccacacccatatctaatgcctgatttttggcaatttgcaacagtttccatgggtcttggccccctaatggccatttatcaagctcggtttatgcgctacatggatgatcggggtttcgttgaggatacaggcagaaaagtctttgcttttcttggagacggggaaatggatgagcccgaatcaacgggagccctaactcttgcaagtagagaaagccttgataatct

SEQ ID NO: 216566 - DNA, 1687 bp, Unknown
  Bacterial polypeptide expressing nucleotide sequence isolated from the Sargasso Sea
atggactctaaaaatgtaattgcagcaatatcattgagtgccgcagttattatattatatggacttttttttgcacctgaaccccagccaattaatcaggctctacaagaaaaaaataatattgtagaaaattctgaagctccaaaattagtagatacacaagaaatcaatacaatttcaagagacgaagctatcaacaattcagacagaattacatttgaaaatgaaaacataattggatctatttctctttcaaatggtggtgcaatagatgattttacttttaaaaactacaatgagaaacttaatggtaaagaaaaaattatattactaaatccgattaatgttaaggatggatatatatttaatacaggatgggtttcatctgacgagaatattgatacaccaaatttagataccaagtggaaaatttctggtaataagaaactttctccaaataatcctgtatctattttttatgaaaatgatcaaggacttaggtttgagagaatcataagtcttgatgaaaagtatttatttaaaattaatcaaaaaataataaataaaacggataaaaaatacaaattttatccatacgcttatttacatcggaataatattcctgaagatttgacagatttttatattcttcacgaaggttttgtaactgtttctgatgaggagttaaaagaaattgattatgatgatattgatgaaaaaagttacactaaaaattcaaaaaaaggctttattgctattggtgataagtattgggttacatcaattattcctcctaaagatagaccctttagaatggatattgattataaaaataaatacagagcaagttacattgactctgaaggattattattagaatcaaatagttcaatagaaaataatgttaaatctattattggtgctaaaaccgtaagagatattgatggttatgcagaaagtgagaatatagataaattcgatctagtgataaattggggaatactttattggctagtaaaaccaatgttttttatacttgaatacttttttatattttcaggcaactatggttatgcaattatattactaactattttagttagaatagtattttttcctttaaatcaatatgcatttaaaagtatgggaaagatgaaagttttacagccagaaatgaatcgtttgaaagaactacataaaaatgacaagcaggagctacaaaaatcacttatgaaattatataaatctgaaggaataaatcctgcatcaggttgtttgcccatattagttcagatcccaatttttttcagtttatacaaattgttattactcgatatttctatgcggcacgctccatttatttggatatgggaagatctttcggccaaagatccggtaacaatttttaatttatttgggttattaccctataatgttccatcttttcttgaaattggtttgctaccactgttaatgggtatcacaatgtttttacaacaacgtttaaatccatcaccaatgacagaccctattcaaaagaaaatatttgcattttttccattttttataactattatattagctccgtttgctgcaggtttgattctttattggacaatgacaaatatacttacaattattcagcagtggatcattctaagaaagacaacagttaaaactaaataaa

SEQ ID NO: 216567 - DNA, 1021 bp, Unknown
  Bacterial polypeptide expressing nucleotide sequence isolated from the Sargasso Sea
gatggatacagaaactcaatcactagttaggatgtttcgtcaaatgcttcgtataagaacttttgaagagcgtgttggtgagctttttctaaaaggaggaaccgcaggttcaatgcttcacctgtcaatcggagaagagtctgctgctgtgggagtaggtgaagcaatgaataccggagatgggtttactactcatcatagaggtcatggaattttcctcgccagaggtgcagacccaaaaaaaatgatggcagaaattggtggtaaggaagatggctattgccgcggtaaaggtggttccatgcacattgcagacaacgatcttgggcacctaggcgctaatgctattgttgggggaggaatttctcatgtggttggtgcaggattatcttataaatatcttggaaaagatcagtctgccgtagcttttttcggcgatggagcaatgcaacagggagggctgtacgaaagcatgaaccttgcggcactttggaaacttccagttatgtttgtatgtatcaacaacgaatatggaatgggaacaagactggaccgagcaagtgcttcactggaatttgccaaacgatccgaaacttttggtttgaatggattggaagtagacggcttagatgttactcaagtacatcataaagctcagaaactgatggaaggtgtccgaaatggagaccctgcatttttaaaagtagattgctatcgttttcacggtcacgctaggaaggataagagtcattaccgtgaagacgtagaggaacaaaaaggcagggagaaagacccaattctccatcttgaagatcaattgattaagggttccttcgtgacaactggggatttggagcaaatcaaatcagaggttgataatgagatggacgaggcaatggaatatgccttaaattcaactgaaccggaatcaattcaacgatttcaggatgtttatgctccggattctcctgaacctcttcctgtggacgaaagaatacgtaaagccctaaacacatcctaa

SEQ ID NO: 216568 - DNA, 1108 bp, Unknown
  Bacterial polypeptide expressing nucleotide sequence isolated from the Sargasso Sea
tccaataattcctgacgaagctagaacctttggtatggacccattgtttagacagttgggtatttacgcacataaagggcagctatatgacccagtcgactctgatcagtttctttattacaaggaagctatcaatggccaaattttcgaagagggaattaatgaggccggtgcgatctcttcctttatagcagcgggaatgtcataccaaacaacaggtgagaacatgattcctttttatatttattattccatgtttgggtttcagcgcgtgtgggactttatttgggctgccggcgatatgagagcgcgtgggtttttgcttggtggaacagctggtagaacaaccttaaacggagaaggtttacaacaccaggatggccacagtcacttggccgccgctgctactccaaatattaaagcgtatgacttagcatacgcatatgaaatagctgtagttataaaacatggtataaaagaaatgttttatgagcagaaagatgttatatactatctaacattagaaaacgaaaactatgtacatcctaaaatgcctgaaaaaattgaaaaagatattattaaaggaatgtataaaattagaaccacgaaaaacccaacaataagattacttggaagcggcccacttctaaacgaggtaattgccgcagcagacttattgaaagatgaatggggtatagatcccggtatttggaacgtaacctctttcacggaacttcgtagggaggctgaggaaatagaaaggtggaacctgataaacccagagcagaaacaaaaacaatctcacatagaaaaagctttaaacaaaaacccagtaccaaccatagcggtttcggactatgtgaagatgtcatcagaacaaatctcaccatatgtttcaggcgcatactatgcattgggaaccgatggttttggcagaagtgatacaagggaaaacctaaggcacttttttgaagttgataggtattacattgttctaactgcggttcgggcgttagcaattgaaggcgtcttagaaatgagtatagcaaataaggtaataaaaaagtataatatagattcaaacaaaccaagtccaataacagtttaa

SEQ ID NO: 216569 - DNA, 776 bp, Unknown
  Bacterial polypeptide expressing nucleotide sequence isolated from the Sargasso Sea
tatgccaagaaaaaaagaaaaacaaactgagacaataaaccttgctaacgatttttctaaggaaacttttctttattggtataaatctatggttttaatgagaaaatttgaggagatggctgggaagttatatggacaacaaaaaattagaggattttgtcatctctacataggtcaagaagcttgtattgcagggtgtgttacagcattaaaagaaggtgataaatatattacttcatatagagaccatgctcatccattagctttaggtacaaatccaaactttataatggcagaattatatggaaaagaaactggcatatctaaaggaagaggtggttcaatgcatatgtttgataaagaaagaaatttttttggtggtcatggaatagttggaaatcaaatcccaatgggggctggtattggttttgcagaattatataaaggaacggataatgtatgcataacttttcttggcgatggagctgttagaattggcgcatttcatgaggctttaaacatgtcaatgtttcttaaaattcctgtaattttcataatagaaaacaacggttatgcaatgggtacttcagttgaaagaacctctaatgtaactgaattatataaaattggtaaagcttatgatattccttcatatccagttgatgctatgaatgttataaaagttcatcatgcagtttctaaggctgcaaaaagagctagagaaggattaggtcctactttattagaattcagaacctataggtataaaggtcatc

SEQ ID NO: 216570 - DNA, 1015 bp, Unknown
  Bacterial polypeptide expressing nucleotide sequence isolated from the Sargasso Sea
tatgacccaatctaatacattacttcccaatctttatacgacaatgaaaagaattagaacgtttgaagaaagagttggggaactttttattaaaggtgaaacagcaggaacaatgttgcatttatcaattggtgaagaattaggaccaacttgtttaggggctgcaatgcaaaagcaagatacttttacaactcaccatagaggtcatggtatatttatcgcaagaggaggagatccaaaaaaaatgatggcagaaatcgctggaaaaaaagatggatattgtaaaggaaaaggtggctcaatgcatattgcagatatgaaactaggacatttaggagcaaatgccatagttggaggtggaatacctacagttgttggggcaggattgagttctaaatatttagaagaagacaaagtatctgttgcattttttggagatggagcaatgcaacagggaattttatatgaaagtatgaatatggcttccctatggaaattacctgtcgtattttgttgtatcaataatcaatatggtatgggaacaaagattgacaatgctgctggccttaaagatttttcgaaaagagcagcttcttttggtttaaataccttacatattgatgatttagatattgagaatgcatatgtcaaatctaaggaaatcattgataaagcaagaaaatttgaaccaggttttatagaagttgagtgttatagattttttggtcatgcgagaatggataaaagtccctatcgaagtgaagaagaagaaattaaaatgagaaagtcagaccccatctcttatgcctctaatcaaatgttaaaaaataaaattatgaatgaagatgaaattaaaaaaataaatgaaaaaatttctattgaaatggatgaagctatggattttgctattaattcacctcttaataaccaaaaagaaatttttactgatgtatacgatgagagcgagcctttgcctattagtgttgaagaaagaataaataaaattttgtcttaa

SEQ ID NO: 216571 - DNA, 1055 bp, Unknown
  Bacterial polypeptide expressing nucleotide sequence isolated from the Sargasso Sea
attgccaccaaaagatatagatccagttgaaacattagaatgggttgatgccataaatagcgttattgatgaagagggattagagagagcctcatatcttttaactaaagttgcagaaaggttaaatcaagaaggggcagtaccctcttataatttaacaactccattcaaaaattctatttcagttaaagatgaagccaaaatgcctggtgacttacttatggaaagaaaaataagatctttaattaggtggaatgcacttgttatggttttaaaagcaaacaagaatgatgaagagttaggtggacatatttctactttttcttcagcagccacattatatgatgttggctttaattatttttttagaggatcagataaccatcttgaagatatggtttattttcagggacattgttctccaggtatatatgcaagaagttatttggagggttatttaaatgaagaggatttagataatttcagaagagaggttactaaaccaggattatcatcatatcctcatccttggttgatgccagattattggcaatttccagtagtctcaatgggattaggaccaattttaggaatatatcaagcacatgttatgaggtatttatcagccagaggtttagttccaagaaatgatagaaaagtttgggtattttgtggtgacggtgagatggacgaacctgaatcaaagggcgctattggcttagcaggaagagaacagttagaaaatttaatatttgttgtaaattgtaatttacaaagacttgatggccctgtcagaggaaatggaaaaattatccaagagcttgaaggagcatttagaggcgaaggctggaatgtaattaaggtcatatgggggaggttttgggacccgattattgaaaaagatactgagggtaaacttcaagaaataatggatgctgtagtagatggcgagcttcaaaattacaaagctaaaggcggggcttacacaagaaaaaatttttttgctagagatccatctgttttagaaatggtaaaggatttaagtgatgaagata

SEQ ID NO: 216572 - DNA, 1264 bp, Unknown
  Bacterial polypeptide expressing nucleotide sequence isolated from the Sargasso Sea
aagagagcattctgaaatccttaaactaaaaaataaagatgccttcaaagttcttcatgaaggcagtggtgaaagaaaagtatcaactacaacaaactgtgttcgaatcatgaataacctgatcaaggatgaaaaccttggagagcgagttgtaccaatagttcctgatgaggcaagaacatttggtatggaaggcatgttcaagcaaataggaatttattcatcagaagggcagctatatgaaccagaagatgctgatcaagttatgtggtacaaagaatccgagactggagtaatgctcgaagaaggaatcactgaagcaggttcatttgctgcttggacagcattggcaacctcttactctaatcataatttgaccatgattcccttttatgttttttattcaatgtttggcttccaaagaatacatgacttagcatgggctgcaggggatgctcaggctaaaggttttttaataggagcaacatcggggagaacaacattaaatggcgaaggtcttcagcatcaagacggccatagccatatcctttcatcaactattccaaactgtaaatcttatgatcccgcatatggttatgagctagctgtaattatcgaacatggcctaaaggagatgtataaagataaaaagaattatttttactatttaactgttactaatgagagatacgttcaaccgccaaaaccaaaaggcaaggatgttgatagcaacatcattaaaggaatgcatagaatttctaaaactaaaaagcctcagataaggctgcttggctctggagctatcttaaatgagagcattaaagcgtctgaaatgttaagtgattttgggattgaaagtgaggtttggagtgtaagcagctttaatatgcttagaaaagatggcatggaagttgagaatgagaatattaaaaatgcgtcgaacaaagcaaaagagtctttcgtagctaaatccttttcagaacatgatattccaacagtggcttcaacagactacatgagagcttattctgagcaaataagaccctatgtaaattcttcttattacacacttggaaccgatggttttggtagaagtgatagtagagcaaaattgcgagaattttttgaggtagatgcaaagagtattgttatgactgcagcttatgcgctttacaaagaagaccaacttaataaaaaagaacttcaaaagatctataaagaaattaaagttaataaaaataagatttcaccttggaataaataa

SEQ ID NO: 216573 - DNA, 1231 bp, Unknown
  Bacterial polypeptide expressing nucleotide sequence isolated from the Sargasso Sea
gatgaacaagttagaaaatatagaatactttaggcctgatgagaaatctctagagattaaatacataaaagagagaagacttaaattgggaggttatttgccagagagatcaacctttgcaaaacctatcaaagcgccatcaaaagatatttttgattttatgaaagtttcaactggtgaaaaagaaatgtctactacaatggctctcgtaagaatgctaactaatttgttaagagataaaaatatttcgcctagattagttccaattatcccagatgaagcaagaacattcggtatggaaggattttttcaaaaaatcggaatatacgctcacgaaggacagaaatatgagcccgaagatgctgcacaattaagttcttatagagaagataaaagtggacaagtacttgaagaaggaattaatgaggcaggagcgatgtcttcttggatagcagccgcaactgcttacacaaatcatgatattgaaatgattccaatatacattttttattctatgtttggatttcaaagaattggagatttagcttgggctgctggagatagccaggccagaggttttttagttggtgcaacagctggaagaacaacattagcaggtgaaggattacaacatcaagatggacatagtcatttgattgcatcaacaattcctaattgtgtaacttatgatcctacatttcattatgaattagcaactatttttagagagggtctaagaagaatgcatgagaagaaagaaaatgttttttattatattacaacaatgaacgaaaattattcacatcctgaaatgcctaaggataaaaattgcgaagaaggaattcttaaaggaatgtataagataaaagaatttaataaatataaaaaaacaaaacttcaacttttaggctcaggaacaatattaagagagatgatgtcagcagctgaaattttacaaaatgactatcaaattgatagtgaaatatggagtgttacaagttttaatgagttaagaaaagatggaatggaagttgaaagatataatcttctaaatccagataaaactcctaaaaaatcatatgtagagcaatgtcttggaagtactgaaggtccaattatggcagcatctgattatatgagaatgaattctgatcaaataagaccttacacaaacaataagagcttttattcgttaggtgcggatggtttggaagaagtgatactagaaaaa

SEQ ID NO: 216574 - DNA, 981 bp, Unknown
  Bacterial polypeptide expressing nucleotide sequence isolated from the Sargasso Sea
catgtctgatatgatgcaccaagatgtagatcctcaagaaactaaagagtggattgatgcgcttgagtcggttttagaagaggaaggcgtagaacgcgcccactatttactcgaaaaacttattgataaagcacgtcgcagcggagcgcatttaccgtatgacgctactactgcctacatcaatactatcccagcagcgcaagagccaaaaatgcctggtgacttgaccatcgaagcgcgcatccgtgcggcaattcgttggaacgcattgatgattgtattgcgtgcatctaagaaagacctagagcttggtggacacattggtagcttcgcatcatcggctatgctttacgatgtgggctttaaccatttcttcaaagcgccgaatgaaaatcaaggcggcgactttattttcgcacagggccatatttctccaggtatttatgcgcgctcttacatggaaggcaacttaactgaagaacagttaaataacttccgtcaagagtgtgctggcgatggtctgtcgtcttacccgcaccctcacttgatgaaagactactggcagttcccaacggtatctatgggtctaggcccacttcaagctatctacacagcacgtttccttaaatacctaactaaccgtggtattaaagactgttcaggtcagcgcgtatactgctatatgggcgacggtgagtgtgatgagccagagagcttgggtgcaatcggtcttgcgtctcgcgaaggcctggacaacctaacgtttgttatcaactgtaaccttcagcgtctagacggcccggtacgtggtaacggcaaaattatccaagaacttgaaggtacgttccgcggcgcaggctgggaagtagtgaaagtcatttggggtagctactgggatgagcttctagctcgtgataaatctggcaagctaattcagcttatgggtgaaacggtagacggtgaataccagaactgtaaagc

SEQ ID NO: 216575 - DNA, 1207 bp, Unknown
  Bacterial polypeptide expressing nucleotide sequence isolated from the Sargasso Sea
aagaaggaaagtttagaaaatccaaattttctcaatctaaacagagataaaaaggttaaagaatatttactctcaagaagaaaagaattgggaggggttctgccttcaagaaaagtctctaagaaaaaattaatagcaaaaaaagaatctttcgtagatttcgataaaaaattagatagagaacagtcaacaacaatggtttttgtaagactgctaactaagcttttaagagatgcagcaataggttcaagagtggtaccaattgttccagacgaggcaagaacatttggtatggatgcattatttagacaatttggtatttattcttctgaaggtcaaaaatatgaaccagaagatgcagataaagtaatgttttatagagaaagtgagtctggaataatgcttgaggaaggcattaatgaagccggtgcattctcagcatggttagctttagcaacatcttattcaaacaataatttgccaatgattccattctatatcttttactctatgtttggttttcagcgtatccacgatttagcttgggctgctggtgattccagagctaagggatttctacttggcgcaacatcaggtagaacaacattaaatggtgaaggtttacaacatcaggatggacatagtcatattcttgcatcaacaatacctaattgccgctcatacgacccatgttactcctatgaattgtccgcaataatacaagaaggcataaatgatatgtatgtaaatggtaatgataggtattattacattactctaatgaatgaaaattattctcacccagccaaacttaaaaaacttaaaaatgaagatattcttaagggagcttataagctgaaagaaaataaaaatataaatctcagaatattagcttcaggcgttactgtaaattttgcattggaagctgagaaagagcttaaagatcatgggattaatgcagatatttggtctataacaagttttaatgagctgtatagagaagggatagagatagaaagagaaaatagactaaattcaacatcaaaaaaatcttatgttgaaacttgttttagtgatgaaatgccaacacttgcagtttctgaatatcaaaaagcatatccaaaccaaataagagagtgggttaacggagaatataaggttttaggtacagatggttttggtagaagtgatacaagagaagaataag

SEQ ID NO: 216576 - DNA, 895 bp, Unknown
  Bacterial polypeptide expressing nucleotide sequence isolated from the Sargasso Sea
tctgcgtgaggacaaagcagaatggactgagtctctagacgctatttatagggagttcgggcctgcaggagccaaggagattcttcgccatttgcaaaattatgcgctcgcgaaaaacataggattagacgaggcgactctcaatacaccttatgtaaatacgatcccgcctggcgatcaatccccataccctggcgatatcgaactggaagaaaggattgaaaagatcaatcgttggaacgcgattgcgatggttctgcaggcgcaggataaaggtattggtgtcggtggacacatagcgacctatgcgtcttgtgcaacgatgttggaagttgggttcaatcatttctttcaaggcgcgggaccggataatgatcgcggctcagccgatatgtttttaccccaaccgcatgcggcgccaggcatttatgctagagcgtatctagaagggaggttgactagagaacagttggcaaattatcggcaagagcttggtgagggtgggggattatcttcatatccgcatcctcgaagtatgccggacttttgggaggtgcctaacgcctcgatgggactgtccactcctgcggctatttatcaggcaaggtttgcaaaatatttagagaatcacggtcttaaacccgctgctactgggaaggtctggtgttttattggcgatggtgaatctgatgagcctgaggttctaggaacgatcagtctggcatcccgggagcaactcgataacttaattctagtcatcaactgtaatttgcaaaggttagatggtcctgtgcgcggtaacggtaaaatcattcaggaacttgaacgatcctttcgaggggctgattggaatgttttgaaagttatatggggaagcggttgggatgaatgttag

SEQ ID NO: 216577 - DNA, 1078 bp, Unknown
  Bacterial polypeptide expressing nucleotide sequence isolated from the Sargasso Sea
tatgactcaaaatatttctgttcctgatattggagacttcaaagatgttgaagtaatagaggttttggttaaaccaggagaccagataagtaaaaacgatccaattgttactatagagagtgataagtctagtcttgaaattccctcacctttgtctggagagataagagatttaaaagttaaaattggagataaagtttccgaaggaagtgttttggccgtaattgagaatggtcaagaatctcaaattccaaaaaaagaaaaaattgtaaaagagcctattaaaaaggaagaactaaaaacaaacggtaatataaatcctataaaacaagttaaaaagatttttgctgaacctgcttctaaggatgacattgatccaatagaaactaatgaatggattgactcattaaattcagtaattgaaaatgatggagcgccaagagcaagttatttattaaatcaggtaattaatcaagcttataagtctggattagttcttcctgatactcgaacaactccgtacattaatacaattccgccagaggctgaagcaaagtctcctggtgatcaaaatattgaaagaaaattaagagcatatattagatggaacgcggcggctatggtggtcaaggctaacaagaaaagtcccgaactaggaggccatattggaacatttgcatcagccgcaacactttatgatgttggaatgaatcatttttggagggcaaaaaataataaatttggtggagatttaatttattttcaaggtcactctgctcccggtatgtatgcaagggcctatttagaaggaagacttaatgaaaaacaattagatggttttagacaagaagtgtcatctggaggattatcatcttaccctcatccttggttaatgccaaacttttggcaatttccaactgtctctatgggccttggtcctataatggcaatttatcaggctcgtttcttaaaatacttaattaacagaggtttagttaaagatgaaggtagaaaaatttgggtttttttaggagatggtgaaatggatgaacctgagtctcttggagctataagttta

SEQ ID NO: 216578 - DNA, 278 bp, Unknown
  Bacterial polypeptide expressing nucleotide sequence isolated from the Sargasso Sea
caatagaggtttgattaaagatgaaggaagaaaagtatgggcctttttaggcgatggagagatggatgagcctgagtcaatgggagctattggattagctgctagagaaaatttagataatttaatatttgtaataaattgtaatcttcaaagattagatggtcccgttagaggtaatggaaaaattatccaagagcttgagggaagtttcagaggatctggctggaatgtaattaaagttattttgggggtcatattgggattcgttgcttgctaat

SEQ ID NO: 216579 - DNA, 1019 bp, Unknown
  Bacterial polypeptide expressing nucleotide sequence isolated from the Sargasso Sea
aaaggaggatattattcctaaaaaaacatttaggactgctttaaatgagcatttaatccaggaaatggaacgagatgataatataatcatttttggtgaagatgtttgtggaggaactggtggaagtggtgaaaaagacgcttggggaggtgcttttggtgtaacaaaaggaattttggggaaatatggctcagaaagaatatttgacactccaattaccgaaagtgcattcattggtgcaggagttggttcagctatgacaggtatgagacctattgttgaaataatgtttgttgattttcttggtgtttgtttcgatcaaattttcaatcaagctgcaaaagtccgatatatgtttggtggaaaggccacaactccgctagttattcgtaccacttttggggcaggttcaagatctgcgagccaacactctcaagctctttatcctatctttacacacataccaggacttaaagtggtagttccttcaaatccttatgatgctaaaggtcttttgattcaatctattagagataatgatccagttatatttttagaaaataaaatgctttatgatgttgaaggtgaagtgccagatcaatcatatacaattccctttgctgaggcaaatgtcataagggagggcaaagacgctttaattgtggcaattggaagaatggttgatttctctattcaggctgcagagcaactagcaaatgaaggtattcaatgttcaattcttgatccaaggacactttcacctattgatgaagagctattattggatatggttgacgaatgcggccgtttagtgatagttgatgagtcttatccaagatgcagtattgcttctgatatttcatcattagttgcagagaaagcatttgatgcactgaaagcccccatcataaaagttacatcccaacattctcctgtgccctatgcgcctaacctggaagatacatatcttccctcaaaagaaaaaattatagatgcggttaagaaggtggtttcatgaa

SEQ ID NO: 216580 - DNA, 1402 bp, Unknown
  Bacterial polypeptide expressing nucleotide sequence isolated from the Sargasso Sea
cgtgatcgttttcaccttccactctccaatcagcaggtggaacagatggagttcttccatccaggagattcgtcccaggaagtcgaataccttcatcagcaacgcgaaaaacttggaggttaccttccctcccggagaactcgtggtgatgatttaaaaactccggaacttccattttttgagcggctgctgaaaagcaccggggagcgtgaaatctcaacaactcaggctctggttcaagctatgacgttattgtgccgggatgaaaagttgggcccccgaatcgttcctatcgtccccgacgaagcacggactttcggaatggaagggatgttccgacaaatcgggatttatgcccatgaaggtcagaaatacgaaccggtggaccgtgaacagctgatgtattaccgggaagatcaaaaaggacaattcctgcaggaaggaatcaacgaagatggtgccatttcttcctggattgcagcagcgacttcctacagcaattccggaatccaaatgattcccttttacactttttactcgatgttcggttttcaacgggttggggatttgatctgggcagcaggtgacattcaggcaagaggatttctgattgggggaacctcaggaagaacaaccctcaacggcgaggggcttcagcacgaagatggacaaagccaaatcatggcagccaatgtaccgaattgtatctcttatgatcctacatttgcctatgaattgatggtgatcatccaaaacggtctgaagaggatgttcgaaaatcaggaaaatgttttttactacatcaccacactcaatgaaaactatcctcatcctgaaatgaaaaaaggtcaggaagagaacatcatcaaaggcatgtatctttttcagcagggaggtaaaggatcgaaacgggtccagcttatgggttcaggaagcatcctcagagaagtgattgccgctgcaaatatactcgcagaagattttggaattcaggcagatgtctggagttgtccgagtttcaatgaattgaagcgagatggggacgattgtgttcggtggaacctgatgcatcctgaccaaaaaccaagaattccccatgtaactgcatgccttgaaaaacattccgggcctgtggttgccgcaacggattatgtaaaattgtttgcagaccagattcgggcctatgttggaagaaattatcatgtcctgggtaccgatggattcggacgaagcgacacccgggcatcgcttcggcgtcattttgaggtcaaccgttattatgtgacggttgccgccttgaaaactttggctgatgaaggaacgatcccagccaaaacggtcaaatccgcgattcgcaaatacaagctcgatccagaaaaacccaaccctctcaacgtttaaa

SEQ ID NO: 216581 - DNA, 281 bp, Unknown
  Bacterial polypeptide expressing nucleotide sequence isolated from the Sargasso Sea
tatgagtaaatttcctgttagagcggctattagagatgctattgccgaggaaatgagactagaccctaatgtattcttaatcggagaggaagtaggagaatatgaaggagcttataaagttagccagggcttaatttcagagtttggagatcaaagagttatagatacccctataactgaggcaggctttacaggtttagcagtaggggcctcaataggaggattgaagcctatagttgaatttatgacatggaattttgcatttcaagctatagatcaaa

SEQ ID NO: 216582 - DNA, 1777 bp, Unknown
  Bacterial polypeptide expressing nucleotide sequence isolated from the Sargasso Sea
ggatcaattattagcaaaggataaatcaggtttattgattaaaagaatgggagaagcagtagatggtgaatatcaagcttttaaagccaaaggaggaaaatatgtaagagataaattctttggaaaatatcctgaacttttggaattagtatcgcagatgaccgatcgagatatatggaaattaaacagaggcggccacgatccgcataaagtttatgcagcttatcactcagcaatgcaaaacaaaggaacaccaactgtaattttagctaaaactataaaaggttatggaatgggtaagtcaggggaaagtatgaatacaacccatcaacagaaaaaattagatgaaaaagatttattgtattatagagacagatttgatgtacctttaactgatgaacaggtaaaaaatatccaatactatagacctgacgaaaactcaccagaaattaaatatttaaaagaatgtagaattaaacttggtggatatttacctgagagatcatcttttgctaaagctataaagacaccacctaaagatatttttgacaaaatgaaagagtcaacaggagataaagaaatgtccacaacaatggttttagttagaatgctaactaatttaatgagagataaaaatgtatctcctagattagttccaataataccagatgaagccagaacatttggtatggaaggttttttccaaaaaataggaatttatgctcacgagggacaaaaatatgaaccagtcgactcagaacaactgagttcgtatagagaggatataaaaggccaagttttagaggagggtataactgaagctggagcaatgtcatcatggatagcagcaggtacagcatatacaaatcatgatatttcaatgatacctatatatattttttattctatgtttggttttcaaaggacaggagattttgtttgggcagctggtgataatcaaacaagaggttttttaattggagctactgcaggaagaacaactttagcaggagaaggattacaacatggagatggacatagtcatgttctgtcatctgtagttcctaattgtatttcatacgatcctacatttggttatgaattggcaacaatttttagagagggattgaaaagaatgtatgaaaaacaggaaaatattttttattacataacaactatgaatgaaaattacccccacccagaaatgccaaaagataaagatgttgaaaaaggaattttaaaggggatgtataaatttaaaagttttaacaaaaataaaaaaacaaagattcaattattaggatcaggtgcaattttaagagaagttattgcagcagctgaaattttggagagagattataaaattgatagtaatgtatggagtgttacaagttataacgaattaagaaaagatgctatagaagtcgaaagatttaatttgctaaatccagataaggaaaataaaaaaagctatcttgaggaatgtctctctaatgaagacggacctattttggcatcatccgattatatgaggttatattctgatcaaattagaccataccttgaaaaaagcttttattctcttggtacagatggatatggaagaagtgatactagacaaaatttaagaaaattttttgaggtggataaagaacatatagttacttattctttaagtgtattagctaaggagcagctaataccatcaaaatatgcgaaagatgcaattaaaaaatataacatagactcagagaaaccgatacctacaaaactataa

SEQ ID NO: 216583 - DNA, 1342 bp, Unknown
  Bacterial polypeptide expressing nucleotide sequence isolated from the Sargasso Sea
gatgaaaacttctgaggaaattaaatatcttaaagatcaaagaattaaacttggtggttttatcccagaaagatcttcgtttgcaaaacaaataaaagctcctcctaaggaaatattcgataattttatgaaatctacaggagataaagaaatgtcgactacgatggcattagttagaatgcttactgcattactaagagataaaaacatatcaccaagattagttcctattatcccagatgaggcaagaacttttgggatggaaggttttttccaaaaaataggaatatatgctcatgaaggtcaaaaatatgagcctgtagactcagaacagttaagctcttacagggaagataaaagtggccaagtattagaagagggaataaatgagtcgggagcaatgtcatcttggattgcagctggtacagcttacacaaatcatgatttagaaatgataccgatttatatcttttactctatgtttggttttcagagagttggtgacttagcttgggccgcaggtgactctcaagcaagaggtttcttaattggggctaccgctggtagaacgactttagctggagaaggacttcaacaccaagatggtcatagtcatttattggcatcaaatattcctaactgtattagttatgatccaacgtttgcttatgaaatggctgtaatattgagagatggactaaaaagaatgcatgagaaaaaagaaaatattttctattacatcactgcaatgaatgaaaattattctcacccagaaaagccaaaggatgccgatgaaggaattttaaagggaatgtatttatttaaagaaaataataacaagaataaaactaaagtgcagcttttaggttcgggaacaattttaagagaaataattgctgctgctgaaattttatctaaagattatggtgtagactctgatgtgtggagtgtaactagcttcaatgaattaagaaaagacggtatggagactgaacgatggaacttattaaatccaaatgaaaaaaagaaaaaatcatatgtacaaaagtgtttaaaaaaaacagatggaccaattattgctgcatcggattatactagatcattttcagatcaaataagaccttacatagaaaaacctttttactctttagggacagatggttatggaagaagtgatactagaaaaaatttaagaaagttttttgaggtcgataaagaacatatagttgcctatacattaagtgctttagcaaaagaacaattgattgagaccaagaaagctgaaagtgcgatcaaaaagtttaagattaataaagatagagattttccatctaatttataa

SEQ ID NO: 216584 - DNA, 1012 bp, Unknown
  Bacterial polypeptide expressing nucleotide sequence isolated from the Sargasso Sea
aaatatcctgaattaaaaaagttagtatcgactatgactgacaaagatatatggagacttaatagaggtggtcatgatcctcataaagtttatgcagcttatcattcggcattcaaacacaaaggttctccgactgtaattatagcgaaaacaattaaaggttatggaatgggtaagtctggtgaaagcatcaatacaactcatcaacaaaagaaattggatgaaaaagacttactctattatagggataggtttaatgtgccactaacagacaaacaggtgaagaatattgaatattatagacctgcagaaaattctgaagaaaccaaatatataaagaactgtagattaaaattaggaggcttcattccagaaagaacatcatattctaaagctattaaagcaccgccaaaagaaatatttgaaaactttatgaaatctactgggaaaaaagagatgtcaacaacaatggctttggttagaatgttaaccaatctttcaagagataaaaatatttctgctagattagttccaataattgctgacgaagctagaactttcggcatggaaggtttttttcaaaaaatgggaatatacgctcatgaaggtcaaaaatacgaacctgtggactccgaacagttgagctcttatcgggaagacaaaagtggacaagtgcttcaagaaggaatcacggaggctggcgcgatgtcttcttgggttgctgcgggaacttcttataccaatcatgatattgaaatgatacctatttatattttttactcaatgtttggttttcaaagaattggagatcttgcatgggcagctggagactctcaaacaagaggttttttaattggggcaacagcaggaagaacgactttagctggtgaaggattacaacaccaggatggtcatagtcatttaatggcatcaaatattccaaattgtgtaagttatgatccgacttttgcttatgaaatggcagttattcttagagatgggattaaaagaa

SEQ ID NO: 216585 - DNA, 1099 bp, Unknown
  Bacterial polypeptide expressing nucleotide sequence isolated from the Sargasso Sea
agaaaaaacaaaaaaagttgttgaagaaaaaataccagtagatacggaaaaaattattaaagaggcagaagatactttagttttaaaagaagaaataaaagaaaaaaaagaaataatcagggaagaaaaaaaagacagaattgaaattccagttaaagaagatattgatccaatagaaacaaaagaatggatagaatctctttcagccgttttacaaaatgatggaaaaaatagagcgcaatttttaataaaacaattaattgaacattcatataaagaaggttcagacttagttttgtctagaaatacgccatatataaatacaatttctcctgaagaagaaataaaatctccaggagatcaaaatattgagagaaaaattagatcgttaattagatggaatgctgcagccatggttgtaagagctaataaaaaaaatcctgagctaggtggccatataggaacatttgcttctgcagctacactttatgatgttggcatgaatcatttttggagagcaaaaaataataaatttggaggagacttaatatatttccaagggcatagcgctccaggtatgtatgcaagagcatttttagagggaagattaagtgaaaagcaattagacagttttagacaggaagttaatccaggcggactatcttcatatccacacccatggttaatgccagaattttggcaatttccaactgtatcaatgggacttggtccaatcatgtcaatttatcaagcaagatttaataaatatttgataaacagaggtttgataaaagatgagggcagaaagatttggtgttttttgggagacggtgagacagatgagcctgagtctttaggagcaataggtttagcagcaagagaaaaattagataatttaatttttgttattaattgtaaccttcaaagattagatggaccagtaagaggtaatggaaaaataattcaggaattagaaggaatttttagaggagcaggctggaatgttatcaaagtaatttggggttcttattgggattcattattagctaaggataaaacaggcttgttaataaaaagaatgaacgaagcagttgatggt

SEQ ID NO: 216586 - DNA, 722 bp, Unknown
  Bacterial polypeptide expressing nucleotide sequence isolated from the Sargasso Sea
tatgactcaatacaatgatgctaaccctgaagagacaaaagaatggcttgaagcactaaggtcagtcataagagaggaaggtgcagaaagagcccactttcttctgtccagactttctagtgatacgaaaagaattaactcaaatatcccctcgactgcgttcagcaccccttacagtaataccatatccccatcgaatgaagagcgaatgcccggcgacatgttcatggagcgacaaatccgtggcatcgtgcggtggaatgcaatggcgatggtgatgcgagcaaatttgcgaaattcaagcattggcggacacatttcaacctttgcatcgtcagcgactttgtatgacgtaggtttcaattacttttttagggggcctaatgatcagcatgagggtgacctaatttactatcaaggccattcctctccagggatctacgcacggtctttcttggagggccgtttggatgaggctcagctggataattttcgggaagaagtaaatggtaacggactttcctcatatcctcatccttggctaatgccagattattggcaattcccaacagtatcaatgggccttggccccatccaggctatctatcaagcacacataatgaaatatttgagtagtcgcggcttaatggataactctgaccggaaggtgtgggcattcttgggtgatggtgaaatggatgaacctgaatctcttggcgcaa

SEQ ID NO: 216587 - DNA, 997 bp, Unknown
  Bacterial polypeptide expressing nucleotide sequence isolated from the Sargasso Sea
aatgcggtcgatcacgctttctcaggctgtcaatgaagccattgccgaggagatgagactggatagctcggtatttcttatcggcgaagacgttgcagaggcgggcactcctttcaagattacttccggtctggtggaagaatttggaactgaaagggttattgatactccaatttctgagccaggcttcatgggactcgccgttggcgcggctatgacgggatcgcgcccaattgtggatattatgtttggtgattttctatttttaataatggatcagctttgtaatcaggccgcgaaggctcactatatgtctggtggtaaattaaatgtgcctctagttgtccgtacaaatcttggagctactagaaggtccgcggctcagcatagtcaatcgctgcatgctttagtatctcacattccaggtctcaagatcgcgatgccttcatctgcttatgaggccaaaggtctgctgaaaaccgcaatcagagatgataatcctgttattatatttgaagacaaattaatgtatcaagacaaagctgatgtgcccgaagatgagtatctaattccttttggagaagctgctgttctgcaggaaggcaatcaggtcacgttaattggaacgtcttcaatgaggcaagtctgcgaagaagctgctcttattctttcagatgaaaaaattagtgttgagataatagatccaagaactttggttccgctagatgaaaagacaattttaaattcagcaaaaaaaacaggaagagtaattgtggttgatgaaggccatcaaaattttggcgttaccgcagaaatagcttctcgcatttctgaaaaggctttttattatttggatgccccagtaattagaatgggcgctatggacgtgcctgttccttttagtcctgttttagaggatttgactgttccaactgccgagaaagttgcttcgaatgcgcgaaagattgtagcgggagagctggtgcatgagttatga

SEQ ID NO: 216588 - DNA, 804 bp, Unknown
  Bacterial polypeptide expressing nucleotide sequence isolated from the Sargasso Sea
aatgaataatcctgagttcaatacagaattaaaagaatggattgaagcccttgaaaatacaattctttcagatggaaaagaatactcaaaagaactactaaaagccctttttactgaagcgtcgcttaaaggaattgttcttgatgagcttaatgacccatctttcaagaacactgtgcaaagtgacgaagaattaccttatccgggtaactgggattttgaagaaaaaattagacatttcattcgttggaacagcctcctaatggtgcttaaagcaaataaagatgatgatttaggaggtcacatatctacctattcctcagctgcaacactttatgaagttggctttaatcacttttttagaggctcagataaacagctaggtgatcttatatattttcaaggacatagttctccaggaatctacgccaggtcttttttagagggaagacttaaaaaagatcaaatagaaaattttagaaaagaaattaaaggaaagggtctttcttcttatccacatccttggcttatgccagattattggcaatttccaactgtttctatggggcttggacctatttttggcatctatcaagctcacatcatgagatatcttgaaaaaagaggactcattgaagaaattgaagataggaaagtttgggtttattgcggagatggagaaatggatgagcccgaatcaatgggtgcaatcagcctagctggaagagaaaatcttaataatttagtttttgtaattaattgtaatttgcaaagattagacggtcctgtaaggggaaattcaaa

SEQ ID NO: 216589 - DNA, 1057 bp, Unknown
  Bacterial polypeptide expressing nucleotide sequence isolated from the Sargasso Sea
tttgtagttaattgtaatcttcaaagattagatggtcctgtaaggggaaactcaaaagttattcaggaattagaaggtgcatttcggggcgctggatggaatgtaataaaagtaatatggggaagcgattgggatgagttgattgagaatgaatctaatgaattacttttaaacagactggaagaaattgttgatggggatttattaaaatatattgtagaagatggcgcatatatacgtgagcatttttttggcaaatcatctgaattattaaaaatggttgatcacctttctgataaacaattagaacgattaagattaggcggccatgatcctgaaaaaatgtacgccgcttataatgaagctattaatcataaagatagacctacagtaattttagctagaactataaaaggatatggtttgggtgaagctggtgaaggtagaaatataacacacaatcaaaaaaagcttaatgaaaaagaactcttatattttagagataggtttaacctaaaattcaatgatgaagaggcaatgaaagcccctttctatcggtttaataaaaatactaaagaatataaatatcttattgatcaaagaaagaagctaggtggatttttaccatcacggtctgataaatctaaaaaactaaaagttccaaatatatctatctttaaagagttaattgatggtagtggagataggaaaatatctacaactatggcctatgtcagattaattactctattagcaaaagataaagatataggtcaaaatattgtgccaataataccagatgaggctagaacgtttggtatggatccattatttcgacaacttggaatctattccagcgcaggacagctctatgaccccgttgattctgatcaattcttatattataaagaagcaactaatggacaaatattagaagaggggattaacgaagctggtgctgtatcatcatttattgctgctggaacaagttatagtaatcatggtataaagatgatacctttttatatatattattcaatgtttggatttcagagaa

SEQ ID NO: 216590 - DNA, 1024 bp, Unknown
  Bacterial polypeptide expressing nucleotide sequence isolated from the Sargasso Sea
tttcatgggacttggtccaatcatgtcaatttatcaagcaagatttaccaaatatttaattaatagaggtttgttaaaagatgaaggaagaaaaatttggtgttttttaggtgatggagaaacagatgagccagagtcgttaggagcaattggtttagctgctagagaaaaattagataatttaatttttgttgttaattgtaatttacaaaggttagatggccctgtcagaggtaatggaaaaattattcaagaactagaaggaatatttagaggagccggatggaatgtaattaaagttatatggggttcttattgggattctttattagctaaagataaatctggattattaattaaacgtatgaacgaagccgttgatggtgaataccaagcatttaaagctaaaggtggagctttcgtgagagaaaaattttttggcaaatatccagaattattaaatcttgtttcacaaatgacagatagagatatatggaaattaaatagaggtggtcatgatccgcataaagtttatgcagcataccattcagcaatgcaaaatactggaacacctactgtaattttggcaaaaacaattaaaggttatggaatgggtaaatctggggaaagtattaacactactcatcaacaaaaaaaattagatgaaaaagatttattatactatcgtgatagatttgatgttcctctaacagatcaacaggttaaaaatattgaatattataaaccagcagataattctccagaaataaaatatttaaagaaatgtagatttaaattaggtggcaatttacccgaaagatcctcttttgctaaatcaattaaaactccttctcaagatatatttaaggcaatgaaagaatctactggaaaaaaagaaatgtctacaacaatggtgttagtaagaatgttaactaatttattaagggataaaaatgttgctcctcgtttagttccaattattcctgatgaagcagagaacttttggaatggaagggttttttca

SEQ ID NO: 216591 - DNA, 1869 bp, Unknown
  Bacterial polypeptide expressing nucleotide sequence isolated from the Sargasso Sea
tgagaggtaacggaaaaattattcaagaacttgaaggaatttttagaggagcaggctggaatgtaatcaaagttatttggggttcatattgggatcaattattagctaaagataattctggtttattgattaaaagaatgggtgaagcggtagatggagaatatcaagcattcaaagcaaaaggagggaagtatgtaagagataaattttttggaaaatatcctgaattattagacatggtatcccaaatgacagatagagatatttggaaacttaatcgaggtggtcatgatccacacaaagtttatgctgcttatcatgctgctatgcagaataaaggtacaccaactgtaattcttgctaaaactatcaagggttatggtatgggtaagtcaggcgaaagcatgaatacaactcaccaacaaaaaaaattagatgaagaagatttattatattatagagatagatttgatgtacctttaacagatcaacaagtaagaaatattcaatattatagaccagatgaaaattcaccagaaataaaatacttaaaagaatgtagaattaagttaggtggaaacttaccagaaagatcatcatttgctaaagcaataaaaactccaccacaagatatatttgcaaaaatgaaagaatctagtggagaaaaagaaatgtctacaacaatggtattagttagaatgttaacaaatcttatgagggataaaaatgttgctccaagacttgttccaattattccagatgaagccagaacttttggtatggagggtttgttccaaaaaataggaatatatgctcacgaaggtcagaaatatgagccagtagactcagaacaattaagttcttatcgtgaggatataaagggtcaagttttagaagaaggaataaccgaagctggagctatttcatcttggattgcagctggcacatcttatgcaaatcatgatatctcaatgataccaatatatatattttattccatgtttggttttcaaagaactggtgactttatttgggctgcaggagacaatcaaacaaggggatttttaattggagcaactgcaggacgtacaacgttgtcaggagaaggtcttcagcatggtgatggacatagtcatgtattgtcttctgtagttccaaattgtatttcatatgatccgactttttcttatgagttagctgtaatttttagagaaggtttaagaagaatgtatgaaaagagagaaaatattttttattatattactacgatgaatgaaaattatactcatcctgaaataccaaaagaaaaaaatatagaagaagatattttaaaaggaatgtataaatttaaagaatttaataaaaataaaaaaactaaaattcaattattagggtctggtgcaatacttagagaaattattgctgctgcagaaatattagaaaaagattacaaaatagatagtaatgtatggagtgtaacaagttataacgagcttagaaaagaagctgtagaggttgaaaggtataatttgcttaatccagataaagaaaacaaaaaaagccacttagaaaagtgtctttcttccactgaaggcccaatagtttcagcttcagactatataaggttaaattcagatcaaattaggccttttactagaaaaagtttttattctcttggtacagatggatacggaagaagtgatactagaaaaaatttaagaaatttttttgaagttgataaacaacatatcgtagcctattctttaagtgttttagccaaagaacaattaataccatctaaatatgcaagcgaagctataaaaaaatataacattgacccgaataaaacaatccctacaaaactataaa

SEQ ID NO: 216592 - DNA, 1549 bp, Unknown
  Bacterial polypeptide expressing nucleotide sequence isolated from the Sargasso Sea
atgggtctcggaccaatcatgggcatttatcaagctagattcatgaggtatatgatagatcgaggattcattaaggacactgggagaaaagtttttgtttatactggtgacggcgagatggatgaacctgaatcacttggtgctcttactcttgcctcaagagaaaatctggacaacctaatttttgttgtaaactgtaaccttcaaagattagacggtccagttcgtggaaattcaaaagtaatacaagagcttgaaggtgcatttagaggtgcaggttggaatgttattaaagttatatggggatcggaatgggatgagcttttccaaaaagacatcaacggcaagctcctgggtaggttaaacgacttggttgatggagatttgttgaaatatactgtcgaaggcggtgcttattttagaaaagagttctttggaaaagatagtgagcttattgaaatggttaaagatttttctgatgaggacttggagggtatgcttgcaggtggacatgaccctttaaagatgtattcagcatataatgaagcgatgaattgtaaaggaaagcctactgctatactagctagaacaattaagggttatggtttaggtgatgctggagaaggtagaaatatcactcataatcaaaaaaaattaaacacggaccaattattatattttcgtgatcggtttgacattcctctaaatgattctgatgctgaaagcgctgaattcttccaattttctaaaaactcaaaagaatacaaatatattaaaaatcaaagggatcttttgggtggctcagtacccacaagagccgatgaatcaaaaaagcttactataccagacattagcatttttgatgaacttcttaacggtactggagatcgtgaagtttcaacaacgatggcatatgtaaggcttcttactcttttaacaaaagataaatctataggaaatcatatcgttccgatcatacctgatgaagccagaacttttggtatggatccactttttagacaacttggtatttatgctcataaggggcaattatatgacccggtcgattctgaccagttcctttattataaggaggctaaaaatggacagattctcgaagaaggtataaacgaagcaggcgcgatgtcgtcattttgtgctgcagcaactagctatagtaaccacggtattaaaatggtaccgttttatatttattattcgatgtttggtttccaaagagtttgggatcttatctgggcgtctggtgacatgaggtcacgcggatttcttttgggtggtactgcaggacgaaccacactaaatggagaaggacttcaacaccaggacggacacagccaccttgctgccgcagcaactcctaacatcaaagcgtatgatgttgcatatggttatgagattgctacgatcgtccatcagggattaaaagaaatgtgcgagcaaaacaaagatgtggtttattacttgaccttagaaaatgaaaactatcgacatccctctattccaatggtgcatcggaaggcatattaaa

SEQ ID NO: 216593 - DNA, 1012 bp, Unknown
  Bacterial polypeptide expressing nucleotide sequence isolated from the Sargasso Sea
catgtctaatactttattgcctaaattatacaaaactatgaagagaataagaactttcgaagagagagtctctgagttatttatcaaaggtgaatctgcaggaactatgcttcatctttctattggtgaagagcttgggccggcatgtgttggaacagcgatgcaagaaaatgatacattcactacacatcatagaggtcatggaatttttgttgctagaggaggtgacccaaataggatgctagctgaaatagcaggaaaaaaagatggctattgtaaaggcaaaggtggctcaatgcacattgctgatatgacactaggtcatttaggtgcaaatgcaattgttgggggaggaatacctactgttgttggtgctgctatgagctacaaatatttaaaacaagagcgtgtttcagttgcattttttggtgatggcgcgatgcaacaaggtattctttatgaaagtatgaatatggcctcactttggaaattaccagtagtcttttgttgtattaataatcaatacggaatgggaactaaaattgaaaacgcagtgggggtcaaagatttttctaaaagagctgagtcatttggattaaatacattacatataaatgatttagatgttgaaagtgcatatcataaatcaaaagaaataatagactctgcaagaaaatttaaacctggttttattgaaatagagtgttacagattttatggtcatgcaagaatggacaaaagtccatacagggatgaatctgaagaaagtgaaaaaagaaaacttgatcctatatcttttgcaagtaatcaaatgataaaaaataatattttagatgaagcagagattaaaaaaattgataatgatattatgattgaaatggataaagctatggaatttgcaattaattcaccaatcaatgatgaaacagaaatatttaaagatgtttatagtgaaaatgaccctttaccagtaagcttagatgaaaaaattaataaaattttaaacaactaa

SEQ ID NO: 216594 - DNA, 423 bp, Unknown
  Bacterial polypeptide expressing nucleotide sequence isolated from the Sargasso Sea
tatgtcagatcttaatcaaaattattttgaaaaaattacctatagagatgctttacgtttagcaatgcatgatgcaatgcaagaagataaaaatattataattatgggcgaggatgtagctaattacggcggtgcttatggagctacaaaagatttattaaaattatttggaaaagaaagagtaattgatacacctatttcagaacctgcgatagtgggtgcagctgtgggtgcagcaatgtctggtctacgtcctgttgcagagttaatgtatgtagatttttttgggatgtccatggatcaaattgctaatcagctggcaaaaattcgatatatgtttggtggacaaattagtgcaccaatggttttaagaacaccagggtggtactgggagatctggaggtgcacaacatcgcaaaagtc

SEQ ID NO: 216595 - DNA, 1480 bp, Unknown
  Bacterial polypeptide expressing nucleotide sequence isolated from the Sargasso Sea
aaatctggtgaaagtgtgaatactactcaccaaactaaaaaattagatgttgatgatctcatgtattacagagatcgatttgatgtccctttaacagatgaacaggtgagaaatattgaatattttaagcctgatgaaaaatcacctgaaataaaatacattaatgaaagaagaattaaattaggtggatttttacctgagagatctacttttgcaaaaccaataaaagcaccaaccaaagatatttttgattttatgaaagtatctactggtgaaaaagaaatgtctactacaatggcacttgtgagaatgctaactaatttattaagagataaaaacatatctccaagattagttccaattattcctgatgaagccagaacgtttggcatggaaggttttttccaaaaaattggaatttatgcacatgaggggcaaaaatatgaacctgaggatgctgctcaattaagttcttatagagaagataaaagtggtcaagttttagaagaaggtatcaatgaggcaggtgctatgtcttcatggattgctgctgccactgcatatactaatcatgatatcgaaatgataccaatttatattttttattcaatgtttggtttccaaagaataggagacctagcttgggcagcgggggatagtcaggctagaggatttttggtaggtgcaacagctggaagaacaacattagctggagaaggcttacaacaccaggatggacatagtcatttaattgcatcaactattccaaattgtgtaacttatgatcctacatttcactatgaattagctgtaatttttcgagaaggtctaagaagaatgcatgagaaaaatgagaatgttttttattatattacaacaatgaatgaaaattacacacacccagaaatgccgaaagataaaagttgtgaggaaggcattttaaagggtatgtataaaataaaagaatttaacaaatacaaaaaaactaaaattcaacttttaggatcaggaacaatcttaagggaaatgatgtctgctgcagagattttgcaaaatgattatcaaattgacagcgagatatggagtgtaacaagttttaatgaattaagaaaagatgggatggaagtagaaagatataatcttttaaatcctgataaagaacctaaaaaatcttatgttgagcaatgcctaggccaaacagagggcccaattatggctgcatctgattatatgagaatgaattcagatcaaatcagatcttatactaataaaagtttttattcattaggagcagatggttttggaagaagtgatacaagaaaaaatttaagaaaattttttgaggtagataaagaacatttggttgcttacggtttaagtattttggcaaaagaacagcttattacttccaaacatgcaaaagatgcaatgaagaagtataatattgatactaacaaaccaatgccaacaaaattataat

SEQ ID NO: 216596 - DNA, 1129 bp, Unknown
  Bacterial polypeptide expressing nucleotide sequence isolated from the Sargasso Sea
tatggctcagaatatttcagttccagatataggtgattttaaagacgtagaagtaatagaaattttagtcaaacctggtgatcaaataaataaaaacgatcctatagttacaatcgaaagtgataaatccagtgtagaaattccatctccttcagctggccaaataaaagatttaaaagtaaagataggagataaagtttcagagggaagcttattagcaactattgaaaatggtcaagcagcttcttcaccaaaacaagaaataaaaaaagaagctgtgaaagaggatgtggttaaagaacaaccaaaatctaatggtaatttaaatcctgtaaaacaagttaaaaaagtttttgcagaaccggcttcaaaggatgatattgatccagttgaaactaatgaatggatagagtcattaaactctgtaattgagtctgatggagcgccaagagcaagctatctattaaataaagttattgatcaagcttataagtctggtttggttttacctgatactagaacaacgccatatataaatactattccgcccgaggcagaggctaaatctccgggtgatcaaaatattgaaaaaaaattaagagcaattattagatggaatgccgctgcaatggtagtaaaagctaataagaaaagttctgaactaggcggacatataggaacttttgcgtcagcagcaacattgtatgacgttggtatgaatcatttttggagagcaaaaaataataaatttggtggagacttagtgtattttcaaggtcactcggctccaggtatgtacgcaagagcattcttagagggaaggctctcagcaaaacaattagatggatttagacaagaggttggtaaagatggtctatcatcttatcctcatccttggttaatgcctgacttttggcagtttccaacagtgtcgatgggtcttggtcctatcatggcaatttatcaagctcggttcttaaaatatttaatcaatagaggtttagtcaaagatgagggtagaaaaatttgggtgttcttgggagatggagaaatggatgaaccggagtctatgggagcaatgggtttagctgcaagagaaaaattagataatttaatatttgtaattaat

SEQ ID NO: 216597 - DNA, 1309 bp, Unknown
  Bacterial polypeptide expressing nucleotide sequence isolated from the Sargasso Sea
aatgagtttaaaattgctaattccagacataggtgatttcgaaaatgttgaaataattgaaatacttgtaaaaaaaggtgacaaaattaaaaaaaacgatcctgtagttacccttgaaagcgataaatcaagtgtggaagttccatcaaactttgcaggcacaatagaaaatattaaagtaaaaattggtgacaaagtatctaaaggagatttaattctaactctagactctagtgaaagtaataatgaagaaaaaaaagaaattaaaaaaacaaatgaagaaatacctcctgtaacagaaaagattattcaagaggcagaaagtgctaaaaaagaaaaggcacctgtagttgagactaatataaaagagaccaaacatacaagattggtaaacgaagtaaaaatgtcatcaataaatgacgatattgacccagctgaaactaaagaatggttagagtcattaagtgctgtactagaaaatgatggatctgaaagagcacattttttgattaaacaattgattgatcaatcatataaagctggatcaaaaatacctcatacacaaacgacaccatatataaatacaattccaccagatgaagaaaaaaaatcaccaggtgaccaaaatattgaacgaaagattagatcattaataagatggaacgcagcagcaatggtcgtaagagctaataaaaagcatcctgagcttggcggacatattggcacgtttgcatcagcagcaactttgtatgatgttggaatgaatcacttttggagggcaaaaaataataaatttggtggtgatttagtttattttcaaggacatagcgctccaggaatgtattcaagagcataccttgagggaagattaaatgaaaaacaattagataaatttagacaagaagtaaaacctggaggattatcttcatatccgcacccttggttaatgccaaacttttggcagtttccaactgtttcaatgggattaggacctatgcttgcaatttatcaagctagatttatgaaatatttaataaatagaggactaataaaagatgaaggaagaaaggtctgggcatttattggagacggtgaaatggatgaacctgagtctcttggtgcaattggtttagctgctagagaaaatttagacaatttaatatttgtagttaattgcaacttacaaagattagacggtccagtgagaggtaatggaaaaataatccaagaactagaaggaatttttagaggaacaggttggaatgttttaaaagtaatctggggttcttattgggactcacttctgcaa

SEQ ID NO: 216598 - DNA, 295 bp, Unknown
  Bacterial polypeptide expressing nucleotide sequence isolated from the Sargasso Sea
tttattagaattcagaacctataggtataaaggtcattcaatgtctgatcctgcaagttataggtcaaaggatgaattagcatcttacaaagaaaaagatccaattgaacaaataaaaaaaataattacaattaaaaaaatccttactgagaaagagtttgatttaattgaaaatgaaattaaatcacaggttaatgattcggtaaagtttgcagaagattctccttacccatcaaaagatgatatatataagcatatttatgagcaaggtgattatccttttttgattgaatag

SEQ ID NO: 216599 - DNA, 1019 bp, Unknown
  Bacterial polypeptide expressing nucleotide sequence isolated from the Sargasso Sea
cctgcttgttactttaaaagacttagtagaaaaagaagtagaagtaaaaaaaaaatctcaagaaaaaataccttcagataccgaaaaaattataaaagaagctgaagatgttttagctgtagaagaaaagaaagataattcaaaaagtaaaattaatgaatcaaaaattgaattaaaaagtggtgaagatattgatcctacagaaactaaagagtggatagattctctttcagcagttttagaaaatgatggaaagcatagagctcagtttttgattaagcaactaatagaacattcttataaagaaggttcagaattggtactttcaagaaatacaccatatataaatacaattttacccgaggaagagaaaaaatctcctggagaccaaaatctagaaagaaaaattagatcaataataagatggaacgcagcagcgatggttgtaagggcaaataaaaaaaatccagaattaggtgggcatataggaacatttgcgtcagctgcaactttgtatgatgttggaatgaatcatttttggagagctaaaaataataaatttggtggagatttaatttactttcaaggacatagtgctccaggaatgtatgcaagagcttttttagagggaaggataactgaaaaagaaatggataaatttagacaagaagttaagccaggcggactatcttcttatccacatccatggttaatgccaaatttctggcagtttccaactgtttctatgggtttaggtccaataatgtcaatttatcaagcaagatttaataaatatttaatcaacagaggcctacttaaagatgaaggaagaaagatttggtgctttttaggagatggtgaaactgatgaaccggagtctttgggcgctataggtttagcggcaagagaaaaacttgataacttaatttttgtagtaaattgtaatcttcagagattagatgggcctgtaagaggaaatggaaaaataattcaagagctagaaggaatatttagaggag

SEQ ID NO: 216600 - DNA, 908 bp, Unknown
  Bacterial polypeptide expressing nucleotide sequence isolated from the Sargasso Sea
tcatccatggttaatgcctgagtattggcagtttccagttgtttcaatgggtctagggcccattcttggaatttatcaagcacatgtaatgcgttatttgtcatcaagaggcttggtcccaagaaatgatcgtaaagtctgggtgttttgtggtgatggtgaaatggatgagcctgaatcaaagggagctataggattagctggacgagaaaagcttgaaaacctaatctttgtaatcaactgtaacctgcaaagattagacggtcctgtaagagggaatggaaaaattattcaggaactcgagggttccttcagaggtgagggctggaatgtcattaaagtagtttggggcagattctgggatccaataatggcaaaagattctgagggtaaattacaggatttaatggatgttgtagtagatggagagttgcaaaactttaaagcaaaaggtggcgcttatacgagagagaatttttttgcgaaggatccttcagttctggaaatggtaaaagacctatccgatgatgatatttataaattaaatagaggaggacacgatccatataaagtttatgcagcttatcataaagcagttaattctgaaggagcgccaactgtaattcttgccctcacaactaaaggctatgggactggatctagagaggctgataacactacccaccaagtaaaaaagttatctatggataatataaaatcttttcgagataagtttaatattcccgtaccagattcagaaatagagaaattaccatacgttagaccgcccgaagattcaccagagatacaatacctcaaaaaaacaagagaagcattgggaggatttattccaagaagaagaacctcatcagatccgactctcaatagcaagcgacaaaccttttgag

SEQ ID NO: 216601 - DNA, 1210 bp, Unknown
  Bacterial polypeptide expressing nucleotide sequence isolated from the Sargasso Sea
tatgataaagcgactaaacatcaaggaagcccaacagtgataattgcaaaaactattaaaggttatggaatgggaaaatcaggagaaagtgtaaatactactcatcaaacgaaaaaattagatgttgatgacttgatgtactatagagatcgatttgatgttcctttaacagatgaacaagtgagaaatattgaatactttaggcctgacgaaaaatctccagaaataaaatacataaaagacagaagaattaaattaggtggatatttacccgaacgttcgacttttgctaaaccaatcaaagcaccctcaaaagatattttcgatttcatgaaagtatcaactggtgaaaaagaaatgtctactactatggccttagtaagaatgttaacaaatttattaagggataaaaatatatctcctagactggttcctattattcctgacgaagcaagaacgtttggcatggaaggattttttcaaaaaatagggatttatgctcatgaaggacaaaaatatgaacctgaggatgcagctcaattaagttcttatagagaagacaaaagtggtcaagttttagaggaaggtatcaatgaagcaggtgctatgtcttcatggattgctgctgccactgcatatactaatcatgatatcgaaatgatcccaatttatattttttattcaatgtttggtttccaaagaataggagatctagcttgggcagccggggatagtcaggctagaggatttttggtaggtgcaacagctggaagaacaacattagctggagaaggcttacaacaccaggatgggcatagtcatttaattgcatcaactattccaaattgtgtaacttatgatcctacatttcattatgaattagcggtaatttttcgagaaggtctaagaagaatgcatgagaaaaatgagaatgttttttattatattacaacaatgaatgaaaattactcacacccagaaatgccaaaagataaaaattgtgaggaaggcattttaaagggcatgtataaaataaaagaatttaacaaatacaaaaaaactaaaatccaacttttaggatcaggaacaatcttaagagaaatgatgtctgctgcagagattttacaaaatgattatcaaattgacagtgagatatggagtgtaacaagttttaatgaattaagaaaagatggaatgggaggtagaaaga

SEQ ID NO: 216602 - DNA, 1318 bp, Unknown
  Bacterial polypeptide expressing nucleotide sequence isolated from the Sargasso Sea
aaagagagaagaataaaattaggtggatttttaccagaaagatcaacctttgctaaacctattaaagcaccctcaaaggatatttttgattttatgaaagtttcaactggtgaaaaaaaaatgtctacaactatggctcttgttagaatgttgactagtttaatgagagataaaaatatctctccaagattagttcccatcattccagatgaagcaagaacatttggtatggagggattttttcaaaaaattggaatctacgcgcatgaaggtcaaaaatatgagccagaagactctgctcaattaagctcatataaagaggaaaaaagtgggcaagttttagaggaaggaattaatgaggcaggtgcaatgtcttcatggattgctgctgcaacggcatatactaatcatgatatcgaaatgatccctatttatactttttattctatgtttggttttcagagaataggagatcttgcgtgggctgctggggatagtcaagctagaggatttttaattggtgctacggcaggaaggacaacattagctggagaaggtttacaacatcaagatggtcatagccacttaattgcatctacaattccaaattgtgtaacttatgacccaacattccattatgaactagcagtaatttttagagaaggtttgagacgaatgcatgagaagagagaaaatgttttttattatattacaacaatgaatgaaaattattctcatccagaaataccaaaagataaaaatatagaagagggaattcttaaaggtatttacaaaattaaggattttaacaaacataaaaaaactaaaattcaacttcttggatcaggcacaatactcagagaaatgatctcagctgctgaaattttacaaaaagagtatcaagttgatagtgaagtttggagtgtcactagttttaacgagcttagaaaagatggaatggaagtagaaagatataatttattaaatccagataaagaggcaaaaatatcttttgtggaacaatgtttaggtaaaactgaaggtccaatcatggcagcatcagattacatgagaatgaattcagatcagattagaccatatacaaataaaagtttttactcattaggagccgatggttttggaagaagtgatacaagaaaaaatcttagaaaattttttgaagtagataaagaacatttggtagcttatggactaagtattttggcaaaagaacaacttattgcatcaaaacatgcaaaagaggcgatgaagaagtacaatattgatagcgataagccaatacctactaagttataaa

SEQ ID NO: 216603 - DNA, 1000 bp, Unknown
  Bacterial polypeptide expressing nucleotide sequence isolated from the Sargasso Sea
agaattaaattaggtggatatatacccgaacgttcaacttttgctaaaccaatcaaagcaccctcaaaagatatttttgatttcatgaaagtatcaactggtgaaaaagaaatgtctactactatggcacttgtgagaatgttaacaaatttattaagggataaaaatatatctcctagactggttcctattattcctgacgaagcaagaacgtttggcatggaaggattttttcaaaaaatagggatttatgcgcatgaaggacaaaaatatgaacctgaggatgcagctcaattaagttcttatagagaagataaaagtggtcaagttttagaggaaggtatcaatgaagcaggtgctatgtcttcatggattgcagctgccactgcatatactaatcatgatattgaaatgatcccaatttatattttttattcaatgtttggtttccaaagggtaggagatctagcttgggcggccggagatagtcaagctagaggatttttagtgggtgcaacagctggaagaacaacattagctggagaaggcctacaacaccaggatgggcacagtcatttaattgcatcaactattccaaattgtgtaacttatgatcctacatttcattatgaattaggagttatttttcgagaaggtcttagaagaatgcatgagaaaaatgagaatgttttttattatattacaacaatgaatgaaaactattcacacccagaaatgccaaaagataaaaattgtgaggaaggcattttaaagggaatgtataaaataaaagaatttaacaaatacaaaaaaactaaaatccaacttttaggatcaggaacaatcttaagggaaatgatgtctgctgcagagattttacaaaatgattatcaaattgatagtgagatatggagtgtaaacagttttaatgaattaagaaaagatggaatggaggtagaaagatataaccttttgaacccagataaagaacctaaaaaat

SEQ ID NO: 216604 - DNA, 1171 bp, Unknown
  Bacterial polypeptide expressing nucleotide sequence isolated from the Sargasso Sea
aatgaatctagacttattagttcctgatataggagactttgaaaacgttgaaataatcgaagtacttgtaaaaaaaggcgacaaaatcaataaaaatgaccctgttgtcactttagaaagtgacaaatcaagtgttgaagtaccatctgaatatgaaggcacaattgaaaatataaatgtaaaaattggggataaagtttcaaaaggtgatttgatattaactatctcttcagaaaataaagatgaacatgacaaaattaataaaactttagacgaaaaaattccgccttcgacagagaaattgatagaggaagcagaaactgcatctaaatctgacacaaaagttgaaacaaaagtaatagagccaaaacaaatcaagcaaacaagattaattaatgaagttaaaatggttagtagtaacgacgatattgatcctgttgaaactaaagagtggttagattccttaagtgcagttctgcaaaatgatggttctgaaagggctcactttttaattaaacaattaattgatcaatcttataaagctggatctaaaattcctcatactcaaactactccttacgtgaatacgataccccctgaagaggaaaaaagatcacctggagaccaaaatatagaacgtaagttaagatcattaattagatggaatgctgctgcgatggtagtaagagcaaataaaaaacatcctgaactcggcggtcacataggaacatttgcatcagctgcaactttgtatgatgttggtatgaatcatttttggcgagcaaaaaataataaattcggaggtgatctagtatattttcaaggtcatagtgcaccaggaatgtatgcaagagcttttcttgagggaagactaaatgaaaagcagttagatagatttagacaagaagtacaaactggtggactttcatcttatcctcatccttggctaatgccaaacttttggcagtttccaacagtttcaatgggtattggtccaatgttatcaatatatcaagcaagatttatgaaatacctaattaatagaggactaattaaagatgagggaagaaaagtttgggcttttcttggagatggagaaatggatgagcccgagtcacttggggcaattggtttagcggcgcgtgaaaatttagataatttaatatttgtt

SEQ ID NO: 216605 - DNA, 208 bp, Unknown
  Bacterial polypeptide expressing nucleotide sequence isolated from the Sargasso Sea
atggcgcaactaacatatagagaggcagttgcagccggaattgctcaagaaatggagcgagacgaaacggttgctttcataggagaagatgtagcaagagcaggtggtgtttttaaagcaacggttggtctttttgataagtttggtccaaaaagagttattgatactccaatttctgaacaagctattctcggagcagcaatgggtg

SEQ ID NO: 216606 - DNA, 1424 bp, Unknown
  Bacterial polypeptide expressing nucleotide sequence isolated from the Sargasso Sea
tatgtctaacaaggtaatagttcctgatattggtgattttgaaaatgttgaaatcatagaaattttggtaaaatcgggagataaagtaaaaaaaaatgattctattgtaactctggaaagtgataaatcgagtgtagaagtaccttcaacggcagaaggaactgttgagaatataaatgtaaaaattggagataaagtttcaaaaggagatgtacttattttagtatcgggcgaaccagctaataataaagatgaaaaaataaaatatagtgaagataaattacctgtagatacagaaaaaattataaaacaagccgaagaaactttagaagaaaaaaaagaagagtttactaaaagtaaaattgataaaaaaaatgagacaattatcgaagtttcaaaagatggtgatattgacccaatagaaacaaaagaatggttagagtcactttctgctgtattggaaaaagatggaaaaaatagagctcaatttttaattaagcaacttattgaacattcttacaaggaaggctcagatttaatattatctagaaatactccttatattaatacgataaagccagaggaagagacaaaatctccaggagatcaaaatttagaaagaaaaattagatctttaatcagatggaatgctgcggcgatggttgttagggcaaacaaaaaaaatccagaacttggaggtcatataggaacatttgcttcagctgctaccctatatgatattggcatgaatcatttttggagagcaaaaaataataattttggtggagacttaatttattttcaaggacacagtgcaccaggtatgtacgccagagcttttcttgaaggaagaattagcgaaaaagaattagataattttaggcaagaagttaaaccaggaggattatcttcttatcctcatccttggttaatgccaaaattttggcaatttcctactgtctcaatgggtcttggacctataatgtcaatttatcaagctaggtttaacaaatatttaattaataggggactgttaaaagatgaaggaagaaaaatttggtgttttttgggagatggagaaactgacgaaccagagtctttaggagcaataggtttagcagctagagaaaaattagataatttaatttttgtagtaaattgtaatttacaaagattagatggaccagttagaggtaatggaaaaattattcaagaacttgaaggaatatttagaggagctggttggaatgtaattaaagttatttggggttcgtattgggatcaattattagctaaagataaatctgggttgttaattaaaagaatgggcgaggcagtagatggagaatatcaggcatttaaagcaaaaggtggagcttatgttagagagaaattttttggaaaatataaagagttgctagata

SEQ ID NO: 216607 - DNA, 1372 bp, Unknown
  Bacterial polypeptide expressing nucleotide sequence isolated from the Sargasso Sea
gatagtgagatagaggatcttccatatgtaaggccaaaagaagattctcctgaaataaaatatctcaaggagacaagagaaaaacttggtggaccagtcccaaaaagaagagagcactctgaaactcttaaattaaaaaataaagatgccttcaaagttcttcatgaaggcagtggtgaaagaaaggtatcaactacaacaaactgtgttcgaattatgaataaccttatcaaggatgaaaaccttggagagcgagtggtgccaatagttcctgatgaggcaaggacatttggtatggaaggcatgtttaagcaaataggaatttactcctcagaagggcagctttatgaaccagaagatgctgatcaagttatgtggtacaaagaatctgagactggagtaatgctagaagagggaatcactgaagcaggttcatttgctgcttggacagcattggcaacatcttactctaatcataatttgaccatgattcctttctacgtcttttattcaatgtttggttttcaaagaatacatgacttagcatgggctgcgggagacgctcaagctaaaggttttttaataggagcaacatcaggaagaacaacattaaatggtgaaggtcttcagcatcaagatggtcacagccatatcctttcatcaactattccaaactgcaaatcttatgatcccgcatatggttatgagctagctgcaattatcgaacatggtttgaaggagatgtataaagataaaaagaattatttttactatttaactgttactaatgagagatatgttcaaccacccaaaccaaaaggtaaggatattgatagcaatatcattaaaggaatgcatagaatttctgaaactaaaaagcctcagataaggctgcttgggtctggagcaatcttaaatgagagttctaaagcagctgacatattaagtcgttttaacattgaaagtgaggtttggagtgttaccagctttaatatgctcagaaaagatggaatggaagttgagaatgagaatattaaaaatccttcaaacaaagcaaaagaatcttttgttgcacaatcgtttaaagaacatgatataccaactgtggcatcaacagattatatgagagcctattctgagcaaataagaccatatataaattcttcttattacacacttggaaccgatggttttggcagaagtgatagcaggcaaaggttacgagagttttttgaggtagatgcaaacagtattgttatgactgcagcttatgcacttcacaaagaaggccaacttaataaaaaagaacttcaaaagatttataaagaaatcaaagtaaataaaaataagatttcaccttggaatacataaa

SEQ ID NO: 216608 - DNA, 1201 bp, Unknown
  Bacterial polypeptide expressing nucleotide sequence isolated from the Sargasso Sea
attagagggtatttttagaggaggtggctggaacgttctaaaagttatttggggatcttattgggactcacttttagcaaatgataagacaggacatttagtaaaaattatgaatgagaccgtggatggtgaatatcaagcatttaaagcaagaaatgggctttatgtaagagaaaagttttttggcaaataccctgaaactaaagaattagtctcatcaatgtcagatactgatatttggagacttaatagaggaggccatgatcctcataaagtatatgctgcatatgataaagcgatgaatcacaaaggaagccccacagtcataatagctaaaactataaaaggttatggtatgggtaaaagtggtgaaagtgtaaatactactcaccaacaaaagaaattggatgttgatgatttaatgtattacagggataggtttgatgttcctttaacagattctcaagtcaaaaatattgaatatttcaaaccagacgaaaactctgaagaaattaaatacttaaaaaaaagaagattagaacttggtggatttataccagagagaacatcatattcaaaaccgattaaagccccagttaaagatatttttgattttatgaaaaagtctactggtgaaaaagaaatgtctacaacaatggcattagtaagaatgttaactaatcttttgagagataaaaatgttgcaccaaaattggttccaattattcctgatgaagctagaacatttggaatggagggtttctttcaaaaaataggtatttatgctcatgaaggtcaaaaatatgagccagaggactcagcacaactttcatcttatagagaagaaaaaagtggtcaggtattagaagaaggtattacagaagctggttcaatgtcttcttggatagcagctggaacagcatatacaaatcatgatattgaaatgataccaatttatcttttctattctatgtttggctttcaaagaattggagattttgcttgggctgcaggagatagtcaagcgagaggctttttaattggtgcgactgcaggaagaacaacacttgcaggagaaggtcttcaacaccaagatggtcatagtcatttattagcatcaacaattccaaactgtatttcttatgatccaacattccattatgaattagctgtgatttttagagaaggtttaagaaggatg

SEQ ID NO: 216609 - DNA, 1267 bp, Unknown
  Bacterial polypeptide expressing nucleotide sequence isolated from the Sargasso Sea
acttttgcaaaaccagtgaaaacacctcctcaagatatatttgaaagttttatgaagtccactggtgataaagaaatgtctactaccatggctcttgtaagaatgcttgcaaatttactaagagacaaaaatgttgcaccaagattggtgcctataattgctgatgaagctagaacttttggtatggagggtttttttcaaaagattggaatttatgcacacgaaggccaaaaatacgaaccagtcgactctgaacagttaagttcttatagagaagataagagcggacaagttttacaagaaggtattacagaagcaggagcaatgtcatcatggattgctgctggaacctcttacactaatcatgatttagaaatgattcctatttatttgttttactctatgtttggttttcaaagaattggagacttagcatgggcggcagcagactctcagacaagaggttttttaattggagcaacatctggaaaaacaactttagctggtgagggattacaacaccaggatggacatagccttcttcttgcatctgcgatacctaactgcataagttacgatcctacattttcatatgagatggcagttatttttagagatggattaaaaaggatgcatgagaaaaaagaaaatatttactactatataactgcaatgaacgaaaattatactcatccagaaaaacctgctggttcagatcagggaattttaaaagggatgtatttatttaaaaactacaaaggaaaaggcaaagctaaagttcaaatgcttggttcaggatcaattttaagagaagttattaaagctgctgaaactttatcaaaagattacggagtagattgtaatgtttggagtgctactagtttcaatgaattaaagaaagatggtatggaagttgaaagaagaaatttattaaatccaaaagagaagcctaagaaaagttatgtacaaaaatgtttagattctcaagagggaattatatttgcagcatcagattatataagatcacatacagaccaaataagaccatatcttaataaaccattctatacattaggaactgatggttttggaagaagtgatacaagaaaggaattaagaaaattttttgaagttgataaaaagcatattgttacatacactttaagcgcattagcaaaagaacaattgatggcttcagaacatgcagaaaaagcaattaaaaaatacaatattgatcaaacaaaagtttttccaacaaaattatagt

SEQ ID NO: 216610 - DNA, 964 bp, Unknown
  Bacterial polypeptide expressing nucleotide sequence isolated from the Sargasso Sea
ggtattacagaggcaggagcaatgtcatcatggattgcagctggaacttcctacacaaatcatgatttagaaatgattcctatttatttattttattcaatgtttggttttcaaagaattggagatttagcatgggctgctgcagattctcagaccagaggttttttgattggagcaacatccgggaaaacaactttagcaggagaaggtttgcagcaccaagatggacatagtcttctcatggcatctgcaatacctaactgcgtaagttatgaccctactttttcatatgagatggcggttatttttagagatggacttaagaggatgcatgaaaaaaaagaaaatatttattactacataactgcaatgaatgaaaattatactcatccagaaaaacctgctggttcagatcaaggaattttgaaagggatgtatttgtttaaaagttataagggaaaaggaaaagcaaaagtacaaatgttgggatctggatcaattttaagagaaattataaaagcatctaaagttttgtctgatgaatacggaattgattgtgatgtttggagtgttactagttttaacgaattgaaaaaaaatggcatggaagttgaaagaaaaaatttattaaatccaggggaaaaagcaaaaaaaagctatgttgaaacatgcttaagttcacaagatggtattatatttgcggcatctgactatattagatcctatgctgatcaaataagatcttatacgaacaaacctttttacacattgggaactgatggttttggaagaagtgatacaagaaaagaattgagaaaattttttgaagttgataaaaaacatattgttacatacactttaagcgcattagcaaaagaacaattgatggcttcaaaacatgcagaaaaagcaattaaaaaatacaatatcgatcaaacaaaagtttttccaacaaagttataga

SEQ ID NO: 216611 - DNA, 1026 bp, Unknown
  Bacterial polypeptide expressing nucleotide sequence isolated from the Sargasso Sea
tgcgcgctcctttctcgaggggcgcatatctgagcagcaattggatagttttcggcaagaggttgatggggaggggttatcctcttacccacacccttggttaatgccagcttattggcagtttccaactgtttcgatggggctgggacccatccaagcaatttatcaggcccacgtgatgaagtatttagatagccgtggtcttgtgcccaagaaggagcgtaaagtctgggcatttctaggtgatggggaatgcgacgaacctgaaactttaggagccctatccctcgcaggacgagagaggctcgataatttgatttttgtagttaactgtaatctccagaggctagatggtccggtaaggggaaacggtaaaattatccaggagctagaaggctactttagaggcgcaggttggaatgttttgaaggtagtctggggaagactttgggatcctttgtttgccagagacaaagacggattgatgcaaaaacagatggatcttaccgtcgacggagagtttcaaaatttcaaggcgaagggcggagcttatgtgcgggaaagctttttcaacaaagatcctgaattggcgaagcttgtcgaggatatgagtgatcaggatatttaccaactaaaccgaggcggtcacgatccttttaagttgtatgccgcttattcttcggctgttcagcataaaggccagccaacagtaattcttgcaaagacggtcaaaggatacgggatgggtgatgctggtgagtccgaaaatgacactcactcggtaaaaatattgaatctagatgagcttaaatatttccgagacaggtttggcatccctttgagtgataaagaagttgaggctgtaccatactatcggcctcctgaggactcgccggagataaaatacctaaaaagtaagcgtgatcagcttggtggttacgtccctatgcgtttagagaataaagaatcgctgaaaatacctcccctatcgactttcaaggctcaactgaaggcagggcgatcgtg

SEQ ID NO: 216612 - DNA, 403 bp, Unknown
  Bacterial polypeptide expressing nucleotide sequence isolated from the Sargasso Sea
atgaaaaaacttactaaaagcgaccatttaaaaatttattcttatatgcttaagataagaagatttgaggagagatcttctcagttatatggaatgggacatattggtggtttctgtcatctttatattggtcaagaagctgtagttgttggtgttttaatgactataaaaaaaaatgattcagttgttactacttacagagatcatggtcacatgatagcaagaggcttagagccaaaaaaaataatgtcagaactgactggaagagttgatggatattcttctggtaaaggaggatcaatgcatatgttttctaaaaaaaataatttttatggaggacatggaattgtcggggcacaagttcctattggaaccggaatagcttttacacacaaaatataat

SEQ ID NO: 216613 - DNA, 844 bp, Unknown
  Bacterial polypeptide expressing nucleotide sequence isolated from the Sargasso Sea
tatttaattaatagaggtttattaaaaaatgaagatagaaaaatttgggcttttcttggcgatggagaaatggatgaaccagaatctttaggagcaattagtttagcttcgagagaaaaattagataatttaatatttgttattaattgtaatttacaaagacttgatggtcctgttagaggaaacggaaaaattattcaagaactggaaggtattttcagaggagccgggtggaatgttattaaggttatatggggttcttactgggatcaattgctcacaaaagataaatcgggattattagtgaaaagaatgaacgaatgtgttgatggagagtatcaagcttttaaggctaaaggtggagcttatgttagagaaaaattttttggcaaatatcctgaactaaaagatttagtatccaccatgaccgacagagatgtttggaagcttaatagaggcggacacgatccacacaaagtttatgcagcttatgatgcggcaataaaaacaaagggacaaccaaccgttattttagcaaaaacaataaagggttatggcatgggtaaatctggagaaagcactaacattactcaccagcaaaaaaaattaggagaagaagatctgctttattacagagatcgttttgatattcctcttaccgataagcaggtaaaaaatattgaattttataaaccaggggaaaattcaacagaaataaaatatatcaaagaaagaagaatgaaacttggaggaaacttgccagaaagaagttcttttgcgaagccaattaaaaagccaaacaaagatatttttgagaatatgctaaaatcatcaggagatcgtg

SEQ ID NO: 216614 - DNA, 989 bp, Unknown
  Bacterial polypeptide expressing nucleotide sequence isolated from the Sargasso Sea
tatatcaactttttcatcagcagcaactttatatgacgttggatttaattatttctttagaggatcagacaatcaccttgaagacatggtttactatcaagggcattgctcaccaggaatctatgcacgaagctttcttgaaggatatttaaatgaagaagacttagataattttagaagagaagtaaacaaaccagggctttcgtcttatcctcatccttggttaatgccaaattattggcaattccctgtagtatcaatgggattaggaccaatacttggaatctatcaagctcatgtaatgagatatttatctgcaagaggtttagtacctagaaatgacagaaaagtatgggttttttgcggtgatggtgaaatggatgagcctgagtcaaaaggagctataggtttagcaggaagggagcagttagaaaaccttatttttgttgttaattgtaatttacagagacttgatggacctgtaagaggtaatggaaaaattattcaagaattagagggggcttttagaggagagggttggaatgtcattaaagtggtatggggtagattttgggatccaataattgctaaagacactcaaggaaagcttcaagaaattatggatgctgtcgttgatggcgaattacaaaactataaagcaaaaggtggagcctataccagagaaaacttttttgctaaggatccatccgttttagaaatggttaaagatttatctgatgacgatatttacagattaaatagaggaggtcatgatccttataaagtttatgctgcttatcataaagctgttaattctaaaggtgcgcccactgttattttagcacttaccaccaaaggctacggaacaggatcaagagaagctgacaacactactcatcaggtcaaaaaattgtcgattgaaaatatcaaatcctttagagatagatttgatatacctgtatcagattcagaaattgaagaactcccat

SEQ ID NO: 216615 - DNA, 817 bp, Unknown
  Bacterial polypeptide expressing nucleotide sequence isolated from the Sargasso Sea
atgacagaccaatacaaagatgtagacccacaggagactcaagagtggatcgagtcgatcgaagacgctcttgaagagcacggttatgagaggactaggtttctgctagagtcccttatagagtttgcgcaatctaaaggtgcacgcctgccttttaacacatctacgccatttttaaatacgattttacctggccaacaaccagaatatccaggggatagagatattgaaagaaaaataaaatccatcgtcaggtggaatgcaatggcaatggtcaccaaggcaaataaagaaaccccaggaataggtggtcatatatcaacctatgcctctgcagcaactctctatgaggtggcattcaatcatatattcaaaggctccgaccactcctccgggcaagacctggttttttttcaaggccacgcctcaccaggtgtatatgctcgcgcctatcttgaggggcgcctatcaaaagagaatttagataactttcgtcgagagctagcagaaggtggtggcctatcgtcctacccgcatccctatttaatgccagagttttggcagtttgcaactgtttcaatgggcctggggcctatgatggccgtttaccaagcacgctttatgagatatatgatagaccggggttttgtagagaatacagggagaaaggtttttgcctttttaggggatggtgaaatggacgaacccgagtcaacaggcgccctgaccctggcatccagagaaaaccttgataaccttatttttgtggtaaactgtaaccttcaaagactagatggtcccgttagaggaaactcta

SEQ ID NO: 216616 - DNA, 880 bp, Unknown
  Bacterial polypeptide expressing nucleotide sequence isolated from the Sargasso Sea
aatggtaagtagtaacgacgatattgatcctgttgaaactaaagagtggttagattccttaagtgcagttctgcaaaatgatggttctgaaagggctcattttttaattaaacaattaattgatcaatcttataaagctggatctaaaattcctcatactcaaactactccttacgtgaatacgataccccccgaagaggaaaaaagatcacctggagaccaaaacatagaacgtaagttaagatcattaattagatggaatgctgctgcgatggtagtaagagcaaataaaaaacatcctgaacttggcggtcacataggaacatttgcatcagctgcaactttgtatgatgttggtatgaatcatttttggcgagcaaaaaataataaattcggaggtgatctagtatattttcaaggacatagtgcaccaggaatgtatgcaagagcttttcttgagggaagactaaatgaaaagcagttagatagatttagacaagaagtaaaaactggtggactttcatcttatcctcatccttggctaatgccaaacttttggcagtttccaactgtttcaatgggtattggtccaatgttagcaatatatcaagcaagatttatgaaatacctaatcaatagaggattaattaaagatgagggaagaaaagtttgggcttttcttggagatggagaaatggatgaacctgagtcacttggcgcaattggtttagcggcgcgtgaaaatttagataatttaatatttgttgttaactgcaacttacaaagattagacggtccagtaagaggaaatggaaaaataattcaagaattagagggtatttttagaggaggtggctggaacgttctaaaagtcatttgg

SEQ ID NO: 216617 - DNA, 562 bp, Unknown
  Bacterial polypeptide expressing nucleotide sequence isolated from the Sargasso Sea
atggagaaaaaatatattcagaacatatattggtgatggagcaatgaacaatggacaagtttttgaagcttttaatctagctgctttatggaagcttcctgttttatacattattgaaaataataaatatggaatgggcacatctgtagatagagcggcagcaggattagatttgtataaaagaggggaggcatttggtattcctggtgagaaggtagatggaatgaatgttttctctgttatagaggcagcagataaagcaggtaagtatgttagagaagggaatgggccatatattattgaagtacaaacatatcgatatagaggacattcaatgtcagatcctgcaaaatatagaacaaaagaagaattagataattataagcaaactgatcctattgaaatagtcaaagctgaaattttaaagaaaaaaattgcaactaatgatgaaattgaaaaaattaataaagatactttaaaagaaattaaaaatgcagcagaatttgcaaccaatagtccttttccaaaggacagagaactttatacggatgtatatttataa

SEQ ID NO: 216618 - DNA, 1008 bp, Unknown
  Bacterial polypeptide expressing nucleotide sequence isolated from the Sargasso Sea
aagttcgtataaagaggaaaaaagtggtcaagttttagaggaaggaattaacgaggctggagcgatgtcatcttggatcgctgcaggaacttcatatacaaaccatgatgtagaaatgatcccaatttatcttttttactcaatgtttggttttcagagaattggtgattttgcttgggccggtgctgatagtcagtccagagggtttttgattggagcaaccgctggaaggacaactcttgctggagaaggtttacaacatcaagatggtcatagccatttgatggcttcaactattcctaattgcagatcatatgatccaacatttcactatgagcttgcagtcatttttcgagaaggtttaaaaagaatgcatgagaaaaaagagaatattttctattatattacgaccatgaatgaaaattatcctcatccggaaatgccaaaagataaatcatgtgaggatggtattttaaaaggaatgtataaaataaaggagtttaacaagtataaaaaaactaaaattcaatttcttggatctggcacaatcttaagagaaatgatagctggtgcggaaatattacaaaatgagtatcaaatcgatagtgagatttggagtgtaacaagctttaatgaattaagaagggatggtcttgaggtagagagatacaatcttctaaatcctgataaggagcctaaaaaaagctatgtagaaaaatgtttgggtaacactgaaggaccaattttagcagcttctgattatatgagaatgaattctgatcagattaggccatacgtaaacaaaagcttttattcattagggactgatggatttggtcgaagtgatacaagaaagaatttaagaaaattttttgaagttgataaggaacatatcacaacatatgggttgagtattttagctaaagaacagcttattgcatcaaaatatgcaaaagaagcaatcaaaaagtataagattgatattgataaaccttatgccaacaaaaa

SEQ ID NO: 216619 - DNA, 802 bp, Unknown
  Bacterial polypeptide expressing nucleotide sequence isolated from the Sargasso Sea
caaagatggttcggacagagcacattatattttaaaaaaacttattgatgaaacttataaggaaggtactaataaacctttaacaagaaacacgccttatataaatactataacaccagaaaacgaaacaaaatctcctggcgatcaaaatattgaaagaaaaataagatctttaattagatggaatgccgcagcaatggttgtaaaagcaaacaaaaaaaatccagaattaggaggtcatataggaacatttgcttcagcagctaccctttatgatgtaggaatgaatcatttctggagagcaaaaaataataaatttggaggagatttaatttattttcaaggtcatagtgccccaggaatgtatgctagagcttttttagaaggaaggctcacagcaaatcaattgagtaattttagacaagaagtaggagttaatgggctttcgtcttaccctcacccttggctaatgccaaaattttggcaatttcccaccgtatcaatgggtcttggtccaattttatcaatctaccaggccagatttacaaaatacttaataaatagaggtttattaaaaaatgaagatagaaaaatttgggcctttcttggtgatggagaaatggatgagcctgaatctttaggagctattgggttagctgcaagggaaaaattagataatttaatatttgttattaattgcaatctacaaagattagatggacctgttaggggaaatggaaaaatcattcaagaattagaaggcatttttagaggagcaggctggaatgtaataaaagtaatt

SEQ ID NO: 216620 - DNA, 664 bp, Unknown
  Bacterial polypeptide expressing nucleotide sequence isolated from the Sargasso Sea
atgttgttgatacgtcgttttgaagaaaaagcaggccaactctacggaatggggatcataggcggattttgtcatttatacattgggcaagaagcaatagttgttgggatgaaagctgcttcaaaagaaatcgatacagttataaccagctacagagaccacggtcacatgttagcatatggaatggaccctaaacgagtgatggcggaactagcaggcaagggcactggttactcaaagggtaaggggggctcaatgcatatgtttagcagagaaaaaaacttttttggcggccacggaattgttggagcccaagttcctatcggcacagggctggcatttaaacacaaatatactcaggatggggcagtttgtcatgcctattgcggtgatggtgcaattaaccaaggccaagtttatgaagcatttaatatggctgcattatggaaattacctgtggtttatgtaatcgaaaataacaagtatggtatgggcacttcggttgagcgggcatcagctgttacagatttatataaaaggggcgagtcttttgggatccctggaatcaaggtcaatggaatggatgttaccgaagtaagaactgtggcagaggaggctaatgattggtgcagagcaggtaagggtccatttatttggaaatgaa

SEQ ID NO: 216621 - DNA, 752 bp, Unknown
  Bacterial polypeptide expressing nucleotide sequence isolated from the Sargasso Sea
attggaacttttgcttcagctgcaactttatatgacgtcggaatgaatcatttttggagggcaaaaaataataaatttggaggtgatctagtttatttccaagggcattcggctccaggtatgtacgctagagcatttcttgagggaagactttctactaaacaactagatggttttagacaagaggttggtaaagatggattatcttcttatcctcatccgtggttaatgccaaacttttggcagtttccaaccgtatcaatgggtctaggcccaatcatgggaatctatcaagcgagatttttaaaatatttaattaatagaggcttgataaaagacgaaggaagaaaaatttgggtatttcttggtgacggtgaaatggatgaaccagaatctttgggtgcaataggtttagcagcaagagaaaaattagacaatttaatttttgtaattaactgtaatcttcaaaggttagatggtccggtaaggggaaatggaaaaattattcaagaacttgagggaagctttagaggtagtggttggaatgtaattaaagtaatttggggttcatattgggataaattgttagcaaaagataaaagtggactattgataaagagaatgaacgaatgcgttgacggtgagtatcaagcttttaaagctaaaggtggagcatatgtaaaagaacatttttttggaaaataccctgagctaaaagaattagtttataccatgactgataaagatatctg

SEQ ID NO: 216622 - DNA, 601 bp, Unknown
  Bacterial polypeptide expressing nucleotide sequence isolated from the Sargasso Sea
catgctaaaaattagaagatttgaagaaagagcagcccaattatatggcatgggtcatataggaggtttttgtcatttatatattggtcaagaagcagttgtagtaggcgttcttatgacaattaacaaaaatgatacagttgtaacaacctatagagatcatggacatatgatagcaagaggactagatccaaaaaaaattatggctgaattaactggtcgttctactggctattcagcaggtaagggcggttcaatgcatatgttttcgaaagaaaataatttttttggaggtcatggaattgtaggagctcaagtaccaattggaacaggtatagcttttacacataaatataacaaagaaaaaaatatttgtagaacttatattggtgatggagctatgaataatggtcaagtttttgaagcgtttaacctagcagctttatggaaattaccagttctatatattattgaaaataataaatatggaatgggaacgtctgttgatagagctgcagctggtagtgatttgtataaaagaggggaggcatttggtataccaggagaaatagtagatggaatgaatgtatttaaagttatt

SEQ ID NO: 216623 - DNA, 886 bp, Unknown
  Bacterial polypeptide expressing nucleotide sequence isolated from the Sargasso Sea
taaagaagctgaatcgtcaattccttctaaggttaaaaaaaaacctgtaagaaaaattcccgcgcgttcaaatggtgccgacattgacccaacagaaacacaagaatggctagactctctaagtgcagttatttcaaaagatggttcagatagagcacactatattttaaaaaaattaattgatgaaacttataaagaaggtgccaataaaccattaactagaaatactccttatataaatactatatcaccagacagtgaagttaaatctccaggcgatcaaaatattgaaagaaaaataagatctctaattaggtggaatgcagccgcaatggttgtaaaagcaaataaaaaaaatccagaactaggaggtcatataggaacatttgcttcagcagctactctttatgatgtgggaatgaatcatttctggagagcaaaaaataataaatttggaggagatttaatttattttcaaggtcacagtgctccaggaatgtatgctagagcttttttagaaggaagacttacagcaaatcaattaagtaattttagacaagaagtgggtgttaatggactctcatcttatcctcacccttggttaatgcctaaattttggcagttccccacagtatcaatgggtcttggtccaattttatcaatatatcaggctagatttacaaaatatttaattaatagaggtttattaaaaaatgaagatagaaaaatttgggcttttcttggtgacggggaaatggatgagccagaatctttaggagctattggattagctgcacgagaaaaattagataatttaatatttgttattaattgcaatttacaaagattagacggtcctgttaggggaaatggaaaaatcattcaa

SEQ ID NO: 216624 - DNA, 901 bp, Unknown
  Bacterial polypeptide expressing nucleotide sequence isolated from the Sargasso Sea
taatttaaataaacaaaaagaagagactattaatattacaaacgacaaaattgatattgatcctttagaaactaaggaatggattgaatctttaaatgcagtagttgaaaatgttggaaatgaaagagcacattttcttctaagacaattaattgatcagtcatatagaaagggttctcgaattccatttatacaaaatacaccttacataaatactattcctcctaatgaggaagaaaaatcctcaggagatcagaatatagagagaaaaattagatctttaataagatggaatgcagcagcaatggtagtaagggctaacaaaaaatttcctgaacttggtgggcatataggcacctttgcgtctgctgcaactttgtatgacgtaggaatgaatcatttttggagagcaaaaaatcatcaatttggaggtgatcttatttattttcaaggacattcagcaccaggtgtatattcaagagcttttttagagggaaggctaacaaaagtacaattagataattttaggcaggaggtaggaccgaatggcttatcctcatatccccacccatggttgatggataaattttggcaattcccaactgtttctatggggcttggtccaatgttagcaatttatcaagctcgtttcatgaagtatttaataaacagaggtttaataaaagatgaaaatagaaaagtttgggcatttcttggtgatggagaaatggatgaaccagaatctttaggggcaattgctttagcatcaagagaaaatcttgataatttgatattcgtaataaattgtaacctacaaagactagatggtcctgttcgtggaaatggaaaaataattcaagaattagagggaagctttagaggagcgggctggaatgttcta

SEQ ID NO: 216625 - DNA, 784 bp, Unknown
  Bacterial polypeptide expressing nucleotide sequence isolated from the Sargasso Sea
aacaccaacacacctgggattggtgggcacatttccacatatgcatcttcagcaacattgtatgaggttgcctttaaccacttttttaaaggccctgaacacccaagtggtggggacttaatcttctatcaagggcatgggtctcccgggcaatacgcaagggcatatcttgaaggaaggttgaccaaagagaaccttgagaactttagaagagagcttacaccgggtgggctttcttcatatccccacccttatttaatgcctgatttttggcagtttgctacagtttcgatgggtttggggcccattatggcaatttatcaagcaaggtttttaaactatatggtagaccgggaaatgatcaaggaaacaggtagaaaggtttgggcttttcttggtgatggagaaatggatgagccagaatctaaaggcgcactcacacttgcttcaaaagaagacttagacaaccttatatttgtagtaaactgtaatttgcaaagattagatgggcctgttcgtggtaatagtaaagttatacaagagcttgagggtgctttccgcggtgcgggctggaatgttataaaggttatttggggttctgagtgggatgaccttattgataaagacacttcagggaaattacttcaaagaatggaagaagtcgtagatggggagcttttaaagtatgttgttgaaggtggtgcatatttcagagaacacttttttggaaaatacccagaaacgcttgatcttgtttcacatataagcgatgaagaccttataa

SEQ ID NO: 216626 - DNA, 741 bp, Unknown
  Bacterial polypeptide expressing nucleotide sequence isolated from the Sargasso Sea
gaccaacaaccaccgtatcctggagatcttgataccgaacgagaaatacagaattcaattctttggaattctgcagttatggtttcagatgcaaatcgtagaatcgatggactcggcggccacatctcgacttatgcatcctcatcaacactatacgaagtaggattcaaccatgtgttccgtggcaaggacagcaatggtattggagatgctctctacatccaaggtcatggaagtcccgggatttatgctagagctttcctagagggaagactgactcgcgaacaattggccaacttccgccaagaagcatttgccgatgggctatcttcctatccacatcctcgattgatggatgatttctgggagtatccaacagtctcgatggggctcgggcccttgggtgcggttatgcatgctcgattttggaaataccttcacaatcgaggcttggctgatacatcagaatctacagtcttcgctttcctcggcgatggtgagatggacgagccggaatccatcgccgcaatcgcggttgcaggcagggaaaaattggacaacctaatcacaatcgtaaattgtaatctacaacgtttggatggccccgttcgaggtaacgccaagatagttcaagagttagaagggctctatcgaggagctggctgggaggtattcaaggtcctatgggattctaattgggacagactatttgctcaagatcgagacgggttgttactcgct

SEQ ID NO: 216627 - DNA, 910 bp, Unknown
  Bacterial polypeptide expressing nucleotide sequence isolated from the Sargasso Sea
aatgacagaccaatacaaagatgtagatccacaggagacccaagaatggatcgagtcgatcgaagacgctcttgaagagcatggttatgagaggaccaggtttctgctagagtcccttatagagtttgcgcaatctaaaggtgctcgcctgccctttaacacatctacgccatttttaaatacgattttacctggccaacaaccagaatatccaggcgatagagatattgaaagaaaaataaaatccatcgtcaggtggaatgcaatggcaatggtcaccaaggcaaataaagaaaccccaggaataggtggtcatatatcaacctatgcctccgcagcaactctctatgaggtggccttcaatcatatattcaaaggctccgaccacccctccgggcaagacctggtgttttttcaaggccacgcctcgccaggtgtatatgctcgcgcctatcttgaggggcgcctatcaaaagagaatttagataattttcgccgagagttagcagaaggtggcggtctatcgtcctacccgcatccctatttaatgccagagttttggcagtttgcaaccgtttcaatgggcctggggcctatgatggccgtttaccaagcacgctttatgagatatatgatagaccggggttttgtagagaatacagggagaaaggtttttgcctttttaggggatggtgaaatggacgaacccgagtcaacaggcgccctgaccctggcatccagagaaaaccttgataaccttatttttgtggtaaactgtaaccttcaaagactagatggcccagttagaggaaactctaaagtaatacaggagcttgaaggagcctttagaggtgcgggctggaatgtcataaaggttatttggggctctgattgggatgagttgatagaa

SEQ ID NO: 216628 - DNA, 637 bp, Unknown
  Bacterial polypeptide expressing nucleotide sequence isolated from the Sargasso Sea
ctacggcgggcatggaattgttggagcacaagtccctcttggggctggactagcttttgcagataaatatttagaaaatgatcgagtaacttttacttatttcggcgatggtgcagctaaccaaggtcaagtctatgagacttttaatatggcatctctttggaaattaccggtgattttcgtaattgaaaataatcagtatgctatgggtacatcccaactacgctcaacctcaacaccagacatttacactagaggcgccggttttgatatacccggagaggccgttgatggaatggatgttctttctgtaaaagctgctggagataaagcggttaaacactgccgcgctggtaaaggcccctatattctcgaaattaaaacttatcgataccgaggacactcgatgtctgatccagcaaaatacagaactcgcgaagaggttcaaaaaatgcgggaagaaagagatgcaatcgaaaacattagatctattttgttaactggcaaacatgcaaccgaagattgcttaaagtcgattgataaggaaattaagaaaatcgtaaatgaatctgcagaatttgccaaagctagtcccgaaccagaacttaatgaactttatactgatatttacgcgtaa

SEQ ID NO: 216629 - DNA, 817 bp, Unknown
  Bacterial polypeptide expressing nucleotide sequence isolated from the Sargasso Sea
ttaataaaacaattaattgatcaatcttataaagctggatctaaaattcctcatactcaaactactccttacgtgaatacgatacctcctgaggaggaaaaaagatcacctggagaccaaaacatagaacgtaagttaagatcattaattagatggaatgctgctgcaatggtagtaagagcaaataaaaaacatcctgaacttggcggtcacataggaacatttgcatcagctgcaaccttatacgatgttgggatgaatcatttttggcgagcaaaaaataataaattcggaggtgatctagtatattttcaaggtcatagtgcaccaggaatgtatgcaagagcttttcttgagggaagactaaatgaaaagcagttagatagatttagacaagaagtacaaactggtggactttcgtcttatcctcatccttggctaatgccaaacttttggcagtttccaacagtttcaatgggtattggtccaatgttagcaatatatcaagcaagatttatgaaatatctaatcaatagaggattaattaaagatgagggaagaaaagtttgggcttttcttggagatggagaaatggatgaacctgagtcacttggagcaattggtttagcggcgcgtgaaaatttagataatttaatatttgttgtaaactgcaacttacaaagattagacggtccagtaagaggaaatggaaaaataattcaagaattagagggtatttttagaggaggtggctggaacgttttaaaagttatttggggatcttattgggactcacttttagcaaatgataaaacag

SEQ ID NO: 216630 - DNA, 889 bp, Unknown
  Bacterial polypeptide expressing nucleotide sequence isolated from the Sargasso Sea
gtgatgcgtgccaaccgtgactcttctgaactcggtggccatattgccagttttgcttcttctgccctgctttatgacataggtttcaatcacttttggcaagcccctggtacagatcatggtggagacctgatctacatccagggacattcggctcctgggatctatgcaagagcttttctcgaaggtcggatcacagaagaacagatgaatcacttccgccaggaatccaccggaaaaggagtttcatcctatccccacccctggctgatgccggaattctggcagtttccaacggtctcgatggggttgggtccgatcatggcaatttaccaggcccgctttctgaaataccttcacaaccgggaattattggataccgaaccaaggaaagtctggtgcttccttggagacggagaaaccgatgagcctgaatcaatgggtgccatccatctcgcagcccgggaaaaactggacaatcttatttttgtcatcaattgcaacctccagcgactggatggtccagtccgcggaaacggcaaaatcattcaggaattagaaggcgagttcaggggcgcaggttggaatgtgatcaaagtcctatggggttcctactgggatccgcttctggccagagacaaccaggggctcttgcggaagagaatggaagaagccatcgatggagaatatcaggcctttaaagccaagggaggtgcttatacacgtacccatttttttggcaagtatccggaactgctggaaatggtctccaatatgagtgatgaggatatctggagactgaatcgcggaggccatgatccacacaaagtttatgctgcttatgaagctgcagttaaacataatgggcaaccccacggtgatattagca

SEQ ID NO: 216631 - DNA, 556 bp, Unknown
  Bacterial polypeptide expressing nucleotide sequence isolated from the Sargasso Sea
tcgagtaacttttacttattttggcgatggtgcagctaaccaaggtcaagtctatgagacttttaatatggcgtctctttggaaactaccggtaatcttcgtaattgaaaataatcaatacgctatgggtacatcccaactacgctcaacctcaacaccagacatttacactagaggcgctggttttgatatacccggagaggccgttgatgggatggatgttctttctgtaaaagctgccggagataaagcagttaaacactgccgcgctggtaaaggcccctatattcttgaaatcaaaacttatcggtaccgaggacactcgatgtctgatcctgcaaaatacagaactcgcgaagaggttcaaaaaatgcgggaagaacgggatgcaatcgaaaatattagatctattttattaactggcaaacatgcaagtgaagatgacttaaagtcgattgataaggaaattaagaaaatcgtaaatgaatctgcggaatttgccaaagccagtcccgaaccagaacttaatgaactttacactgatatttacgcgtga

SEQ ID NO: 216632 - DNA, 959 bp, Unknown
  Bacterial polypeptide expressing nucleotide sequence isolated from the Sargasso Sea
aagagaagtagataaaccagggatatcttcatatccacatccatggctgatgccagattattggcaatttccaaccgtttctatgggtttaggcccaattatgggtatttatcaagcacacgtaatgagatatttatctgcaagacagcttatagaaagaggtaatagaaaagtgtgggttttttgtggagatggtgaaatggatgagccagaatcaaaaggtgctattggcttagctggaagagaaagtttagaaaatttaatatttgttattaattgtaaccttcaaagattagatggtcctgttaggggcaaccataaaattattcaagagctagaaagagagtttagaggttcagggtggaatgttttaaaagttgtttggggcaggcattgggatcagatcctttcaagagatggtaaaggaaaactacaaagacttatggatgcggtcgttgatggagaacttcaaaatttcaaagccaagggcggggcctatactcgtgaaaagttttttggccaagatccagaagtgctaaagatggtcgaagatttaactgatgaggacatctataagttgaatagaggtggccatgatccttataaggtttatgcagcttaccacaaggcagttaatacaaaaggtgctccaactgtcattcttgctctaacaactaaaggttatggaacgggctctagagaggcagataacactactcatcaggtaaaaaagttaacgacagataatctaaaagcctttagagataggtttgatattccagtgtcagataaagatttagagaagcttccgtacataaaatttgaaaaaaattcaaaagaatataaatatttaaaagagtcaagaaaaaaacttgggagggccaatttcccgctaggattttttgatgataatccattaaaaagacctgcagtagaacttttcaaaaatatcttgatgg

SEQ ID NO: 216633 - DNA, 705 bp, Unknown
  Bacterial polypeptide expressing nucleotide sequence isolated from the Sargasso Sea
gtgtttcttgggagatggagagatggatgagccagagtctttaggtgcgataggtttagcagctagagaaaatttagacaatcttatatttgtagttaactgcaatttacaaagattagatggacctgtaagaggaaatggaaaaataattcaagagttagaaggcatttttagaggcgcaggatggaatgtaataaaagtcatttggggatcttattgggattcattgttagcaaacgataaaactggtcatcttattaaaataatgaatgaaacagttgacggtgaatatcaagcttttaaagccagaaatggtttatatgttagggaaaaattttttggcaaatatccagaaactttagaattagtttcagcaatgtctgacaaggatatttggagattaaatcgaggaggacatgatccccacaaagtttatgctgcttatgataaggctgtaaaaaatactggtagcccaacaattattgtagctaaaacaattaaaggatatggaatgggaaaatctggagagagtgtaaacactactcatcaacaaaagaaattagatgttgatgatttattatattacagagatagatttgatgttccattaaatgatgagcaagtgaaaaatgtagaatattttaaaccagacaaaaattctgaagaaatcaaatatttaaaagaaagaagaatggaattaggggg

SEQ ID NO: 216634 - DNA, 907 bp, Unknown
  Bacterial polypeptide expressing nucleotide sequence isolated from the Sargasso Sea
tttcaaggacactcggctccaggaatgtatgcaagagctttcttagagggaagacttacttcaaaacaactagatggttttaggcaagaagtgaataaaggaggtttatcctcatacccacatccgtggttaatgccaaaattttggcaatttccaactgtgtccatgggtcttggacctatcatggctatctatcaagctagatttttaaaatacttaattaatagaggattaataaaagacgaaggtagaaagatttgggtatttcttggtgatggtgaaatggacgaacctgagtcgcttggagcaattggtttagctgctcgtgaaaaattagataatttagtttttgtaataaattgtaatttacaaagattagatggacccgttagaggaaatagtaaaattattcaagaattagagggaagctttagaggttcgggttggaatgtaataaaagttatttggggatcatactgggatcaactattggctaaagataaaacaggtcttcttattaagaggatgaatgaatgtgtagatggagaataccaggcgtttaaagctaaaggtggatcttatgtaagagaaaaattttttggaaaatatcctgaacttaccgaacttgtttcctctttaaccgataaagatatttggagattaaatagagggggtcatgatcctcacaaagtttatgcagcttactcagcagcaatgcagaatactggatcgcctacagttatcctggcaaaaacaatcaaaggatatggaatgggtaaaacaggtgagagtgtaaatacaactcaccagcaaaaaaaattagatgaagaggatctactttactatagagatagatttaatgttccgttaacagataaacaggtaaaaaatatagagtatacaagcc

SEQ ID NO: 216635 - DNA, 763 bp, Unknown
  Bacterial polypeptide expressing nucleotide sequence isolated from the Sargasso Sea
caagagtgggtcgagtcaatagaagactctcttgatgaacacggatatgaaagaacacgttttttgctcgaaactcttattgattatgcgcaatcgaggggcgcacgccttccttttaacacctctaccccttttataaacaccatacttcctaaacaacaacccaaatacccaggtgatagagaaatagagagaaaaataaagtctattgttaggtggaacgcgatggcgatggtcacaagagccaacaaagaaacaatggggataggcggccacatatctacatatgcatcagctgctacaatgtacgaagttgcattcaaccacttcctaaaaggaccaagccatccatcgggccaagatttggttttttaccagggtcacgcttctcccggtatgtactccaggtcttttttagaaaaaagactatcaagagaaaacctagttaatttcagaagagagctatctaagggaggagggctctcttcgtatccacacccatatttaatgccagacttctggcagtttgcaacggtatcaatgggtcttgggcccataatggctatataccaggcaagatttatgagatatatgattgaccggggttttatgaaagatacagggagaaaggtatatgcttttcttggggatggtgagatggacgaacccgagtccaaaggtgcactaacccttgcgtccagggaaaacctagacaaccttatttttgtcgttaattgtaacctacaaagattagatgggcccg

SEQ ID NO: 216636 - DNA, 951 bp, Unknown
  Bacterial polypeptide expressing nucleotide sequence isolated from the Sargasso Sea
ccaatttttggcagtttccacagtctcaatgggtattggtcctatgttagcaatatatcaagcaagatttatgaaatacctaattaatcgaggattaattaaagatgagggaagaaaagtatggacttttcttggagatggagaaatggatgaacctgagtcacttggtgcaattggtttagcggcgcgtgaaaatttagataatttaatatttgttgtaaactgcaacttacaaagattagacggtccagtaagaggaaatggaaaaataattcaagaattagaaggtatttttcgaggcagtggttggaacgttttaaaagttatttggggatcttattgggactcacttttagcaaatgataagacaggacatttagtaaaaattatgaatgagaccgtagatggtgaatatcaagcatttaaagcaagaaatggactgtatgtgagagaaaagttttttggcaaatatcctgaaactacagaactagtttcatcaatgtcagatactgatatttggaggcttaatagaggtggccatgatcctcataaagtttatgctgcatatgataaagcggtcaatcacaaaggaagccccacagtcataatagctaaaactataaaaggttatggtatgggtaaaagtggtgaaagtgtaaacactactcaccaacaaaagaaattggatgttgacgatttaatgtattacagggataggtttgatgttcctttaacagattctcaagtcaaaaatattgaatatttcaaaccagacgaaaactccgaagaaattaaatacttaaaaaaaagaagattagaacttggtggatatataccagagagaacatcatattcaaaaccgattaaagctccagttaaagatatttttgattttatgaaaaaatctactggcgaaaaagaaatgtctacaacaatggcattagtaagaat

SEQ ID NO: 216637 - DNA, 988 bp, Unknown
  Bacterial polypeptide expressing nucleotide sequence isolated from the Sargasso Sea
atgcccgtgcttttgtcgaaggccgtttacagctgatcagctggacaacttccgtcaggaagtaggtggtgaaggtttatcctcttacccacaccctaaattaatgcctgaattctggcagttccctacagtttctatgggtttaggtcctatcacgtctatttatcaggcccgtttcctgaagtatttagatggtcgtggtttaaaagacaccagtgcacaacgcgtttatgccttcttaggtgatggtgagatggacgagccggaaagccgtggttctttatcttttgctgcccgtgaaaaactggataacctgtgtttcctggtgaactgtaacctgcagcgtttagacggtcctgtgatgggtaacggtaaaatcatccaggaactggaaggtttattccgtggagccggctggaacgtgattaaagtggtatggggcagtggttgggacaagctgctggccaaagacaccactggcaagttactgcagctgatgaacgaaactgtagacggtgactatcagacgtacaaagccaaagacggcgcttatgtgcgtcagcatttcttcggacgttaccctgaaactgcagctttagtggctgatatgacagacgaagaaatcttcgccttaaaacgtggtggtcatgaaccgtccaagttatatgctgcctttaaagcggcgcaggaaaccaaaggtcgtcctactgtgatcctggctaaaaccatcaaaggttatggcatgggtgaagcggctgaaggcaaaaacattgcccaccaggtgaagaaaatggacatgactcatgtgctgcaaattcgcaagcgtctgggtctggaagattacatcagcgaagaagatgtacagagcctgccttatattcagctgcctgaaggttcacctgaacatcagtatctgcatgcccgtcgtaatgcgttaaatggctacacgccagtgcgtttaccgaatttcactaaagctttgactctg

SEQ ID NO: 216638 - DNA, 901 bp, Unknown
  Bacterial polypeptide expressing nucleotide sequence isolated from the Sargasso Sea
gctgaagaagcaatgggctgaaaaaaaagaggaaaaaaaaattataagtgaaccattagtagagaaaaaacaatctacaattcaagttgttaatggttctgatattgatccacttgaaactcaagattggttagagtctttatctgctgtaatttccaaagatggaaaccatagagcccattttttaataaaagaattaattaataaagcttaccgcgagggagcaaatattccttatactcaaaatacaccatacattaatacaatacctcctgaggctgaagtaaagtctagtggtgatcaaaatattgaaagaagaattagatctttaattagatggaatgcagcagcaatggtagttcgagcaaataaaaaacaccctgagcttggtggacacattggtacatttgcatctgctgcaacattatatgatgttgggatgaatcatttttggagagcaaaaaataataaatttggtggagatttaatttattttcaaggacatagtgctccaggaatgtatgcaagagctttcttagaaggtagattaaatgaaaaacaattagatagtttcagacaagaggtaaaacctgggggcctatcgtcatatccacatccatggctaatgccaaatttttggcagttccctactgtatcaatggggttaggtcctatgcttgctatttatcaagctagatacatgaaatatttaatcaatagaggtttaattaaggatgaaggaagaaaggtctgggcttttttaggcgatggggagatggatgagcctgagtcaatgggagctattggattagctgctagagaaaatttagataatttaatatttgtaattaattgtaatcttcaaagattagatggtccggttagaggtaatggaaaaatt

SEQ ID NO: 216639 - DNA, 799 bp, Unknown
  Bacterial polypeptide expressing nucleotide sequence isolated from the Sargasso Sea
atttgcatctgcagcaacactttacgatgtaggaatgaatcatttttggagggcaaaaaataataaatttggtggtgatctgatttattttcaaggtcatagtgctcctggcatgtatgcaagggcatttcttgaaggaagaataaatgaaaaagaattagatagatttagacaagaagtagaacctggaggattatcttcctatcctcatccatggctaatgccaaaattttggcaatttccaacagtatctatgggattgggacccataatgtcaatttaccaagctcggtttaataaatatttaattaatagaggactattaaaagatgagggaagaaaggtttggtgttttttaggagacggtgaaactgatgaaccagagtctttaggtgcaattggattggcagctagagaaaaactcgataatctaatttttgtcattaattgtaatttgcaaagactcgatggtccagttagaggaaatggaaaaattattcaagaacttgaaggtatatttagaggtgccggctggaatgttatcaaagtaatttggggatcatattgggatccactactagcaaaagataaatcaggattattgatcaagcgaatgggagaagcagtagatggtgaataccaagcatttaaagctaagggtggttcatatgtaagaaataaattttttggaaaatatcctgagttattagatttagtatctcaaatgacagataaagatatatggaaacttaatagaggtggtcatgatcctcataaagtttatgcagcatactatgcc

SEQ ID NO: 216640 - DNA, 834 bp, Unknown
  Bacterial polypeptide expressing nucleotide sequence isolated from the Sargasso Sea
tcttcaggggatcaaaatatagaaagaaaaattagatcattaattagatggaatgctgcagcaatggtagtaagggcaaataaaaaatttcctgagcttggtggacatataggtacatttgcatctgccgccactttatacgacgtaggaatgaatcatttttggagagcaaagaatcaccaatttggaggagatcttatttatttccaaggccattctgctccaggtgtatactcaagggcttttttagaaggaagactttcaaaagatcaattagacaattttagacaggaagttggacctaatggtttatcttcatatcctcatccatggttaatgcataaattttggcaattcccaactgtatcaatgggtcttggcccgatgttagcaatatatcaagcaagatttatgaagtacttaattaatagaggtttaataaaagatgaaaatagaaaagtttgggcatttcttggtgatggagaaatggatgagcccgagtctttaggagcaattgctttagcatcaagagaaaatttagacaatttaatattcgtaataaattgtaacttgcaaagattagatggacctgttcgtggaaacggaaaaataattcaagaactagagggaagttttagaggtgctggatggaatgttatcaaagtaatttggggatcttattgggatccacttttagctaatgataaaactggactattaatcaaaagaatgaatgaagcggttgatggtgaataccaggcatttaaagcaaaaggtggcgcatatgtcagagaaaaattctttggcaaatatccagagctatctaaattagta

SEQ ID NO: 216641 - DNA, 711 bp, Unknown
  Bacterial polypeptide expressing nucleotide sequence isolated from the Sargasso Sea
agcgcaccaggtatgtatgcaagagcttttttagaaggaagaattacagaaaaacaattagataaatttagacaagaagttgagaaaggcggattgtcttcttacccacatccttggttgatgcctaagttttggcagttcccaactgtgtccatgggtcttggtcctatgatggcaatctatcaagctaggtttacaaagtatttaataaatagaggtcttttaaaagatcaagataggaaaatttggtgtcatctaggtgatggtgaaatggatgaacctgaaagctttggggctgtagggctggcagcaagagagaaattagataatttgatttttgtaattaattgtaatcttcaaagattagatggacctgtaagaggaaatggaaaaattattcaagaacttgaaggaagatttagaggctcgggttggaatgtgataaaagtaatttggggatcttactgggatcagcttttgtctaaagataaaactggtttactagttaaaagaatgactgaagcagttgatggggaatatcaggcattcaaagcaaaaggtgggtcttacgtaagagaaaaattttttggtaaatatcctgaattaaaagacttagtggcaaatatgactgacgcggatatttggaaattaaatagaggtggacacgatccgcataaagtttactcagcttatcatgctgctgttcgatgc

SEQ ID NO: 216642 - DNA, 484 bp, Unknown
  Bacterial polypeptide expressing nucleotide sequence isolated from the Sargasso Sea
gctgctttatggaagcttcccgttttatatattattgaaaataataaatatggtatgggcacatctgtagatagagcggcggccggattagatttgtataaaagaggtgaggcttttggtattcctggcgagaaggtagatggaatgaatgtattttcagttatcgacgcagcagataaagcaggtaagtatgttagagaagggaatggaccttatattatcgaagtacaaacatatcgatatagaggacattcaatgtcagatcctgcaaaatatagatcgaaagaagaattggataattataagcaaactgaccctattgaaatagtcaaagccgaaattttaaagaaaaaaattgcaactaatgatgaaattgaaaaaattaataaagatactttagaagaaataaaaaatgcagctgaatttgcaaccaatagtcctttcccaaaggacagcgagctttatacggatgtttatttataat

SEQ ID NO: 216643 - DNA, 786 bp, Unknown
  Bacterial polypeptide expressing nucleotide sequence isolated from the Sargasso Sea
aataccctggtgatttagaaatggaagagaaattagaaaatatcattcgttggaacgctatggccatggtggttaaagcaaaccgtgaaatagaaggcattggaggccatatatccacttttgcatcttcagcctctctttatgaggttggtcagaatcatttttttaaaggtaccgacggcaatcaggcaggggatatggtcttttttcaagggcatgggtctccaggtaattatgccagagcctttttagaaggccggttaccagctaaaaaacttcatcattttagacaagaactatcagaggaaggcggtttgtcatcttatccccacccttatttaatgccagatttttggcagttccctactgtttcaatgggtctaggaccgattttaagtatttatttagcccgtttcaatcaatatttagtcgcaagagattttttaaaaaaatcaccaaatgtgtggtgttttataggggatggtgaatcagatgaacctgaaacattaggcgcattaacgcttgcttcacgtgaaaaattaaataatttaatctttattgttagttgcaatttgcagcggctagatggcccagttcgagggaatggtaaaatcatacaagaattagaatcagcctttagaggtgccggttggtatgtgattaaagttatttggggcagtggctgggataaactattacagtcagagcaccgtgaactattgttaaaacgtatgaaagaagtggtggatggggaataccaaaagtatgtggtagaacccaggtagt

SEQ ID NO: 216644 - DNA, 748 bp, Unknown
  Bacterial polypeptide expressing nucleotide sequence isolated from the Sargasso Sea
ataggtacatttgcatcagcagcaactttgtatgacgtaggaatgaatcacttttggagagcaaaaaataataaatttggtggagatttgatttattttcaaggccacagtgccccaggaatgtatgcaagagcatatttagagggaagattaaatgagaaacaattagatagttttagacaagaggtcaaacctggaggactttcttcttatccgcacccgtggttaatgccaaagttttggcaatttccaactgtgtctatgggtcttggtcctatgctagcaatttatcaagccaggtacatgaaatacttaataaatcgaggattgattaaagatgaaggaagaaaagtatgggctttcttaggtgatggagaaatggatgaacctgagtcaatgggggcaattggtttagccgctagagaaaatttagataatttaatttttgttattaattgcaatctccaaagactagatggacctgtaaggggtaatggaaaaataattcaagaactggaaggaagttttagagggtctggttggaatgtgataaaagtcatttggggctcttattgggattcgctacttgctaatgataaatcaggccatttagtaaaacttatgaatgagaccgttgatggagagtatcaggcagctaaagcaagagacggcgcctatgtaagagaaaaattttttggaaaatatgctgaaacttcagaattagtgtccagtctttctgataaagaca

SEQ ID NO: 216645 - DNA, 805 bp, Unknown
  Bacterial polypeptide expressing nucleotide sequence isolated from the Sargasso Sea
agaacgtaagttaagatctttaattagatggaatgctgctgcgatggtagtaagagcaaataaaaaacatcctgaacttggcggtcacataggaacatttgcatcagctgcaaccttgtacgatgttgggatgaatcatttttggcgagcaaagaataataaattcggaggtgatctagtatattttcaaggtcatagtgcaccaggaatgtatgcaagagcttttcttgagggaagactaaatgaaaagcagttagataaatttagacaagaagtacgaactggtggactttcatcttatccacatccttggctcatgccaaacttttggcagtttccaacagtttcaatgggtattggtcctatgttagcaatatatcaagcaagatttatgaaatatctaatcaatagaggattaattaaagatgagggaagaaaagtttgggcttttcttggagatggagaaatggatgaacccgagtcacttggagcaattggtttagcggcgcgtgaaaatttagataatttaatatttgttgtaaactgcaacttacaaagattagacggaccagtaagaggaaatggaaaaataattcaagaattagagggtatttttagaggaggtggctggaacgttttaaaagttatttggggatcttattgggactcacttttagcaaatgataagacaggacatttagtaaaaattatgaatgagaccgtagatggtgaatatcaagcatttaaagcaaaaaatggactttatgtaagagaaaaagttttttggcaaatattccctgaaaca

SEQ ID NO: 216646 - DNA, 299 bp, Unknown
  Bacterial polypeptide expressing nucleotide sequence isolated from the Sargasso Sea
aaaatatgtaagaagtggtaaagggccgtatatattagaagttcaaacttacagatatagaggtcattcaatgtcagatcccgctaaatacaggtcaaaaaaagaattagattcttacaaaagcaatgatccaattgaatttgtaagaaaagaaatattaaaaaagaaaattgcttctaaagagcagttggaaaaaattaacagtaaaattatcagtgaaataaaagaagcggctgattatgctttaaaaaacgaatatccagatccatcatctttatacagtgatgtttatatttaaa

SEQ ID NO: 216647 - DNA, 853 bp, Unknown
  Bacterial polypeptide expressing nucleotide sequence isolated from the Sargasso Sea
aaaaatcatcaatttggaggtgatttaatttattttcaaggtcattctgctcctggaatatattcaagagcttttttagagggaagactttcaaaagagcaattagataatttcagacaggaagttgagcctaatggattatcttcttatccacacccatggttaatgcataaattttggcaattcccaactgtatcaatgggcctaggtccaatgctagcaatctatcaagcacgatttatgaaatacttaataaatagaggtttaataaaagacgaaaatagaaaagtctgggcattccttggagatggagaaatggatgaaccagagtctttgggggcaattgccttagcatcaagagaaaatctagacaatttaatatttgtgataaactgtaacctacaaagattagacggaccagttagaggaaatggaaagattattcaagaattagaaggaagcttcagaggttcgggatggaacgtaataaaagtaatttggggttcatattgggatccacttttagctaaagataaaacaggattgcttattaaaagaatgaatgaagctgttgatggagaatatcaggcatttaaagcaaaaggaggagcttatgtaagagaaaaattttttggaaaatatccggaattgtcagaattagtttcatcatatagtgacaaggacatttggcgattaaatagaggtggtcatgatccccataaagtttatgcagcatatcataaggcaatggaaaatgtaggaagcccaacagttattattacaaaaacaattaagggatatggtatgggtaaatctggcgaaagtatcaacacaacacatcaacaaaaaaaat

SEQ ID NO: 216648 - DNA, 522 bp, Unknown
  Bacterial polypeptide expressing nucleotide sequence isolated from the Sargasso Sea
aatgactttaaaatcagtaagggaaagcattagagatacaattgcagaagaaatgagactagattctaatgtatttttattgggagaagaagttggggagtatcaaggagcatataaggtcagtcaaggtttattagaagagtttagttcaaaaagaattgtagatactcctataactgaagcaggttttacaggtctagctgtaggagctgcaatgaatggtttaaggccgatagtagaatttatgacatggaattttgctatgcaagctatagatcatattattaattctgctgctaaaacattttatatgagtggtggaaaaataaatattcctatagtttttagagggcctaatggtattgcatctagagtagcagcacagcatagtcaagactattcagcatggtattctcatattcccggggtaaaagttttatcaccatatgatgcaaacgatgcctcagggctttttagagcccgcataagagatgagaaccctgttatatttttggaacatga

SEQ ID NO: 216649 - DNA, 898 bp, Unknown
  Bacterial polypeptide expressing nucleotide sequence isolated from the Sargasso Sea
ggagacttaatttattttcaaggtcatagcgcaccaggaatgtatgccagagcatttttagaaggaagattaaatgagaaacaattagatagttttagacaggaggtaaaaaaagatggtctttcatcttatccgcatccatggttaatgcctaatttttggcaatttccaactgtttcgatgggactaggtccaatgttagcaatctatcaagctcgatttatgaaatatttaattaacagaggtttaataaaagatgaaggtagaaaagtttgggcatttcttggtgatggagaaatggatgagccagaatcactgggtgcaattggattagcagctagagaaaatttagacaacttaatatttgtaattaactgtaatttgcaaagattagatggtcctgttagaggaaatggaaaaattatacaagaacttgagggtatttttagaggagcaggatggaatgtaatcaaagtaatctggggatcttattgggatactttgttagcaaatgataaaactggtcacttaattaaaataatgaatgaaactgttgatggagagtatcaagcgtttaaagcaagaaatggattatacgtaagagaaaacttttttggaaaatatcctgaaactttagagttagtttctgcaatgtcagataaagatatatggagattaaatagaggcggtcatgatcctcataaagtttatgcagcatatgacaaagccactaaaaacataggtagccctacagtaataattgctaaaacgatcaaaggttatggtatgggtaaatctggagaaagtgttaataccactcatcaacaaaaaaaattagatatagaggatttattatattatagagatagatttgatcttcccttaaatgatgaacaag

SEQ ID NO: 216650 - DNA, 813 bp, Unknown
  Bacterial polypeptide expressing nucleotide sequence isolated from the Sargasso Sea
ttcctgaattaggagggcatataggaacatttgcatctgcagccactctttatgatgtaggaatgaatcatttttggagagcaaagaataataaatttggtggagatcttatttattttcaaggacatagtgctccaggtatgtacgctagagcttttttagaaggtagattaaacgagaaacagttagataaatttaggcaggaagtaaaaccaggtggcctgtcatcttatcctcatccatggttaatgccaaatttttggcagtttccaactgtatcgatgggaataggaccaatgctagctatttatcaagctaggtttatgaaatatttaattaatcggggtttaattgaagatcaaaatagaaaagtttgggcttttattggagatggtgagaccgatgaaccagaatcattaggtgcaattggtttagcagctagagaaaaattagataatttaatttttgtagttaactgtaatttgcaaagattagatggacctgtacgaggaaatggcaaaattattcaggagttagaagggatttttagagggtctggttggaatgttataaaagtaatttggggatcatattgggatcagttattagcaaaagataaaactggtcatttagttaaattaatgaatgaaacagttgatggagagtaccaagcttacaaagctagaaatggtctatatgtaagagaaaaattttttggtaaatatcctgaaacaaaagaattagtatccgctttatcagacaaagatatatggaggttaaataggggtggtcatgatccacataaagtttaag

SEQ ID NO: 216651 - DNA, 954 bp, Unknown
  Bacterial polypeptide expressing nucleotide sequence isolated from the Sargasso Sea
aacgatgatattgatcctgtagaaactaaagagtggttagattcattaagtgcagttttgcaaaatgatggctctgaaagagctcattttttaattaaacaattaattgatcaatcttataaagctggatctaaaattcctcatactcaaactactccttacgtgaatacgatacctcctgaggaggaaaaaagatcacctggagaccaaaacatagaacgtaagttaagatcattaattagatggaatgctgctgcaatggtagtaagagcaaataaaaaacatcctgaacttggcggtcacataggaacatttgcatcagctgcaaccttatacgatgttgggatgaatcatttttggcgagcaaaaaataataaattcggaggtgatctagtatattttcaaggtcatagtgcaccaggaatgtatgcaagagcttttcttgagggaagactaaatgaaaagcagttagatagatttagacaagaagtacaaactggtggactttcgtcttatcctcatccttggctaatgccaaacttttggcagtttccaacagtttcaatgggtattggtccaatgttagcaatatatcaagcaagatttatgaaatatctaatcaatagaggattaattaaagatgagggaagaaaagtttgggcttttcttggagatggagaaatggatgaacctgagtcacttggagcaattggtttagcggcgcgtgaaaatttagataatttaatatttgttgtaaactgcaacttacaaagattagacggtccagtaagaggaaatggaaaaataattcaagaattagagggtatttttagaggaggtggctggaacgttttaaaagttatttggggatcttattgggactcacttttagcaaatgataaaacaggacatttagtaaaaattatgaatgagaccgtagatggtgaatatcaa

SEQ ID NO: 216652 - DNA, 801 bp, Unknown
  Bacterial polypeptide expressing nucleotide sequence isolated from the Sargasso Sea
ggtttactgggttagctgtagggagtgctttcaaaggattaagaccaatagtagaatttatgactttcaatttttcaatgcaagctattgatcaaataattaattctgctgcaaaaactttatatatgtctggaggacaaataaattgtccgattgtttttagaggacctaatggtgctgcatcgcaagttgctgctcaacatagtcaagatttttctagctggtattctcattgtcctggattaaaggttgtagctccatctaacgcatttaatgccaaaggcttattaaaatcatctatagaagatgataatcctgtaatttttttagaaaatgaaattttatataatcaaaaaatggatgtgcctgaagatactaattttgatatccctttaggtgttgctaatatagctttagaaggcagagatgctacaatagttacttattcgatcatggtttcgaaatctttagaagctgctgaaattttaaagaaagactataatttaaatgttgaaattattgatttacaaacaattagacctctagacgtagatactattttaaattcagtaaaaaaaactaatagagctataactgttgaagaatcttggccttttgcaagtgttggatctgaaattgtgaatattgtacaaagagaaatttttgactatttagattcccctattattaaagtaaatagtgcagatgtacctatgccttattctagcgttttagaaaaaaaatatctacctcaagtacaagacattatttcagctattaaaaaagtttgttatatttaaa

SEQ ID NO: 216653 - DNA, 425 bp, Unknown
  Bacterial polypeptide expressing nucleotide sequence isolated from the Sargasso Sea
aatgaaaaaaaaatttaaaaaagaagattatattaaaatctatagaaaaatgcttcaaattagaagatttgaagaaagagctgctcaattatatggaatgggtcacataggtggtttttgccatctttatataggtcaagaagcagtggtagtaggagtgctgatgactatagaaaataacgatagtgttgttactacctacagagatcatggtcatatgatagcaagagggttggagccaaagaaaattatggctgagcttactggaaaacaaactggttattcaaatggaaagggtggctcgatgcatatgttttcaaaaaaaaataatttttatggtggtcatggcatagttggagcgcaagtacccattggtactggaatagcttttactcataaatatagaaaagaaaaacaaatatgta

SEQ ID NO: 216654 - DNA, 967 bp, Unknown
  Bacterial polypeptide expressing nucleotide sequence isolated from the Sargasso Sea
aagaagcaaaatcccccaggcgaccaaaacatttgaaagaaaaataagagctttgattagatggaatgcagcagctatggtcgttagagcaaataaaaaaaatccagaacttggtggtcatataggtacttttgcttcagccgctactctttatgacgttggcatgaatcatttttggagagcaaaaaataataaatttggtggtgatttaatttattttcagggacatagtgcaccaggaatgtatgctagagcttttcttgaaggaagaattagtgcaaaacagttagattcttttcgacaagaagtaaatcctggaggtctttcatcttatccacatccttggttaatgccaaaattttggcaatttccaactgtttcaatgggactaggacccataatgtcaatttatcaagctagatttacaaaatatttaattaatagaggactgttgaaagatgagggaagaaagatctggtgtcatttgggagatggagaaacagatgaaccagaatctttaggtgcaattggacttgctgctagggaaaagttagataatttaatttttgttgttaattgcaacctccaaagacttgacggtcctgtaagagggaatggaaaaatcatacaagaacttgaaggaatttttagaggagctggttggaatgtaattaaagttatttggggttcttattgggatcctttactttcaaaagataaaactggtttattaattaaaagaatgaacgaggcagtcgatggagagtatcaagcatttaaggcaaaaggaggcgcttttgtaagggaaaatttttttggtaaatatcctgagcttttaaatttagtttctcaaatggacgataaggatatttggaagttaaatagaggaggtcacgatcctcacaaagtttacgcagcttatcactctgcaatgcagaataaaggcagtccgactgtaattttagcc

SEQ ID NO: 216655 - DNA, 777 bp, Unknown
  Bacterial polypeptide expressing nucleotide sequence isolated from the Sargasso Sea
gaaaaaagatcacctgggagaccaaaacatagaacgtaagttaagatcattaattagatggaatgctgctgcaatggtagtaagagcaaataaaaaatatcccgaacttggtggccacatagggacatttgcatcagctgcaacattatatgatgttgggatgaatcatttttggagagcaaaaaataacaaatttggaggtgatctagtatattttcaaggtcatagtgcaccaggaatgtacgcaagagcttttcttgagggaagattaaatgaaaagcagttagatagatttagacaagaagtacaaactggtggactttcatcttatcctcatccttggctaatgccaaacttttggcagtttccaacagtttcaatgggtattggtccaatgttagcaatatatcaagcaagatttatgaaatacctaattaatagaggattaattaaagatgaaggaagaaaagtttgggcttttcttggagatggagaaatggatgagcctgagtcacttggggcaattggtttagcagcgcgtgaaaatttagataatttaatatttgttgtaaactgcaacttacaaagattagacggtccagtaagaggaaatggaaaaataattcaagaattagagggtatttttagaggaggtggctggaatgttttaaaagttatttggggatcttattgggactcacttttagcaaatgataagacgggacatttagtaaaaattatgaatgagaccgtagacggtgaatatcaagcatttaa

SEQ ID NO: 216656 - DNA, 650 bp, Unknown
  Bacterial polypeptide expressing nucleotide sequence isolated from the Sargasso Sea
catgacgtctcgcaaagtttcaaaaaaaaccaacgtaaactcacaagaattgctttctttttataaagatatgcttttaattaggcggtttgaggaaaaagctggtcagctctatggaatgggtttgataggtggcttttgccacctttatataggccaagaggctgttgttgttggactagaggcttcagcagaagaaggagataaaagaattacttcctatcgcgaccacggacacatgcttgcttgcggtatggatcctaagggtgtcatggctgaactcacaggtagagctgggggttactctaagggaaaaggtggttcgatgcatatgtttagcaaagagaagaatttctacggcgggcatggaattgttggagcacaagttcctcttggagctggactagcttttgcagataaatatttagaaaatgatcgagtaacttttacatatttcggcgatggcgctgctaaccaaggtcaggtctatgagacatttaatatggcatcgctttggaaactaccggtaatcttcgtaattgaaaataatcagtacgctatgggcacatcgcaactacgctcaacctcaacaccagacatttacactagaggcgctggttttgatatacccggagaagccgttgatggga

SEQ ID NO: 216657 - DNA, 878 bp, Unknown
  Bacterial polypeptide expressing nucleotide sequence isolated from the Sargasso Sea
gcttactatcgtgaagataagaaaggtcaggtacttcaagaaggtatcaacgatctaggtgcaatggcatcgtgggtagcgtcaggtacgtcgtactcaacgtgtaacgctaccactattccgttctacatttactactcaatgtttggtttccaacgtgttggtgatcttgcatgggcagcgggtgatagccaagcacgtggtttcctactaggtgcaacagcaggtagaactacgcttaacggcgaaggtctacagcaccaagacggtcattcacacgttcaggcgaacctaattcctaactgtattacttacgatccaacgtacggttatgaagtcgcggttatcgttcaagacggtctgcgtcgcatgtacggtaacaacgaaaacatcttctattacctaacactaatgaacgagaactatcagcaccctgcaatgccagaaggtgatgatgttgctgagcaaatcattaaaggtatttacaagcttgagcgcgttgaaaacgacaagtctaagcttaacgtacagctaatgggctcaggtactatcttaaacgaagtacgtaaagcggcacagattctgtgtgaagactacaacgtatcttctgacgtttactctgtgacctcgttcaacgagctagcccgtgaaggtcaagacgtagctcgttacaacatgctaaaccctgaagctgagcaaaaagtaccttacattggtcaggtaattacgaaagacgcaggccctgcgatttctgccactgactatgtgaagaactactcagaccaagtacgcgcgttcattgaaactgaataccgctgcctaggtacagacggtttcggtcgaagtgatagccgtgaaaacttgcgtactcactttga

SEQ ID NO: 216658 - DNA, 735 bp, Unknown
  Bacterial polypeptide expressing nucleotide sequence isolated from the Sargasso Sea
ctaaaaaaattatggctgaactgactggaaggctagatggatactcaaaaggcaaaggtggttcaatgcacatgttttcaaaaaaaaataatttttttggagggcatggcattgttggagcacaagtgccgataggaactggagtagcgtttgcattaaaatatgaaaataaaaaaaatatatgcagaacttatataggtgatggagcaatgaataatggacaagtattcgaatcttttaatctagcttcactttggaatcttccagtcttatacataattgaaaataatatgtatggaatgggaacttcagttgataaagcttctgcgggtagtgatttatataaaagaggtgaggcctttgacataccaggtgaaatagtagatggaatgaatgtttttaaagtgagagaagcagcttttaaagcagcaaaacatgttagaaatttaaagagaccttatatattagaagttcaaacttatcgttataaaggtcattctatgtccgatcctgctacatacagatcaaaaaaagaactagattcatataaaacaaaagatccaatacaaattgcaaaagatgaaatcattaagaaaaaaatagcaactgaaaaagaacttgaaaaaattaatgaaaaaataatcaataagatcaaagatgcagcagattttgctttaaattctccttttccaaatcatgaggagttatttacagatgtttacatagagcattaat

SEQ ID NO: 216659 - DNA, 627 bp, Unknown
  Bacterial polypeptide expressing nucleotide sequence isolated from the Sargasso Sea
ggaggtcatataggaacatttgcctcagcagctacactttatgatgtaggaatgaatcatttttggagagctaaaaataataaatttggaggcgacttagtttattttcaaggacatagcgcgccaggaatgtacgctagagcttttttagaaggaagacttactgaagcacaactaaataactttagacaagaagtagatggaaaaggactttcgtcttatccgcatccttggcttatgccaaaattttggcagtttcctatagtttcaatgggtctaggcccaataatgtcaatctaccaagctagatttacaaaatatttaatcaatagaggtttactaaaagatgaaggaagaaaaatttggacatttttgggagatggagaaaccgatgaaccagaatctttaggagctattggtttagcagcaagagaaaagttagataatttggtatttgttattaattgtaatttacaaagattggacggacccgtaaggggaaatggaaaaattattcaagaactagaaggtatttttagaggagctggctggaatgtaataaaagttatttggggatcttactgggattctttattagaaaaagataaaagcggcttgctagttaaa

SEQ ID NO: 216660 - DNA, 874 bp, Unknown
  Bacterial polypeptide expressing nucleotide sequence isolated from the Sargasso Sea
agaaaagtttgggttttcttaggcgatggtgaaatggatgagccagagtcacttggcgcaataggtttagcagcaagagaaaaattagataatttaatttttgttatcaattgtaacctccaaagattagatgggcctgtgagaggaaatggtaaaattattcaagaattagagggaagttttaggggaacaggttggaatgtaattaaagttatttggggatcttattgggatcagttgttagcaaaggacaaaactggattacttgttaaaagaatgaatgaatgtgttgatggagaatatcaagcgtttaaagctaaaggaggatcttatgtaagagataaattttttggtaagtatgatgagttaaaagagttggtttcaacgatgacagataaagatatttggaaattaaatagaggtggtcacgatcctcacaaagtttatgctgcgtaccactctgctatgcaacatgaaggttctcctaccgttattttggcaaaaacaattaaaggttatggaatgggtaaatctggtgagagtataaacacaacacatcaacaaaagaagctagatgaaaaagatttactttattacagagatagatttggtgtcccactaacagataaacaagttaaaaatatagagtattataagccaagtgaaaattcagaggagatcaagtacctgaaagacaaaagattaaagcttggtggttttattcctgaaagatcaacctttgctaaagcaatcaaaacccctcctaaagatatttttgactcttttatgaaatccactggagacaaagagatgtcgactactatgactcttgttaggatgttaacggcattacttcgagataaaaatttatctc

SEQ ID NO: 216661 - DNA, 553 bp, Unknown
  Bacterial polypeptide expressing nucleotide sequence isolated from the Sargasso Sea
tctgtctttatatcttggggatggagctataaatcaaggacaggtttatgagagctttaatatggcagctttgtggtctttaccttgtgtctatattattgaaaataatcaatatggcatgggaactgcggtgtctcgcgctgccgcgggagaaacattagcgagtagaggagctgcatacggtatacccggattagaggtagatggcatggacgtcttagcggttaaagaagcaggtacagaggctgtccaacatgctgaatcaggaaaaggcccatttattttagaaatgaaaacatatcgatatcgcggtcactcgatgtcagaccctgctaaatatcgaactaaagaagaagttaatcgaatgcgacaggagcgcgacccgatagataatgtaaaggagagacttatccaagctgacgttgcagaagaagaattgaagggaatggataagctaatccgtgatacagtatcggaggcggtagaatttgcccaaaaaagcgaggagcctgatccatcagaattatacacagatgttcttatccaagtttaa

SEQ ID NO: 216662 - DNA, 947 bp, Unknown
  Bacterial polypeptide expressing nucleotide sequence isolated from the Sargasso Sea
tacccaggaggtttatcatcttatccccatccatggctgatgcctaagttttggcagtttccaactgtttctatgggtcttggaccaatgatggcaacctatcaggcaagatttatgaaatatcttattaatagaaaattaataaaagatgagaataggaaagtttggtctttcttaggggatggtgaaatagatgagccagaagctctaggatctattggtttagcagcaagagaaaagttagataacttgatttatgttgtgaactgcaacctacaaagattagatggtccagtaagaggcaatggtaaaattattcaagaattagaaggaatttttagaggagctggatggaatgtaataaaagtcatttggggatcatattgggatcctttacttgcaaatgataaatcaggtttacttgtaaaaagaatgaacgaggcagttgatggagaataccaagcctttaaagcaaaaggcggtttatatgttagagataacttctttgggaaataccctgaacttaaaaatctagttgcaagttatacggatagcgatatttggaaattaaatagaggcggtcacgacccgcataaagtttatgctgcttatcataaagctattaatacaaaagatagaccaacagtcatattagctaaaacaattaaaggatacggtatgggaaaatctggtgaaagtataaatacaacccatcagcaaaaaaaattaggtgtagatgatttgctgtattacagagatagatttgatgttccattaacagatgaacaagtcaaaaatatagaatactttagacctgatgaaaattcagaggaaataaaatacttaaaaaaaagaagattggctttaggaggatatattcctgagagatcgtctttttcgaaaccaaatcaaacaccaagtaatgatatttttgactttatgaaaaa

SEQ ID NO: 216663 - DNA, 878 bp, Unknown
  Bacterial polypeptide expressing nucleotide sequence isolated from the Sargasso Sea
atctttaattagatggaatgctgcagcaatggtggttcgagcaaataaaaaatttcctgagcttggaggacacattggtacatttgcttctgctgcaacattgtacgatgtaggtatgaaccatttttggagagcaaaaaataataaatttggtggagatttgatttattttcaaggacatagcgctccaggaatgtatgcaagggcatatttagaaggtcgactaaatgaaaaacaattagatagttttagacaagaggtaaaacctggaggtttatcgtcatatccacacccgtggttaatgccaaaattttggcagttccccacagtttcaatgggtttaggacctatgcttgctatttatcaagcaagatacatgaaatatttaatcaatagaggtttgattaaagatgaaggaagaaaggtgtgggcttttttaggtgatggagagatggatgaacctgagtcaatgggagctattggattagctgcaagagaaaatttagataatttaatatttgtaattaattgtaatcttcaaagattagatggtccagttagaggtaatggaaaaattattcaagagctcgaaggaagtttcagagggtctggttggaatgtaattaaagttatttggggatcgtattgggattcattaattgcaaatgataaaactggttatttagtgaaagccatgaatgagacagtcgatggtgaatatcaggcaatgaaagctagagatggtgcatacgtgagggaaaaattttttggtaaataccctgaaacgctagatttagtatcaagcctgtcagatatagatatttggagacttaatagaggaggtcatgaccctcacaaagtttttgcagcatatgata

SEQ ID NO: 216664 - DNA, 966 bp, Unknown
  Bacterial polypeptide expressing nucleotide sequence isolated from the Sargasso Sea
atgcctggtgatcttttcatggagcgaaaaattagatctttaataagatggaatgccttagtcatggtcttgagagcaaatatgaacgatgatgagcttggtgggcatatagctacattttcttcagctgcaactttatacgatgttggatttaattatttctttagggggtctaataatcaacttgaagacatgatttactatcagggacacagttctcctggaatttatgctcgtagttttctggaaggctatctcaatgaagaggatttagataattttagaagagaagtaactaagcctggattgtcatcttatcctcatccatggttaatgcctgagtattggcagtttccagttgtttcaatgggtctagggcccattcttggaatttatcaagcgcatgtaatgcgttatttgtcatcaagaggcctggtcccaagaaatgatcgtaaagtctgggtgttttgtggtgatggtgaaatggatgagcctgaatcaaagggagctattggattagctggacgagaaaagcttgaaaacctaatctttgtaatcaactgtaacctgcaaagattagatggtcctgtaagagggaatggaaaaattattcaggaactcgaaggttccttcagaggtgagggctggaatgtcattaaagtagtttggggcagattctgggatccaataatggcaaaagattctgagggtaaattacaagatctaatggatgttgtagtagatggagagttgcaaaactttaaagcaaaaggtggcgcttatacgagagagaatttttttgctaaggatccttcggttctggaaatggtaaaagacctatcggatgatgatatttataagttaaatagaggaggacacgatccatataaagtttatgcagcttatcataaagcagttaattctgaaggagcgccaactgtaattcttgccctcacaactaaaggt

SEQ ID NO: 216665 - DNA, 425 bp, Unknown
  Bacterial polypeptide expressing nucleotide sequence isolated from the Sargasso Sea
gatgaataaaaaaaataaaaataattttacaaatgaccagttattgaagttttacgaaaaaatgtttttaattagaaaatttgaagaaaaggctgcccaattatatggagctggaaaaattggaggtttttgccatttatacattggccaagaggctgtagtcataggtattctctcctctattaactcagaggataccgttatcaccgcttatagagatcatggacatatattagctcgtggagtagatcctaaactagtaatgtctgaattaactggaaggaaagatggcatttcaaaaggtaagggcggatcaatgcacatgttctccaaagctaatagattttatggtgggcacggtatcgttggagcacaagtacctttaggcgtcggtataggttttgcacataaatatagaaatgaaa

SEQ ID NO: 216666 - DNA, 937 bp, Unknown
  Bacterial polypeptide expressing nucleotide sequence isolated from the Sargasso Sea
aactaaagaatgtttagattcattaagtgcagtcctgcaaaatgatggttctgaaagggctcattttttaattaaacaattaattgatcaatcttataaagctggatctaaaattcctcatactcaaactactccttatgtgaatacgatacctcctgaggaggaaaaaagatcgcctggagatcaaaacatagaacgtaagttaagatcactaattagatggaatgctgctgcgatggtagtaagagcaaataaaaaacatcctgaacttggtggtcacataggaacatttgcatcagctgcaacattatatgatgttgggatgaatcatttttggcgagcaaaaaataataaatttggaggtgatctagtatattttcaaggtcatagtgcaccaggaatgtatgcaagagcttttcttgagggaagattaaatgaaaaacagttagatagatttagacaagaagtacaaactggtggactttcatcttatcctcatccttggctaatgccaaacttttggcagtttccaacagtttcaatgggcattggtccaatgttagcaatatatcaagcaagatttatgaaatacctaatcaatagaggattaattaaagatgagggaagaaaagtttgggcttttcttggtgatggagaaatggatgaacctgagtcacttggggcaattggtttagcggcgcgtgaaaatttagataatttaatatttgttgttaactgcaacttgcaaagattagacggtccagttagaggaaatggaaaaataattcaagaattagagggtatttttagaggaggtggctggaacgttctaaaagttatttggggatcgtattgggattcacttttagcaaatgataagacaggacatttagtaaaaattatgaatgagaccgtagatggtgaatatcaagccatt

SEQ ID NO: 216667 - DNA, 983 bp, Unknown
  Bacterial polypeptide expressing nucleotide sequence isolated from the Sargasso Sea
atggaatgcagcagcaatggtagttcgagcaaataaaaaatatcctgagcttggtggacatattggtacatttgcatctgctgcaacattatatgatgttgggatgaatcatttttggagagcaaaaaataacaaatttggtggagatttaatttattttcaaggacatagtgctccaggaatgtatgcaagagctttcttagaaggtagattaaatgaaaaacaattagatagtttcagacaggaggtaaaacccgggggtctatcgtcatatccacatccatggctaatgccaaatttttggcagttccccacagtatccatggggttaggtcctatgcttgctatatatcaagctagatacatgaaatatttaattaatagaggtttgatcaaagacgaaggaagaaaagtttgggcctttttaggcgatggggagatggatgagcctgagtcaatgggagctattggattagcagctagagaaaatttagataatttaatatttgtaatcaattgtaatcttcaaagattagatggtcctgttagaggtaatggaaaaattattcaagagcttgagggaagtttcagaggatctggctggaatgtaattaaagttatttgggggtcatattgggattcgttgcttgctaatgataaaactggtcacttaataaaaattatgaacgagacagtagatggtgagtaccaagcaatgaaagcaagagacggtgcttatgtaagagaaaagttttttgggaaatctcctgaagcattagaattagtttcaagcatgtcagatacagatatttggagacttaatagaggtggtcacgatcctcacaaagtttttgctgcatatgataaagcgaccaaacatcaaggaagcccaacagtgataattttgcaaactattaaaggttatggaatgggaaaatcaggagaaagtgtaaatactactcatcaaaccgaaaaaattagat

SEQ ID NO: 216668 - DNA, 466 bp, Unknown
  Bacterial polypeptide expressing nucleotide sequence isolated from the Sargasso Sea
aatgttattgattcgtagattcgaagaaaaagccggacaactttatggaatgggtaaaattggtggattttgtcatttatatattggacaagaagcggttgttgtaggtgtcgattcagtgaaaaaaaaaggtgaccaagtaataacttcttatagagatcatggacatatgttatcttgtggaatggatcctaaaggtgtaatggcagaattaactggcaaaaaaactggatattccaaaggtaagggcggatctatgcacatgttcagcaaatctaaagatttctatggagggcatggtatagttggtgctcaagttccaattggtgctggcctagccttctcaaataaatacaaaaaaaataaatctgtatgctttacctattttggtgacggtgccgctaaccagggtcagatatatgaaacttttaatatggcttctctttggaaattacctgttgttttt

SEQ ID NO: 216669 - DNA, 739 bp, Unknown
  Bacterial polypeptide expressing nucleotide sequence isolated from the Sargasso Sea
atgaagactgaaattttaatgccttccctatcacctacaatggaggaaggaaatttagctaaatggtatgtgagtcccggagataaggtgaagcctggagatatcatagccgatattgagacggacaaagctctaatggagtatgaatgcattgaagaaggaactgttattgatctaattgttaaagagggaacagaaaatataaaagtcaattccttgatcgcaattattgaaaccgatgggtctgaggaggtaatggaaataaaagatcccgcgatcgagcaaaatgaccctgtagctgatgataaatctgaagagatattgaatatagaagagaaagaaaatgttatagcctcagctaaggatgaagaaaaaactctcggtcaagaagaaaacataagcaaagttttgaatacgtttacagtgcgagaggccatcaatggtgcaattgctgaagagatgagacgcgatgaagatgtttttcttatgggggaagaagtaggggagtatcaaggcgcatataaggtaagccaaggtttgctcgatgagtttggagtagaaagagtaattgatactcctatcaccgaacacggcttcactgggctcgctgttggagctgcatttgcgggaattaggcctatagttgagttcatgacatttaattttgcgatgcaagctttagatcaaataattaactctgctgctaaaacaaattatatgtcaggaggacagattaatt

SEQ ID NO: 216670 - DNA, 891 bp, Unknown
  Bacterial polypeptide expressing nucleotide sequence isolated from the Sargasso Sea
ttataggctttgcccagtctaaaggggctcgcctacccttcaacacatcaactccatttaccaatacaatcctgccaggacaggaacccaagtaccctggagatagagaactcgagcgtaaaataaaatccatagtaaggtggaacgcgatggcgatggttacaaaagccaacaaagaaacccctggtattggtggtcacatttcaacatatgcatcagcggcaaccctttatgaagttgcatataatcatattttaaaaggtgcagcccacccttctggccaagatatggtcttttttcagggtcacgcatcgccgggtatttatgcccgtgcttttctagaaaagcgattatcaaaagagaacctgcacaattttcgtcgtgaactatctgaaggcggggggctctcatcatatccacacccatatttaatgcctgatttctggcaatttgcaacagtttccatgggccttggccctctaatggctatttatcaagctcggtttatgcgctatatggatgatcggggtttcgttgaggatacaggtagaaaagtctttgcttttcttggagatggggaaatggatgaacccgaatcaacgggagccctaactcttgcaagtagagaaagccttgataatcttatttttgtggtaaactgcaacctgcaaagactggatgggccggttcggggaaactctaaggtggtccaagaacttgagggtgcctttaggggggctggttggaatgtgataaaggttctttgggggtctgagtgggatgatctgtttgaaaaagacacaacaggaatgtttctaaaaagaaccgaagaggttgtagatggtgacctcttaaaatacattgttgagggtggcgccctatatgcgtgaa

SEQ ID NO: 216671 - DNA, 742 bp, Unknown
  Bacterial polypeptide expressing nucleotide sequence isolated from the Sargasso Sea
taaaaaatatcctgagcttggtgggcacataggaacatttgcatctgcagcaacattatacgatgtaggaatgaatcatttttggagagcaaaaaataataaattcggaggtgatctagtatattttcaaggtcatagtgcacctggcatgtatgctagggcttttcttgagggaagattaaatgaaaaacaactagatagatttagacaagaggtaaaaacaggtggtctttcttcctaccctcatccctggctaatgcctaatttttggcagttcccaactgtttcaatgggtattggtccaatgttagcaatatatcaagcaagatttatgaaatatcttattaatagaggattaataaaggacgaaggaagaaaagtatgggcatttcttggtgatggagaaatggatgaaccagagtctcttggcgcaataggattagcagctcgtgaaaatttagacaatttaatatttgtagttaattgtaatttacaaagattagatggtccagttagaggaaatggaaaaataattcaagaactagagggtatttttcgaggtgcgggctggaatgttttaaaggtcatttggggttcatattgggatacacttttagcaaatgacaagacgggacatttggtaaaaattatgaatgagactgtggatggtgaatatcaggcttttaaagcaagaaatggactttatgtgagagaaaagttttttggtaaatatcctgaaaca

SEQ ID NO: 216672 - DNA, 850 bp, Unknown
  Bacterial polypeptide expressing nucleotide sequence isolated from the Sargasso Sea
attagaaaaaaaacaatctacaattcaaattattaatggttcagatatcgatccacttgaaacacaagactggttagaatctctatctgcagtaatatctaaagatggaaatcatagagcccattttttaataaaagaattaattaataaagcttatcgtgaaggagcaaatattccttatacgcaaaatacgccttacataaatacaataccacccgaagctgaagtaaaatctagcggtgatcaaaatattgaaagaagaattagatcattaatcagatggaatgctgctgcgatggtagtacgagcaaacaagaaatatcctgagcttggtggacacattggaacatttgcatctgctgcaacattgtacgatgttgggatgaatcatttttggagggcaaaaaataataaatttggtggagatttaatttattttcaaggacatagtgctccaggaatgtatgcaagggcattcctagaaggtagattaaatgaaaaacaactagatagttttagacaagaggtaaagcctggaggtctgtcttcatatccacacccctggttaatgccaaagttttggcagttccctacagtatctatgggtttaggtcctatgcttgctatatatcaagctagatacatgaaatatttaatcaacagaggtttgattaaagatgaaggaagaaaagtatgggcttttttaggtgatggagaaatggatgagccagagtcaatgggagcaattggattagctgcaagagaaaatttagataatttaatatttgtaattaattgtaatcttcaaagattagatggtccagttagaggtaatggaaaaattatcaag

SEQ ID NO: 216673 - DNA, 883 bp, Unknown
  Bacterial polypeptide expressing nucleotide sequence isolated from the Sargasso Sea
aaagtttgggcatttttaggtgatggagaaatggatgagccagagtctatgggtgcaatcggtttagcagccagagaaaaattagataatttaatatttgtagttaattgtaatctccaaaggctcgatgggcctgttaggggaaatggaaaaattattcaagaattagaaggaagctttagaggagctggctggaatgttataaaagtaatttggggctcatactgggattctttgatagctaacgataaaactggtcatttagtaaaaataatgaatgaaacggttgatggagaataccaagcaatgaaagcaagagatggtgcttatgttagagaaaaattttttggtaaatatcctgaaacacaagaactagtctcaagcttatcagataaagatatttggaggttaaacagaggtggtcatgatccacataaagtatatgcagcttatgataaagctacaaaaaatcaaggaagccccactgtaatcatagcaaagaccatcaagggatatggaatgggtaagacaggcgaaagtgtaaacacaactcaccaaacaaaaaaattagatgtagatgatttgctatactacagagatcgatttgatgttcctctaactgacgatcaagttagaaatattgagtattttaagcctgatgaaaaatctccggaaattaaatatttaaaagaaagaagattgaatttaggtggctttttacctgaaagaactacctacgcaaaaccaattaaagctccatcaaaagatatttttgatttcatgaaagtttcaactggtgaaaaagaaatgtcaacaaccatggcaatggttaggatgtttactaatttattaagagataaaaatatttctccaagattagtcc

SEQ ID NO: 216674 - DNA, 481 bp, Unknown
  Bacterial polypeptide expressing nucleotide sequence isolated from the Sargasso Sea
ctgtcgacgtcgcacaccttcgagttccccactcccttcaaggcgcacaactgcgatgggcctgagagctcttgcgtagcgaccaaggacgagctgatgagttaccttgacctgatgctccgcatgcgccggatggaaattgcctttgacaacgaatacaaggcgcgcaacatccgtggtttctgccacctctacgacggccaggaggcctgcgccgtcggcgtcgaagcagcgctcacgcgtgaggattcttggatcacctcgtaccgctgccacgccacgatgctagcccgtggtggtgaggtgtcggccattgctgccgagctctttggcctggaagacggcgttgctgccggcaagggcgggtccatgcacatgtacagcaaggaccagaacttctacggtggcgcgggcattgttggtgcccaggtgccctgcggcgtgggtctggcgttcgcaaacaagtacaacgccggcttca

SEQ ID NO: 216675 - DNA, 924 bp, Unknown
  Bacterial polypeptide expressing nucleotide sequence isolated from the Sargasso Sea
ataaacactataccagcagatgaagagataaaatctccaggcgaccaaaatattgaaagaaaaatcagagcactaattcgatggaattcagcagttatggttgttagagccaacatgagagatccttcgttaggaggtcacattggaacatttgcttcagcggcaactctttatgatataggaatgaatcatttttggagggctaaaagtaataaatttggtggtgatttaatttatttccaaggacattcagccccaggaatttatgctagagcttttttagaaggaagacttaacgagaagcaattagatagattcagacaggaagtttacccaggaggtttgtcatcttatccccatccatggctgatgcctaagttctggcagtttccaactgtttccatgggacttggaccaatgatggcaacttatcaggcaagatttatgaaatatcttatcaatagaaaattaataaaagatgagaataggaaagtttggtctttcttgggagatggtgaaattgatgagccagaggctctaggatctattggtttagcagcaagagaaaagttagataacttgatttatgttgtgaactgcaaccttcaaagattagatggtccagtaagaggtaatggtaaaattattcaagaattagagggaatttttagaggagctggctggaatgtaataaaagtcatttggggatcatattgggatcctttacttgcaaatgataaatcaggtttacttgtaaaaagaatgaatgaagcagttgatggagaataccaagcctttaaagcaaaaggtggtttatacgttagagataacttctttgggaaataccctgaacttaaaaatctcgttgcaagttatacagacagtgatatttggaaattaaatagaggtggtcacgacccgcat

SEQ ID NO: 216676 - DNA, 665 bp, Unknown
  Bacterial polypeptide expressing nucleotide sequence isolated from the Sargasso Sea
aatgactatttcaattctaatgcctgcattgagcccaactatggaagaagggactttatcaaagtggcttataaaaataggcgataaagttaaccctggtgatcttcttgccgaaattgaaacagataaagctactatggaagttgaatgcattgaagaaggttacgttagtgatttactagttaaggagggcactgaaggagtaaaaattaatacacctattgcaattctctcttctagtcataaaaaaattaaaaatgatcaagaaattaaaaaaaataaattagaagaaaatattgatgataatgtaatacatatatctccctcaaaggatatttcagaattagattctcttaataacaatcaaaaccaactaaataatactgaaacacataatattactgtaagacaagctctaagagatgctatggcagaagaaatgagaattgataaaaatgtttttgtgttgggtgaagaagtggcggaatatcagggtgcgtataaagttacacagggtttacttcaggagtttggagaaaaaagggtagttgacactccaataactgaacatggttttactggattagggattggggctgcatttgcaaatcttaaacctgttgttgagtttatgacatttaattttgctatgcaggcaattgatc

SEQ ID NO: 216677 - DNA, 715 bp, Unknown
  Bacterial polypeptide expressing nucleotide sequence isolated from the Sargasso Sea
gttctagatactcctatttctgaagccggttttgcaggagttggtgttggatcaactatggttggctctagacctataattgaattcatgacttttaattttgcgttagttggaattgatcaaataattaataatgctgcaaaaattagacaaatgtcaggtggacaatttcctattccaatagtttttagaggtccaactgcctcagcaggtcaacttggtgcaactcattcacaagcatttgacaactggtttgctaattgtcctggattaaaagtaattgtcccatctaacccttatgatgctaaaggattattaaaatctgcaataagagatgatgacccagttatatttatggaatcagaacagatgtatggagataaaggagaaattccagaaagtgagtatacacttcctataggagtagctgatattaaaagaaaaggtaaggatgtaactgtagtctcttttggtaaaataattaaagaggcatatatagcagctgataaactagcagatgaaggtgttgaatgtgaaataattgatcttagaacaattagaccactagattatgatgcaatattcgattcagttaaaaagacaaatagattagtaattcttgaagaggcatggccttttggaaatatatcaaccgacatatctcatactgtgcaaagtaaactttttgattatttagatgctccagttgaaaagg

SEQ ID NO: 216678 - DNA, 786 bp, Unknown
  Bacterial polypeptide expressing nucleotide sequence isolated from the Sargasso Sea
tatcaggctagatttatgaaatatttgattaatagaagccttataaaagatgaaggaagaaaagtttgggcattccttggtgatggtgaaatggatgagccagagtctatgggcgctattgggttagccgcgagagaaaacttagacaatttaatttttgttgttaattgtaaccttcaaagattagatggccctgttagaggtaatgggaaaataattcaagaattagagggaattttcagaggagctggctgggatgttataaaagtaatatggggatcatattgggatcctttgctagcaaaagataaaactggtcatcttttaaaaattatgaacgaaacagttgatggagaataccaagcttttaaggcacggaatggtttatatgttagagagaaattttttggcaaatatgcagaaacaaaagagttagtttcatctctatcagataaagatatatggagacttaatagaggaggtcacgatccccataaagtttatgctgcttacgatcaagcttcaaaaaacaaaggtaaaccaactgtaatcattgcaaaaacaattaagggttatggaatgggtaaaactggagaaagtgtaaatactacacatcaacaaaaaaaaatgggcgtggatgacttaatgtattatagagataggtttgatgttccattaactgacaagcaggttcaggatatccagtatttcagacctaatgaaaattctgaggaaattaaatatttgaaagatcgtaggataaaattaggtggttttattccagaa

SEQ ID NO: 216679 - DNA, 990 bp, Unknown
  Bacterial polypeptide expressing nucleotide sequence isolated from the Sargasso Sea
ccaggtgatctttttatggagagaagaattagatcactaatcagatggaatgctcttgttactgtattaagagcaaacaaaaatgatgacgaacttgcgggacatattgctactttttcatcagcagcaatgctctatgacattggctttaattatttctttagagggcaagaaagcaaaaatgatgatttagtatattttcaaggacactcttcaccaggtatttatgcaagaagttttcttgaagggcgtctaagtgaagaggatttagataattttaggagagaagttgataaaccaggactttcttcttatccacatccatggctgatgcctgactattggcaattcccagtcgtttcaatgggtcttggacctatttctgcgatctatcaagctcatgttatgaagtatcttcatgcgcggggattaaaagatttaggtgatagaaagatttggggattttggggtgatggtgaaatggatgaacctgaatcattaggagcaatcggtttagctgcaagagaaaaattagacaatttgatctttgttataaattgcaatcttcaaagactggatggccctgtaagaggaaatggaaaagtaatacaggaattagaaagacaatttagaggatctggctggaatgttatcaaagttgtttggggccgactttgggatcctattatggctaaagacaaaggcggacatcttcaaaaaataatggatgaagtcgttgatggagaaatgcaaaactttaaagcaaaaggaggagcatacacccgcgaaaacttctttggtaaacatcccgaggcgcttaagttagttaaaggtctatccgatgaagagatctataaattaaatagaggtggccatgatccatataaggtttatgccgcctatcatgaagcagtgaaccataaaggagcacctacagttatcttgcgctcacaacaaagggttatggtgttgggtcaagagaagcagaca

SEQ ID NO: 216680 - DNA, 394 bp, Unknown
  Bacterial polypeptide expressing nucleotide sequence isolated from the Sargasso Sea
tatggaaacatctacaacagcggcaaacgtcaaagatactgggacttcggttgaatcctttacaaaagaaacatacctaaagtggtatgaatcaatgctcttaatgagaaaattcgaggagaaagcagggcaactatacattcaacaaaagattagaggtttttgtcatttgtacattggtcaagaggctttagtcgcaggagcaatttccgcaattcgaccaacagacaatctaattaccgcttacagagatcatgcccatccaattggaatgggtatggatccgaaatatgtaatggctgaattatatggcaaggaaacgggatgtagtaagggaaaaggtggatctatgcacatgtttgacaaggagctaaacttcttcggcggtcatggc

SEQ ID NO: 216681 - DNA, 936 bp, Unknown
  Bacterial polypeptide expressing nucleotide sequence isolated from the Sargasso Sea
ttagaagatgtaccaaaaaatactgaaaatttaattcaagaagcagaagattctttaaaaagaattaaagaaccaaaaaaaccaattaacaaaatagaaaaagaaaaatctgaaataaaacagatagtaaaagaaggagatattgatccattagaaacaaatgagtggctagagtctctttcagatgtcatagagaaagatggaaatcagagagctcattatttgatcaaggaactaattaataaagcatacatggaaggagctaatattccatatacacaaaatactccctatattaatacgatacctgttggtgatgaaaaaaaatcaaatggtgatcaaaatatagaaagaagaataagatctttaattagatggaatgctgctgctatggtagtgagggcaaataaaaaatttcctgaacttggaggtcatataggaacgtttgcgtctgctgctactttgtatgatgttggaatgaatcatttttggagagctaaaaataataaatttggaggagatttaatttattttcaaggacatagtgcacctggtatgtatgcgagagcatttcttgagggaagattgaatgaaaaacaattagacagttttagacaagaggtcaatccgggtggtttgtcatcttacccccacccatggttaatgccaaacttttggcaatttcccacagtttcaatgggtttaggaccaatgctagcaatttatcaagctagatatatgaaatatttaattaatagaggtttaattaaagatgaaggtaggaaggtttgggcatttttgggtgatggagaaatggatgagccagagtctcttggagcaataggtttagctgcaagggaaaaattagataatcttatatttgttgtaaattgtaatcttcaaagattggatggacctgtacgagggaatggaaaa

SEQ ID NO: 216682 - DNA, 826 bp, Unknown
  Bacterial polypeptide expressing nucleotide sequence isolated from the Sargasso Sea
aagtacccagaaaccgcagctctcgtgtctgacatgaccgatgcacaaatctttgctcttaagcgtggtggtcatgagccatctaagctatttgcagcttataaaaacgctcaggaaactaaaggtcgtccaaccgttattttggctaaaaccgtaaaaggttatggcatgggtgaagcggcagaaggtaaaaacattgctcaccaagtgaagaaaatggacatgactcacgtactgcaattacgtgatcgtctaggcctacaagatttattaactgatgatgcggttgaaaacctgccttatttaacacttgaagaaggctcgaaagagcatgagtacttacatgctcgtcgtaaagcgttacatggttacacgccacagcgtttgcctaactttactgaagcgttaaccctgccagcccttgaagaatttaccccgttgcttgaagagcaaaagcgtgaaatttcatcaactatggcgtttgtgcgtaccttaaatattcttttaaaagataaaggcattggcaaaaatattgtgccaattattgccgacgaagcgcgtacatttggtatggaaggtttattccgtcaaatcggtatttataacccatctggtcaaacttatacccctgaagatcgtggcgttgtgtcttactacaaagaggcgacttcaggccaagtattgcaagagggtattaacgagttaggtgctatgtcatcttgggtggcagcggcaacgtcatacagcactaacaacttaccgatgatcccattctatatttactactctatgtttggtttccaacgcgtgggtgatatggcgtgga

SEQ ID NO: 216683 - DNA, 760 bp, Unknown
  Bacterial polypeptide expressing nucleotide sequence isolated from the Sargasso Sea
aataaattgtggtggagatttgatttatttccaaggccacagtgccccaggaatgtatgcaagagcatatttagagggaagattaaatgagaaacaattagatagttttagacaagaggtcaaacctggaggactttcttcttatccgcacccgtggttaatgccaaagttttggcaatttccaactgtgtctatgggtcttggtcctatgcttgcaatttatcaagccaggtacatgaaatacttaataaatcgaggattaattaaagatgaaggaagaaaagtatgggctttcttaggtgatggagaaatggatgaacctgagtcaatgggggcaattggtttagccgctagagaaaatttagataatttaatttttgttattaattgtaatcttcaaaggctagatggacctgtaaggggtaatggaaaaataattcaagaactggaaggaagttttagagggtctggttggaatgtaataaaagtcatttggggctcttattgggacccgctactcactaatgataaatcaggccatttagtaaaacttatgaatgagacagttgatggagagtatcaggcagctaaagcaagagatggcgcctatgtaagagaaaaattttttggaaaatatgctgaaacttcagaattagtgtccagtctttctgataaagacatttggagattgaacagaggaggccatgatcctcataaagtttatgccgcatatgatcaagcaactaagaaccaaggaagt

SEQ ID NO: 216684 - DNA, 622 bp, Unknown
  Bacterial polypeptide expressing nucleotide sequence isolated from the Sargasso Sea
tggaatagtaggagctcaagttccaattggggttggtttagctttttctcataaatataaaaatgatggttatgttagtatgacttacttaggcgatggagcagttaaccaaggtcaagtatacgaaagctttaatatggccgcattatggaaattacccgtagtttttattattgaaaataataaatatggaatgggaacttctgtaactagagcaagtgccggcagatcactcgctgaaagaggtaaagcctatggaatacccggtatagaagttgatggaatgaatgttttttcagttagagaagctggaaaagaagctttagattattcaagaaatggaaaaggcccttttattttagagatgaaaacttacagatatagaggtcattctatgtctgaccctgctaaatatagagcccgttcagaagttgatgcggttagacagcaaaaagattgtatagaaaatcttagagagatacttcaagaaaataaggtaactgacgatgaactcaaaagttttgatactgaaattaaatcaacagtatcaaaagctgcagagtttgctttggaaagtgatttgccagataaaagtgaattacttactgatatttatctataa

SEQ ID NO: 216685 - DNA, 828 bp, Unknown
  Bacterial polypeptide expressing nucleotide sequence isolated from the Sargasso Sea
ttggtggccatatatcaacatacgcatctgcagcaacattgtatgaagtcgcatttaatcatgtgtttaaggggccagatcataaagaaggtcaagatttaattttttttcagggtcatgcctctccagggatgtattcgagggcttttcttgaggggaggtttaataaagataatttaaaaaactttagacaggagcttgcaaaagaagggggactttcttcctatcctcacccatatcttatgccaagtttttggcaatttgcaacagtctctatgggtttgggtcctttaatggctatctaccaagctagatttatgcgctatatggtagatagaaaatttataaatgaaacaaaaagaaaagtttttgccttcctgggtgatggagaaatggatgagcctgagtctaagggcgccttaactctcgcttcacgagaagagttagacaaccttatttttgttattaattgcaatttacaaagattagatggaccagtaagagggaattcaaaagttattcaagaactagagagcgctttccgcggagctggttggaatgtgataaaagttatttggggttctggttgggacagacttttagtaaaagacactaagggtcttttactaaaaaggatggaagaaatagttgatggagacctacttaaatatacagttgaagatggttcttatttcagagagcacttctttggaaaagataaagaactcttgtctttagttgatcacctttcagataaagatcttgaagatttaaagccagggggacatgatccagaaaaagtattgcagcatttaatgaggcaataaa

SEQ ID NO: 216686 - DNA, 930 bp, Unknown
  Bacterial polypeptide expressing nucleotide sequence isolated from the Sargasso Sea
aaagaattaataaacaaagctaatatggagggtgcaaatattccctacacacaaaacacaccctatataaatacaattccagttaatgaagagaaaaaatcaaatggtgatcaaaatattgagagaagaattaggtcattaataagatggaattccgcagcaatggttgttcgtgcgaacaaaaagtttccagagctaggaggacatattggaacatttgcatcagctgctacactttatgatgtaggtatgaatcatttttggagagcaaaaaataataaatttggtggggatttgatttactttcaagggcatagcgcgccaggcatgtacgcaagagcgtttcttgagggaagacttaacgaaaagcaattagatagttttagacaagaagtcaatccaggaggtctttcatcttatccacacccttggttaatgccaaatttttggcaatttcccacagtctcaatgggtttaggaccaatgctagcaatatatcaagcaagatatatgaaatatttaattaacagaggtctaattaaagatgaaggaagaaaagtgtgggcttttttaggagatggggaaatggatgaaccagagtctttaggtgcaattggtttagcagctagagaaaaattagataatttaatatttgtaatcaattgtaaccttcaaagattggatggaccagtaaggggaaacggaaaaattatacaagaattagagggtatttttagaggagctggatggaatgttattaaagtaatctggggttcttattgggatccgctattggctaacgataaaactggccatttaattaaagttatgaatgaaactgttgatggtgaatatcaagcgatgaaagcaagagacggagcttatgtcagagaaaagttttttggtaaatatcctgaaactaaagagtta

SEQ ID NO: 216687 - DNA, 815 bp, Unknown
  Bacterial polypeptide expressing nucleotide sequence isolated from the Sargasso Sea
ggcttttttaggtgatggggagatggatgagcctgaatcaatgggagctattggattagctgctagagaaaatttagataatttaatatttgtaattaattgtaatcttcaaagattagatggtccagttagaggtaatggaaaaattattcaagagcttgaaggaagtttcagaggatctggctggaatgttatcaaagttatttggggatcatattgggattcattaattgcaaatgataaaagtggttatttagtaaaaactatgaacgagacagtcgatggcgaatatcaggcaatgaaagctagagatggtgcatacgtgagggaaaaattttttggaaaataccctgaaacactagaactagtatcaagcatgtcagatacagatatttggagacttaatagaggtggtcatgatcctcacaaagtttttgctgcatatgatagagccactaaacatcagggaagcccaacagtgataattgcaaaaactatcaaaggttatggaatgggaaaatcaggagaaagtgtaaatactactcatcaaactaaaaaattagatgttgatgatttaatgtattatagagatcgatttgatgtccccttaacagatgaacaggtgaaaaatattgaatattttaggcctgacgaaaaatctccagaaataaaatacataaaagaaagaagaattaaattaggtggatatttacccgaacgttcgacttttgctaaaccaatcaaagcaccctcaaaagatatttttgatttcatgaaagtatcaactggtgaaaaagaaatgtctactactatgg

SEQ ID NO: 216688 - DNA, 707 bp, Unknown
  Bacterial polypeptide expressing nucleotide sequence isolated from the Sargasso Sea
aatggcaaccaaacccaaatctaaaccgaaacgcggagctcgcaaaaggccagccgccaaaaagtctgcgcctggtgctaccaacgacgaactcctatcctattataacgatatgcttttaattcgacgctttgaagaaaaagcaggtcagttgtatgggatgggcctgatcggcggtttttgccatctctacatcggccaagaagccgtggttgttggcatgcaggccacggccggcgaaaacgatacggttgtcaccagctaccgcgatcatggccatatgttggcctgcggtatggaggcgaagggtgtcatggcggagcttacaggacgccggggcggctattctaggggtaagggaggctccatgcatatgttcagccgcgaaaaaaacttttacggcggtcacggtatcgttggggctcagatgcccatcggtacgggcctcgcatttgcatcgaggtataaggaggacggcggcgtctgtcatgcttactgcggtgacggcgccataaatcagggtcagatttacgaggcatttaatatggccagtctctgggacctgccggttatttatgtaatcgagaacaataaatacggaatgggcacttccatcgaacgcgcttcggcggtcactgaacttcacaaacggggcgcgtcgtttggaattcccggcacccaagtcaacggaatggacgtcctggaag

SEQ ID NO: 216689 - DNA, 853 bp, Unknown
  Bacterial polypeptide expressing nucleotide sequence isolated from the Sargasso Sea
gccccggcgctggacaccttcaaggccatcctggagcccacgcccgaaggccgtgagatctccaccacccaggcctatgtgcgtttcctgacgcagctgctgcgcgacaaggacatcggtccccgcgtggtgcccatcctggtggacgaggcccgtaccttcggcatggaaggcctgttccgccagatcggcatctacaacccgcacggtcagcaatacaccccggtcgacaaggatcaggtgatgtactaccgcgaagacaaggccggccagatcctgcaggaaggcatcaacgaagccggcggcatggccagctggattgctgcggccaccagctacagcacctcgaaccggatcatgatcccgttctatgtgtactactcgatgttcggcttccagcgcattggcgacctggcctgggctgcgggtgacatgcaggcacgcggtttcctgctgggcggcacttcgggccgcaccacgctgaacggcgaaggcctgcagcacgaagacggtcacagccacatcctggccaacaccattcccaactgcatcagctacgaccccaccttcgcacacgaagtggccgtgatcatgcaggacggtctgcgccgcatggtgcagaaccaggaaaacgtcttctactacctgacgctgctgaacgaaaactacgccatgcccggcctgaccgccggcacggaagcgcagatcatcaagggcatgtacctgtgcaagcccggccagaaggtgccgcaatcgggcgagcgcgtgcaactgctgggctcgggcacgatcctgcgcgaatccttctttgcgcaagagctgctggaaaaggactggggcattgcggccgacg

SEQ ID NO: 216690 - DNA, 460 bp, Unknown
  Bacterial polypeptide expressing nucleotide sequence isolated from the Sargasso Sea
tttatacattattgaaaataataaatatggaatgggcacatctgtagatagagcggctgccggattagacttatataaaagaggggaggcatttggtattcctggtgagaaggtagatgggatgaatgtgttctctgtaatagaagcagcagataaagcaggtaaatatgtcagggaagggaatggtccttatattattgaagtacaaacttatcgatatagaggacattcaatgtcagatcctgcaaaatatagaacgaaagaagaattagataactataagcaaaccgatcctattgaaatagttaaaggtgaaattttaaagaaaaaaattgcaactaatgatgaaattgaaaaaattaataaagatactttagaagaaataaaaaatgcagctgaatttgcaaccaatagtccttttccaaaggatagcgagctttatacggatgtttatttataa

SEQ ID NO: 216691 - DNA, 920 bp, Unknown
  Bacterial polypeptide expressing nucleotide sequence isolated from the Sargasso Sea
tccaaaagacacagaaaatataataaaacaggcagaagtagcaattgcagatgaaaaaaagagagaaacaaaaataaatgagactaaaattgaaaacaaacaatcttcaactcaggtagtgaatggcgctgataccgatcccctagaaacaaaagattggttagaatcattgactgcagttatttcaaaagatggaaatcaaagagcacatttcttaataaaagaattaataaataaggcctatcgagaaggtgcaaacattccttacacacaaaatacaccatatgtgaatacaattcctccagaagctgaggtgaaatctaatggagatcaaaacatagaaagaagaataagatcattaattagatggaactcagcagctatggtggttagggccaataagaagtttcctgaacttggaggacatatcggcacatttgcttcagcggcaaccttatatgatgtgggaatgaaccatttttggagagctaaaaataataaatttggtggagatttgatttattttcaaggtcatagcgctccaggaatgtatgccagagcttatttagagggaagattaaatgaaaaacaattagatagttttagacaagaggtcaaacctggtggtctatcctcatatcctcatccgtggctaatgccaaagttctggcaatttccaactgtttccatgggtcttggcccgatgcttgcaatttatcaggctagatacatgaaatacttaatcaatcggggattgataaaagatgagggaagaaaagtgtgggcttttttaggtgatggagagatggatgaaccagagtctatgggagcaattggtttagctgccagagaaaatttggataattttatttttgttatcaattgtaatcttcaaagattagatggaccagttagaggta

SEQ ID NO: 216692 - DNA, 412 bp, Unknown
  Bacterial polypeptide expressing nucleotide sequence isolated from the Sargasso Sea
atgagagaaattcaatttagagaagctatatgtgaagccatgtctgaggaaatgagaagagatgaaactgtctatctgatgggagaggaagttgcagaatataatggcgcttataaagcatctaaaggtatgcttgacgaatttggagattcaagagttattgatactccaattagtgaattgggttttgctggaattggagtaggttctactatgactggaaacagaccaattattgaattcatgactttcaacttttcccttgttggaattgaccaaataataaataatgccgcaaaaataaggcaaatgtctgctggacagttcccttgtcctattgtttttagaggaccaactggttctgcaggacaactcgcagcaacacattcacaagcgtttgataattggtttg

SEQ ID NO: 216693 - DNA, 758 bp, Unknown
  Bacterial polypeptide expressing nucleotide sequence isolated from the Sargasso Sea
aatgtatgccagggcttttcttgaaggaaggatcaatacaaaacagttagattattttcgtcaagaagttaatcctggtggtctttcttcttatcctcatccttggttaatgcctaagttttggcagtttccaacagtttcaatgggtttaggacctataatgtcaatttaccaagcacgatttacaaaatatttaattaatagaggattgttaaatgatgaaggaagaaagatttggtgtcatttaggagatggagaaacagatgaaccagaatctttaggtgcaataggattagctgctagagaaaaattagataatttaatttttgttattaactgtaacctccaaaggcttgatggccctgtaagaggaaatggtaaaattattcaagaacttgaaggtatatttagaggggcaggttggaatgtaattaaagttatttggggttcatattgggatcctttgctctcaaaggataaatctggtttattaattaaaagaatgaacgaagcagttgatggtgaatatcaagcatttaaagcaaaaggtggtgcctttgtaagagaaaagttttttggtaaatatccagaacttttaaatttagtttcacaaatggatgataaggatatttggaagttaaatagaggtggtcatgacccacacaaagtctatgcagcatattattctgcaatgcaaaataaaggtactccaaccgtaattttagcaaaaacaataaaaggatatggtatgggtaaat

SEQ ID NO: 216694 - DNA, 550 bp, Unknown
  Bacterial polypeptide expressing nucleotide sequence isolated from the Sargasso Sea
atttgtagaacttatgttggtgatggagctatgaataatggtcaagtttttgaagcttttaatcttgccgcattatggaagctaccagtcctatatataattgaaaacaacatgtatggcatgggcacttcagttgaaagagcttcagcaggaagtgatctttataaaagaggagaatctttcggcattcctggggaaatagttgatggtatgaatgtatttaaggttattaattctgcaaacaaagctgggaaatatgtaagaaatggtaaaggaccttatatattagaagttcaaacctatagatatagaggtcattcaatgtcagatccagctaaatatcgaacaaaaaaagaattggatacttacaaaagtcatgaccctattgaatttgtaaaaaaagaaattctaaaaaagaaaattgctactaatatggagttggaaaaaattaatcataaaattataaatgaaataaaagaagcagcagattatgctcttaataatgaatatccagatccatcatcattatacacggatgtttatatttaaa

SEQ ID NO: 216695 - DNA, 824 bp, Unknown
  Bacterial polypeptide expressing nucleotide sequence isolated from the Sargasso Sea
tcttgaaggacgacttaatgaaaaacaacttgatagctttagacaagaagtaaagcctgggggtttatcatcatatccacatccttggttaatgccaaaattttggcaatttccaactgtatcgatgggattaggtccaatgctcgcaatttatcaagctagatacatgaaatatttaataaatagaggcttgatcaaagatgaaggtagaaaagtttgggcatttttaggtgatggagaaatggatgaacctgagtctttaggagcaataggcttagctgcaagggaaaaattggacaatttgatatttgtagtaaattgtaatcttcaaagattggatggaccagtaagaggtaatggaaaaattattcaagagttagagggaatttttagaggggctggttggaatgttattaaggtaatatggggttcttattgggatcaattattagcaaatgataagacgggccatctagttaaaacaatgaatgaaacagttgatggtgaatatcaagcaatgaaagctagaaatggggcttatgtaagagaaaaattttttggaaaatatccagaaacttcagaattagtctctagcctttctgacaaagatatttggagattaaatagaggcggtcatgatcctcataaagttttcgcagcatatgataaagcatctaaaaatattggaagtccaacagttgttattgctaagactattaaaggttatggcatggggaaaagtggagaaagtgtcaacactacacaccagactaagaaattagatgtcaatgatttgatgtattacagagatagatttgatgtac

SEQ ID NO: 216696 - DNA, 770 bp, Unknown
  Bacterial polypeptide expressing nucleotide sequence isolated from the Sargasso Sea
atttatgcaagatcgtttctagagggcgtacttaccaagcagcaactagataatttcagacaagaaataggtggaaatggtctatcatcttatcctcatccttggctaatgcaagattattggcaatttccaaccgtttcaatgggattagggccaataatgtcaatttatcaagcacatgtaatgaaatatcttgaacagagaggcttgttagaagaaaaccaaaatagaaaaatatggatgttttgcggagatggagaaatggatgagcctgaatcaatgggatctatttcacttgctgctagagaaaaactaaataatcttatatttgtaattaattgcaatcttcaaaggttagatgggcctgtaaggggtaattcaagaataataactgaactaggtacaatttttaaagcagctggatggaatgtcataaacctcatttggggaagaaggtgggatgaattgttagctaaagattattctggcgcattgcgatgggttatgaataatactgttgatggagaatatcaaaactttaaagctaaaggtggcgcatatactagaaaacatttttttggcaaacaccctgaggcgttgaagttagttgaagaaatgacagatcaggagatagaagatcttaatagaggcggccatgatcctttaaaagtttataatgcatataaaaaagcatatgaatgcacagataagccttctgtaattcttgcatttacagtaaaaggttatggaattgggtcaagacaagcaga

SEQ ID NO: 216697 - DNA, 724 bp, Unknown
  Bacterial polypeptide expressing nucleotide sequence isolated from the Sargasso Sea
tatgaaaacgaaaagtaaaaaaaaaatagaacagcaaaaaacaagcaaagtcaattatgatattgatcttttaaaagcccttcataaaaaaatgttaatgataagacgctttgaagaaaaagctgggcaattatatggtatggggcatattggaggtttttgtcatctctatattggtcaagaggctgtggttgtaggcattcagtcagttttagagaaaaatgatactctagtaacttcctatagagatcatgggcatatgttggcttgtgatatggatcctaagggtgtcatggctgagttgacaggaagaattactggttactcaaaaggtaagggtggttcaatgcacatgtttagcagagaaaaaggtttttttggtggtcatggaatagttgctgcacaagttccaattggcaccggcttagcttttgcacataaatataaagctaataatgcaatttcagttactttttttggagatggtgcggctaatcagggacaggtttatgaaacttataacatggcatcactctggaaattacccgtggttttcgtgattgagaataatatgtatggaatgggtacttctgtatcaagatcttctgctggagataattttgcaaaacgaggagatgcttttggtattaaaaataaagttataaatggaatggatgtcttagaagtcagagaggccgctaaagatgctgttgaatactgtaga

SEQ ID NO: 216698 - DNA, 871 bp, Unknown
  Bacterial polypeptide expressing nucleotide sequence isolated from the Sargasso Sea
aagggctaacaaaaaatttcctgagctaggaggtcatataggtacatttgcatcggcagcaactttgtatgatgtaggaatgaatcatttttggagagcaaaaaataataaatttggtggagatttaatttatttccaaggccacagtgccccaggaatgtatgcaagagcatatttagagggaagattaaatgagaaacaattagatagttttagacaagaggtcaaacctggaggactttcctcttatccacacccatggttaatgccaaagttttggcaatttccaactgtgtctatgggccttggtcctatgttggcgatttatcaagccaggtatatgaaatacttaataaatcgaggattgattaaagatgagggaagaaaagtatgggctttcctaggtgatggagaaatggatgaacctgagtcaatgggggcaattggtttagccgctagagaaaaattagataatttaatttttgttataaattgtaatcttcagaggctagatggacctgtaaggggtaatggaaaaataattcaagaactggaaggtagttttagagggtctggttggaatgtgataaaagtcatttggggttcttattgggactcgctacttgctaatgataaaacaggtcatttagtaaaacttatgaatgagacagttgatggagagtatcaggcagctaaagcaagagatggcgcgtatgtaagagaaaaattttttggaaaatatgctgaaacttcagaattagtatccagtctttctgataaagacatttggagattgaacagaggagggcatgatcctcataaagtttatgccgcatatgatcgagcaactaagaatcaaggaagtcccaca

SEQ ID NO: 216699 - DNA, 679 bp, Unknown
  Bacterial polypeptide expressing nucleotide sequence isolated from the Sargasso Sea
atgaaccacttttggagagcaaaaaataataaatttggtggcgatttaatttattttcaaggtcacagtgctccaggcatgtatgcaagagctttcttagagggtagattaaatgaaaaacaattagatagtttcagacaagaggtaaaacctggaggtctatcgtcatatccacatccatggcttatgccaaatttttggcagttccctactgtgtcaatggggttaggccctatgcttgctatttatcaagctagatatatgaaatatttaatcaacagaggtttgattaaagatgaaggaagaaaggtgtgggcttttttaggtgatggggagatggatgagcctgaatcaatgggagctattggattagctgctagagaaaatttagataatttaatatttgtaattaattgtaatcttcaaagattagatggtcctgtcagaggtaatggaaaaattattcaagagctcgaaggaagtttcagaggatcaggctggaatgtaataaaagttatttggggatcatattgggactcattaattgcaaatgataaaactggtcatttaattaaagccatgaacgagacagttgatggcgaatatcaagcaatgaaagctagagatggtgcttacgttagagaaaaatttttggaaaatatccagaaacaaatcaatt

SEQ ID NO: 216700 - DNA, 913 bp, Unknown
  Bacterial polypeptide expressing nucleotide sequence isolated from the Sargasso Sea
cctgaaaaagaaaaaacaaaaaaagtaaaacaagaaactaaaatattagctaataacaaagatattgatcctctcgaaacaaaagattggttagattcgatttctgctgtgcttgaaaaagatggaataaatcgggcgcaatttttaatcaaagagttaatagaacattcatatagacagggatcagatttggctttgtcaagaaacaccccttacataaatactatttctcctgaagaagaaacaaaatctcctggagatcaaaatatagaacgaaagttgagatctttgatcagatggaatgcagcagcaatggttgtaagagctaacaaaaaatttccagaattaggcggacatataggaacttttgcttcggcagctactttgtatgatgtaggaatgaatcatttttggagagctaaaaataataaatttggtggagatttaatttattttcaaggacatagcgcacctggaatgtatgcaagagcatatttagaaggaagattatcagaaaagcaattagatagttttagacaagaagtaaataaagggggtctttcatcgtatcctcatccctggttaatgccaaatttttggcaattcccaaccgtttcaatgggaataggaccaatgttggcaatttatcaggctagatttatgaaatatctaatcaacagaggtttaatgaaagatgaaggaaggaaagtttggtgcttcttgggagatggagaaatggatgagccagagtctttaggagcaataggtttagcatctagagaaaatttagacaatcttatatttgtagttaactgtaatttgcaaagattagatggacccgttagaggaaatggaaaaataattcaagagctagaaggtatttttagaggtgcaggatggaatgttattaaag

SEQ ID NO: 216701 - DNA, 803 bp, Unknown
  Bacterial polypeptide expressing nucleotide sequence isolated from the Sargasso Sea
agcagaggaactgaggcgcgatccagagatatttatgatgggtgaagaaatcggtgagtatcagggtgcatataaggtctctcagggattgttagaagaatttggggataaaagaataattgatacacctattactgagcacggcatgacaggtttgggtgtcggtgctgctttcggtggtctaaagcctattgttgagtttatgacctttaattttgctatgcaggcgatggatcagattgttaattctgctgctaaaactcgttatatgtcaggtgggcaaatgagtcttcccatagtgttccgtggcccaaacggagcggcagccggagtagcagcacaacactcccaatgttttgccagctggttttctcatattcccggtcttaaagttgtttcgccttggtctggagcagatgctaaggggctgctaaagtccgctattcgtgatcctaatcccgttatatttttggaacacgaattgctttatggggaaaaatttatagttccagacgatcaggaatataccgtccccctaggatctgcaaatgtagagaaaataggcggagatgttactgtgatttcatattctaggatggtgcaggttgcgcttgaggccgcggatgttcttgcaggtgacgggatagaggtagaggttattaatctaaggactttaagaccccttgatgttgatacgataatttcatctttgaaaaagactaatcgcattatcagtttggaggaggggtggcctgtggcaggtcttggagcagaaatatctgcgatcgttatggaaaagggtt

SEQ ID NO: 216702 - DNA, 876 bp, Unknown
  Bacterial polypeptide expressing nucleotide sequence isolated from the Sargasso Sea
tatctcgaaatacaccttacataaatactatttctcccgaagaggataaaacatctcctggggatcagaatattgaaagaaaaataagatctttaattagatggaatgcagctgcaatggttgtacgagctaataagaaaaatcctgatctcggtggtcatataggaacctttgcttcggctgcaacattatatgacgtgggtatgaatcatttttggagagcaaaaaataataagtttggtggagatttgatatatttccaaggtcatagtgctccgggaatttatgcaagatcttttttagagggaagattaactgagaaacaattagattcttttagacaggaggtcttaccaggtggtttatcctcatatcctcacccttggcttatgccagactactggcagtttccaactgtatcaatgggtcttggtccaatgttagcgatctatcaggcaagatttatgaaatatttaataaatagaggattgataaaagatgagaatagaaaagtgtgggcttttttaggtgatggagaaatggatgaaccagagtctttgggtgcaattggattagcctcaagagaaaaattggataacctaatatttgtggttaactgcaatcttcaaagattagatggacctgttagaggcaatggtaagataattcaagaacttgagggaatttttagaggagctggttggaatgtaataaaggtgatttggggatcttactgggatcaactattagcaaaagataaaacaggtttattggtgaaaagaatgaatgaggccgttgatggagaatatcaagcctttaaggccaaagggggtgcatatgttagagacaaattttttgaaaatacaaagaattaaa

SEQ ID NO: 216703 - DNA, 895 bp, Unknown
  Bacterial polypeptide expressing nucleotide sequence isolated from the Sargasso Sea
cctgaggactcggcgcaattaagttcatatagagaagaaaaaagtggacaagttttggaggaaggaattaatgaggcaggtgctatgtcttcgtggattgctgcaggaacttcttacacaaatcatgatattgaaatgatccctatctatcttttttattcaatgtttggttttcagagaataggtgactttgcttgggcaggagcagacagtcaatcaagaggatttttgattggtgctactgcgggaagaactacacttgcaggagaaggtttacagcatcaagatggtcatagtcatttaatggcatcaactattccaaattgtaagtcatatgatccaacatttcattatgaactagcaacaatcttcagagaaggattgaaaagaatgcatgagaagaaagaaaatattttttattatatcacaacaatgaacgaaaattatcctcatcctgctatgccatctgaaaaatcatgtgaagagggaatactaaaaggaatgtataaaattaaagaatttaacaaatataaaaaaaccaagattcaatttttaggatcaggtacaattttaagagaaatgatagctggtgctgaaattctacaaaaggaatatcaaattgatagtgaaatttggagcgtaactagttttaacgaacttagaagagatggccttgaggttgaaagatataatttattaaatcctgaaaaagaaccaaaaaaatcatatgttgaaagttgtttaggcaaaactgaaggtccgattttggctgcatcagattatatgagaatgaactctgaccaaattagaccttatattaacaagagcttttattcactaggaacagatggatttggtcgaagcgatacgagaaaaaatttaaggaagtttttga

SEQ ID NO: 216704 - DNA, 748 bp, Unknown
  Bacterial polypeptide expressing nucleotide sequence isolated from the Sargasso Sea
gttttttttcagggtcatgcctcgccgggcatttattcccggtcttttcttgagggcaggttaaccgagaaacacttaaacaattttcgaaaagaattatcaaaagaaggcggacttagttcatacccacatccatatttaatgccacattattggcagtttgcaaccgtatctatgggtctaggtccaatgatggcaatatatcaagctagatttatgaggtatatgacagaccgaggtctaattaaagaaacaggaagaaaggtctatgcttttttaggtgatggtgaaatggatgaaccggaatcaactggcgcacttactttggcgtctagagagaacttagacaatctagtttttgtgattaattgtaatcttcaaagactcgatggacctgtccgaggtaattcaaaagtaatacaagaattagagggggcatttagaggggcagggtggaatgttgttaaggttgtatggggttctgactgggacgagttgtttaaaaaagacaccaaagggattcttttaaaaagaatggaggaagttgtagatggggatttattaaaatatgtggttgaaggtggggcttatataagagaacatttttttggaaaatacccagagttgctaacgctagtaaaagatatatccgatgaaaagctagaaaaaatgagaataggtggtcatgatccagttaaaatgtatgcagcatataaagaagcatcagaacacaaggggtctcctacgg

SEQ ID NO: 216705 - DNA, 907 bp, Unknown
  Bacterial polypeptide expressing nucleotide sequence isolated from the Sargasso Sea
atgggagaggaagttgctgaatatgaaggagcatataaagtttcacaagggcttttagatgagtttggtagtgaacgtgtgattgatacaccaataactgaacacggctttactggtttagctgcaggcgctgcatttggaggattaaaaccagtagttgaatttatgacttttaatttttctttacaggcaatggatcagataattaatacttgtgcaaaaacgctttatatgtcaggtggacaaatgaactgtccaattgtgcttagaggtcctaatggagctgcttcgcaagttgcggcacaacattcgcaagattttgcaccatggtttgcatcagtacctggtttaaaagttattcaaccattttcagcaaacgatgctaaaggtcttttaaaatctgcaataagagacccaaatcctgtaatatttttagaaaatgaaatattatataatgacaaatctgcctcatcaaaaattaatgaccaattaattcctattggaaaagctaaagttttacttgaaggttcagacgtaactttagttagttatgggattggaatcaaacattcgctaagtgcagttgaactagctaaagatattgatattagtgttgaaattattgatctcagatctataagaccaatcgattatgatactgtctttaaatcaataagaaaaacaaatcgttgtataacggttgaagaatgctttccaatttgttcaataggcaatcacctatcagcttcaattatggagaatatatttgattatctagattcacctattatcaattgtactggaaaggacgtaccaatgccttatgctaaaaaccttgaaaaggctgctcttctgaatcctgaagaaatttttaaggctataaaaaaagttacttacagggattgat

SEQ ID NO: 216706 - DNA, 877 bp, Unknown
  Bacterial polypeptide expressing nucleotide sequence isolated from the Sargasso Sea
acttttggcagtttccactgtatcgatgggattaggaccaatgttagcaatctatcaagcaagatatatgaagtatttaattaatagaggtttaattaaagatgaaggaagaaaagtttgggcatttttaggtgatggagaaatggatgagccagaatctctaggagccatcggcttagcagcgagagaaaaattggataatttaatttttgtaattaactgtaacttacaaagattagatggacctgtacgtggtaatggaaagataatacaggagttagagggaatttttagaggtgctggatggaatgtaattaaagtaatctggggctcttactgggattctctattgacaaatgataagacaggtcatcttgtaaaaaccatgaacgaaacagtagatggcgagtaccaagccatgaaagcgagagatggcgcctatgttagagaaaaattttttggaaaatatccagaaactagggaattggtatcaagactatcagacaaagatatttggaggctgaatagaggtggccatgaccctcataaagttttctcagcatatgataaagcgtctaaaaatgttggcagcccaacagtagtaattgcaaaaactattaaaggatatggtatgggcaaaggtggagaaagtgtgaacactactcatcaaactaaaaagctagatatagatgatttgatgtattatagggatagatttgatgttcctttaactgatcaacaagtcaaaaacattgaatattataagccagaaccaaattctccagaaattaaatatatcaaagaaaaaagaattcaacttggaggctttattcctgagagaacaacttatgctaaacctattaaggcacctccaaaa

SEQ ID NO: 216707 - DNA, 800 bp, Unknown
  Bacterial polypeptide expressing nucleotide sequence isolated from the Sargasso Sea
tctgctagagtcccttatagagtttgcgcaatctaaaggtgcacgcctgccttttaacacatctacgccatttttaaatacgattttacctggccaacaaccagaatatccaggggatagagatattgaaagaaaaataaaatccatcgtcaggtggaatgcaatggcaatggtcaccaaggcaaataaagaaaccccaggaataggtggtcatatatcaacctatgcctctgcagcaactctctatgaggtggcattcaatcatatattcaaaggctccgaccactcctccgggcaagacctggttttttttcaaggccacgcctcgccaggtgtatatgctcgcgcctatcttgaggggcgcctatcaaaagagaatttagataactttcgtcgagagctagcagaaggtggtggcctatcgtcctacccgcatccctatttaatgccagagttttggcagtttgcaactgtttcaatgggcctggggcctatgatggccgtttaccaagcacgctttatgagatatatgatagaccggggttttgtagagaatacagggagaaaggtttttgcctttttaggggatggtgaaatggacgaacccgagtcaacaggcgccctgaccctggcatccagagaaaaccttgataaccttatttttgtggtaaactgtaaccttcaaagactagatggtcccgttagaggaaactctaaagtaatacaggagcttgaaggagcctttagaggcgcgggctggaatgtcataaaggttatttggggttctgattgggatgagt

SEQ ID NO: 216708 - DNA, 886 bp, Unknown
  Bacterial polypeptide expressing nucleotide sequence isolated from the Sargasso Sea
gcaatctaccaagctagatatatgaagtatctgatcaacaggggccttattaaagatgaaggaagaaaagttggggcttttttaggagatggtgagatggatgaaccggagtctttaggtgctattggtttagcatcaagagaaaaattagataatttaatttttgtagtcaattgtaatttacaaagattggatggtccagttaggggtaatggaaaaataattcaagaattagaaggaatttttagaggtgctggttggaatgtgattaaagttatttggggatcttattgggattcattattagcaaatgataagtcaggccatcttgttaagataatgaatgaaacagtcgatggagaataccaagcgataaaagcaagagatggtgcttttgttagagaaaaattttttggaaaatatccagagacagaaaatttagtttcaagtttatccgacaaagatatttggagactaaatagaggtggtcatgatccccataaggtttttgctgcatatgataaagcttcaaaaaacattggaagcccaacagttgtaattgctaaaacaataaaaggttatggaatgggtaaaagtggagaaagcgttaacactacacatcaaacaaaaaaattagatattgatgatttaatgtattatagagataggtttgatgttccattgacagatgatcaagtaaaaaatattgaatattataaacctgatactaattcagctgagattaaatatataaaagaaagaagacttcaacttggtggatttattcctgagaggacatcttatgctaaatctataaaagcaccacctaaaaatatttttgataatatgaaagaatctaccggtaaaaaggagatgtctactacaa

SEQ ID NO: 216709 - DNA, 935 bp, Unknown
  Bacterial polypeptide expressing nucleotide sequence isolated from the Sargasso Sea
tgatagaaaaatagaaagaaagataaagtcttttgtgcgttggaacgcaatggcaatggtggtaaaggcaaacaccaacacgcctggaattggagggcacatttctacatatgcatcttcagcaacattgtatgaggttgcttttaaccatttttttaaaggccctgaacacccaagcggtggggacttaatcttttatcaggggcatgggtctccggggcaatacgcaagggcataccttgagggaagactaaccaaagaaaatcttgagagctttagaagagagcttacaccgggtgggctttcttcatatccccacccttatttaatgcctgatttttggcagtttgctacagtttcgatgggtttggggcccattatggcaatttatcaagcaaggtttttaaactatatggtagaccgggaaatgatcaaggcaacaggtagaaaggtttgggcttttcttggtgatggagaaatggatgagccagaatctaaaggtgcacttacacttgcttcaaaggaagacttagacaaccttatatttgtagtaaactgtaatttgcaaagattagatgggcctgttcgtggtaatagtaaagttatacaggagcttgagggtgctttccgcggtgcgggctggaatgttataaaggttatttggggttctgagtgggatgaccttattgataaagacacctcagggaaattacttcaaagaatggaagaagtcgtagatggggagcttttaaagtatgttgttgaaggtggtgcatatttcagagaacactttttcggaaaatacccagaaacccttgatcttgtttcacatataagcgatgaagatcttataaaaatgaaattgggtggccacgaccctataaaaatgtacgcagcttataaagaagcgactgagcacaagggccgcccaactg

SEQ ID NO: 216710 - DNA, 776 bp, Unknown
  Bacterial polypeptide expressing nucleotide sequence isolated from the Sargasso Sea
aatgttagcaatatatcaagcaagatttatgaaatatttaattaataggggtttaataaaagatgaaaaaagaaaagtctgggtgtttttaggagatggtgaaatggatgaacctgaatcacttggtgcaataggtttagctgcaagagaaaatctggataatttaatttttgtaattaattgtaatttgcaaagactcgatggaccagtgagaggtaacggaaaaattattcaggagcttgaaggaatttttagaggagctggttggaatgttataaaagtaatttggggttcttattgggaccaattattagctaatgacaaaaaaggattattagtaaaaagaatgaatgaagctgttgacggagaatatcaggcattcaaagctaatggtggttcatacgttagagaacatttttttggaaaatatcctgagttaaaagaaatggtgtctagttttacagacaaagatatatggaagcttaatagaggaggtcatgatcctcataaagttttcgcagcctatgacgctgcttcaaaaaatgttggatctccaacagtcataattgcaaaaactattaaaggttatggcatgggaaaatctggagaaagcataaatactacacaccaacaaaaaaaacttgatgttaaagatcttctctattaccgagacagatttgatgttccgttaactgataaacaggtagaagaaattcagtattataagcctgataataactctgaggaaataaagtatttaaaagagagaagattag

SEQ ID NO: 216711 - DNA, 840 bp, Unknown
  Bacterial polypeptide expressing nucleotide sequence isolated from the Sargasso Sea
cattaccaacaaaaaatttaaataaagaaaatgataaaaaaaataagactaaaaaaattactaatccccaaaatgatgtacatgactttgatttagaaaaaaatgaaacccaagaaatattaacagttagagagtctataagagacgctttagctgaagaaatgcgagcagatgaaaatgtttttttaatgggagaagaagttgcagaatatcaaggtgcatataaagtctctcaaggtcttttagacgaatttggaagtaaaagagtaattgatacaccaattactgaacatggttttactggtttagctgctggtgctgcttttggaggattaaaacctgtagttgaatttatgactttcaatttttcattacaagcaatggatcaaataattaatacttgtgcaaaaacgctttatatgtcaggtggacaaatgaattgccctattgttttgagaggaccaaatggagcagcctcacaagttgcagcccaacattctcaagatttcgctccctggtttgcatcaatacctgggttaaaagtaattcaacctttttctgcaaatgatgcaaaagggcttttgaaatccgctataagagatccaaatcctgtaatttttttagaaaatgaaatattatacaatgacaagtctgcttcatcagaaataagagatgaattgatccccataggaaaagctaatatcttaattgaaggtacagatgtttcaattataagttacggtataggaataaagcattcacttatggcaatagaacttgctaaagatattaatataagtgtcgagcttatcgatctaagatctttaagacccaattgat

SEQ ID NO: 216712 - DNA, 852 bp, Unknown
  Bacterial polypeptide expressing nucleotide sequence isolated from the Sargasso Sea
agcaattttatatgaagtgggatttaatcatttttttcgaggttccgataaatcattaggagatttaatatattttcagggtcattcatctccaggaatatatgcaagatcttttttagaaggccgattaacctccgaacagcttgataattttagacaagagataaaaggtcagggcttatcttcatatccacatccatggttaatgccggattattggcaatttccaacagtctcaatgggtctagggccaatttttggcatttttcaagctcacgtaatgagatatctagaaaaaagaggtttgattaaatcaattgagaatagaaaagtctgggttttttgtggtgatggagagatggatgagccagaatcgatgggttctataagtttagccggaagagaaaaactcaataaccttgtatttgtagttaattgtaatttacagaggctagacggccctgttagaggaaattctaaaattattactgagctttctaagcagttcagtggagcaggttggaatgttattcatttgatatgggggagaaaatgggatgaattaataaacaatgataaagatggcctattgcaaaaaattatggacgagacagttgatggagaataccaaaattacaaagcaaagggcggcaaatatactagagataacttctttggtaaagatccagaagttcttaaaatgatagattcattaaatgataaagaagtagaagatttaaatagagggggacatgacccaactaaaatctataatgcttatcgcttggcttatgaggaaaaagataagccaacagttattctagctttttacattaagggttatggtattgg

SEQ ID NO: 216713 - DNA, 496 bp, Unknown
  Bacterial polypeptide expressing nucleotide sequence isolated from the Sargasso Sea
gatgtactcttttatgctcaagattagaagatttgaggaaagagctgctcaactttacggaatgggtaaaataggtggtttttgccatttgtatattggccaagaagcagttgttgttggtatattaatgacaatagataaaaatgactcagttgtaactacttacagagatcatggccatatgatcgctaggggattaaatccaaaacgtattatggcagaattgactggtagagaagatggttattccgctggtaagggcggttcaatgcatatgttttcaaaagaaaataatttttacggcgggcatggtattgtaggagcccaagtaccaattggaacgggtatagcattcacgcataaatataatggagaaaaaaatatatgtagaacatatatcggtgatggagcgatgaacaatggacaagtttttgaagcttttaatctagctgctttatggaaacttcccgttttatatattattgaaaacaacaaa

SEQ ID NO: 216714 - DNA, 966 bp, Unknown
  Bacterial polypeptide expressing nucleotide sequence isolated from the Sargasso Sea
gactaaatgaaaagcagttagatagatttagacaagaagtaaaaactggtggactttcatcttatcctcatccttggctaatgccaaacttttggcagtttccaactgtttcaatgggtattggtccaatgttagcaatatatcaagcaagatttatgaaatacctaatcaatagaggattaattaaagatgagggaagaaaagtttgggcttttcttggagatggagaaatggatgaacctgagtcacttggggcaattggtttagcggcgcgtgaaaatttagataatttaatatttgttgttaactgcaacttacaaagattagacggtccagtaagaggaaatggaaaaataattcaagaattagagggtatttttagaggaggtggctggaacgttctaaaagttatttggggatcttattgggactcacttttagcaaatgataagacaggacatttagtaaaaattatgaatgagaccgtagatggtgaatatcaagcatttaaggcaagaaatgggctttatgtgagagaaaagttttttggcaaataccctgaaactacagaattagtttcatcaatgtcagatactgatatttggagacttaatagaggaggccatgatccacacaaagtttatgctgcatatgataaagcggttaatcacaaaggaagccccacagtcataatagctaaaactataaaaggttatggtatgggtaaaagtggtgaaagtgtaaacactactcaccaacaaaagaaattggatgttgatgatttaatgtattacagggataggtttgatgttcctttaacagattctcaagtcaaaaatattgaatattttaaaccagacgaaaactctgaagaaattaaatacttaaaaaaaagaagattagaacttggtggatttattccagagagaacatcatattcaaaaccgattaaagcccccagttaaa

SEQ ID NO: 216715 - DNA, 561 bp, Unknown
  Bacterial polypeptide expressing nucleotide sequence isolated from the Sargasso Sea
gagataaaaatatttgtcgaacttatattggtgatggtgctatgaacaatggtcaagtatttgaagcttttaatttagctgctttatggaaactgcctgttctttatattattgagaataataagtacggtatgggtacatctgttgaaagggctgctgctggctctgatttatataagagaggtgaagcctttggtatcaaaggtgaaattgttgatggtatgaatgtttattcggttattaaagctgcagataaagcaggagagtatgttaggtctggtaaagggccgtatattcttgaagttcaaacttatcgctacagaggtcattcaatgtcagacccagctaaatacagaactaaaactgaattagaagaatataagaattctgatccaattgaagtagttaaaaatgaaattataaagaaaaatattgcttcatataatgaattagaaaaaattggaaaagaaattattgaagaagttaaattagctgcagactttgcattggaaagtaattttcctgaaaataaagaattatttacagacgtttatttataat

SEQ ID NO: 216716 - DNA, 817 bp, Unknown
  Bacterial polypeptide expressing nucleotide sequence isolated from the Sargasso Sea
ttatcttcgtacccacatcctaaattaatgcctgaattctggcagttcccaacagtatctatgggcttaggtcccattacgtctatctatcaggcgcgtttcctgaagtatttagatggtcgtggtttaaaagataccagccaacaacgcgtctatgccttcttaggtgacggcgagatggacgagccggaaagccgtggctctttatcttttgctgcccgtgaaaagctggataacctgtgtttcctggtcaactgtaacctgcaacgtttagatggtcctgtgatgggcaatggtaaaatcatccaggaactggaaggtttattccgtggcgccggctggaacgtgattaaagtggtatggggcagtggctgggacaagctgttggccaaagacaccacaggcaagttactgcagctgatgaacgaaactgtagacggtgactaccagacctacaaagctaaagacggcgcttatgtgcgtcagcatttcttcggacgttaccctgaaactgcagctttagtggctgatatgacagacgaagaaattttcgcgttaaaacgtggtggtcatgagccatccaagttatacgcagcatttaaatctgcgcaggaaaccaaaggtcgcccaactgtcattctggccaaaaccatcaaaggttatggcatgggtgaagcggctgaaggcaaaaacattgcgcaccaggtcaagaaaatggatatgactcatgtgctgcaaatccgtaagcgcctgagcctggaagattacatcagcgaagacgatgtacaaagcctgccttacatccagttgcctgaag

SEQ ID NO: 216717 - DNA, 948 bp, Unknown
  Bacterial polypeptide expressing nucleotide sequence isolated from the Sargasso Sea
ttatgccaatttttggcagttcccaaccgtatcaatgggattaggcccaatgttagcaatctaccaagctagatatatgaagtatttaattaatagaggtttaataaaagacgaaggaagaaaagtatgggcttttttaggtgatggtgaaatggatgagccagagtcattaggtgctattggtttagctgctagagaaaaattagataatttgatttttgtcattaattgtaacttacaaagattagatggtccagttagaggaaatggaaaaataattcaagagctagagggaatatttagaggtgctggttggaacgtgatcaaagtaatatgggggtcatattgggatcctttgttaacaaacgataagacaggacatcttgtaaaaaccatgaacgagacagtcgatggagaataccaggcaatgaaagctagagacggtgcatatgtaagagaaaaatttttcgggaaatatcctgaaacaaaagaattggtctcaagtttatcagacaaggatatttggaggttaaatagagggggtcatgatcctcataaagtattttcagcatatgataaagcatcaaaaaatattgggagcccaacagtagttattgccaaaactattaaaggctacggaatggggaaaagtggagaaagcgttaacacaactcatcaaacaaaaaaattagatatagatgatctaatgtattatagagataggtttgatgttcctctaactgatgatcaagtaagaaatattgaatattataaacctgatcaaaattctgctgaaataaaatatattaaagaaagaagacttcagctcggaggatttataccagagagaacaacttatgctaaacctataaaaactcctcccaaaaatatttttgataacatgaaagagtctacaggcaagaaagaaatgtctacaacaatggcact

SEQ ID NO: 216718 - DNA, 866 bp, Unknown
  Bacterial polypeptide expressing nucleotide sequence isolated from the Sargasso Sea
ttttttaataaaagaattaataaataaagcttatcgtgaaggtgcaaatattccttatacacaaaataccccgtacataaatacaattcctcctgaagcagaagtaaagtctagtggagaccaaaatatagaaagaagaataagatcattaattagatggaattcagctgccatggttgttagagcaaataaaaagtttcctgagcttggagggcacataggtacttttgcatctgcagcaacattgtacgatgttggaatgaaccatttttggagagcaaaaaataatagatttggtggagatttgatttatttccaaggtcatagtgcacctggaatgtatgcaagagcatttcttgaaggaagattaaacgagaaacaattagatagttttagacaagaggtaaaacctggtggactttcatcatatccacatccatggttaatgccaaaattttggcaatttccaactgtctctatgggattaggccctatgcttgcaatataccaggcaagatacatgaaatatttaattaatagaggactgataaaagatgagggtaggaaagtatgggcttttttaggagatggagaaatggatgaaccagagtcaatgggtgcaattggtcttgctgcgagagaaaatttggataatttaatatttgttattaattgcaatctccaaagacttgacggaccagttagaggtaatggaaaaattatccaagagttagagggtagttttagaggatcaggttggaatgtgataaaagtaatttggggttcatattgggactcattgattgcaaatgacagaactggccatttagtaaaaattatgaatgaaacagttgatgggagatatc

SEQ ID NO: 216719 - DNA, 568 bp, Unknown
  Bacterial polypeptide expressing nucleotide sequence isolated from the Sargasso Sea
atataatggtgataaaaatatttgtcgcacttacattggtgatggcgctatgaataatggtcaagtttttgaagcttttaatttagcagctttatgggaacttcctgtcttgtacataatagaaaataataaatatggtatgggtacagcagttggtagagctgctgcaggcactcatttatataaaagaggagaagcttttggaattaaaggcgagatagttgatggtatgaatgtatattcagttatcaaagcagccgcaaaagcaggagagtatgtaagatcaggcaaaggtccttatatattagaagttcaaacatatcgctatagaggtcactcaatgtctgatcctgcaaaatataggacaaaagatgaattagaagaatataaaaattcagaccctatagagattgtaagagaagaaatattaaaaaagaaactcgcaactaaaaatgatttggataatttaaataaagaaattattgaagagataaaatcagcagttgattttgctcttgaaagtaaatttccacctagtgaagaattatatacagatgtttatatttaa

SEQ ID NO: 216720 - DNA, 817 bp, Unknown
  Bacterial polypeptide expressing nucleotide sequence isolated from the Sargasso Sea
agatggctttagacaagaagttggaaaagatggattgtcctcttatcctcatccatggttaatgccaaatttctggcaattcccgaccgtatctatgggacttggaccaataatgggtatctatcaagctaggtttttaaaatatttaattaatagaggattaattaaagatgaagggagaaaaatttgggtttttctaggtgatggtgaaatggatgaaccagagtcattaggtgcgattggattagcagcgagagaaaagttagataatttaatttttgtgattaattgtaatctacaaagacttgacggtcctgttagagggaatggtaaaattattcaagaacttgagggtagtttcagagggacaggatggaatgtgattaaagtaatttggggttcttattgggatcaacttttagcaaaagataaaagcgggcttttaattaaaagaatgaatgagtgtgtagatggtgaatatcaagcttttaaggcaaaaggtggtaattatgttagagaaaaattttttggtaaatacccggagttaaaagaattggtatctactttgacagataaagacatatggaaattaaataggggtggtcatgatcctcataaagtttacgcagcgtacgatgctgctatgaaaaataaaggttcgccaacagtcattattgctaaaacaattaaagggtacggaatgggtaaatctggtgaaagtataaataccactcatcaacagaaaaaaatggatgaggaagatttgttatactatagagacagatttggtgttcctctgacggacaaaacaagttaa

SEQ ID NO: 216721 - DNA, 703 bp, Unknown
  Bacterial polypeptide expressing nucleotide sequence isolated from the Sargasso Sea
ctgccctttaacacatccacgccatatataaatacgattttaccaagccaggagtcaggttatccaggcaacagagagattgagcgaaaaataaaatctattgttaggtggaatgctatggcgatggttacaaaagcaaataaaaacactccgggtattggggggcatatttcaacctatgcatcagcggcaactatatatgaggttgctttcaatcactttttaaaagggccaaatcaccccagtgggcaagatcttgttttttatcagggacatgcctcgccaggaatgtattcaagagcgtttttagaagggaggctttcagaaaaaaacctaaacaattttagaagggaactatctaaagaagggggcttgtcttcttatccccacccctatctaatgcctgacttttggcagtttgcaacagtttcaatgggccttggcccactaatggcaatctaccaagcgaggtttatgagatatatgatagaccgagggtttatgaaagatacaggcagaaaggtttttgcatttcttggtgatggagaaatggacgaaccagaatcaaaaggggcgctaacgctggcctccagagagaatctagacaatttggtttttgttgttaattgtaatctccaaagattggacgggccggttcgtggaaattcaaaaatcattcaagagcttgaggctgcctttagag

SEQ ID NO: 216722 - DNA, 835 bp, Unknown
  Bacterial polypeptide expressing nucleotide sequence isolated from the Sargasso Sea
ggattagttctcccagataccagaacaactccttacataaacactattccccctgagatagaagtaaaatctccaggtgatcaaaacttagaaaaaaaaataagagcttatgttaggtggaacgcagcagctatggttgtaaaagctaataaaaaaagttctgagctaggaggtcatattggaacatttgcctctgctgcaactttatatgatgttgggatgaatcatttctggagagctaaaaataataaatttggtggagatcttatatattttcaaggtcactctgctccaggtatgtatgctagagcatttttagaaggaagaatgacaaccaaacaacttgatggttttagacaggaagttgctaaaggaggtttgtcttcttatcctcatccttggttaatgccaaacttttggcagttcccaaccgtctccatgggcttagggccaattatggccatctatcaggcacgttttttaaaatatctaattaatagaggtttagtcaaagatgaaggaagaaaaatttgggttttccttggagacggtgaaatggatgaaccagagtctttaggtgcaataggtttagctgctagagaaaaattagataatttaatttttgttatcaattgtaatcttcaaagattggacggtcctgttcgaggtaatagtaaaattattcaagaattagagggaagctttaggggaacaggttggaatgtaattaaagttatatgggggtcttattgggatcaattattggcaaaagataaaacaggtatacttgtaaaaagaatgaacgagtgtgtcgatggtgagtatcaagctttaa

SEQ ID NO: 216723 - DNA, 916 bp, Unknown
  Bacterial polypeptide expressing nucleotide sequence isolated from the Sargasso Sea
tcccacagtctcaatgggtttaggaccaatgttagctatttatcaagcaagatatatgaaatatttaattaacaggggtcttatcaaagatgagggacgaaaagtttgggcttttttaggagatggggaaatggatgaaccagagtccttaggagcaattggtttagcagctagagaaaaattagataatcttatatttgtgatcaattgtaatctccaaagattggatggacctgtgagaggtaatggaaaaataatacaagaattagagggtattttcagaggggctggatggaatgttattaaagtaatttggggttcttattgggatccgttattggctaacgataaaactggtcacctaattaaagttatgaatgaaactgtcgatggtgaatatcaagcaatgaaagcaagagatggagcttatgtgcgagataagttttttggtaaatatcctgaaactaaagagataatctcaagcctttcagacaaagatatatggagattgaatagaggtggacatgatccccacaaagtttttgcagcttatgataaagcctcaaaaaatatcggaagcccaacagttgtcattgccaaaactataaaggggtatggaatgggcaaaagtggtgagagtgtaaatactacacatcaaactaaaaaattagatatagacgatttgatgtattacagagacaggtttgatgttcctcttactgataaacaggtacaaaatattgaatattataaaccggaccagaactcacctgagataaaatatattaaagaaagaagacttcaattaggaggatttatcccagagagaactacttatgcaaaacccattaaagccccacccaaaaacattttcgacaatatgaaagaatcaacaggaaaaaagaaatgtctacta

SEQ ID NO: 216724 - DNA, 945 bp, Unknown
  Bacterial polypeptide expressing nucleotide sequence isolated from the Sargasso Sea
ccttattctgccgaaaccgcctatatcacacccattccccctcaaaatgaagcgtacactcccggcgatccagcattagaggtaaggataagatctattagccgttggaatgccttagccatggtggttcaagctaataggaagaatagcgaattaggtgggcacatagccagctacgctagtgctgcgacactatacgatgttggatacaaccatttttggcgtgcaccaaatgaatctcacgagggcgatcttgttttctttcaaggtcactcagctccgggtgtctacgctagagcatatcttctaggactaattgatgagagtgaattaagtaattttagacaagaagtgggggaaaatggtctatcttcttatccacacccctggttaatgcctaacttttggcaatttccaactgtctctatggggcttggtccaatcatggcaatttaccaggcacgtttcatgcgctacttagcgaatcgaaaattatccaatggtcatgacagaaaagtctgggcgtttatgggtgatggcgaaatggatgaacctgaggcgttcggagctgccgctttagcctcccgagaaaaattagacaaccttattttcgtcgtaaactgtaaccttcaacgcttagacggcccagtgagaggaaacggaaaaataatacaagagttagaatccgacttcagaggggctggctggaatgtcatcaaagtcatttggggatctgcttgggatcctcttcttgcaaaagataaggatcaaaaacttgtttctaggatggaaatggctgtagacggagagtatcaggcctacaaggctaatgacggtgcttttgtgagagaacacttttttggcaaggatccgacgctgaaggctatggttgcaaatatgagcgacgaggacatttggcggctcaatcgcgggggacacgatcct

SEQ ID NO: 216725 - DNA, 271 bp, Unknown
  Bacterial polypeptide expressing nucleotide sequence isolated from the Sargasso Sea
atgagagaaattcaatttagagaagctatttgtgaggctatgtctgaagaaatgagattagatgaaaccatctatctcatgggcgaggaagttgctgaatataatggagcttataaagcttctaaaggcatgcttgatgagtttggtgaaaaacgtgtaattgatactccaatatctgaacttggttttgctggaataggagttggatcaacaatgactggaaacaggcctatagttgaatttatgacttttaatttcgccattagttggt

SEQ ID NO: 216726 - DNA, 914 bp, Unknown
  Bacterial polypeptide expressing nucleotide sequence isolated from the Sargasso Sea
atccgttagaactaaagaatggatagaatctttaaatgcagttgttgaaaatatgggaaatgagagagctcattttcttttaagacaattgattgatgagtcttatcgaaaaggatcaagaattccatttattcaaaatacgccttacataaacactattccacctaatgaagaagaaaaatcttcaggagatcaaaatattgagagaaaaattagatctttaattagatggaatgcagcagcaatggtggttagggcaaataaaaaatttcctgaactaggtggtcatataggtacatttgcatctgcagctactttgtacgatgtaggaatgaatcatttttggagagcaaaaaatcatcaatttggtggagatttaatttattttcaaggccattctgctccaggagtatattcaagagctttcttggaaggcagacttacaaaagagcagttagacaatttcagacaagaagtaggtcctaatggcttatcttcatatcctcatccatggttaatgcataaattctggcagtttccaactgtatcaatgggacttggcccaatgttagcaatatatcaggcaaggtttatgaaatacttaattaatagaggtttaataaaagatgaaaacagaaaagtttgggcatttcttggggatggagaaatggacgagccagagtctttaggagctattgctttagcatcaagagaaaatttagataatttaatatttgttattaattgtaatttgcagagattagatggtcctgtaagagggaatggaaaaataattcaagaattagagggaagttttcgaggagctggttggaacgtcatcaaagttatctgggggtcttattgggatacacttttagctaatgataaatcaggattgcttatcaaaagaatga

SEQ ID NO: 216727 - DNA, 901 bp, Unknown
  Bacterial polypeptide expressing nucleotide sequence isolated from the Sargasso Sea
ggtgatttgatctattttcaaggtcatagctcaccaggaacgtacgctagagcttatttagaaggtaggcttgatgaaaaacaactaaataattttagacaagaagttgatggaaaaggtctttcttcttatcctcatccttggcttatgccaaaattttggcaatttccgatagtttcaatgggccttggatcaataatgtcaatataccaagcaagatttacaaaatatttaattaacagaggtttgctgaaggatcaggatagaaaaatttggactttattgggtgatggagaaatggacgaaccagaatcactaggagcaattggtttggctgcaagagaaaaattagacaatttagtatttgttataaattgtaatctacagagattagatggcccagttagaggcaacggaaaaattattcaggagctggaaggaatttttagaggagcaggatggaatgtaataaaagttatatggggttcgtactgggatactttactagcaaaagataaaagtggtttgctaataaagaggatgaacgaatgtgttgatggagaatatcaagcctttaaagccaaaggaggttcttatgttagagaaaagttttttggcaaataccctcaattaaaagatttagtttctagtatgacagatggagacatatggaagcttaatcgaggggggcatgatcctcataaagtgtacgcagcctatgatgctgccatgaaaacaaaaggacaaccaactgtaattctagctaagacaattaaaggttatggtatgggtaaatctggagaaagcatcaacacaacacaccaacaaaaaaaattgggagaagaggacttactttactatagagatcgttttgatattccacttacagacaaacaagtta

SEQ ID NO: 216728 - DNA, 944 bp, Unknown
  Bacterial polypeptide expressing nucleotide sequence isolated from the Sargasso Sea
tgaaaaagcattaaaaaaaactgaggaacaaaaacttcaaattcaaaaaaaagaaaaacctgaaataattcaagtagttaaagatggcgatttagatccgcttgagactagtgaatggattgaatctttatcagcagtgattgaaaaagatggaaatcaaagagcacattatttaattaaagaattaattaataaagcttatatggagggtgctaatattccttacactcaaaacactccatatataaatacaataccagtaagtgaagaaaaaaaatcgaatggtgaccaaaatatagaaagaagaattagatcgctaatcagatggaatgcagcagctatggttgttagagcaaataaaaagtttcctgaacttggaggccatattggaacttttgcatctgctgcaaccttatatgatgttggaatgaatcatttctggagagcaaaaaacaataagtttggaggagatctgatttattttcaaggacatagcgctcctggaatgtattcaagagcatttcttgaaggaagactaaatgaaaaacaattagatagttttagacaagaagttagtcctggtggtttatcttcttatccacatccttggttaatgccaaatttttggcaattcccaactgtatcaatgggtctaggacccatgttagctatctaccaagcaagatatatgaaatatctaattaatagaggtttgattaaggatgagggcagaaaagtttgggcttttttaggagacggagaaatggatgaacctgagtcactaggtgctattggtctagcagcaagagaaaagttagataatttaatttttgtagttaattgtaatttgcaaagattggatggacctgttcgtggcaatggtaaaattatacaggagttagaaggaatttttagaggcgctggatggaatgtgataaagtaat

SEQ ID NO: 216729 - DNA, 379 bp, Unknown
  Bacterial polypeptide expressing nucleotide sequence isolated from the Sargasso Sea
aatgtactcttttatgctcaaaattaggagatttgaggaaagagcatctcaactttatggaatgggtaaaatagggggtttttgtcatttatatattggacaagaagctgttgttgttggtgtattaatgacaattgataagaatgactcagttgtaactacttatagagatcatggacatatgattgctagaggacttgatcctaaacgaattatggcagagttgactggcagagaagatggctattctgctggtaagggtggttcaatgcatatgttctctaaagaaaataatttttatggtggtcatggtattgtaggagctcaagtaccaataggaaccggtatagcattcacgcataaatataatggagaaaaa

SEQ ID NO: 216730 - DNA, 946 bp, Unknown
  Bacterial polypeptide expressing nucleotide sequence isolated from the Sargasso Sea
catttcattcgatggaacagtctcttaatggtacttaaagctaacaaagatgatgatttaggaggtcatatatctacctactcctcagctgcaacactttatgaagttggctttaatcacttttttcgaggctcagataaaaagctaggtgatcttatatattttcaaggccatagttctccaggaatctatgctaggtcttttttagaaggaagacttaaaaagggtcaaatagaaaattttagaaaagaaattaagggaatgggtctttcttcctatccacatccttggctaatgccagattattggcaatttccaactgtttctatggggcttggacctatctttggtatctatcaagcacatatcatgagatatcttgaaaagagaggactcattgaagaaattgaagatagaaaagtttgggtttattgcggagatggagaaatggatgaacccgaatcaatgggagctattagcctagctggaagagaaaatcttaacaatttagtttttgtaattaattgcaatttacaaagattagacggtcctgtaagaggaaattcaaaaattgttactgagctagcaaaacagtttaaaggcgctggatggaatgtagtaaatttgatttggggaaggcactgggatgatctaattaacaatgatcaaaacggtttgttacaaaaaattatggatgagactgtagatggggaatatcagaattttaaagctaaaggtggtaaatatactagagaaaattttttcgggaaaaatcctgaagttctgaaaatgattgaaaaattctctgatgatgaagttgagaatttaaatcgtggaggacatgatccaattaaggtttataacgcttatagactcgcatatgaaaataaaactaaaccgactgttattttggcatttactattaaaggttatggaattgggtcaa

SEQ ID NO: 216731 - DNA, 943 bp, Unknown
  Bacterial polypeptide expressing nucleotide sequence isolated from the Sargasso Sea
tttagtaaggatgaaaggagaaaaaatttgggtatttttaggggatggtgaaatggatgaaccagagtcattaggagcaattggtttagctgcaagagaaaaattagataatttaatttttgtaataaattgtaatctacaaagacttgatggtcctgttagaggtaatggaaaaattatccaagaacttgaaggaagttttagaggaactggatggaatgttattaaggttatatggggctcttattgggatcaacttttagctaaagacaaaactggtttattagtaaaaagaatgaatgaatgtgttgacggtgaatatcaagcgtttaaagctaaaggtggtaaatatgtaagagaaaaattttttggaaagtataacgaattaaaagaacttgtttcaactatgactgataaagatatctggaaattaaatagaggtggacatgatcctcacaaagtttatgcagcatatcactctgctatgcaacacaaaggttctcctaccgtaattttagctaaaactataaagggttatgggatgggtaaatcaggtgaaagtattaatactactcaccaacaaaaaaagctcgatgaagaagatttgctttattatagagataggtttggtgttccattaactgataaacaagttaaaaatatagagtattataaaccgagtgaaaattcagaagaaataaaatatttaaaagataaaagaattaaacttggaggttttattccagaaagatcttcatttgccaaagctattaagacgccaccaaaggatatttttgaaccctttatgaagtcaactggtagtaaagaaatgtctacaactatggctttggtaagaatgctaacagctcttttacgagataaaaatttagcaccaagattagtgccaataatccctgatgaagcaagaactttggaatggagg

SEQ ID NO: 216732 - DNA, 868 bp, Unknown
  Bacterial polypeptide expressing nucleotide sequence isolated from the Sargasso Sea
tcagtaaaggaattagatagatttagacaagaagtaaaacctggaggactttcttcttaccctcatccatggttaatgccaaaattctggcagttcccaactgtttcaatgggactaggcccaattatgtcaatctatcaagcaaggtttaataaatatcttataaacagaggattattaaaagatgaaggtagaaaaatttggtgcttcttgggagatggagaaacagatgaaccagagtcattaggcgccataggtttagcagcaagagaaaaattagataatcttatatttgttattaattgcaatcttcaaagattggatggtccagttagaggcaatggaaaaattattcaagaactcgaaggaatattcagaggagctggctggaatgttttaaaagtaatttggggttcttattgggatcaattattagctaaagataaaacaggtttattgattaaaagaatgggagaagcagttgatggagagtatcaagcttttaaggcgaggggaggtaattatgtgagagaaaaattttttggaaaatacccagaattgcttgatttagtttctcaaatgactgatagagatatttggaaattaaatagaggaggacacgatccacataaagtttttgctgcttataatgtagcaatgaaacacaaaggtagccctacagttattttagctaaaacaattaaaggttatggaatgggtaaatctggagaaagcattaatacaacacatcaacaaaaaaaattaggagaagaagatttgctatattatagagatagatttgatgttcctttgacagatgaacaggttaaaaatattgaatattacaaaccaccagaaaattcacctg

SEQ ID NO: 216733 - DNA, 868 bp, Unknown
  Bacterial polypeptide expressing nucleotide sequence isolated from the Sargasso Sea
agctaacaaaaaatttccagaattaggtggacacataggaacctttgcttctgctgcaactttatatgatgttggaatgaatcatttttggagagcaaaaaataataaatttggaggtgatctggtatattttcaaggacacagcgcacctggaatgtatgccagggcatttctagaaggcagattaagcgagaaacaattagatagctttagacaagaggtaaaacctggaggattatcttcataccctcatccgtggctaatgccaaatttttggcaatttccaactgtttcgatggggttaggaccaatgcttgcgatttatcaagcaagatacatgaaatatttaatcaatagaggattgattaaagatgaaggacgaaaagtctgggcctttttaggagatggtgaaatggatgaaccagaatccatgggtgcaattggattagcggccagagaaaaattagataatttaatttttgtaattaactgtaatctccaaagacttgatggccctgtaagaggaaatggaaaaattattcaagaacttgaaggtagctttagaggtgctggatggaatgtaataaaagttatttggggttcgtactgggactcattgttagctaatgacaaaactggtcaattagtaaaaattatgaatgaaacagtagatggtgaataccaagctatgaaagcaagagatggcgcatatgtgcgagaaaagttttttggaaaaaatccagatactttggagatggtttcatctatgtcagataaagatatttggagattaaatcggggaggacacgatccccataaggtatatgcagcttatgataaagcaattaaaaaccaagggattcccaac

SEQ ID NO: 216734 - DNA, 460 bp, Unknown
  Bacterial polypeptide expressing nucleotide sequence isolated from the Sargasso Sea
atggcaaaggcaaagacagcaacaaaaaaggattctttctctaaagaaacctacatgaattggttcgagagcatgctgctcatgagaagattcgaagagaaagccggccaattatatggccagcaaaaaattcgaggcttctgccatctgtacatcggacaggaagcatgtatggccggggcagtttcagctttgaagaagggcgacaaatacatcactgcctatcgtgatcacgcacatcctttggcactagggtcagacccgaagaaggtaatggccgaactctacggcaaggaaacagggatatcgagaggaaaaggcggatccatgcacatgttcgacaaggaaaaccatttcttcggggggcacggaatcgtaggaggccaaatcccaatgggtgcaggcattgcatttgccgaaaaatacaacgagacgggcttcctatgtatgtgctccatgg

SEQ ID NO: 216735 - DNA, 439 bp, Unknown
  Bacterial polypeptide expressing nucleotide sequence isolated from the Sargasso Sea
atgctattaattcgtagatttgaagaaaaagcaggtcaattgtatggaatgggttctattggaggattttgtcacttatacattggtcaagaagccgtggttgtcggtatgcaatctgtttctaaagaaggagatagtgttataacctcttatagagatcatgggcatatgttagcctgtgggatggatcctaaaggagttatggcagaacttacaggcagagaagatggctactccaagggtaaaggtggttccatgcacatgtttagtaaagaaaaaaatttttatggtggacatggcattgttggggctcaagttccaattggcgtaggattagctttctcacataaatacaaaaatgatggttttatttgtatgacttatttaggcgatggagcagttaatcaaggtcaagtttatgaaagttttaacatgtctg

SEQ ID NO: 216736 - DNA, 869 bp, Unknown
  Bacterial polypeptide expressing nucleotide sequence isolated from the Sargasso Sea
tggaatcaaaatccgctctatcatccgctggaacgcggcaatgatggtgatgcgtgccaaccgtgactcttcagaactcggtggccatattgccagttttgcttcttctgccctgctttatgacataggtttcaatcacttttggcaagctcctggaccagatcatggtggagacctagtctacatccagggacattcggctcctgggatctatgcaagagcttttctcgaagggcgaattacagaagaacaaatgaatcacttccggcaggaatctactggaaaaggagtttcatcatatccccacccctggctgatgccggaattctggcagtttccaacggtctcgatgggtttgggtccgatcatggcaatttaccaggcccgctttctaaaataccttcacaaccgtgaattattggataccgaaccaaggaaagtctggtgcttccttggggacggagaaaccgatgagcctgaatcaatgggtgccatacatctcgcagcccgggaaaaactggacaatcttatttttgtcattaactgcaacctccagcgactggacggcccagtccgaggaaacggtaaaatcatccaggaactggagggagagttcaggggcgcaggttggaatgtgatcaaagtactatggggttcctactgggatccgcttctggccaaagacgatcaagggctcttgcggaagagaatggaagaagccatcgacggagaatatcaggcctttaaagccaagggtggtgcttatacacgcacccatttttttggcaagtatccggaactgctggaaatggtctccaatatgagtgatgaggatatctggagactgaatcgcggaggccatgatccac

SEQ ID NO: 216737 - DNA, 860 bp, Unknown
  Bacterial polypeptide expressing nucleotide sequence isolated from the Sargasso Sea
agaaaaaaaacaatctacaattcaagttattaatggttctgatatcgatccacttgaaacgcaagattggttggagtctttatctgcagtaatttccaaagatggaaaccacagggcccattttttaataaaagaattaattaataaagcttatcgtgaaggagcaaatattccttatactcaaaatacaccatacattaatacaatacctcctgaggctgaagtaaagtctagtggtgatcaaaatattgaaagaagaattagatcgttaataagatggaatgctgcggcaatggtagttcgagcaaataaaaaatatcctgagcttggtggacacattggtacatttgcctctgctgcaacattatatgatgttgggatgaatcatttttggagagcaaaaaataataaatttggtggagatttaatttattttcaaggacatagtgctccaggaatgtatgcaagagcattcttagaaggcagattaagtgagaaacaattagatagttttagacaagaggtaaagcctggaggtttatcatcatatccacacccttggttaatgccaaaattttggcaatttcccacagtatctatggggttaggtcccatgcttgccatatatcaagctaggtacatgaaatatttaatcaatagaggtttgattaaagatgaaggaagaaaagtgtgggcttttttaggcgatggggagatggatgagcctgagtcaatgggagctattggattagctgctagagaaaatttagataatttaatatttgttataaattgcaatcttcaaagattagatggtccagttagaggtaatggaaaaattattcaagagcttgaaggaa

SEQ ID NO: 216738 - DNA, 949 bp, Unknown
  Bacterial polypeptide expressing nucleotide sequence isolated from the Sargasso Sea
tgcaccaggtatgtacgcaagagcttttttggaaggacgactctctgcaaaacaattagatggatttagacaagaggttggtaaagatggtctatcatcttatcctcacccttggttaatgcccgacttttggcaatttccaacagtgtcgatgggtcttggtcctatcatggcaatttatcaagctcggttcttaaaatatcttatcaatagaggtttagtcaaagatgagggtagaaaaatttgggtattcttaggagatggagaaatggatgagccggagtctatgggagcaatcggtttggctgcaagagaaaaattagataatttaatatttgtaattaattgtaaccttcaaagacttgatggaccagtaaggggtaatggaaaaattattcaagagcttgaaggaagttttagaggaacaggttggaatgtgatcaaagttatttggggatcttattgggataaactattaatgaaagataagtctggccttctggtgaaaagaatgaatgaatgtgttgatggagagtaccaggcttttaaagcgaaggatggtttatatgttcgggaaaaattctttggcaagtatcctgaactaaaagaaatggtatctactatgacagacaaagacatttggagactaaatagagggggtcatgatccacataaagtttatgctgcctaccattcggcaatgcagcacactggttctccaactgttattcttgctaaaaccattaaaggttacggtatgggaaaatctggtgaaagtattaatacaacccaccagcaaaaaaaattagatgaggaggatttactttattacagagatcggttcggtgtgccgctcactgataaacaggtaaaaaatattgagtattacaaaccagatgaaaactctgaagaaattaaatatcttaaaaatcaaagaattaaggcttgg

SEQ ID NO: 216739 - DNA, 631 bp, Unknown
  Bacterial polypeptide expressing nucleotide sequence isolated from the Sargasso Sea
atgcttttgattcgtagattcgaagagaaagccggacaactttatggaatgggtaaaattggtggattttgtcatttgtatattggacaagaagctgttgttgtgggggtagattcagtaaaaaaaaaaggtgaccaagtaataacttcatatagagatcatgggcatatgttgtcttgtggaatggatcctaagggagttatggcggaattaacaggcaaaaaaactggatattctaaaggtaagggcggatctatgcatatgtttagcaagtctaaagatttctatggtggacatggtatagttggtgctcaagttccaattggtgctggtttagccttttcaaataaatacaaaaaaaataaatctgtatgttttacctattttggagatggtgcggctaaccaggggcagatatatgaaacttttaatatggcttctctttggaaattaccagttgtttttataatagagaataatcagtatgctatgggtacttcaattgatagagcatcatcaactcttaaactcttttcaagaggccaagcctttaatattcctggccaattagtagacggaatggacgttttaaaagtaagtaaagcaacagaattagcagcaaaaaatgtag

SEQ ID NO: 216740 - DNA, 893 bp, Unknown
  Bacterial polypeptide expressing nucleotide sequence isolated from the Sargasso Sea
cttggctaatgccaacttttggcaatttccaacagtctctatgggcttaggtccaatgttagcgatttatcaggcaagatatatgaaatatttgattaatagaggtttaataaaagatgaaggaagaaaagtttgggcatttcttggagatggcgaaatggatgagccagagtctttgggtgcaattggtttagcatcgagagaaaaattagataatctaatttttgttgtgaattgtaatctccaaagacttgatggtccagttagaggaaatggtaaaataattcaggagttagagggtatattcaggggcgctggatggaacgttattaaagtaatttggggatcttattgggatcctttattggctaatgataaaaccggtcatttaattaaagctatgaatgaaactgtcgatggtgaataccaagcaatgaaagcaagagatggagcctatgtcagagaaaagttttttggcaaatatcctgaaactaaagaattagtttcaagcctctcagataaagatatatggagattaaatagaggtggacacgatcctcataaagtttttgcagcttatgataaagcttcaaaaaatattggaagtccgacagttgtgattgccaagactataaagggatatggaatgggtaaaagtggtgaaagtgtaaatacaacgcatcaaactaaaaaattagatatagacgatttgatgtattacagagacaggtttgatgttcctctaactgataaacaggtacaaaacattgaatattataagccagaccaaaactcacctgaattaaagtatattaaagaaagaagacttcaattggggggatttatcccagagagaactactttttgcaaaccaattaaaactcctccaaaaa

SEQ ID NO: 216741 - DNA, 934 bp, Unknown
  Bacterial polypeptide expressing nucleotide sequence isolated from the Sargasso Sea
tcagaaagagctcattttttgataaaacaattaattgatcaatcatacaaagctggatcaaaaattcctcatacccaaactactccctatgtaaatactatacctcctgatgaagagaaaagatctccaggagatcaaaatatagaacgaaagttaagatctttaataaggtggaatgctgcagcaatggtagtaagagcaaataaaaaatatcctgagcttggtggtcatataggaacatttgcatctgctgcaacattatatgatgtaggaatgaatcatttttggagagcaaaaaataataagttcggaggtgatctagtttattttcaaggtcatagtgcacctggtatgtatgcaagagcttttcttgagggaagattgaatgaaaaacaactagatagatttagacaagaggtaaaaacaggtggtctttcttcgtacccccatccatggctaatgcctaatttttggcagttcccaactgtttcaatgggtattggtccaatgttagcaatatatcaagcaagatttatgaaatatcttatcaatagaggattaattaaagacgaaggaagaaaagtctgggcatttcttggtgatggagaaatggatgagccagagtctcttggtgcaatagggttagcagctcgagaaaatttagataatttaatatttgttgttaactgcaatttacaaagattagatggtccagttagaggaaatggaaaaataattcaagaattagagggaatttttagaggcgcagggtggaatgttttaaaagtcatttggggttcttattgggatactcttttagcaaatgataagacaggacatttagtaaaaattatgaatgagaccgtggatggtgaatatcaggcttttaaagcaagaaatggactttatgtcagagagaagttttttggtaaat

SEQ ID NO: 216742 - DNA, 909 bp, Unknown
  Bacterial polypeptide expressing nucleotide sequence isolated from the Sargasso Sea
ggtgcaatattccttaccgcaaaacacaccctatataaatacaattccagtaaatgaagagaaaaaatcaaacggtgatcaaaatattgagagaagaattcggtcattgataagatggaattccgcagcaatggttgttcgcgcgaataaaaaatttcctgaacttggaggacatattggaacatttgcatctgcagctacgctttatgatgtaggaatgaatcatttttggagagcaaaaaataataaatttgggggagacttaatttattttcaaggacatagcgctccaggtatgtacgctagagcatttcttgagggaagacttaatgaaaaacaattagatagttttagacaagaagttaatccaggaggcttatcgtcttatccacatccttggttgatgccaaacttttggcaatttcctacagtctcaatgggtctaggaccaatgttagctatctatcaagcaagatatatgaaatatttgattaacagaggtctcattaaagatgaaggacggaaagtatgggcttttttaggagacggtgagatggatgaaccagagtctttaggagcaattggtttagcagctagagaaaaattagataatctaatattcgtgatcaattgcaacctccaaagattggatgggcctgtaaggggtaatggaaaaatcatacaagaattagagggtatttttagaggagctggatggaatgttatcaaagtaatttggggctcttattgggatccgttgttggctaacgataaaactggacatttaattaaagttatgaatgaaactgtcgatggtgaatatcaagcgatgaaagcaagagatggagcttatgtacgagagaagttttttggtaagtattccgaaactaaagaattaatctcaagccc

SEQ ID NO: 216743 - DNA, 811 bp, Unknown
  Bacterial polypeptide expressing nucleotide sequence isolated from the Sargasso Sea
aatggttagtagtaacgacgatattgatcctgtcgaaactaaagagtggttagattccttaagtgcagttctacaaaatgatggttctgaaagagctcattttttaattaaacaattaattgatcaatcttacaaagctggatctaaaattcctcatactcaaactactccatatgtaaatactataccacctgaagaggaaaaaagatcacctggagatcaaaacatagaacgtaagttaagatcattaattagatggaatgctgctgctatggtagtaagagcaaataaaaaatatcctgaacttggtggtcatataggaacatttgcatcagctgcaacattgtatgatgttggtatgaatcatttttggcgagcaaaaaataataaattcggaggtgatctagtatattttcaaggtcacagtgcaccaggaatgtatgcaagagcttttcttgagggaagactaaatgaaaagcagttagatagatttagacaagaagttcaaactggtggactttcatcttatcctcatccttggctaatgccaaatttttggcagtttccaacagtttcaatgggtattggtccaatgctagcaatatatcaagcgagatttatgaaatacctaattaatagaggattaattaaagatgagggaagaaaagtttgggcttttcttggagatggagaaatggatgaacctgagtcacttggggcaattggtttagccgcgcgtgaaaatttagataatttaatatttgttgtaaactgcaacttacaaagattagacggtccagtaagaggaaat

SEQ ID NO: 216744 - DNA, 736 bp, Unknown
  Bacterial polypeptide expressing nucleotide sequence isolated from the Sargasso Sea
catgacttttaatttcgctatgcaagcaatggatcaaatagttaactcagcggcaaaaacattatacatgtcaggaggacaaatctcttgcccaattgtttttagagggccaaatggagcagcttctcgagttgcagcccaacattctcaagattttagtgcattttactcttcgatcccaggactgaaggttattcagccctttactgcttctgacgctaaaggtctgctaaaatcggcaatcagagataataatcctgtgatatttttagaaaatgaaattctttatggaaggaaatttgaaagggaaccttctgaagaggttatcccgataggaaaagcaaaaattttccaagaggggacagacgtgacattgattagctttggcattgggatgacatatgccatagaggcagctgacattctttcaaaagaagggataagcactgaaattatagacttgagaactatcaggccgttagataagaatacaataatttcatctgtaaaaaagacaaatagatgcataactatcgaagagggttttccgatatgttccgttggcaatcatattaccgcactaattatgcaagaggccttcgactaccttgatgctcccgttataaattgtactgggaaagatgtaccgatgccttatgccgaaaatcttgaaaaacttgcgctagtcaatactcaagaagtggtagatcgggctaaagaaataatttacaggtaa

SEQ ID NO: 216745 - DNA, 805 bp, Unknown
  Bacterial polypeptide expressing nucleotide sequence isolated from the Sargasso Sea
gttgttcaacaagaaggattctgagagagcaaattttttaattaagcaactaattgaccatgcatacagacaaggttcaaaaattccttacacccaaagcactccatatataaatacaattcctccagaggaagaaaagaaatctcccggtgaccaaaatattgagaggaggttaagatcattaattagatggaatgcagcagcaatggttgtcagagctaacaaaaaatttcctgaattaggtggccacataggaacttttgcatcagctgcaaccttatatgatgttgggatgaatcacttttggaaagcaaaaagtgataattttggaggagacttaatctattttcaaggtcacagcgctccaggcatgtatgcaagagcttttctagagggtagactaaacgaaaaacaattagacagttttagacaagaagttaataaaggtggactgtcttcataccctcacccttggctaatgcctaatttttggcaattcccaactgtttcaatgggactaggtcctatgctagcaatataccaagctcgttttatgaaatatctaattaatagaggtttaatcaaagacgaagggagaaaagtttgggcttttcttggtgatggtgaaatggatgaaccagaatcattaggtgcaattggtttagcagctcgagaaaaattagataacttaatattcgtagtgaattgtaatcttcaaagacttgacggaccagtcagaggaaatggtaaaattatccaagagctagaaggtatatttagaggtgcaggctggaaatgttattaa

SEQ ID NO: 216746 - DNA, 849 bp, Unknown
  Bacterial polypeptide expressing nucleotide sequence isolated from the Sargasso Sea
caatttttggcaatttcctacagtttcatgggtattggtccaatgttagcaatatatcaagcaagatttatgaaatacctaattaatagaggattaattaaagatgagggaagaaaagtttgggcttttcttggagatggagaaatggatgaaccagagtcacttggggcaattggtttagctgcacgtgaaaatttagataatttaatttttgttgtaaactgcaacttacaaagattagacggtccagtaagaggaaatggaaaaataattcaagaattagaaggtatttttcgaggaggtggctggaacgttttaaaagttatttggggatcttattgggactcacttttagcaaatgataagacgggacatttagtaaaaattatgaatgagaccgtagatggtgaatatcaagcatttaaagcgagaaatggactgtatgtaagagaaaagttttttggcaaatatcctgaaactacagaattagtttcatcaatgtcagatactgatatttggaggcttaatagaggtggccatgatcctcataaagtttacgctgcatacgataaagcggtcaatcacaaaggaagccccacagtcataattgccaaaactataaaaggctatggtatgggtaaaagtggtgaaagtgtaaacactactcaccaacaaaagaaattggatgttgacgatttaatgtattacagggataggtttgatgttcctttaacagattctcaagttaaaaatattgaatatttcaaaccagatgaaaattctgaggaaattaaatacttaaaaaaaagaagattagaacttggtggattcataccagaaagaacatca

SEQ ID NO: 216747 - DNA, 542 bp, Unknown
  Bacterial polypeptide expressing nucleotide sequence isolated from the Sargasso Sea
aatgaaaaaaaagtttaaaaaagaagattatattaaaatttatagaaaaatgcttcaaattagaagatttgaagagagagctgctcaattatatggaatgggtcacatagggggtttttgtcatctttatattgggcaagaagcagtagtcgtaggagtactgatgactatagaaaataatgatagtgttgttactacctatagagatcatgggcatatgatagcaagaggattggagccgaagaaaattatggctgagcttactggaaaacaaactggctattcaaatggaaagggtggttcaatgcatatgttttcaaaaaaaaataatttttatggtggtcatggcatagttggagcgcaagtaccaataggtactggaatagcttttactcataaatatagaaaagaaaaacagatatgcagaacgtatataggtgatggagctatgaataatggtcaagtttttgaggcatttaatttagcatcattgtggaaattacctgttttatacataattgaaaataatatgtatggtatgg

SEQ ID NO: 216748 - DNA, 514 bp, Unknown
  Bacterial polypeptide expressing nucleotide sequence isolated from the Sargasso Sea
atgaaaaagaaatttaaaaaagaagattatattaaaatatatagaaaaatgcttcaaattagaagattcgaagagagagccgctcaattatatggaatgggacacataggtggcttttgtcacctatatattggacaagaggcagttgttgtcggtgttctaatgactatagagaataatgatagtgttgttactacatacagagatcatggacatatgatagcaagaggattggagccaaagaaaattatggcagagctcactggaaaacaaactggatattcaaatggtaagggtggttcgatgcatatgttttcaaaaaaaaataatttttatggtggccatggaatagttggggcgcaagtaccaattggtacaggaatagcttttacccataaatataaaaaagaaaaacaaatatgtagaacgtacataggtgatggagctatgaataatggtcaagtttttgaagcttttaatttagcatcattgtggaaactgcctgttttataca

SEQ ID NO: 216749 - DNA, 957 bp, Unknown
  Bacterial polypeptide expressing nucleotide sequence isolated from the Sargasso Sea
tgggcgtttttaggagatggtgaaatggatgaacctgagtctttaggagcaattggtttagctgcgagagaaaaattagataatttaatatttgtagttaattgtaatttacaaaggttagatggtccggtcagaggaaatggaaagataattcaagagctagagggaatttttagaggagctggatggaatgtaattaaagtaatatggggatcttattgggatccgttattagcaaatgataaaacaggtcatcttgttaagactatgaatgaaactgttgatggtgaatatcaagcgatgaaagcaagagatggtgcctatgtaagagaaaagttttttggtaaataccaagagacaaaagaattagtatcaaacttatctgataaagatatttggagactaaacagaggtggtcacgatccacataaagtttttgctgcttatgacaaggcctctaaaaatgttggtagtccaaccgtagtaatcgctaaaactattaaaggttatggaatgggtaaaagtggggagagtgtaaataccactcatcaaactaaaaaattagatatagatgacttaatgtattatagggatagatttgacgttccattaaccgataatcaagtgcggaatattgaatattataaacctgatcaaaaatcagtagaaataaaatatattaaggagagaagattacagcttggtggatttattcctgagagaaccacttatgcaaaacctataaaggcacctccaaaagacatcttcgatactatgaaagagtccacagggaaaaaagaaatgtctacaactatggctttagttagaatgttgacgagccttcttagagataagaatgtagcacctagactggtaccaattattcctgatgaagcaagaacatttggtatggagggattttttcaaaagataggaatatatgctcacgaaggtcaa

SEQ ID NO: 216750 - DNA, 836 bp, Unknown
  Bacterial polypeptide expressing nucleotide sequence isolated from the Sargasso Sea
tattgaaggaagactcaatgaaaaacaattagataattttagacaagaggttaatccaggaggtttgtcatcttatccacatccatggttaatgccaaacttttggcaattcccaactgtgtcaatgggattgggaccaatgttggctatctatcaagcaagatatatgaagtatttgattaatagaggtttgattaaagatgaaggaagaaaagtttgggcatttttgggagatggagaaatggatgaaccagaatctttaggagcaattggtttagcggcaagagaaaaattagacaatttaatttttgtagttaattgtaatttacaaagattagatggtccagtcagaggaaatggaaaaataattcaggagttagagggtatttttagaggtgctggatggaatgtgattaaagtaatatgggggtcttattgggatccattattagcaaatgataaaacagggcatcttatcaaaactatgaatgaaactgttgatggagagtatcaagctatgaaagcaagagatggtgcctatgtaagagaaaagttttttggtaaatacgaagaaacaaaagaattagtgtctagtttatctgataaggatatttggagattaaatagaggtggtcatgatccacataaagtctttgctgcttatgacaaggcttctaaaaacattggtagtccaactgtagtaattgctaaaactataaaaggttatggaatgggcaaaagtggagaaagtgtaaatacaactcaccaaacaaaaaaattagatatagatgatttgatgtattacagagatagatttgatgtaccattaactgatg

SEQ ID NO: 216751 - DNA, 862 bp, Unknown
  Bacterial polypeptide expressing nucleotide sequence isolated from the Sargasso Sea
aatggataattttcgtcgcgaggtcgatggccaggggttgtcctcctatccgcacccatggttgatgcctgattattggcaatttccaacggtttctatgggacttgggccgctgcaagcgattcatcaagcccatctgatgaaatatttacagaaccgggaccaggctaatgtagctagacgtaaagtgtgggctttcctcggtgacggcgagtgcgatgaacccgaagcattgggcgcattggcgttagcggggcgcgaaaagctcgataacttgattttcgttgtgaattgcaacctacagcgtttagacggacccgtgcgcggcaacggtaagatcattcaggagcttgaaggctattttcgcggagcaggctggaatgtaatcaaagtggtatgggggcgcctttgggatccgctattggcgcgggatgaagacggtctattgcagcaagccatggacgagacggtagatggcgagtttcaaaattttaaagcgaaaggcggcgcctatgtgcgagagcatttttttggccaacatccgcaactatcggcgatggtttctgatatgactgacgaagacatctaccggcttaaccgtggcggccacgacccttataaaatttatgcagcataccgagcagcagttctgcatgaaggtcagcctacggtcattctggcaaagacggtaaagggttatggaatgggcgatgctggggagtcggaaaatactacccaccaggttaaaaagctgaatttagaagagttaaaacaattccgtgaccggttcgatgtgccgctgtccgacaaacagttgcgcgatattccgtattttcgtccggccgcagacagtgctgaaatg

SEQ ID NO: 216752 - DNA, 784 bp, Unknown
  Bacterial polypeptide expressing nucleotide sequence isolated from the Sargasso Sea
tatggtagttagggcaaataaaaagtttccagaattaggcggtcatataggaacgtttgcatcagcagctactttgtatgatgtaggaatgaatcatttttggagagctaaaaataataaatttggtggagacttaatttattttcaaggtcatagtgcgccaggaatgtatgcaagagcttttttagaaggaagattaaccacaaaacaattggatagttttagacaagaggtaaaaagtggaggtctttcgtcttatcctcatccatggttaatgcctaatttctggcaattccctactgtttcaatgggtttaggaccaatgctagcaatctatcaagccaggtttatgaaatacttaattaatagaggattaataaaagatgaaggaagaaaagtgtgggcctttttaggagatggtgagatggatgagccagagtcacttggtgcaattggattagcagctagagaaaatttagacaacttaatatttgtagttaattgcaatttgcagaggctagatggaccagttagaggtaacggaaaaataattcaagaacttgagggtatttttagaggatcaggatggaacgttataaaggttatatggggatcctattgggattcattattggcaaatgacaaaactggtcatcttattaaaataatgaatgaaacagttgatggtgagtatcaagcatttaaagctagaaatggtttatacgtcagggaaaatttttttggcaaatatccagaaacactaaagttagtttcggcaatgtca

SEQ ID NO: 216753 - DNA, 966 bp, Unknown
  Bacterial polypeptide expressing nucleotide sequence isolated from the Sargasso Sea
attaatagaggacttattaaagatgaaggaagaaaagtttgggcatttttaggagatggagaaatggatgaaccagagtctttaggagcgataggtttagcttcaagggaaaaattagataatttaatatttgttgttaactgtaatctacagagattagatggtccagtaagaggaaatggaaaaattattcaagaattggaaggtattttccgaggctctggatggaatgtaataaaagtaatttggggctcgtattgggactcattaattacaaatgataaaagtggccaattaataaaaatcatgaatgaaacagttgatggtgaatatcaagcaatgaaggcaagagatggagcttttgtgagagaaaaattctttggaaaatatcctgaaactttagaattggtatcaagtttatcagataaagatatttggagattaaatagaggtgggcacgatcctcacaaagtttatgctgcttacgacaaagcatcaaaaaataaaggtagtccaacggttatcattgcaaagactattaaagggtacggaatgggaaaatcaggagaaagtgtaaatactacacatcaaacaaaaaaattagatgtagatgatttaatgtattacagagatcggtttgacgttccgctaactgatgatcaggttagaaatattgaatattttaagcccgatgaaagttcacctgaaattaaatatataaaagaaaaaagaattaatttaggaggtttcttgcccgagcgtacaacctatgcaaaacctataaaaactccctcaaaagatatttttgattttatgaaagtgtcaactggtaaaaaagaaatgtctactacaatggcattagttagaatgcttacaaacctattgagagataaagatatttcacctagattagttccaataataccagatgaagcaagaacatttggaatggaaggtttttttcaa

SEQ ID NO: 216754 - DNA, 820 bp, Unknown
  Bacterial polypeptide expressing nucleotide sequence isolated from the Sargasso Sea
gaaagaagaattagatcgttaattagatggaatgcagccgcgatggtggtacgtgcaaataaaaaacatcctgagcttggtggacacattggtacatttgcatctgctgcaacattatatgacgttgggatgaaccatttttggagagcaaaaaataacaaatttggtggagatttaatttattttcaaggacatagtgctcctggaatgtatgcaagggcatttttagaaggcagattaaatgaaaaacaattagatagttttagacaagaggtaaagcctggcggtctatcttcatatccacacccttggttaatgccaaaattttggcagttccctacagtatctatggggttagggcccatgcttgcaatatatcaggctaggtacatgaaatatttaatcaatagaggtttgattaaagatgaaggaagaaaagtgtgggcctttttaggtgatggagaaatggatgagccagagtcaatgggagcaattggattagctgcaagagaaaatttagataatttaatatttgtaataaactgtaatcttcaaagattagatggtccagttaggggtaatggaaaaattattcaagagcttgagggaagtttcagaggatcgggatggaatgtaatcaaagttatttggggatcatattgggattcattaattacaaatgacaaatctggttatttaattaaagctatgaatgaaacagtcgacggtgaatatcaagcaatgaaagctagaaatggtgcatacgtgagggaaaaattttttggaaaataccctgaaacgcttgaattagtatcaagta

SEQ ID NO: 216755 - DNA, 1289 bp, Unknown
  Bacterial polypeptide expressing nucleotide sequence isolated from the Sargasso Sea
tggagagctaagaataataaattttgggggagatcttatatattttcaaggtcatagtgcgccaggaatgtacgcaagagcttttcttgaaggtcgacttaacgaaaaacaattagatagttttagacaagaagttaatccaggtggtttatcgtcatatcctcatccttggttaatgccaaagttttggcaatttccaacagtttcaatgggattaggtccaatgttagcaatctaccaggcaaggtatatgaaatatttaattaatagaggattaattaaagacgaaggtagaaaagtttgggcatttttaggtgatggtgagatggatgaaccagaatctttaggcgcaattggtttagcggcaagagaaaaattagataatttaatatttgtaataaattgtaatttacaacgattagacggacctgtgcgaggaaatggaaaaattatacaagagctagaaggaatttttagaggagcaggatggaatgtcattaaagtaatttggggttcttattgggatccattattattaaatgataaaactggtcatctagttaaaactatgaatgagactgttgatggcgaatatcaagccatgaaagcaagagatggcgcatatgtaagagaaaaattttttggaaaatataaagaaacaaaagatcttgtctcaagcctttcagataaagatatttggagattaaatagaggtggtcatgaccctcataaagtttttgctgcttatgataaggcatcaaaaaatattggaagccctacagtggtaattgctaagacaatcaaaggttatggcatgggcaaaagtggagaaagtgtaaataccactcatcagactaagaaattagatgtaaacgatttaatgtactatagagataggtttgatgttcctttgactgataagcaagttgaaaatattgaatattacaaacctgatcaaaattcaccagaaataaagtatattaaggaaagaagacttcaattgggtggctttatccctgagagaacttcttatgcaaaacctattaaggcgcctccgaaaaatatttttgataatatgaaagagtctacgggtaaaaaagaaatgtctactacaatggctttggttagaatgttaacaaatcttttaagagataaaaatgtagctcctagattagttcctattattcctgatgaagcaagaacatttggaatggaaggtttttttcaaaaagtaggtatctatgctcatgaaggacaaaaatatgagcccgaagattctgctcaattaa

SEQ ID NO: 216756 - DNA, 1701 bp, Unknown
  Bacterial polypeptide expressing nucleotide sequence isolated from the Sargasso Sea
cgatgaaagcaagagatggagcttatgtgcgagaaaagttttttggtaaatatcctgaaactaaagaattaatctcaagcctttcagacaaagatatatggagattaaatagaggtggacatgatcctcacaaagtttttgcagcttatgacaaagcctcaaaaaatattggaagcccaacagttgtgattgccaagactataaagggttatggaatgggcaaaagtggtgagagtgtaaatacaacacatcaaactaaaaaattagatatagacgatttgatgtattacagagacagatttgatgttcctttaactgataaacaggtgcaaaatattgaatattataagccagaccaaaactcacctgaaattaaatatatcaaagaaagaagacttcaattgggaggatttatcccagaaagaactacttatgcaaaacctattaaggctcccccaaaaaacatttttgacaatatgaaggtatcaacaggtaaaaaagaaatgtctactacaatggcattggtaagaatgttaaccaatcttctaagagataaaaatgttgccccaagattagtaccaattattcctgatgaggcgagaacatttggtatggagggtttttttcaaaaaattggtatttatgctcatgaaggacaaaaatatgaacctgaggactcggcacaattaagttcatatagagaagaaaaaagtggacaagttttggaggagggaattaatgaggcaggcgcaatgtcttcgtggattgctgcaggcacctcttacacaaatcatgatattgaaatgatacctatatatcttttttactcaatgtttggttttcagagaataggtgattttgcttgggcaggagcagacagtcaatcaagaggatttttaattggtgctactgctgggagaacaacattagcaggagaaggcttgcaacaccaagatggacatagtcatttaatggcatcaactattccaaattgcaagtcctatgatccaacatttcattatgaactagcaacaatctttagagaaggattgaaaagaatgcatgagaagaaagaaaatattttttattatatcacaacaatgaacgaaaattatcctcatcctgctatgccaactgacaaatcatgtgaagaaggcattctgaaaggaatgtataagattaaagaatttaacaaatataaaaaaactaaaattcaatttttaggatcaggtacaattttgagggaaatgatagctggtgctgaaattctccaaaaggaatatcaaattgatagtgaagtttggagcgtaactagttttaatgaattaagaagagatggcttagagatcgaaaggtataatttattaaatcctgaaaaagatccaaaaaaatcatatgttgaaagctgtttaggcaaaactgaaggtccaattttagctgcatcagattatatgagaatgaactcagaccaaattcgaccttatattaacaagagcttctactcgttaggaacagatggatttggtcgaagtgataccagaaaaaatttgaggaagttcttcgaggttgataaagaacatgttgttgcatatggactaagtgttttagctaaagaacaattaattgcttctaagtacgctcaagaggcaataaagaagtatcaaattgataaagataaaccaatgccaacaaaattataat

SEQ ID NO: 216757 - DNA, 3067 bp, Unknown
  Bacterial polypeptide expressing nucleotide sequence isolated from the Sargasso Sea
atgagcaacaaaattactgttcctgatattggcgatttcgagagtgtagagatcattgaaattttagtaaaaaaaggggatcaaataaaaaaaaatgactccattgttactttagaaagtgataagtcgagtgttgaagtgccctctacagatgagggaacggttgaaagtgtaagtgtaaatattggagataaagtttcaaaaggtgatgtacttatttcactttcaggaaattcaaatcagaaagaagaaattaaaaagcttccagttgatacagaaaatatcattaaagaggcagagtcaaatttagtaaatgataaaaaggaaataaccgaaacaaaaactgataaaaaaattgaaactgttgatctaccggtaaaaaaagatccagtaataaaagtagtcaaaaaagatggagatatagatcctgttgaaacaaatgagtggttagaatcattgtcatcagttttagaaaacgatggaaaggaaagagctcaatatttaattaaacaactaattgaatattcatataaaaaaggctcagatttaattctttcaagaaatactccttatataaatacaattaaacctgaagaacaagcccaatctcccggggatcaaaatttggagagaaaaattagatctttaattagatggaacgcggcggcaatggttgtaagagcaaataaaaaaaatcctgagcttggcggacatataggtacatttgcatctgcagcaacattatatgatgttggaatgaaccatttttggagagcaaagaataataaatttggtggagatttaatctattttcagggtcacagcgccccaggcatgtatgcaagagcttttctagagggtagaattaatgaaaaagaaatggatcgttttagacaagaagttaagccaggagggctttcatcttatcctcatccatggttaatgccaaagttttggcaattcccaactgtatcaatgggacttggtccaataatgtcaatttatcaggctagatttaataaatatttaatcaatagaggtttattgaaagatgaaggaagaaagatttggtgttttcttggtgatggagaaactgatgaaccagagtccctaggagctattggcttagctgctagagaaaaattagataatctaatattcgttattaattgtaatcttcaaagattagatggaccagtgagaggaaatggaaaaattatccaagaacttgagggaatttttagaggggctggctggaatgttttaaaagtaatttggggttcttactgggaccaattattagctaaagataattcaggtttattaattaaaagaatgggagaggctgtagacggagagtatcaagcttttaaagctaaaggagggtcttacgtaagagaaaaattttttggaaaatatcctgaattattagaattagtatcacagatgacagacagagatatttggaaattaaatagagggggtcatgatccacacaaagtttatgctgcttatcagtcagctatggaaaacaaaggaactccaactgtaattttagcaaaaaccattaaaggttatggaatgggaaagtcgggtgaaagcatgaatacaacgcaccaacaaaaaaaattagatgaagaagatttattatattatagggacagatttgatgtacctttaactgatgatcaagtgaaaaatattcaatattatagaccagatgagaattctccagaaattaaatatttaaaagaatgtagaattaaactcggcgggtatttacctgaaagatcatcttttgctaaagcgataaaaacaccaccaaaagatatttttgataaaatgaaagagtctactggcgaaaaggaaatgtctactactatggttttagttagaatgttaaccagtttaatgagagataaaaatgtttctcctcgattagttccaattattccggacgaagcaagaacatttggaatggaaggtttttttcaaaaaattggaatttatgctcatgagggacagaaatatgaacctgttgattctgaacaattaagttcatatagagaagatattaaaggtcaagttttagaggaaggtataaatgaagctggagcaatgtcgtcttggatagcagcaggcacagcttatacaaatcatgatatttcaatgatccctatatatattttttactctatgtttggatttcaaagaacaggcgactttgtttgggctgcaggtgataatcaaaccagaggttttttggttggagcaactgcaggaagaacaactctagcaggtgaaggattgcagcatggtgacggccatagccatgttctatcatctgtagttccaaattgtatttcttatgatcctacatttggatatgaattagctacaatttttagagaaggtttgaaaagaatgtatgaaaatcaagaaaatattttttattatattacaacaatgaatgaaaattatcctcatccagaaatgccaaaaggtaaagatattgaggaaggaattttaaaaggtatgtataaatttaaaagttataataaaaataaaaaaacaaaaattcaattattaggctcaggtgctattttacgagaagtaattgcagcagcagaaatcttagagagagactataaaattgatagcaatgtttggagtgttacaagttttagtgaattaagaagagatgcaatagaaattgaaagatttaatttattaaatccagatgaaaaaccaaaaaaaagctatcttgagcagtgtctttcatctgaagatggtccaattctggcatcatcagattatatgagattaaattctgatcaaattagaccatatttagaaaaaagtttttattcattaggaactgatggatatggaagaagtgatactagaaaaaacttaagaaaattctttgaggtagataaagagcatatagtggcttattcactaagtgtattagcaaaggaacagctggtgccatcaaaatatgctaaagaggcaataaaaaaatataatattgacccagaaaaacctatacctacaaaattgtaaa

SEQ ID NO: 216758 - DNA, 1613 bp, Unknown
  Bacterial polypeptide expressing nucleotide sequence isolated from the Sargasso Sea
catctggcgcttgaaccgtggtggccacgatccagttaaagtattcgcggcttaccaaaaagcgattgatacaaaaggtcgtccaacggtaatccttgctaaaacggttaaaggtttcggtcttggtgcatcaggcgaagcacaaaacgtagcgcacaacgttaagaaaatggacgttgattcaatcaaagcgttccgcgatcgtttcaatattcctgtagcagacgagaaaattgctgacctgccatacttcaagttcgacgaagacagcgaagaaatgaagtaccttcgcgagcgtcgtgaagcactaggcggttacttgccttctcgccgtgaacaggctgaagaacagctggaagttcctgagctaagtgcattcgacgccatcttaaaaggttcaggtgaccgtcaagtatcatcaaccatgacttttgtacgtgtacttaacgcgctattgaaagataagaaaattggtaagcgtattgtgccaattattcctgatgaagcccgtacatttggtatggaaggcttattccgtcaggtaggtatctacgccaatgaaggccagaaatacgtacctcaagatgccgaccaagtcgcttactatcgcgaagataagaaaggtcaggtattacaagaaggtattaacgagctaggtgcaatggcgtcgtgggttgcgtcaggtacgtcttactcaacgtgtaacgctaccactattccgttctacatttactactcaatgtttggtttccaacgtgttggtgaccttgcatgggcggcaggcgatagccaagcacgtggtttccttttaggcgcaactgcgggtagaaccacacttaacggtgaaggtctacagcaccaagacggccactcacatgttcaagcgaacctaattcctaactgtattacttacgacccaacgtatggttacgaagtagcagttatcgttcaagacggtctacgtcgcatgtacggtaacaatgaaaatatcttctattacctaacgttgatgaacgagaactatcagcaccctgcaatgccagaaggtgatgatgttgctgagcagatcattaaaggtatctacaagcttgagcgtgttgaaaacgacaagtctaagcttaacgtacagctgatgggctcaggtactatcttgaacgaagtgcgtaaagcggcccagatactatgcgaagactacaacgtatcttctgacgtttactcagtgacctcgttcaacgagctagcgcgtgaaggccaagacgtagcacgctggaacatgctaaacccagaagctgagcaaaaagtaccttacattggtcaggtaattacgaaagacgcaggtcctgcgatttctgccactgactatgtgaagaactactcagaccaagtacgtgcgttcatcgaaactgaataccgctgcctaggtacagacggtttcggtcgaagcgatagccgtgaaaacttgcgtactcactttgaagttaatgcgtcatacattgtggtggcatcactttacgaattggctcagcgcggtgacgttgagaagaaagtggtagcagaagccattaagcgttttgaaattaacgctgaaaaacttaacccactttacgcgtaag

SEQ ID NO: 216759 - DNA, 1564 bp, Unknown
  Bacterial polypeptide expressing nucleotide sequence isolated from the Sargasso Sea
atgctggcctatcatgaagcggtgaaccatacgggtcagccgacggtgattctggccaaaacggttaaaggctacgccaccggtgccggtgaagcggtgaacaaggctcaccaaatgaagaaactggacttggagagcctgaaggatttccgagaccgtttcgatatgccgttcaccgatgaacagctagaagatgttccctattatcgtccagcggatgattccccggagctgcgttacatgaaggagcagcgcgacaaattgggtggttacatgcctgtgcgtcgacgcaaagcgagtcagcagttaaccatccctgggctggatgtatttgccaactttctggaagggagtggtgaccgggaaatttccactaccatggcctttgtgcgcatgatgagcaccctgatcaaggataagcagattggtgatcgggtggtgcctattgtgcctgatgaagcacgcacctttggtatggagggtctgttccgccaactaggtatttattcctctggggggcaaaaatacgaacccgaagatgccggccagatcatgtattaccgggaagaaaagaagggccgaattcttgaagaagggatcaatgaggccggcgccatgtccggctggcttgccgcagctaccagttatagcgttcataattttaccctgattccgttctatatctattactccatgttcggctttcagcgggtgggcgacctggcctgggcagcaggggattcacaggcacggggttttctattgggagccacagcagggcgcactacgcttaacggtgaaggtctgcagcatcaggatggtcacagtcatattctttccagcacggtagccaactgtgtcagctacgatcccacctacagttatgagctagcggtgattcttcaagatggcctcagacgcatgtatgaggataacgaaagggtgttttattacctgacgttgatgaatgaaaactacattcatggggccatgcccgagggggccgaagaaggtatccgcaagggcatgtatctgttgcgcgaaggtaaagcgaagaccaagaaaagccctaaagtgcagctgctgggaagcggtacgattttacgtgaagtggaagcggcggcagaactgctacgggaagattttgacgttgcggctgatgtgtggagtgtgaccagctttaacgaactgcgccgtgaaggcctgaaaatggaccgcgatgagatgctcaacccggaagaggagcgtccggcaaactgggtagaaaaatgcctggatggccgtagtggtccggtgattgcttcaacggattacatgcgggcctatgccgaccagattcgtccctgggtgaacgcgccttacacggttctaggaacggatggattcgggcgcagtgattcgcgccagaagttgcgtcacttctttgaagtcgatcgttacttcgtggttctggccgctcttaatgccctgcgcaaagagggcaaagttgaggtagggctagtaaaacaggccatcgagaaatacggcattgacacggataaaccctatccggtgatgcattaat

SEQ ID NO: 216760 - DNA, 1567 bp, Unknown
  Bacterial polypeptide expressing nucleotide sequence isolated from the Sargasso Sea
ttgaaagatggttcagatagagcgcattatattttaaaaaaattaattgatgaaacttacaaggaaggtattaataaacctttaacaagaaatacgccttatataaatactataacaccagaaaatgaagcaaaatctcctggagatcaaaatattgaaagaaaaataagatctttaattagatggaatgctgcagcaatggttgtgaaagcaaataaaaaaaatccagaattaggaggtcatataggaacatttgcttcagcagctactctttatgacgtaggaatgaaccatttctggagagcgaaaaataataaatttggaggagatttaatttattttcaaggacacagtgctccaggaatgtatgctagagcttttttagaaggaagacttaccgcaggtcaattaagtaattttagacaagaagtgggtgttaatggtctttcatcttatcctcacccttggttaatgcctaaattttggcaattccctacagtatcgatgggccttggtccaattttatcaatatatcaggctagatttacaaaatatttaattaatagaggtttattaaaaaatgaagatagaaaaatttgggcttttcttggtgatggagaaatggatgaacctgaatccttaggtgctattggattagcagcacgagaaaaattagataatttaatatttgttattaattgtaatttacaaagattagatgggcctgttaggggaaatggaaaaatcattcaagaattagaaggcatttttagaggagcaggctggaatgtaataaaagtaatttggggttcgtattgggactctttaatagcaaaagataaaagcggtttattagttaaaagaatgaatgagtgtgtagatggagaatatcaagcttttaaagctaaaggtggagcttatgttagggaaaaattttttggaaaatatcctgaattgaaagatttagtatcagccatgaccgatagagatatatggaaacttaatagaggaggacatgatcctcacaaggtttatgctgcttatgatatggctatgaaaactaaaggtcaaccaacagttattttagccaaaactatcaaaggttatggcatgggcaaatctggagaaagcaccaatactactcaccaacaaaaaaaattaggagaagaagatcttctttattatagagatcgatttgatatcccacttactgataaacaagttaaaaatattgaattctacaaaccaggagaaaaatcagaagaaataaaatatatcaaagaaagaagaatgaagcttggaggaaatttaccagagcggacttcttatgcgaaacctataaaaaaaccttcgaaagatatttttgaaaacatgcttaaatcttcaggagatcgtgaaatgtctacaacaatggctcttgtaagaatgttaaccagtttattaagagataaaaatattgcttcaagattggtaccaatcattccagatgaggctagaacatttggaatggaaggtttttttcaaaagattggtatttatgcacatgaaggacaaaaatatgaacccg

SEQ ID NO: 216761 - DNA, 1177 bp, Unknown
  Bacterial polypeptide expressing nucleotide sequence isolated from the Sargasso Sea
acttttgcttcagcagctactctttatgatgtgggaatgaatcatttttggagagcaaaaaataataaatttggaggcgatttagtttattttcaaggacatagtgctccaggtatgtatgcaagagcttttttagaaggaagacttaccgctaagcagttaagtaattttagacaagaagtaggtgttgatggactttcatcttatcctcacccatggctaatgcctaaattttggcagtttcctacagtatcgatgggtcttggtccgattttatcaatctaccaagcaagatttacaaaatatttaattaacagaggtttattaaaaaatgaagataggaaagtttgggcatttcttggagatggagaaatggatgagcccgaatctctaggagccattggattagcggctagagaaaaattagataatttaatatttgttattaattgtaatttacagagattagatggtccagtacggggtaatggaaaaattattcaagaactagaaggtatttttagaggagccggctggaatgtaataaaagttatttggggaacatactgggatactttgttagcaaaggataaaagtggtctcttagtcaaaagaatgaacgaatgtgtagatggagaatatcaggcttttaaagccaaagggggagcatatgttagagaaaagttttttggaaaatatcctgaattaaaagatttagtgtctacgatgaccgacagagatgtttggagacttaatagaggtggacatgatccgcataaggtttacgcagcctatgatgctgctatgaaaaccaaagggcagccaacagtaattttggccaaaactatcaaaggttatggcatgggtaaatctggtgaaagcacaaatataacacatcaacaaaaaaagctaggagaagaagatcttctgtactacagggatcgttttgatattcctctcactgataaacaagttaaaaatatagaattttataaacctgacgaaaaatcagaagaaattaaatacatcaaagagagacgaatgaagcttggtggtaatattccggagcgaacttcttacgcaaaacctattaaaaaaccttcaaaagatatttttgaaaatatgcttaaatcttcaggcgagaaggaaatgtcaaccaccatggttcttgttagga

SEQ ID NO: 216762 - DNA, 947 bp, Unknown
  Bacterial polypeptide expressing nucleotide sequence isolated from the Sargasso Sea
cagaatggcacttcaagaatccatgcgtgaggattccaaaataattgtaatgggagaagatgtcggactttacggaggggcttatggagttacaaaaggaatgattgaggagtttggtgcgaaaagaatccttgataccccaatttcagaagagggcattttaggaacggcggttggatcagcaatgactggtctcagacctgtcgtagaattaatgtatattgactttgtaatgttggcaatggatcaattagtaaaccaagcagcaaagattcgatacatgtttggaggccaaataagcgtccccatggtaatgcgagcacagggaggaactggccgctcaggagcagcacaacactcccaaagtcttgaagcatggataatgcatactccagggctaaatcttgctatgcctgctacagtaactgatgcttattatttgttgaaacatgctttaaaactttcagaccctgttgtatttcttgaacataaaatgctatacactcttaaaggggaaattgatgagagtaattccctttcatgggggcaggcatcaatccttcggtctggttctgatttcactctggttacatattctaggatggtccatcgagcattagaagccgcagaaaaacttgctgaactgggaattcaaacagaggtcattgatttaagaacactttacccactagacacagaaacaattaattcatctgtaaagaaaacaggtcgtgccttagttgtaacagaggattgtctgactgcaggagtcagcgcagaattgtcagcaagaatcaccgaaggggcttttgaatttttggaagaacctgttatacgcctagcaggtgaagatatcccaatccctgtttctccaagtatggaaaaagaagctgtcccaagtgtagatagaattttctcgactgcaaaacttttacttcgaaaatgat

SEQ ID NO: 216763 - DNA, 1324 bp, Unknown
  Bacterial polypeptide expressing nucleotide sequence isolated from the Sargasso Sea
aattaataaagcttatatgcagggtgcaaacattccttttacccaaaataccccatatataaatacaataccaacaaatgaagaaaaaaagtctaatggtgatcaaaatattgaaagaagaataagatcgctaataagatggaactcagcagcaatggtagttcgtgcaaataaaaagtttcctgaacttggtggacatattggtacatttgcatccgcggctacactttatgatgttggaatgaatcatttttggagggctaaaaataataaatttggtggggatttaatttattttcaaggtcatagtgcaccaggtatgtatgccagagcatttcttgaaggaaggctcaatgaaaaacaattagatagttttagacaagaagttaacccaggtggcttatcatcatatccacatccatggttgatgccaaaattttggcaatttccaacagtttcaatgggattagggccaatgttagcgatctaccaagcaagatatatgaagtatttaattaatagaggtctaattaaggacgagggaagaaaggtatgggcttttttaggagatggtgaaatggatgaaccagagtcattaggagcaataggtctagctgctagagaaaaattagataatttaattttcgtaataaattgtaatcttcaaagattagatggtccagtcagaggaaatggaaaaataattcaagaattagaaggaatttttagaggagctggatggaatgttataaaagtaatttgggggtcttattgggatccattattagcaaatgataaatcaggtcatttaattaaagctatgaacgaaactgttgatggcgagtatcaagcaatgaaagcaagagacggtgcgtacgttagagaaaagttttttggtaaatatccagagactaaagatctggtttcaagtctttcggataaagacatctggagattaaataggggtggacatgatcctcataaagtttttgcagcttatgacaaagcttcaaaaaatataggcagcccgacagtcgtgattgctaaaactataaaaggttacggaatgggaaaaagtggtgaaagtgtaaatacaactcatcaaacaaagaaattaggtgtagatgatttgatgtattatagagatagatttgatgtgcctctaacagataaacaagttcaaaatattgaatattataagccagaacaaaactcaccagaaattaaatatttaaaagaaagaaggctccaactaggagggttcattccagaaagaaccacttatgctaaatctattaaagccccacctaaaagatatttttga

SEQ ID NO: 216764 - DNA, 1221 bp, Unknown
  Bacterial polypeptide expressing nucleotide sequence isolated from the Sargasso Sea
gtaattgaaaatgacggggcgtcaagagctagttatttattaaataaagtaattgatcaagcatataaggcaggattggtactacctgataccagaacaacgccatatataaatactattccgcctgaagctgaggttaaatcaacaggagatcaaaatattgaaaaaaaaatacgtgcctacataaggtggaatgccgccgctatggttgtgaaagcaaataaaaaaagttcagagcttggtgggcacataggaacttttgcatctgcagcaacactgtacgatgtaggaatgaaccatttttggagagcaaaaaataataaatttggtggtgacttagtatattttcaaggacactcagctccagggatgtacgcaagagcatttttagagggaagactaactactaaacaattggatggctttagacaagaagttggtaaagatggattgtcctcttatcctcacccatggttaatgccaaatttctggcaattcccaaccgtgtctatgggacttggaccaataatgggtatctatcaggctaggtttttaaaatatttaattaatagaggattaattaaagatgaagggagaaaagtttgggtttttctaggtgatggtgaaatggatgaaccagagtcattaggtgcaattggtctagcagcaagagaaaagttagataatttaatttttgtgatcaattgtaatctacaaagacttgacggtcctgttagaggaaacggtaaaattattcaagagcttgagggtagttttagagggacaggatggaatgtaataaaagttatttggggttcttattgggatcaacttttagcaaaagataaaagtgggcttttaattaaaaggatgaatgagtgtgtagatggtgagtatcaggcttttaaagcaaaaggtggtaattatgtaagggaaaaattttttggtaaataccctgagttaaaagaattagtatctactttaacagataaagatatatggaaattaaatagaggtggtcacgatccacataaagtttatgccgcgtactatgcagccatgaaaaataaaggctcaccgacagttattattgcaaaaacaattaaaggatacggaatgggtaaatctggtgaaagtataaataccactcatcagcagaaaaaaatggatgagggagatttgttatactatagagatagattgggtgttcctcttactgac

SEQ ID NO: 216765 - DNA, 1470 bp, Unknown
  Bacterial polypeptide expressing nucleotide sequence isolated from the Sargasso Sea
tatggctcaaaatatttcagttcccgatattggagattttaaagatgtggaggtcattgaggttttagtcaaacctggtgatcaaattagtaaaaatgatccaatcgtaacaattgaaagtgacaaatctagcgtagaaataccctcacctgcagcaggagaaataaaagatttaaaagtaaaaattggtgacaaggtctctgaaggaagtgttttagcaacaattgaaaatggtcaagcggcatcggcgcccaaagaagaaaaaatagaaaaaccaaaaaaagaaattcatgttcaagaaaaaccaaaaacaaatggtgaggtaaatcctgtaaaacaagtaaagaaagtttttgcagaacctgcatctaaagatgacatcgatccaattgaaacaaacgaatggattgactctttaaattcggtaattgaaaatgatggctcatctagagcaagttacttattaaacaaagttattgaccaagcctataaatcaggattagtattaccggatactagaacaacaccttacatcaatactattccgcctgaagctgaagctaagtcaactggagatcaaaatattgaaaaaaaattaagagcttatattagatggaatgctgctgcgatggtggttaaagcaaataaaaaaagtcctgaattaggtggtcacattggaacatttgcatctgctgcaacactttatgatgtagggatgaatcatttttggagagcgaaaaataataaatttggtggtgatttaatatattttcaaggtcactcggccccaggtatgtacgctagagcttttcttgagggaagactaaatgcacatcaattagatggatttagacaagaagtaaataaaggcggcctatcatcatatcctcatccatggttaatgccaaatttctggcagtttcctactgtctcaatgggtcttggtcctatcatggcaatttatcaagcgagatttttaaaatatttaattaatagagggttgatcaaagatgaagaaagaaaaatctgggtgtttttaggagatggcgaaatggatgaaccggagtcacttggagctattggattagccgcaagagaaaaattagataacttaatttttgttattaattgtaatttacaaagactagatgggccagttagaggaaatgggaaaattattcaagaacttgaaggtagctttagaggctctggttggaacgtaattaaagttatttggggaacttactgggatcagttactagcaaaagataaaactggcttgctaataaagcgtatgaacgaatgcgtagatggtgagtatcaagccttcaaagctaaaggtggttcatatgttcgagaaaatttttttggaaaataccctgaattacaagaactggtttcttcaatgacggataaagatatttggcgattaaatagaggaggtcacgatccacacaaagtttatgctgc

SEQ ID NO: 216766 - DNA, 1591 bp, Unknown
  Bacterial polypeptide expressing nucleotide sequence isolated from the Sargasso Sea
tctgagctcaatgaccctccttttaagaatacagttcattcagatgaagagcatccttatccaggtaatttagaatatgaagaaaagattagacattttataagatggaatagtcttttaactgttttaaaagcaaataaagaatctgatttagggggacatatctcaacttattcttcagcagcaactttatatgaagtgggatttaatcatttttttcgaggttccgataaatcattaggagatttaatatattttcagggtcattcatctccaggaatatatgcaagatcttttttagaaggtcgattaacctctgaacagcttgataatttcagacaagagataaaaggtcagggcttatcttcatatccacatccatggttaatgcctgattattggcaatttccaacagtctcaatgggtctagggccaatttttggtatttttcaagctcatgtaatgagatatctagaaaaaagaggcttgattgaatcaattgacaatagaaaagtttgggttttttgtggtgatggagagatggatgaaccagaatcgatgggttctataagtttagctggaagagaaaaactcaataaccttgtatttgttgttaattgtaatttgcagaggctagatggccctgttagaggaaattctaaaattattactgagctttctaagcagttcagtggagcaggttggaatgttgttcatttgatctggggaagaaaatgggatgaattaataaacaatgataaagatggcctattacaaaaaattatggatgaaacagttgatggagaataccaaaattacaaagcaaagggtggtaaatatactagagagaatttttttggcaaagatccagaagttctcaaaatgatagattcactaagtgataaagaagtagaagatttaaatagaggagggcatgacccaactaaaatctataatgcttatcgcttggcttatgaggaaaaggataggccaacagttattcttgcttttacaattaaaggttatggtattggttcaagacaagcagataatactgcccatcaggtaaaaaaacttacaaaagagaatctagaagattttattgataaatttgatctaccaataaaaaaagaaagcttagacaatccaaatttccttaatttaaacagaaataagaaagttaaggaatatttactctcaagaagagaagaattaggaggtctattgccttcaagaaaagcttctaagaaaaaattaatagcagaaaaaaaatctttcatagattttgataaaaagttagatagagagcagtcaacaacaatggtttttgtaagacttctaactaaacttttaagagatgcagcaataggttcaagagtagtgccaattgttccagatgaagcaagaacatttggtatggacgctttattcaggcaatttggcatctattcatctgaaggtcaaaaatacgaaccagaagatgcagataaagtaatgttttatagagaaagtgagtctggaataatgcttgaggaaggtattaatgaagccggtgcattctcagcatggctagctttagcaacttcttatt

SEQ ID NO: 216767 - DNA, 1243 bp, Unknown
  Bacterial polypeptide expressing nucleotide sequence isolated from the Sargasso Sea
ttggtaaaaaaaggtcaaaaaatcaataaaaacgatccagtagtaactttagaaagtgataaatctagtgttgaggttccgtcaaattacgaaggagaagtcgaaagtataagtgtaaaaataggtgataaagtttctaaaggagatttaatattaactttatcttcaagtaatgagaaaaataacgaaaaggtccctccagttacagaaaaaataattcaggaagccgaaagttcaataagtgaaaaaaattacaaaataaataatcaaactgaaaaacaaatagcaaaaaaaccaaaacaagaaactaaaatactagttaataacaaagatattgatcctcttgaaacaaaagactggttggattcaatttctgcagttcttgaaaaagatggaaaacttagagctcaatttttaattaaagaattaatcgaacattcatataaacaaggatcagatttagttttgtctagaaatactccttatataaacactatatcccctgatgaagaaacgaaatctccaggagatcaaaatatagaacgtaaattaagatctttaattagatggaatgcagctgcgatggttgttagagccaataaaaaatttccagaattaggtggtcatattggaacttttgcatctgcagctacattatacgatgtaggaatgaatcatttttggagagctaaaaataataaatttggtggagatttaatttattttcaaggacacagtgcacctggaatgtatgcaagagcatttttagaaggaagacttaatgaaaaacaattagataaatttagacaagaagtgaaaaaaggagggctttcatcttatcctcatccttggttaatgccaaatttttggcaattcccaacagtgtcaatgggattaggaccaatgttagcaatttatcaagctagatttatgaaatatttaatcaatagaggattaatgaaagaagaaggaagaaaagtctggtgttttctaggagatggagaaatggatgaaccagaatcgctaggcgcaataggtttagcagctagagaaaatttagataatcttatatttgtagtgaattgtaatttgcaaagattagatggaccagttagaggaaatggaaaaataattcaagagttagaaggaatttttagaggcgcaggatggaatgttataaaggtaatctggggatcttattgggatccattatttggcaatgataaaactggtcatctaataa

SEQ ID NO: 216768 - DNA, 1312 bp, Unknown
  Bacterial polypeptide expressing nucleotide sequence isolated from the Sargasso Sea
aaggaatttgatctaggaggacatatatcaacatattcatctgcagcaactttatatgaggtaggttttaatcatttttttcgtggttctgataaattactaggcgatttaatatattttcaaggtcattcctctccaggaatatatgcaagatcttttcttgaagaacgcatttctgcaaaacaacttgataattttagacaggaaataaaaggtgagggcttatcttcatatccacatccatggttgatgcctgattattggcaattcccaacagtatcaatgggtttaggtccaatctttggtatttttcaagctcatgtaatgaggtatctcgaaaaaagagacttaattgaatcaatagataatagaaaagtctgggtcttttgtggtgatggagagatggatgaacctgaatccatgggatctataagcttagcaggaagggaaaagcttaataatcttgtattcgttataaattgtaatttacagaggttggatggaccggttagaggtaattctaaaattattactgaacttgctaagcagtttagtggtgcaggctggaatgttgtgcatctaatctggggaagaaaatgggatgaattaataaataatgataaagatgggctattacagaaaattatgaatgagacagtagatggagaatatcaaaactacaaagctaagggtggaaaatacaccagagagaacttttttggcaaagatccagaagtgcttaaaatgatagattcattaagtgataaagaagtagaagatttaaatagaggagggcatgatccaactaaaatttataacgcttatcgcttagcttacgaggaaaaggataggccaacagttattcttgcttttacaattaaaggctatggcattggctcaaggcaagcagataataccgctcatcaggtaaaaaagcttacgaaagagaatctagaagattttattgataaatttaatctgccaataaaaaaagaaagcttagacaatccaaattttcttaccctaaacagagataaaaaggttaaagaatatttactcgcaagaagagaagaattaggaggtttactgccttcaagaaaaatctccaagaaaaaattaatagcaaaaaaagaatcttttatagatttcgataaaaaattagatagagagcagtcaacaacaatggtttttgtgagacttctaactaaacttttaagagatgacgcaataggttcaagagtagtaccaattgttccagatgaggcaagaacatttggcatggatgctttgtttagacaatttggtatttatt

SEQ ID NO: 216769 - DNA, 1966 bp, Unknown
  Bacterial polypeptide expressing nucleotide sequence isolated from the Sargasso Sea
catgaactcaacaaacaaaaatgatctagatccacaggagactcaagagtgggtcgaagcgatggaagctgtaatcgaaagggatggtcatgaaagagctcaatatatattaaggcaactggctgaccagtctgttctatcagggggcgggagtccgtattccgcgaacaccccttacttgaatacaatcccacctgaacttgaagtacgttcagatggcaatcaagaattggaatcaaagatacgctcaattattcgctggaatgcggtagttatggtaatgcgtgccaataaggatgattctgatttaggtggacatatagcaagttatgcttcatctgcgacactgtacgatgtaggtttcaaccatttctggcatgcccccaaaaaggatcatgatggagatctggtattctttcagggacattctgcccctggtatttatgcacgggcatttttagaaggaagacttactaaagagcagttagataatttccgcagtgaatctgaaggcaaaggagtttcttcatatccacatccatggcttatgagtgaattctggcaattcccgactgtatccatgggactggggcccataatggctatttaccaggcaagatttctaaaatacttgcaaaatcggggtttggcagatacggccggtcgaaaagtctgggcatttttaggtgatggtgaagtagatgaacctcaatctcttggagcaattggtctggcatcacgggagaatttggataatttgatttttgtgattaactgtaatttgcagagacttgacggtcctgtaagaggaaacggaaaaattatacaggaacttgaaggagagttcagaggtgcaggttggaatgttataaaagtaatttggggttcttattgggatcccttgcttgcaagagacacggagggttttcttcgcaaacgtatggatgaagcgattgatggtgaatatcaagcgtttaaagctaagggtggagcatatacaagggctcatttttttggtaaataccctgaattactggatatggtttccaatatgtctgatgaggatatatggagactgaacaggggtggacatgatcctcataaaatttatgctgcattccactcagcagttaatcataaagagcaacctacggtaattcttgttaaaacagtaaaaggttatggcatgggtggttcaggtgaagctattaacattacccattcccaaaagaaaatgaaaatagaagatctcaaaagtttcagggatcgttttcgtgttcctattaatgatgaacaggtagaagatctttcttattacaaacctcctgctgattctccagaaattaaatatcttaaaaaatgtcgaaaaaaattaggtggacctctcccatctcgcagagtaaatggagacaaactgactattccggctttatctgtgtttgacagattattaaatgagaccggggatcgagaaatatcaactacgcaggcattggttcaggcgatgactttactctgtaaggataaaaacattggtcagcgtgtggtacccattgttccggatgaagctagaacatttggtatggaaggtatgtttcgtcaaattgggatctatgcacatgaaggtcaaaaatatgagccggttgatcgggagcagttgatgtattacaaggagaatcagagtggtcagatgcttcaagagggtatcactgaagatggagccatgtcttcatggatcgccgcagctacatcttattccaattctggtatgcagatgattcctttttacatgttctattcaatgtttggttttcagcgaattggtgatttgatatgggcagcaggagatatgcaggcaagggggtttttaataggagcaacttcaggacgcacaacacttaatggtgaggggttgcagcatgaggacggacacagccagattatggccggaaacgtgcctaactgc

SEQ ID NO: 216770 - DNA, 2647 bp, Unknown
  Bacterial polypeptide expressing nucleotide sequence isolated from the Sargasso Sea
gatgtataaagatactgatccacaagaaaccagggaatggcttgagtctattgaagatgccttagaagagcatggaaatgaaagaacccagttcttgcttcaaacgctcatagcttatgctcaaaccaagggcgctagattaccattcaacaccaatactccatatttaaatacgatactaccatcggatcaattagagtatcctggcgatcttgatttagagcaagcaatcacagcgattattcgctggaacgctatggcaatggtcacgcgagccaacaaagaaacttctggaattggtggtcatatttctacttatgcatctgctgctacgctatatgaggttgcgtttaatcacttctttaaagggttagagcacccagatgggcaagatttaattttctttcaagggcacgcttctccaggaatatattcccgagcttttcttgagggccgtctttcttcaaaaaagcttgatagttttaggcatgaattgtcagatggcggggggctgtcctcatatccccacccatatttaatgcctgatttttggcaattcgcaacagtttcaatgggattagggccaattatggggatttaccaagcaagatttatgcggtatatgatcgatagaggatttataaaagacaccggaagaaaggtttttgtttatacaggggacggtgaaatggatgagcccgagtctttaggagctttaaccttagcatccagagaaaaccttgacaatctgatcttcgttgtaaattgcaatctacaaagactagatgggcctgttcgcggtaactcaaaggtgattcaagagctagaaggtgcgtttagaggtgcgggctggaatgttataaaagttatatggggctctgattgggatgaactatttcaaaaagatgtaaatggaaaacttgtaaaaagacttagtgatttagttgatggagacctattaaaatacaccgttgagggtggagaatattttagaaaagaattttttggcaaggaccctgagcttttggaaatggttaaagatttatctaatgaggagctagaacaaatgctcgcaggtgggcatgaccctataaaaatgtattcagcctatcatgaggcaatgaattttgcgggcaaacccactgctattttagcaagaaccatcaagggatatggacttggtcaggctggcgaaggtagaaacataacccacaatcaaaaaaagcttaacgaaaatgaattgctttattttagagataggttttccataccactaagcgataaagatgcggctaatgcatcatttaaatcatttaataaaaattcaaaagaatttaagtatataaaaaataaacgagacctacttggaggtccagtaccgattagatcagataagtcaaaaaaacttacgatacctaatattaaaatatttgatgagttactaaaaggaacaggtggtcgagaaatttccaccacgatggcctacgtacgattactgacactactaactaaagataaaacaattggaaagcatattgtacccattgttcctgatgaggcaagaacatttggaatggatcctttattcaggcagttgggaatttattcccacaaaggacagttatatgatccagtggattccgaccaattcttatattacaaagaggcaaaaaatggacaaattttagaagaaggtatcaatgaagcaggcgcaatgtcatccttttgtgctgcagcaactagctatagtaaccacggaatcaaaatgataccgttttacatttattattctatgttcggctttcaacgtgtttgggatcttatttgggcgtccggcgacatgagggcacgtggctttcttttaggtggaacagcaggcagaaccacgctcaacggggaaggcttacaacatcaagatggccatagtcaccttgccgcagcagcaacgccaaatattaaggcgtacgacgttgcctatggatatgaaattgcaaccatcattcatcgtggattaattgaaatgtgccaagatgaaaaagatgttgtttattatttaacacttgagaatgaaaattaccaacatcctgaaattccaaaaggatcagagagtggaattataaaaggtttatataaaataaaagagccaaataatcctgatattcgtttattgggtagcggtccattgatgggagaaacttttgcggcagcggagttgttaaagaaagactggaaaatagactgtggtatatggaatgtaacaagctttagtgagttaaggcgcgatgctcaggctgcagagcgctggaatttaatgcacccaacaagtaaaaataaaaaaacataccttgatgaatgtttaggtgataagcctattcctgtagttgcagtatctgactatgttaaaatggtttcagagcaaattggaccttatataccggcaccatactatacactaggtactgatggatttggccgtagcgacactagagaaaatctgcgacatttctttgaagtcgatagatattatattactttatgtgccatacgttcattaattatagataaaaaattagattcctcaatagcagagaaagcaattttaaaatataaaattgatcctaaaaaacctaatccactaaatttataa

SEQ ID NO: 216771 - DNA, 1273 bp, Unknown
  Bacterial polypeptide expressing nucleotide sequence isolated from the Sargasso Sea
atgcaaaaccctgatttcgaaagagaatttcaagaatggcttgaagctttagaaaatgtactcatttctgatggtaaagagtacacagaagaactgctaaaagctttatatactgaagctagattaaaaggtattgaggtgtctgaacttaatgaccctccttttaagaatacagttcattcagatgaagaacatccttatccaggcaatttagaatatgaagaaaagattaggcattttataagatggaatagtcttttaactgttttaaaagcaaataaagaatctgatttagggggacacatctcaacttattcttcggcagccactttgtatgaagtgggatttaatcatttctttcgaggttctgataaatcactaggagatttaatatattttcaaggccattcatctccaggaatatatgcaagatcttttttagaaggtcgattaacctctgaacagcttgataattttagacaagagataaaaggtcagggcttatcttcatatccacatccatggttaatgcccgattattggcaatttccaacagtctcaatgggtctagggccaatttttggcatttttcaagctcacgtaatgagatatctagaaaaaagaggtttgattaaatcaattgagaatagaaaagtctgggttttttgtggtgatggagagatggatgagccagaatcgatgggttctataagtttagccggaagagaaaaactcaataaccttgtatttgtagttaattgtaatttgcagaggctagacggccctgttaggggaaattctaaaattattactgagctttctaagcagttcagtggagcaggttggaatgttgttcatttgatatgggggagaaaatgggatgaattaataaacaatgataaagatggcctattgcaaaaaattatggacgagacagttgatggagaataccaaaattacaaagcaaagggcggcaaatatactagagataacttctttggtaaagatccagaagttcttaaaatgatagattcattaaatgataaagaagtagaagatttaaatagagggggacatgacccaactaaaatctataatgcttatcgcttggcttatgaggaaaaagataagccaacagttattctagcttttacaattaagggttatggtattggttcaagacaagcagataatactgcccatcaggtaaaaaaacttacaaaagagaatctagaggattttgttgataaatttgatctacccaataaaaaaa

SEQ ID NO: 216772 - DNA, 1087 bp, Unknown
  Bacterial polypeptide expressing nucleotide sequence isolated from the Sargasso Sea
atgaaatctggtaaagattttgatcctatcgaaacaagggagtggatcgaatcacttgatgatgtaattgacgatcagggaactgatagagcatcatttctattaaatgagttagctaagcacctcatggataagggggcagtaccttcctataatttaacaacaccatttaaaaacactatctctcctgaaaatgaggcaatgatgcctggcgatctctttatggagagaagaattagatcacttattaggtggaatgctcttgctacagttctcagggcaaacaaaaatgatgatgagctcggcggacatattgcaactttttcttcagcagcaatgctttatgacattggctttaattatttttttaggggacaagaaagtgaaaatgatgatttagtatattttcaaggacactcttcacctggtatttatgcaagaagttatctcgaaggtcgaataaatgaagaggatttagacaactttagaagagaagttgataaaccgggtctttcttcatatcctcacccatggctgatgccagactattggcaattcccagtcgtttcaatgggacttggacctatttctgcgatctatcaagctcatgtgatgaaatatctgcatgcgaggggattaaaagaattaggtgatagaaagatttggggattttggggcgatggtgaaatggatgaacctgagtcattgggggcgattggtttagctgcaagagaaaaattagacaatttgatctttgttataaattgcaacctccaaagacttgatggtccagtaagaggaaatggaaaagtaatacaggaattagaaagacaattcagaggttcaggctggaatgttattaaagttgtttggggccgactttgggatcccattattgcaaaagacaaaggcggacatcttcaaaagataatggatgaagtcgttgatggtgaaatgcaaaattttaaagctaaaggaggagcatatactcgtgaaaatttcttcggtaaacatcctgaagcacttaaattagtaaaaggtctatctgatgaagagatctataaattaaatagaggtggccatgacc

SEQ ID NO: 216773 - DNA, 972 bp, Unknown
  Bacterial polypeptide expressing nucleotide sequence isolated from the Sargasso Sea
aatgttagcaatatatcaagcaagatttatgaaatacctaattaatagaggattaattaaagatgagggaagaaaagtttgggcttttcttggagatggagaaatggatgaacccgagtcacttggggcaattggtttagcggcgcgtgaaaatttagataatttaatatttgttgttaactgcaacttacaaagattagacggtccagttagaggaaatggaaaaataattcaagaattagagggtatttttagaggcgcaggttggaacgttctaaaagttatttggggatcttattgggactcacttttagcaaatgataagacaggacatttagtaaaaattatgaatgagaccgtagatggtgaatatcaagcatttaaagcaagaaatgggctttatgtaagagaaaagttttttggcaaataccctgaaactaaagaattagtctcatcaatgtcagatactgatatttggagacttaatagaggaggccatgatcctcataaagtatatgctgcatatgataaagcgatgaatcacaaaggaagccccacagtcataatagctaaaactataaaaggttatggtatgggtaaaagtggtgaaagtgtaaacactactcaccaacaaaagaaattggatgttgatgatttaatgtattacagggataggtttgatgttcctttaacagatgcccaagtcaaaaatattgaatatttcaaaccagacgaaaattcagaagaaataaaatatttaaaaaagagaaggatagaattgggtggttttattccagaaagaacatcttactcaaaaccaattaaagctccaagtaaggatatttttgattttatgaagacttctactggtgaaaaagaaatgtctacaacaatggcactagtaagaatgctaactaatcttttaagagataaaaatgttgctcctaaattagttccaattatccagacgaa

SEQ ID NO: 216774 - DNA, 2305 bp, Unknown
  Bacterial polypeptide expressing nucleotide sequence isolated from the Sargasso Sea
ttgccaaaaacctataaagacacagacccacaagaaacccaagagtggattgagtcgatcgacgatgctcttgaagagcatggctatgagcgaacccggtttttattggaagagcttattgaatatgctcaatcgaaaggcgcgagactaccttttaatacaaatacaccttttataaatacaattctacctcaagaccaacccgattaccctggcaatagagaaatagaaagaaagataaagtcttttgtgcgctggaacgcaatggcgatggttgtaagagcaaatacaaatacacctgggattggtgggcacatttccacatatgcatcttcagcaaccttgtatgaggttgcatttaaccatttttttaaaggccctaaacacccaagtggtggggacttgatcttttatcagggacatgggtctcctgggcaatacgcaagggcatatcttgaaggaaggttgaccaaagagaatcttgagtgttttagaagagagcttacaccaggtgggctttcttcatatccacacccttacttaatgcctgatttttggcagtttgctacagtttcaatgggtttgggacccattatggcaatttatcaagcaaggtttttaaactacatggtagaccgggaaatgatcaaggaaacagggagaaaggtttgggcttttcttggtgatggagaaatggatgaaccagaatctaaaggcgcactcacacttgcctcaaaggaagacttagacaaccttatatttgtagtaaactgtaatttacaaagattagatgggcctgttcgtggtaatagtaaagttatacaagagcttgagggtgctttccgcggtgcgggctggaatgttataaaggttatttggggttctgagtgggatgaccttattgataaagacacttcagggaaattacttcaaagaatggaagaagtcgtagatggggagcttttaaagtatgttgttgaaggtggtgcatatttcagagaacactttttcggaaaatacccagaaacccttgatcttgtttcacatataagcgatgaagaccttataaaaatgaaattgggtggccacgaccctataaaaatgtacgcagcttataaagaggcgactgagcacaggggccgcccaactgtgattcttgcaagaacaataaagggatatgggctaggtgaagcaggagaaggtagaaacattacacacaaccaaaagaagctaaatcaaaatgagcttttatattttagagataggtttgatgtgccattatctgatgaggaggctatttcagctacgtttttcaagccaaaatcaaatagcaaagaaataaaatacataaaaaactgtcgtgaaaaactaggtggttttattcctaaccgtgttgtttttaataaaagaatgaacccacctaaagttgatatttttcaagaactattagatggtactggggaaagagaaatatctacaacaatggcctttgtgaggctcttaacaattttatgtagagataaaaacattggtaaaaacattgttccaataattcctgatgaagccagaacctttggtatggacccattgtttagacaactaggtatttatgcacataaggggcaactatatgatccggtagactcagaccagtttctttattacaaagaagctatcaatggccaaattttcgaagagggaattaatgaggcgggtgcaatatcttcttttatagccgcgggaatgtcataccaaacaacaggcgagaacatgattcctttttatatttattattccatgtttgggtttcagcgcgtgtgggactttatttgggctgccggcgatatgagagcgcgggggtttttgcttggtggaacagctggtagaacaaccttaaacggtgaaggtttgcaacaccaggatggtcacagtcacttggccgccgctgctactccaaatattaaagcgtatgacttagcatacgcatatgaaatagctgtagttataaaacatggtataaaagaaatgttttatgagcagaaagatgttatatactatctaacattagaaaacgaaaactatgtacatcctaaaatgcctgaaaaaattgaaaaagatataattaaaggaatgtataaaattagaaccacgaaaaacccaacaataagattacttggaagtggcccacttttaaatgaggtgattgccgcagcagacttgttgaaagatgaatggggtatagatcccggtatttggaacgtaacctctttcacggaacttcgtagggaggctgaggaaaatagaa

SEQ ID NO: 216775 - DNA, 1747 bp, Unknown
  Bacterial polypeptide expressing nucleotide sequence isolated from the Sargasso Sea
attgtctacagaaattaaggtccctgatattggtgacttcaaaaatgttgaaattattgaggttcttgtaaaagaaggtcaaacaatatcaaaaaatgatcctcttattacattggagagtgacaaatctagtgttgaggttccatcgccatttgaagggaaaatatctaaattaaaagtaaaaatcggagataaagtttctaaaggtagtttaatcgggcttattgactcagaagctaacgaacaactgtccagtaaaaaattagatgacaaagtgactgaaaaaattattagtcaagcagaggaaaataaaatttccccaaatggaaatattacaaaacctagaatagaagttattaaaaatcaaaaagttttgtttaataataaattcaatgatattgatccagaagaaacaaacgagtggattgactcgctaaattcagttgttaagagagatggtgcagaaagagcacatttcttactaagtcaattaattgatcaagcttatgttgctggatcaaatttgccctttactcaaaacactccttacataaataccatcccagcggatctagaagtaagttcacctggcgaccaaaatattgaaaggaaaataaggtcattagttagatggaacgctgctgcaatggttgtaagagcaaataaaatttcctcagaattaggaggccatatagctactttcgcatctgctgcaactttatacgatgtaggttgcaatcatttttggagagcaaaaaataaagatttcttaggtgatatgatttattttcagggccatgctgcacctggtatgtacgcacgctcttttcttgaaggtagaattaaaaaaaagcaattaaaaaactttcggcaagaagttgatggtaaaggattatcatcatatccccatccatggttgatgccagattattggcaattcccaagtgtgtcgatgggactaggtcctattatgtcaatttatcaagcaagatttacaaaatatttaattaatagaggcttaataaaaaaccaagatagaaaaatttggacattcattggggatggagagactgacgaaccagaaaccttaggtgcaatcggtttagcagcaagagaaaaattagataatttaatatttgtcattaattgcaatcttcaaagattggacggccctgtaagaggaaatggtaagataattcaagaattagagggaacctttagaggagctggatggaatgttataaaagtaatttggggatcttattgggaccctttattaaaagcggataaaactggattattaatgaaaagaatggatgaatgcgttgatggggagtatcaagctttcaaagcaaaaggaggggcgtatgttagagaaaaattctttggcaaatatcctgaattagtaaaattagtatcaaatatgactgatgctgatatttggagattaaatagaggtggacatgaccctcacaaagtttatgctgcttacgatgccgctataaaacataaagggcaaccaaccgtaatactgacaaaaactataaaaggatatggaatgggtcaatctggtgagagtattaacactacgcaccaagccaaaaaattagacttaaaagacatgtactactttagagacaggtttgatttgccattaaaagataagcaagttgaggatttagaattctataaaccaaatgaaaaatctgaagaaatttcatatttgaaagaaagaagagaaaattag

SEQ ID NO: 216776 - DNA, 1135 bp, Unknown
  Bacterial polypeptide expressing nucleotide sequence isolated from the Sargasso Sea
atggttagtagtaatgatgatattgatcctgttgaaacaaaagaatggttagactctttaagtgcagttctacaaaatgatggttcagaaagagcacattttttaataaaacaattaattgatcaatcttataaagctggatcaaaaattcctcatactcaaactactccatacgtaaatactatacctcctgaggaagaaaaaagatctccaggagatcaaaatatagaacgtaagttaagatcattaataagatggaatgctgcagctatggtagtccgagcaaataaaaaatatcctgaacttggtgggcatataggaacatttgcatctgcagcaacattatatgatgtaggaatgaatcatttttggagagcaaaaaataataaattcggaggtgatctagtatattttcaaggtcatagtgcacctggtatgtatgcaagagcttttcttgagggaagattaaatgaaaaacaactagatagatttagacaagaggtaaaaacaggtggtctttcttcgtaccctcatccttggttaatgcctaatttttggcagttcccaactgtctcaatgggtattggtccaatgttagcaatatatcaagcaagatttatgaaatatcttattaatagaggattaattaaagacgaaggaagaaaagtctgggcatttcttggtgatggagaaatggatgagcctgagtctcttggtgcaatagggttagcggctcgtgaaaatttagataatttaatattcgttgttaactgcaatttacaaagactagatggtccggttagaggaaatggaaaaataattcaagaattagagggaatttttagaggcgcagggtggaatgttttgaaggtcatttggggttcttattgggatactcttttagcaaatgataagacaggacatttagtcaaaattatgaatgagactgttgatggtgaatatcaggcttttaaagcaagaaatggactttatgttagagaaaagttttttggtaaatatcctgaaacaactgaattggtctcatcgatgtctgatactgatatttggcgattaaacagagggggtcatgatcctcataaagtttatgctgcttatgataaagccagtcaaccac

SEQ ID NO: 216777 - DNA, 1336 bp, Unknown
  Bacterial polypeptide expressing nucleotide sequence isolated from the Sargasso Sea
atgagcgaaaaattacttgtccctgatattggcgaatttgagaacgttgaagtaattgaaattcttgtaaaatctggcgaacaaataaaaaaaaatgatcctcttataacaatcgaaagtgacaaatctagtgttgaaattccttcaacagttgatggaaaaattgaaagtattgaacttaaagttggcgataaagtttcaaaaggagacttaatattaaattatttgtcttcatcaaaaactgcaaatttagaaaaaattccaaaggatactgaaagtataattaaacaagcagaggaagcaattacttctcaaaaagaagaagaggtaaaaaatataattcctgaaaaaaaacaatctaccattcaagttagtaatggtgcagatttagaccctcttgaaacaaaagattggttagaatctttatcagcagtaatttcaaaagatggaaatcagagagcccacttcttaattaaagagctaataaacaaagcttaccgagagggagcaaatattccttatacgcaaaatacaccttatattaatacaatccctccggaagcagaggtaaaatcaaatggcgaccaaaacatagagagaaggataaggtcgctaattcggtggaattcagcagccatggtggtaagggctaacaaaaaatttcctgagctaggaggtcatataggtacatttgcatcagcagcaactttgtatgacgtaggaatgaatcacttttggagagcaaaaaataataaatttggtggagatttgatttattttcaaggccacagtgccccaggaatgtatgcaagagcatatttagagggaagattaaatgagaaacaattagatagttttagacaagaggtcaaacctggaggactttcttcttatccgcacccgtggttaatgccaaagttttggcaatttccaactgtgtctatgggtcttggtcctatgctagcaatttatcaagccaggtacatgaaatacttaataaatcgaggattaattaaagatgaaggaagaaaagtatgggctttcttaggtgatggagaaatggatgaacctgagtcaatgggggcaattggtttagccgctagagaaaatttagataatttaattttcgttattaattgtaatcttcaaaggctagatggacctgtaaggggtaatggaaaaataattcaagaactggaaggaagttttagagggtctggttggaatgtgataaaagtcatttggggctcttattgggactcgctacttgctaatgataaaacaggccatttagtaaaacttatgaatgagacagttgatggagagtatcaggcag

SEQ ID NO: 216778 - DNA, 1019 bp, Unknown
  Bacterial polypeptide expressing nucleotide sequence isolated from the Sargasso Sea
aatgtacgcaagagctttccttgaagggagattgaatgaaaaacaactagatagctttagacaagaggtgaaaccaggtggcctttcttcatatcctcatccgtggttaatgccaacattctggcaatttccaactgtttcaatgggtttggggccaatgcttgcaatatatcaggcaaggtacatgaaatatttaatcaacagaggattaataaaagatgaaggacgaaaagtatgggcgtttttgggagacggtgaaatggatgagccagagtccatgggtgcaattggtttagctgcaagagaaaatttagacaatttaatttttgttataaattgcaatctccaaaggcttgatggacctgtaagaggtaatggaaaaattattcaagaattagaaggaagttttagaggatctggatggaatgtcattaaagtgatttggggttcttattgggactctttgattatgaatgacaaaacaggtcatttagtaaaaattatgaatgagacagttgatggagaatatcaggcaatgaaagcaagggacggtgcctatgttagagaaaaattttttggaaagtatcctgagacatcagaactagtttctagtctttcagataaagatatctggagattaaacaggggtggccacgatcctcataaagtttatgctgcatacgacaaagcaacaaaaaatattggtagccctacagtcattatagcaaaaacaataaagggatatggaatgggaaaatcaggagaaagcgtaaacacgacccatcaaacaaaaaaactggatgttgatgatctaatgtattacagagaccgttttgatgtaccattaacagatgatcaggttagaaatattgaatacttcagacctggtgaaaaatccttagaaattaaatatttgagagaaatgagattaaaattaggcggatttttgcctgaaagatctacttttgcaaaatcagtaaaagcaccatcaaaagatatttttgattttatgaaagttt

SEQ ID NO: 216779 - DNA, 1396 bp, Unknown
  Bacterial polypeptide expressing nucleotide sequence isolated from the Sargasso Sea
tcctgaacttggaggtcatattggaacatttgcatcagcagcaacactttatgatgttggaatgaaccatttttggagagcaaaaaataataaatttggtggtgacttaatttattttcagggccatagcgcaccaggaatgtatgcgcgagctttcttagagggcagattacatgagaagcaacttgatagttttagacaagaagtaaaaaaaggaggtttatcttcataccctcatccttggttgatgccgaacttttggcaatttcctactgtatcaatgggtttaggacccatgttagcaatatatcaagcaagatttatgaaatatttaatcaatcgtggtttgattaaagatcaaaatagaaaagtttgggccttcctcggagatggcgaaatggacgaaccagagtctttaggcgcaattggtttggcagcaagagaaaaactcgacaatttaatttttgttgttaattgtaatttacaaagattagatggacccgttagaggaaatggaaaaattattcaagagctagaaggaatttttagaggagctggttggaatgttataaaagttatttggggctcgtactgggatccattgttagcaaaagataaaactggtcatttagttaaaattatgagtgaaacagttgatggggaatatcaagcttataaagcgagaaatggtttgtacgttagggaaaatttttttggtaaatatcctgaaactaagagattagtttcatctttatcagacaaggatatttggaaacttaatagaggcggtcatgaccctcataaagtgtattcggcatatcacgaagcatctaaaaacattggaagtccaacagttattatagccaaaacaataaaaggttatggaatgggaaaaactggagaaagtgtaaacaccacccatcaacaaaaaaaaatggggattgatgatttaatgtattatagagatagatttgatgttcctttaacgaataaacaagttgaagaagttcaatattttaaaccagatgaaaattctgccgaaattaaatatttgaaagagaaaagaattaaattaggaggatttattcccgaaaggacaagttatgctaaaccaattaaaactcctccaaaagatatttttgattttttaaaagaatctacaggaaaaaaagaaatgtccacaacaatggctctggtcagattgctaacaaatctattaagagacaaaaatgtttctcctagacttgttccaattattcctgatgaggcaagaacctttggaatggaaggtttttttcaaaagattggaatttatgctcacgaagggcaaaaatatgaacctgaggattcagaacagttatcttcttatagagaagataaaaaaggccaagtttag

SEQ ID NO: 216780 - DNA, 1444 bp, Unknown
  Bacterial polypeptide expressing nucleotide sequence isolated from the Sargasso Sea
tatggctcaaaagatttcagttccagatattggcgattttaaggatgtagaagtaatcgaaattttagtaaagcctggagacaatataaaaaagaatgatccaatagttacaattgaaagtgacaaatctagtgtggaaattccttctccatcagaggggcaaataaaagatttaagcgtaaaaattggagataaagtttcacagggtagtgtcatagcaactatagaaaatgatcaagtagtttcagaaaaaaaagaaattcaaaaaaaagatgaaaaaaaagaaaaatctaaaacaaatggtaatattcagacaaatcaatcaataaaaaaagtaaaaaaagtttttgctgaagcggcatctaaggatgatatcgatcctttagaaactaatgagtggattgagtcactaaattcagtgatcgaaaatgatggttcatcgagagcaagttttttattaaataaagtaattgatcaagcttacaaagctggacttgttttacctgatacaaggacaactccatatattaatacaattcctccagagacagaagctaagtcaaccggtgatcaaaacattgaaaaaaaaattcgagcttatataagatggaatgctgcagcaatggtggtcaaggcaaacaaaaaaagctcagagctaggaggtcatattgggacttttgcgtctgcagctactctttatgatgtaggaatgaaccatttttggcgtgcgaaaaataataaattcggtggagatttaatttattttcagggacattctgcgcctggaatgtatgctagagcttatctagagggaagattgactgccgatcagctagacggatttagacaagaagtagataagggtggtttgtcatcatatcctcatccatggttaatgccaaatttttggcagtttccaactgtgtctatgggtcttggtccaattatgggtatttatcaagcaagatttttaaaatatttaattaatagaggcttagtaaaagatcaaggtagaaaggtttgggtttttttaggtgatggcgaaatggacgagcctgagtcactaggagcaataggtttagctgcaagagaaaaattagataatttgatttttgttattaattgcaaccttcaaagacttgatggcccggttagaggtaatggaaaaattattcaggagcttgagggaagttttagaggttctggatggaatgtaataaaagttatttggggatcttactgggatcaactattagcaaaagataaaacaggattacttataaaaagaatgaatgagtgtgttgacggagagtatcaagcatttaaagcaaaaggtggagaatatgttagaaataaattttttggtaaatatcctgaactgaaagagcttgtttcgagtatgactgataaagatatatgggaaattaaacagaggtggtcatga

SEQ ID NO: 216781 - DNA, 1354 bp, Unknown
  Bacterial polypeptide expressing nucleotide sequence isolated from the Sargasso Sea
attgccgccaaaagatatagatccagttgaaacattagaatggattgatgccataaatagtgttattgatgaggagggcttagaaagagcttcctatcttttaactaaagttgcagaaaggttaaatcaagaaggagcagtaccttcttataatttaacaaccccattcaaaaattctatttcagttaaagatgaagccaaaatgcctggcgatttacttatggaaagaaaaataagatctttaattaggtggaatgcacttgttatggttttaaaagcaaataagaatgatgaagagttaggtggacatatttctactttttcttcagcagccacattatatgacgttggctttaattatttttttagaggatcagataaccatcttgaagatatggtttattttcagggacattgttctccaggtatatatgcaagaagttatttggaaggttatttaaatgaagaggatttagataatttcagaagagaagttactaaaccagggttatcatcatatccgcatccttggttgatgccagattattggcaatttcctgtagtctcaatgggattgggaccaattttgggaatatatcaagcacatgttatgaggtatttatcagctagaggtttagttccaagaaatgacagaaaagtttgggtattttgtggtgatggtgagatggacgaacctgaatcgaagggtgctattggcttagcaggcagagagcagttagaaaatttaatatttgttgtaaattgtaatttacaaagacttgatggtcctgtcagaggaaatggaaaaattatccaagaacttgaaggggcatttagaggcgaaggctggaatgtaattaaggtcgtgtgggggaggttttgggacccgattattgaaaaagatactgagggtaaacttcaagaaataatggatgctgtagtagatggcgagcttcaaaattacaaagctaaaggtggggcttacacaagaaaaaatttttttgctagagatccatctgttttagaaatggttaaggatttaagcgatgaggatatttatagacttaatagaggtggtcatgatccttacaaggtatatgctgcatatcataaagctgttaattcaaaaggtgctccaaccgtaatattagctttaaccactaagggatatggaactggctcaagagaagctgataacaccacacatcaagtaaaaaaattatcgttagaaaatattaaatcgtttagagataaatttgatattccaatcccagattccgagatagaaaaattaccctatgttaggccagcagaagattctccagaaattcaatatttaaaaaaaactagaaaa

SEQ ID NO: 216782 - DNA, 1183 bp, Unknown
  Bacterial polypeptide expressing nucleotide sequence isolated from the Sargasso Sea
tatggctcaaaatatttcagttccagatataggtgattttaaagacgttgaagtaatagaaattttagtcaaacctggtgatcaaataaataaaaacgatcctatagttaccattgaaagtgataaatctagtgtagaaattccatctccttcagctggcctaataaaagatttaaaagtaaaaataggagataaagtatctgagggaagcttattagcaattattgaaaatggtcaagcagcttcttctccaaaacaagaaatagaaaaagaagcagtgaaagaagaggtggttaaagaacaaccaaaatctaatggtaacttaaatcctgtaaaacaagttaaaaaagtttttgcagaaccggcttcaaaggatgatattgatccagttgaaactaatgaatggatagagtcattaaactctgtaattgagtctgatggagcaccaagagcaagctatttattaaataaagttattgatcaagcttataagtctggtttggttttacctgatactagaacaacgccatatataaatactattccacccgaggctgaggctaaatccccgggtgatcaaaatattgaaaagaaattaagagcaattattagatggaatgccgctgcaatggtcgtaaaagctaacaagaaaagttctgaactaggtggacatataggaacttttgcgtcagcagcaacattgtatgacgttggtatgaatcatttttggagagcgaaaaataataaatttggtggtgacttagtatattttcaaggtcactcggctccaggtatgtacgcaagagcattcttagagggaaggctctcagcaaaacaattagatggatttagacaagaggttggtaaagatggtctatcatcttatcctcacccttggttaatgcccgacttttggcagtttccgactgtgtcgatgggtcttggtcctatcatggcaatttatcaagctagattcttaaaatatctaatcaatagaggtttagtcaaagatgaaggtagaaaaatttgggtattcttaggagacggagaaatggatgaaccggagtctatgggagcaatcggtctagctgcaagagaaaaattagataatttgatctttgtaattaagtgtaatcttcaaagacttgatggtcctgttagaggcaatggaaaaattattcaa

SEQ ID NO: 216783 - DNA, 1929 bp, Unknown
  Bacterial polypeptide expressing nucleotide sequence isolated from the Sargasso Sea
aatgaatttagatttattagttccagatattggagattttgaaaatgttgagataatagagattcttgtaaaaaaaggagacaaagtaagtaaaaatgatccagttgtaactcttgaaagtgataaatccagcgtagaagttccttcaaattatgaaggattggttgaaagtataaaagttaaaataggagataaagtatcaaaaggggacttaattttaactttatcttcaagcaaagataagatcaataaaacttctggtgataaaaatgttaatgaagaagtgccaccagttacagaaaaaattattcaagaagcagaaaaagtaattaataagtctgaggaaaaaatacaaaacaaaaatactatagttaagtcaaaaaagttaaaaaatgaagtaagaatggtcattagcaataatgatattgatccaagtgaaaccaaagattggcttgattctttaagtgctgttctacaaaatgatggtgcagaaagagctcattttttaataaagcaattaatagatcagtcttataaggctggttcaagaattccttatactcagacaactccttatataaatacaattcctccagatgaggaaaaaaaatcaccaggtgatcaaaacatagaacgtaaaattagatcatttataagatggaatgcggcagctatggttgtaagagcaaacaaaaaatttcctgaactaggtggacatattggaacatttgcatcagctgcaacattatatgatgttggcatgaatcatttttggagagcaaaaaataataaatttggaggggatctagtttattttcaaggacacagcgcaccaggaatgtatgctagagcatttttagagggaagattgagcgagaaacaattagatagttttagacaggaagtaaaacctggaggattatcttcataccctcacccttggctaatgccaaatttttggcaatttccgactgtttcgatgggtctaggaccaatgcttgcaatttatcaagcaagatacatgaaatatttaatcaatagaggattgattaaagatgagggacgaaaagtctgggcctttttaggagacggtgaaatggatgaaccagagtccatgggtgcaattggattagcggccagagaaaaattagataatttaatttttgtaattaactgtaatctccaaagacttgatggccctgtaagaggaaatggaaaaattattcaagaacttgaaggtagctttagaggcgctggatggaatgtaataaaagttatttggggttcatactgggactcattgttagctaatgacaaaactggtcaattagtaaaaattatgaatgaaactgtagatggtgaataccaagctatgaaagcaagagatggcgcatatgtacgagaaaagttttttggaaaaaacccagatactttggagatggtttcatctatgtcagataaagatatttggagattaaatcgaggaggacatgatccccataaggtatatgcagcttatgataaagcaattaaaaaccaaggaagtccaacagttattattgcaaaaacaatcaaaggatatggaatgggaaaaacaggtgaaagtgtaaacactactcaccaaaccaaaaaattagatgtagatgatcttatgtattatagagatcgttttgatgttcctctaactgatgaacaagttagaaatatagaatactttaggcctgatgagaaatctccagagattaaatacataaaagagagaagacttaaattgggaggttatttgccagagagatcaacctttgcaaaacctattaaagcgccatcaaaagatatctttgattttatgaaagtttcaactggtgaaaaagaaatgtctactacaatggctctcgtaagaatgttaactaatttgttaagagataaaaa

SEQ ID NO: 216784 - DNA, 2810 bp, Unknown
  Bacterial polypeptide expressing nucleotide sequence isolated from the Sargasso Sea
aatatcacaaaagaaagttgaagaaaaaatacctccctctaccgaaaaaattatacaagaagcagagaaaactttagttttaaaagaagaagtcaaaaattcaaatacaacaaacctaaataacaaaaggaacgaaaaaattgagatagtaaaaaatggtgatattgatcctatagaaacaaatgagtggatggagtcactttccgcagttcttgaaagagacggaaaacatagagctcaatttttgataaaaaaattaatagaccattcttataaagaaggatcagatttggttttgtcaagaaatactccttatataaatacaatttcacctgaagaagaaacaaaatctccaggagatcaaaatattgaaagaaaaataagatccttaatcagatggaatgctgctgcaatggtagtaagagcaaataaaaaaaatccagaattaggtggtcatataggtacttttgcatctgcagcaactttatacgatgttggtatgaatcatttttggagagctaaaaataataaatttggtggagacttaatttattttcaaggacacagcgcgccaggaatgtatgcaagagcatttttagaaggaagaattacggaaaaagaattagataaatttagacaagaagttaatcctggtggtttatcatcatatccacatccatggttaatgccaaaattttggcaattcccaactgtttcaatgggtcttggaccaataatgtcaatctatcaagctagatttaataaatatcttattaatagaggtttattaaaagatgaaggaagaaaaatctggtgctttcttggagatggagaaactgacgaaccggaatctttgggtgcgatcggattagctgcgagagaaaaattagataatttaatttttgtaattaattgtaacttacaaagacttgacggtcctgtacgaggtaatggaaaaataattcaagagcttgaaggaatatttagaggagcagggtggaatgtaatcaaagtcatctggggttcatattgggattctttacttgctaaagataaatcaggattattaataaaaagaatgggagaagccgttgatggtgagtatcaagcatttaaagctaaaggaggagcttacgtaagagaaaaattttttggaaaatatcctgagttattagatttggtatctcagatgacagatagagatatttggaaacttaatagaggtggacatgatcctcataaagtttatgcagcttacgatttggctatgagaaataaaggcacgccaacagttatccttgctaaaacaatcaaaggatatggaatgggtaaatctggagaaagcataaatataacacatcaacaaaaaaaattagatgaaggagatttattatattatcgtgatagatttgatgtcccattaacagatgaacaagtaaaaaacattgaatattataaacctcctgaaaattctgcagaaataaaatacttaaaagaatgtagaattaaattaggaggcaatcttccagaaagatcgtcttttgcaaaagctataaaaaccccaccagaagatgtttttagtgcaatgaaagagtctacaggtaaaaaagaaatgtccacaactatgatattggtaagaatgttaacaagtttattaagagataaaaacgtggctcctcgtttagttccaattatacctgatgaggcaagaacatttggcatggaaggtttttttcaaaaaataggtatttatgctcatgaaggtcaaaaatatgaaccagtagactcagaacaattaagttcttatagagaagatgtaaaaggacaagtcttggaagaaggtattacggaagctggagcaatgtcttcatggattgccgcaggaaccgcttatgcaaatcatgatatttcaatgataccaatatatttgttttactctatgtttggatttcaaagaacaggggattttgcctgggctgctggagacaaccaaacaagaggatttttaattggcgctacttcaggtagaacaactttagcaggcgaagggctacaacatggagatggacatagccacattatgtcctcagtaatacctaattgcaaatcctatgaccctacttttggttatgaacttgctgtaatttttagagatggtctcaaaagaatgtatgaaaaacaagaaaatattttttattatattactactatgaacgaaaattatccacatcctgctataccaaaagataagtctgtcgaagaaggaatattaaaaggtatgtacttatttaaagaatttaaaaatcataaaaaaataaaaatccaattgcttggatcaggggctattttaagagaaatgataaaagctgcagaaatattacaaaatgattacaaaattgatagtaatgtttggagtgttacgagttttagtgaattaagaaaagatgctattgaaattgaaagatacaatttattaaatccagacgaaaaaaataagaaaaattttgttgaaaaatgtttgttacacactgaaggaccagtgctagcagcatcagattatattcgcttaaatgccgatcaaataagaccttttacaagcaaaagtttttattcatttggaacggatgggtatggcagaagcgatacaagaaaaaatttaagaaaatttttcgaagtagataaagaacatatagtaacttattcattaagtgtattagcaaaggagcagcttatttcttcaaaatatgcaaaagacgcaataaaaaaatataatattaatccagacaaaccaattcctacaaaattatagt

SEQ ID NO: 216785 - DNA, 2201 bp, Unknown
  Bacterial polypeptide expressing nucleotide sequence isolated from the Sargasso Sea
tatggttaataaagtaattgttcctgatattggtgattttgagaatgtagagattatagaaattttagtaaaatcaggagataaaataaaaaaaaacgactctatagtaactctcgaaagtgataaatcaagtgttgaggtgccttcaacagcagaaggtatggtagaaaaaataaatgtaaaaataggagataaagtttcaaaaggtgatgtgcttatatcagtttcaggagaacaggccgatgttaatgataaggaaataaaatctagtaaagataaattgccgacagacacagaaaaaattattcaacaagcagaagatagtttagaaaaaaaagaagaaaaagttgtttcaagtaaaattgataaaaaaaatgagacaattattcaagtttccaaagatggtgatattgatcctatagaaacaaaagaatggttagagtctctttctgcggtgttagaaaaagatggaaaaaatagagctcaatttttaatcaaaaaacttattgatcattcttacaaagaaggctcagatttaatattgtctagaaatactccttacattaatacaataaaaccagaggaagagataaaatctccaggagatcaaaatttggaaagaaaaattagatctttcattagatggaatgcagcagcaatggttgtaagagcaaataaaaaaaatccagaacttggaggccatattggaacatttgcatctgctgcaactctatacgatgttggaatgaatcatttttggagagcaaaaaataataaatttggaggagatttaatttactttcaaggtcatagcgctcccggaatgtatgcaagagcttttcttgaagggagaattaatgaaaaagaattagaccattttagacaagaggtaaaacctggggggttatcttcttatcctcatccttggttaatgccaaaattttggcaatttcctacagtgtcaatgggtctgggaccaataatgtcaatctatcaagcaagatttaataaatatttaattaatagaggattgttaaaagatgaaggtagaaaaatttggtgcttcctaggggatggtgaaactgatgagccagaatctttaggagctataggattagcagcaagagaaaaattagataatttaatttttgtagtaaactgtaatcttcaaagattagatggaccagtaagaggtaatggaaaaattattcaagagcttgagggaatatttagaggagctggatggaatgtaataaaagttatttggggttcttactgggattcattgttagctaaagataaatctggattattaattaagagaatgggcgaagcagttgatggagagtatcaagcgtttaaagcaaaaggaggatcctatgtaagagagaagttttttggaaagtataaagaacttttagatctagtttctcaaatgacagatagagatatctggaaacttaatagaggtggacatgatccacataaggtttatgcagcatatcattctgcaatgaaaaataaaggaactccaacagtaatactggccaaaacaattaaagggtatggaatgggtaaatctggagaaagtattaatacaacacatcaacaaaaaaagttagatgaacaagaccttttatattatagagataggtttgatgttcctttaactgatgaacaggttaaaaatatagaatattacaaaccaaaagaaaattctccagaaatgaaatatttaaaagaatgccgaattaaattaggaggttttttacctgaaagatcttcatttgcaaaagcaataaaagctccaccaccagatatatttgcaaaaatgaaagagtccactggagaaaagcaaatgtctacaacaatggtattagttagaatgttaacaaatcttatgagagacaaaaatgtagctccaagactcgttccaattattccagatgaagctagaacttttggtatggaaggtttatttcaaaaaattggaatctatgctcacgaaggtcagaaatatgaaccagtagattcagaacaattgagttcatatcgagaagatataaatggtcaggttttagaagaaggcataactgaagctggcgctatttcatcatggattgcagcaggtacttcttatacaaatcacgatatttcaatgataccgatatatatattttactcaatgtttggttttcaaa

SEQ ID NO: 216786 - DNA, 1159 bp, Unknown
  Bacterial polypeptide expressing nucleotide sequence isolated from the Sargasso Sea
tatggctcaaaatatttcagttcctgatattggtgattttaaagatgttgaagtaattgaggttctggttaaacctggagataagataaataaaaacgatccagtcgttactattgaaagtgataaatctagtctcgaaattccttctccgtcctctggtgaaattaaagatttaaaagttaagataggtgataaggtttcagagggaagcatcctagctactattgaaaatggtcaagtaactccgactcctaaaaaaaaagaaataacgaaagaacctgttgaagaagaaccaaaaaaaaatggagacctacatcctgttaaacaagttaaaaaaatttttgctgagcctgcttctaaagatgatattgatccaatagaaaccaatgaatggattgaatctttaaattcagtaattgaaaatgatggttcgccacgagcgagttatttattaaatcaagtaatcgatcaagcttataaatctggtttagttttacctgacacaagaactactccttatataaatacaattcctcctgaaattgaagttaagtcaccaggcgatcaaaatattgagaaaaaaataagagcttacataagatggaatgctgcagctatggtggtcaaagcaaataaaagaagttcagaattaggtggacacattggaacctttgcatcagctgccactctttatgacgttggaatgaatcatttctggagggcaaaaaataataagtttggaggagatttaatttactttcaaggccactctgctcctggaatgtacgcacgagcatttttagaaggcagacttacctcgaaacaattagatggtttcagacaagaagttgatgaaggtggtttgtcctcatatcctcatccgtggttgatgccaaagttttggcaatttcctactgtttcgatgggtctagggccgatcatggcgatttatcaagcaagatttttaaaatatttaataaatagaggtttagtaagagacgaaggaagaaaaatttgggtcttcctaggtgatggcgaaatggatgaaccagagtcgcttggagcaataggcttggctgcaagagaaaagctagataatctaatttttgtaattaattgtaatcttcaaagattagatgggccagtcagaggaaacgga

SEQ ID NO: 216787 - DNA, 1137 bp, Unknown
  Bacterial polypeptide expressing nucleotide sequence isolated from the Sargasso Sea
agctcactatttgataaaagaattaattaataaagcttatatggaaggagctaatattccgtatacacaaaatacaccatatataaacactatcccagtaaatgaagaaaaaaaatcaaatggtgatcaaaatattgagagaagaattagatcattaataagatggaatgcggcggcgatggtagtaagagcaaataaaaaatttcctgaacttggaggtcatataggaacatttgcatccgcggctactctttatgatgtgggaatgaaccatttttggagagcaaaaaacaacaaatttggaggtgatttaatttattttcaaggccatagtgcacctggcatgtacgctagagctttcttagagggccggctaaatgagaagcaattagatagttttagacaagaagttaatccgggcggcttgtcttcttacccacatccatggttaatgccaaaattttggcaatttccaacagtgtctatgggtttaggcccaatgttagcgatctatcaagcaagatatatgaagtatttaattaatagaggtttaattaaagatgaaggtagaaaagtttgggcctttttaggagatggagaaatggatgagccagaatctttaggtgctattggtttagcagcaagagaaaaattagataatttaatatttgttgtaaattgcaatcttcaaagattggatggacctgttcgaggtaatggaaaaattattcaagagttagagggaatttttagaggggcaggatggaatgttcttaaggtcatttggggttcatattgggatccattattagcaaatgacaaaacaggtcatttagtaaaaacgatgaacgagactgttgatggagagtaccaagcaatgaaagcaagagatggcgcttatgtaagagaaaaattttttggtaaatacccagagactaaagatttagtttcaagtctatctgataaagatatttggagattaaacagagggggccatgatcctcataaagtttttgcagcctacgacaaagcgtcaaaaaatattggaagtcctacggttgtaattgcaaaaacaattaaaggctatggaatgggcaagagcggagaaagtgttaacactacgcaccaaactaaaaa

SEQ ID NO: 216788 - DNA, 853 bp, Unknown
  Bacterial polypeptide expressing nucleotide sequence isolated from the Sargasso Sea
atgacgtctcgcaaaggttctaaaaaaaccaacataaatacgcaagaattgctctctttttataaagatatgcttttaattagacggtttgaggaaaaagctggccagctctatggaatgggtttaataggtggcttttgccacctttacattggacaagaagctgttgttgttgggttagaggccgcagcagaagacggagacaaaagaattacctcctatcgtgaccacggacatatgcttgcttgtggtatggaccctaatggagttatggccgagctcacaggtagagccggtggatactccaaaggaaaaggtggttcgatgcatatgtttagcaaagagaagaatttctacggcgggcatggaattgttggagcacaagttcctcttggagctggactagcttttgcagataaatatttagaaaatgatcgagtaacttttacttattttggcgatggcgctgccaaccaaggacaagtctatgagacttttaatatggcatcgctttggaaattaccggtaatcttcgtaattgaaaacaatcagtatgctatgggcacatcgcagctacgctcaacctcaacaccagacatttatactagaggcgctggcttcgatatacccggagaggccgttgatgggatggatgttctttctgtaaagccgccggagataaggcggttaaacactgccgcgccggtaaaggcccctatattctcgaaatcaaaacttatcgataccgagggcactcaatgtctgatccagcaaaatacagaactcgagaagaagttcaaaaaatgcgggaagaaagggacgccatcgaaaatattagatccattttgttaac

SEQ ID NO: 216789 - DNA, 502 bp, Unknown
  Bacterial polypeptide expressing nucleotide sequence isolated from the Sargasso Sea
atggcagttaatatacccaaaaatttactagcagagttttatagaaagatgcttttgattaggcggtttgaagaaaaggcaggtcaactatatggtatggggaaaattggtgggttttgccacttatacataggccaagaggctgtagtagtaggaataacctcagtaaggcaagctggcgaccaaaccataacttcatatcgggaccatgggcatatgctggcctcaggtatggatcctaaaggggttatggcagagttaacagggagaataactggctattctaaaggcaagggaggttcaatgcatatgtttagcaaagccgaaaatttttttggcggccacggcattgtaggagcacaagttcccataggagctgggcttgcattttcaaacaggtatcagaaaaataaaaatgtgagtttcacatattttggagatggagcagccaatcaaggccaggtttacgaaacgtttaatatggcatccttgtggaaactcc

SEQ ID NO: 216790 - DNA, 1000 bp, Unknown
  Bacterial polypeptide expressing nucleotide sequence isolated from the Sargasso Sea
tctttaaaaacttatagagaagcaattaacgaagctcttctccaagaaatgaagaaagatgaaaatgttgtagtaataggagaagatgttgcaggaggcgcaggcactaatggagagcaagatgcatggggtggagtgcttggtgtaaccaaaggcttacttaagcactttggtagagagagagttattgatacgcctattactgaaactgctattatgggaatggcttctggagctgctttgacaggtttaagaccggttgcagaattaatgtttgtggactttatgggtgtttgttttgatcaaattttaaatcaaactgctaaattcagatacatgttcggaggcaaagctgtaacaccactaacgattagaacaatgtacggtggcggattaagagcagcaagtcaacatagtcaatgtttatatcctatgtttactcatgttccaggcattaaagtggttgtaccatccaatccttatgatgctaaaggtctattgactcagtcaataagagataatgatccggtaatttttatggagcataagaatttatatgatttatcaggagatgtaccagatgaatcttattcaattccttttggagaagctaattttacacgcgagggaaaagacataacctttataggcatgggtcaaactgttgatatatgtaataaggttgctgatactttaaaaaaagagggtacaacctctacagtgctagatctaagaactttatctcctctggatgaagattctattttagaagcttctgaagaaactggcaaagtagttattgtggatgaatcctatccaagatgtaatatcgctactgatatatcagctttaatttgtcagaattcatttgattcacttaaagcaggaataaaaatggtaactcctccacatactccagttccattttcaccaccattagaagatttataccttcctagcgaagaaaaggttttaagcgcagctaaagaaattctctaaa

SEQ ID NO: 216791 - DNA, 1663 bp, Unknown
  Bacterial polypeptide expressing nucleotide sequence isolated from the Sargasso Sea
atggcccaaaaaatttctgttcccgatattggcgattttaaagatgtagaagtaatagagatcttagtaaaacctggagatcaaattaaaaaggatgatccaatagtaacaatagaaagtgacaaatcaagtgttgaaattccctcgcctacaaatggagaaattaaagaccttaaagttaaagttggagataaagtttcagaaggtagtgtgctggcaataatagaaaatggtcaagcatccccaaaaatccaagtacaacctgcaaaacaaaaaacagaaaaaaaaacaaagaataaaacgtcaaaaaccaatggtaacttaagcccaataaatcaggtaaagaaagtgttcgcagaacctgcatcgaaggatgatattgatccaatagaaactaatgaatggatagactctttaaattctgtaatagaaaatgatggagcgcctagggcaagttttcttcttaataaagtaattactcaagcttacaaatcaggtttggtcttgccagataccaggaccactccctacataaatactattccccctgaggctgaagcaaaatctccaggtgatcaaaaaatagaaaaaaaaattagggcttatataagatggaatgctgcagcaatggtagtgaaagcaaataaaaaaagtcctgaacttggtggtcatattggtacttttgcatcagcagcaactttatatgatgttggaatgaatcatttttggagagcaaaaaatgataattttggtggagatctaatttattttcaaggacactctgctcccggtatgtacgcaagagcatttttagaaggtagattatcctcgaaacaacttgatgggttcagacaagaagtttccaaaggtggtttatcttcctacccacatccgtggttgatgcctgacttttggcagtttccaacagtatctatgggccttggacctattatggcaatttaccaagcaagatttttaaaatatttaatcaatagaggacttttaaaagacgagggtagaaaaatttgggtttttttaggcgatggtgaaatggatgaaccggagtcgcttggtgcaataggtttagctgccagggaaaaactagataatttaatttttgttataaattgtaatttgcaaaggctagatggtcctgtaagaggaaatagtaaaattattcaagagcttgagggaagttttagaggaactggttggaatgtaataaaagttatttggggatcatattgggatcaattgcttgcaaaagataaaacagggctattggtaaaaagaatgaatgaatgtgttgatggtgaataccaagcattcaaagcaaagggtggttcgtatgtcagagaaaatttttttggaaagtataaagaactgaaagatcttgtatcttcaatgacagataaagacatatggagattaaacagaggaggacatgacccacataaagtttatgcagcttatcattctgcaatgcaacataaaggttcaccaacagtaattcttgcaaaaactatcaaaggttatgggatgggtaaatcaggagaaagtatcaatactactcatcaacaaaaaaagttagatgaaaaagatctactatattacagagacagattcggtgttcccctgacagataaacaagtaaaaaatatga

SEQ ID NO: 216792 - DNA, 1692 bp, Unknown
  Bacterial polypeptide expressing nucleotide sequence isolated from the Sargasso Sea
aatgagcgaaaaattacttgttcctgacattggtgactttgaaaatgttgaggttatagagatacttgtaaaacctggtgaccaaattaaagaaaatgatccaattgtcacaattgaaagtgacaaatcaagcgttgaaattccttctacaattgctggaaaaatagatagtgtagcagttaaagttggcgataaagtttctaaaggtgatttattgcttaatcttaaatcatcatcaaaaatatcatcagaaagcacccttccaaaagatacagaaaatataattaaacaagctgaagaagcaatggctgaaaaaaaagaggaaaaaaaaattattaaagagccagtagtagagaaaagacaatctacaattcaagttgttaatggttctgatatcgatccacttgaaacccaagattggttagagtctttatctgctgtaatttcgaaagatggaaatcatagagctcattttttaattaaagaactaattaataaagcatatcgtgagggagctaatattccttatactcaaaatacaccatatataaatacaatacctcctgaggccgaagtaaagtctaatggtgatcaaaatattgaaagaagaattagatctttaattagatggaatgcagcagcaatggtagttcgtgcaaataaaaaatatcctgagcttggtggacacattggtacatttgcatctgctgcaacattatatgatgttggtatgaaccatttttggagagcaaaaaataataaatttggaggagatttaatttatttccaagggcatagtgctccaggaatgtatgcaagggcatttttagaaggcagattaaatgagaaacaattagatagttttagacaagaggtaaagcctggaggtttatcgtcatatccacacccttggttaatgccaaaattttggcagttccccacagtatcaatgggcttaggccctatgcttgctatctatcaagctagatacatgaaatatttaatcaatagaggtttgattaaagatgaaggaagaaaagtatgggcttttttaggtgatggcgaaatggatgagccagagtcaatgggagcaattgggctggctgcgagagaaaatttagataatttaatttttgtagttaactgtaatcttcaaagattggatggtccagttagaggtaatggaaaaattattcaagaacttgagggaagttttagaggagctgggtggaatgtaataaaagttatttggggatcatattgggactcattgatagctaatgataaaactggtcatttagtgaaagttatgaatgagactgtagatggtgagtaccaagcaatgaaagcaagagacggagcctatgtaagagaaaagttttttggaaaatctcctgaaacatttgaattagtttcaagtatgtctgataaagatatatggcggctaaatagaggtggacatgatcctcataaagtttttgcagcatacgataaagcgaccaaacatcagggaagcccaacagtaataattgcaaaaaccattaaaggttatggaatgggaaaatcaggagaaagtgtaaatactactcatcaaactaaaaaattagatgttgatgacctgatgtactatagagatcgatttgatgttcccttaacagataaacaggtgagaaatattgaatatttaagccc

SEQ ID NO: 216793 - DNA, 1468 bp, Unknown
  Bacterial polypeptide expressing nucleotide sequence isolated from the Sargasso Sea
cccagggcttggagggcatatttccacttacgcatcggttgcaactctttatgaggttggttttaatcatttttttagagggcctgatcgtaaagaaggatcagaccttgtcttttttcagggtcattcgtcacctggagtttattctagagcttttcttgaaggcagattaactaaagaagaattaaaaaactttagaagagagctctctgaagaaggcggtctatcctcttatccgcatccttggttgatgccaaacttctggcaatttgctacagtatcaatgggtcttgctcctgttatggctatctaccaagcacgttttttgaattatttaattgacagaaatcttgttaaggacgaacagagaaaggtatgggcatttcttggcgacggggagatggacgagccagagtcgaaaggcgcacttactttagcctctagagaggaattagataatttaatttttgttattaattgtaatctgcaaaggttggatggtccagtcagaggcaatggaaatgttatacaagaattggaaggagctttcaggggggctggttggaatgttataaaattaatatggggcagtgaatgggatgagctttttgaaaaagacacctcaggtaagcttttagaaaggttaggagaaatagtagatggagatttgcttaaatacgtagttgaagatggtggctacttcagaaaacatttttttggtaaatatcctgaattgcttgaattagtagcccatttaagtgatgatgaattaacaaagttaaaactgggaggtcacgatccaataaaagtatacaatgcgtacttgagtgcggtcaatcataaaggtagcccaaccgttgttctggcgcgcactattaaaggttatggtatgggtgaagctggtgaagggagaaatattacccataatcaaaaaaaattaaacaagaatgaacttttatattttagagataggtttaatattaaactctctgatgataaagctgtccatgctccattttatgagcttgaccaggatagcgaagaactggaatacctgaaaacaaaaagggaaaaactcggtggatatctaccagctagaattgttccaaatataaaaatggaaattccggatatttctattttcaaagaacttttgaatggaaccggagaaagagcaatttctacaacaatggcttttgtaaggttacttacaattatcagtaaagataaaaacattggtaagcagatagtaccaataatccctgatgaggcaagaacttttggcatggatcccttatttcgccaattaggaatttacgcccacagaggacagctatacgatccagtcgactcagatcaattcctttactataaggagtctaaagatggacaaattcttgaagaaggaataaatgaagcaggtgcaatatcttcttttattgccgccaggcatgagctacactactaa

SEQ ID NO: 216794 - DNA, 766 bp, Unknown
  Bacterial polypeptide expressing nucleotide sequence isolated from the Sargasso Sea
atcattttccgggttgaagcctgtagtagaatttatgacttttaatttttctcttcaggctatggatcacataattaattcagccgctaaaacactttatatgggtggtggtcaactaaactgccccatagtatttcgtggaccaaatggagcagcagcaagagttgctgcgcagcatagtcaagatttaacggcttggttttcgcatataccaggactaaaagttatatcgccgttctctgcaagagatcataagggactgctcaaggcggccatcagagatcccaatcctgtcatctttcttgaaaatgaaatcttatattctgaccaagagtcgatcatagaacataatgatgatataactccaatagggaaggcaaaaatactcagagaaggctctgatataactctaatttcccattctatatcactcaaaatgtgtttagaggcatcaaaaaaattagccaagaaaaatattgattgtgaggttcttgacttaagaaccatcaagccactagacacggaagcaattattagctcaatacagaaaacaaacaaatgtgttgttgttgaacaaggctggtcacaatctggggtatcatcggaaattatatctgttataatggaaaacgcttttgactggcttgatgcccctgttttacgcctaacaggtaaagatgttccaatgccatatgctgagaatttagagaatttagcattgccatcagaagatgaattgatcaagattgttgaaagtttagtctaa

SEQ ID NO: 216795 - DNA, 1965 bp, Unknown
  Bacterial polypeptide expressing nucleotide sequence isolated from the Sargasso Sea
aatgacagaaaaattattagttcctgacattggtgattttgaaaatgttgaggtaatcgaattacttgttaaagaaggtcaagaaataaaaaaaaacgatccagtaatcactatagaaagtgataaatctagtgttgaaataccatccatcttttcaggaagagttgaaactatttcagtaaaagttggagataaagtttcaaaaggagatctacttcttaatatttcaagttccaatcaaacatctaaatcatctagtgaagttccaaaaaatactgaaaatttaattcaagaagctgaaaattctttgaaaaaaaaacaagaacaaaaaacaataaatgaaaatattatgaaagaaaaacgagagataattcaagttataaacgaaggtgatattgatccattagaaacaagtgaatggctagagtctctttctgcagttatgcaaaaagatggcaatcagagagcacactatttaattaaagaacttattaacaaagcttacatggaaggcgctaatattccttatactcaaaacacaccttatataaacactataccagtaagtgaagaaaaaaaatcaaatggtgatcagaacattgaaagaagaattagatcattgataagatggaatgctgctgcgatggtagtaagagcaaataaaaagtttcctgaacttggaggccatattggaacatttgcatctgctgctactctttatgacgttgggatgaatcatttttggagagcgaaaaataataaatttgggggcgatttaatttattttcaaggtcatagtgcaccaggtatgtatgctagagcttttcttgaaggtcgactaaatgaaaagcaattagatagtttcagacaagaagttaatcctggtggcttatcatcttatccgcatccttggttgatgccaaacttttggcaatttccaacagtctcaatgggattaggtccaatgctagcaatttatcaagcacggtacatgaagtatttaataaacaggggacttattaaagatgagagcagaaaggtgtgggcttttttaggtgacggagagatggatgagccggagtctttaggtgctattggtttagccgctagagaaaatttagataatttgatatttgtagttaattgtaatcttcaaagattggatggaccagttcgaggtaatgggaaaatcatacaagagttagaaggaatttttagaggagcaggttggaatgttatcaaagtaatttggggttcatactgggatccattattagcaaatgataaaacaggtcatttaataaaaacaatgaatgaaactgttgacggcgaataccaagcaatgaaagcaagagatggtgcttatgttagagaaaaattttttggcaaatatttagagaccaaagaacttgtatcaagtttgtcggataaagatatttggagattgaacagaggaggacatgacccgcataaagtatttgcagcttatgataaggcatcaaaaaatgttgggagtcctacagtagtaattgcaaaaactattaaaggttatggtatgggaaaaagtggagaaagtgttaacaccacacatcaaacaaaaaaattagatatagatgatttaatgtactatagggataggtttgatgtaccgttaacagatcagcaagtaaaaaatattgagtattataaacctgatcaaaattctcctgaaatcaagtatctcaaggaaagaagaattcaattaggaggttttatacctgaaagaacaacttatgcaaaaccgattaaggcccctccaaaagatatttttgataacatgaaagagtctactggacaaaaagaaatgtccaccactatggctctagttcgaatgcttacaaatcttttgagggataaaaatgttgctcaaagattagtacctataattcctgatgaggcaagaacttttggtatggagggcttttt

SEQ ID NO: 216796 - DNA, 1237 bp, Unknown
  Bacterial polypeptide expressing nucleotide sequence isolated from the Sargasso Sea
atgagcctgaatcaatggggtgccattcatctcgcagcccgggaaaaactggacaatcttatttttgtcatcaactgcaacctccagcgactggacggcccagtccgaggaaacggcaaaatcatccaggaactggaaggagagttcaggggcgcaggttggaatgtgatcaaagtcttatggggttcctattgggatccgcttctggccaaagacgaccaggggcttttgcggaagagaatggaagaagccatcgacggagaatatcaggcctttaaagccaagggtggtgcttacacacgcacccatttttttggcaagtatccggaactcttggaaatggtctccaacatgagtgatgaggatatttggagactgaatcgcggaggccatgatccacacaaagtttatgctgcctatcaagctgcagtaaaacataatgggcaacccacggtgatattagcaaaaaccgttaagggttacggcatgggcggatccggagaaggtgccaacattactcaccaacagaaaaaaatccgtcctgaagatctcctggtgttccgtgatcgttttcaccttccactctccaatcagcaggtggaacagatggagttcttccatccaggagattcgtcccaggaagtcgaataccttcatcagcaacgcgaaaaacttggaggttaccttccctcccggagaactcgtggagatgatttaaaaactccggaacttccattttttgagcggctgctgaaaagcactggggagcgtgaaatctcaacaactcaggctctggttcaagctatgaccttattgtgcagggatgaaaagttgggcccccgaatcgttcctatcgtccctgacgaagcacggactttcggaatggaagggatgttccgtcaaatcgggatttatgcccatgaaggccagaaatacgaaccggtggaccgtgaacaactgatgtattaccgagaagatcaaaaagggcaatttctgcaggaaggaatcaacgaagatggtgccatttcttcctggattgcagcagcgacttcctacagcaattccggaatccagatgatacccttttacaccttttactcgatgtttggttttcaacgggttggggatttgatctgggcagcaggtgacattcaggcaaggggatttctgattgggggaacctcaggaagaacaaccctcaacggcgaggggctgcagcacgaagatgacaaagcca

SEQ ID NO: 216797 - DNA, 2656 bp, Unknown
  Bacterial polypeptide expressing nucleotide sequence isolated from the Sargasso Sea
atgccccccccagaaccccgacagactcttcccgatacggacccagaggagacggatgaatggctggaatccttgaggaccctagcatcgtcacagggctcgtcaagggcgcggctactcctacaggaggtaatgtcagaagcgtcttccttggggattgacatttccccatctagaacaccgtaccttaactcaatttccattgagcaacagtctccatatcctggaaacctaacattggagaagaagatccagaatcacgtactgtggaatgcggccgctatggtctcagatgcaaacaggagaatagacgggataggcgggcatatttccacttacgcctcaagctcgactttgtacgaagtaggattccagcatgtattcagaggaaaggatctcaatggcattggagacgccttattcatccagggacacgctagtcctggaatttatgctcgagcattcctagaaggaagaatttccacagatcaggtttctaacttcaggcaggaggccttcgtggagggactgtcttcataccctcatccaagactgatgccagaattctgggagtatcccaccgtttcgatgggtttagggccacttggtgccgtaatgcaggcgagattctggaagtatctcgaccaaagaggaatcgcagatacatcggagagtcgggttttcgccttcttaggggacggagagatggacgaaccagaggcaatagcttccatagcagtggccggtagggaacagttggacaatctaatcgtggtagtaaattgcaatttacagaggctagacgggcctgtaagagggaattccagcatcatccaggaactagagggcctctatcgaggagcgggatggacagtaatcaagctaatttgggggtcaggatgggacagagtattccaaagagacacaaaaggagagcttctggagaagatggaggggatcactgatggggactggcaacgactcagcactctatcaatcgacgatttccgagaagagatgttctctggaagcgagtctctgaaggccctaggaacctcaatttctgataatgaaatagaaggccttaccagaggaggtcacgatccagtaaaggtgtattctgcatacaaatcagctatttctgcaaagggcccagctgtaattttggcacatacagtgaaaggctggggaatagactctttcgagggtaggaactcaactcatcagaagaagaagatgactatcgacgacctgaaagcttaccgtgatgctctggagattgatatcgaggactccagactcgaagaaaatcccttcatcgcactagaagaagactcggatgagatcaagtatctgaccgaaagaagaaccgcactcggtggatatctaccctcaagaaaaccctctaaaattaacttcgatcttcccggacaagacacatattcagcattcgaccagggtaccccagaaggtcaagaggtttctacaaccatggctttcgttcgcctgctaagaaatctgatgaaatcagagataggctccagagtcgtgcccatcatccccgatgaaggcagaaccttcggaatggatccactattcagcgagtttgagatattcgcttctagaggccagaagtacactccagtagaccataagatgctcctaaactacaaggagtcggaatcaggtcaggttcttcaggaaggaatttcggaggcaggagccattgcctcatggatatcaagtgctacttcgtactctagtgcaaactctgctaccatgcctttctacaccttctactctatgttcggatttcagagggtaggggatcagatttggagtgctgcagacgctcgcgctcgcgggttcctgatgggcgcgacagcggggcggaccacgcttaacggagagggtctacaacatcaggatggacacagtctactgatggcctcggcagttcctcactgtcgagcatgggatcctgcatatgcctacgagctagccgctatcatcagacatggaatagatgagatgtggggccagaatcttgatgtcttccactatgtgatgctttacaacgagaatcagcagcagatgccaaagccacctgacgtggatgatggcatcgttaggggagcgtacaaaatagaagaagtgggggagggaagaaaaaagattaggctactcggatccggcccaatcctgaggaacgttagggaggcagcctcggaactactcagtgaacacgggatatcatcagaggtttggtccattacctcctatggggaacttcgcagggaaggtcttgagcacgaaagatcaagacgcctgaaccctgaaatttccgaagaaccatacgtctccagatgttttggagacgacacgcccacagtcgctacttctgactacatctgctccgtccctgagatgattcagagatggataggaggcagatacattgtacttggaacagatgggttcggaagatccgacacacgagaagcccttcgttcgtttttcgaaatagatacaaacagcattgttgttgcagcgatttcggcattggagcaggaaggaacattaccttctggcacggtagagaaagaattggaaaagaggaacctaaacaaagagagaatagacaagacagagtgat

SEQ ID NO: 216798 - DNA, 1225 bp, Unknown
  Bacterial polypeptide expressing nucleotide sequence isolated from the Sargasso Sea
atgactgaaaaattattagttcctgacattggtgattttgaaaatgttgaggtaattgaattattggttaaagaaggtcaagaaattaaaaaaaatgatcctgttgtaactatagagagtgataaatctagtgttgaaataccatcaatttcttcaggcaaaattgagtctatagttgtaaaagtaggtgataaagtttcaaagggtgatttaattttgaatatatcaagtgttgataataaattttcctcttctcaagatgttccaaaaaatactgaaaatttaattaaagaagcagaaagttccttaaaaaaaattcaagagcaaaaaaaactaattcaaaaaacagagaaagaaaaatctgaaattatacaagttgcaaatgaaggagatattgatccattagaaactaatgagtggctagaatctctttcagatgtcatcgaaaaagatggaaatcagcgagctcattatttaatcaaggagctaataaataaagcatacatggaaggagctaacatcccatatacacaaaatactccttacataaatacgatccctgtaagtgaagaaaaaaaatcaaatggcgatcaaaatattgagagaagaataagatctttaatacgatggaatgctgctgcgatggtagtgagggcaaataagaaatttcctgaacttggaggtcatataggaacttttgcatctgccgcaactttatacgatgttgggatgaatcatttttggagagctaaaaacaataaatttggaggagatttagtttattttcaaggacacagtgcaccgggtatgtatgcgagagcatttctcgagggaaggctgaatgaaaaacaattagatcgttttagacaggaggttaatccaggtggattatcttcttaccctcatccgtggttaatgccaaacttttggcaatttccaaccgtttcaatgggtttaggacctatgctagctatttatcaagccagatatatgaaatatttaattaacagaggtttaataaaagatgaaggtagaaaggtttgggcttttttgggtgatggagaaatggatgagccagagtctcttggagcaatagggttagctgcgagagaaaacctagataatcttatatttgttataaattgtaatcttcaaagattggatggacctgtgcgaggtaatggaaaaatcatacaagaattagagggaatttttagaggagcag

SEQ ID NO: 216799 - DNA, 1882 bp, Unknown
  Bacterial polypeptide expressing nucleotide sequence isolated from the Sargasso Sea
gagaaagcttataatcttgtattcgtcataaattgtaatctacaaaggctagatgggcctgtcagaggcaattctaaaattattactgaacttgctaagcagtttagcggtgcaggctggaatgttgtgcatctaatctggggaagaaaatgggatgaattaataaataatgatgaagatgggctattacagaaaattatgaatgagaccgtagatggagaatatcaaaactacaaagctaagggcggcaaatacactagagagaacttttttggtaaagatcctgaagtgcttaaaatgatagattcattaagtgataaagaagtagaagatttaaatagaggaggacatgatccaactaaaatttacaatgcttatcgcttagcatatgaggaaaaggataaaccgacagtaattcttgcttttacgataaaaggttatggtattggttcaagacaggcagataatacagcccatcaggtaaaaaaacttacgaaagagaatctagaagattttattgataaatttaatctaccaataaaaaaagaaagcttagacaatccaaattttcttaccctaaacagggataaaaaggttaaggaatatttactttcaagaagacaagaattggggggcttattgccttcaagaaaagtctctaaggaaaaattaatagcaaaaaaagaatctttcttagatttcgataaaaaattagatagagagcagtcaacaacaatggtttttgtaagactgctaactaagcttttaagagatgcagcaataggttcaagagtagtaccaattgttccagatgaggcaagaacatttggcatggatgcattatttagacaattcggtatttattcatctgaaggtcaaaaatatgaaccagaagatgcagataaagtaatgttttatagagaaagtgaatctgggataatgcttgaggaaggcattaatgaagccggtgcattttcagcatggctagctttagcaacatcttattcaaacaatgatttgccaatgattccgttctatatcttttactctatgtttggttttcaacgtactcatgatttagcttgggccgctggagattctagagcaaggggttttttacttggcgctacatcaggcagaacgacattaaatggtgaaggtttgcaacatcaggatggccatagtcatatacttgcatcaacaataccaaattgcagggcatatgatccatgctactcatatgaactatcagcaataatacaagaaggcattagtgatatgtatgtaaatggcaatgataggtattattacattactctaatgaacgaaaactactctcatccagccaaaccaaaaaaacttaaaaatgaagagattcttaagggggcttataagctgaaagaaaataaaaatataaatcttagaatattagcttcaggtgttactctaaattttgcattggaagctgagaaagaacttaaaaattataatattaatgctgatatttggtcgataaccagttttaatgagttgtacagagaagggatagagatagaaagacaaaatagactaaattcaacatcaaaaaaatcttatgttgagaattgttttagtgatgaaatgccaacaattgcagtttctgaatatcaaaaggcatatccaaaccaaattagagagtgggttaatggagagtataaaattttaggtacagatggttttggtagaagtgatacaagagaagaattaagggatttttttgaaataagcaaagaacatataattttaaatagtttattgctgcatggaaaaaagaaagaagcagaaaaatttattaaagattctggtatggttttaagtaaagaggcgccatggaagagttaac

SEQ ID NO: 216800 - DNA, 1318 bp, Unknown
  Bacterial polypeptide expressing nucleotide sequence isolated from the Sargasso Sea
atgagcgaaaaattacttgttcctgacattggtgactttgaaaatgttgaggttatagagatacttgtaaaacctggtgatcaaattaaagaaaatgatccaatagttacaattgaaagtgacaaatcaagtgttgaaatcccttctacaattgctggaaaagtagatagtttagcagttaaagttggtgataaagtttctaaaggtgatttattgcttaatcttacatcatcaccaaaaacatcatcagaaagcactcttccaaaagatacagaaaatataattaaacaagctgaagaagcaatggctgaaaaaaaagaggaagaaaaaattatatctgaaccaataattgagaaaaaacaatctacaatacaagtagttaatgggactgatattgatccgcttgaaactcaagattggttggagtctttatcagcagttatttcaaaagatggaaatcaaagagctcattttttgattaaagaactaattaacaaagcttatcgagaaggagcgaatattccttatactcaaaatacaccttacattaatacaatacccccagaggctgaagtaaagtctagtggtgatcaaaatattgaaagaagaattagatcgttaattagatggaatgcagcagcgatggtagttcgagcaaataaaaaacaccctgaacttggtggacacattggtacatttgcatctgctgcaacattatacgatgttggcatgaaccatttttggagagcaaaaaataataaatttggtggagatttaatttatttccaagggcatagtgctccaggaatgtatgcaagggccttcttagaaggtagattaaatgagaaacaattagatagttttagacaagaggtaaagcctggaggtctatcgtcatatccacacccatggttaatgccaaaattttggcagttccctacagtatcgatggggttaggccccatgcttgctatatatcaagccagatacatgaaatatttaatcaatagaggtttgattaaagatgaaggaagaaaagtatgggcttttttaggtgatggagaaatggatgagccagagtcgatgggagcaattgggctggctgcaagagagaatttagataatttaatttttgtagttaattgcaatcttcaaagattagacggtccagttagaggtaatggaaaaattattcaagaacttgaaggaagttttagaggatctgggtggaatgtaataaaggtaatttggggatcttattgggactcattgatagctaacgataaaactggtcaattagtaaaaattatgaatgaga

SEQ ID NO: 216801 - DNA, 1239 bp, Unknown
  Bacterial polypeptide expressing nucleotide sequence isolated from the Sargasso Sea
agactgtcagaaaaacaattagatagttttagacaagaagtaaataaaggtggtctttcatcttaccctcatccttggttaatgccaaaattttggcaattcccaaccgtttcaatgggaataggaccaatgttggcaatataccaagctagatttatgaaatatctaattaatagaggattaatgaaagatgaacatagaaaagtttggtgtttcttgggagatggagagatggatgaaccagagtctttaggtgcgataggtttagcagctagagaaaatttagacaatcttatatttgtagttaactgtaatttgcagagattagatggacccgttagaggaaatggaaaaataattcaagagttagaaggtatttttagaggtgcaggatggaatgtaataaaagttatctggggttcttattgggattcattgttagcaaacgataaatctggtcatcttattaaaataatgaatgaaacggttgatggtgaatatcaagcttttaaagctaggaatggtttatatgttagggaaaaattttttggcaaatatccgcaaactttagaattagtttcatcaatgtctgataaagatatttggagattaaatagaggtggacatgatcctcataaagtttatgcagcttatgataaagctgttaaaaatactggaagtccaacagttattgttgctaaaacaattaaaggatatggaatgggaaaatctggagagagcgtaaacactactcatcaacagaagaaattagatgtagatgatttattatattatagagatagatttgatgttccattaaatgatgatcaagttaaaaatatagaatattttaaaccagatgaaaattctgaagaaattaaatatttaaaagaaagaaggatgaaactaggaggtttcataccagaaagaacttcatattcaaaaccaattaaggctccaactaaagacatttttgattttatgaaagtttctactgggaacaaagagatgtctacaactatggccctagttaggattttgactaatttattaagggataaaaatgttgcacctaaattagttccaataattcctgacgaagcaagaacttttggaatggaaggttttttccaaaaaattggtatttatgcacatgagggtcaaaaatacgaaccagaagattctgcacaactgtcttcatatagagaggaaaaaagtgggcaggttttagaagaagga

SEQ ID NO: 216802 - DNA, 925 bp, Unknown
  Bacterial polypeptide expressing nucleotide sequence isolated from the Sargasso Sea
tacagcatacacaaatcacgatatagaaatgataccaatctacattttttactcaatgtttgggtttcaaagagtaggagatctagcatgggcagcaggtgatagccaagcaaggggttttttgattggagctaccgcaggtagaacaacactagcaggtgaaggtctacaacaccaagatggacatagtcatttaatagcttcaacaatacccaattgtgtaacttatgatcccacctttcattatgaattagcagttattttcagagaaggtatgaggcgaatgcatgaaaaaaaagaaaatgtcttttattatattacgacaatgaatgaaaactattctcaccctgagatgccaaaagaaaagaactgtgaagaaggaattcttaaaggcatgtataagattagagaatttgataaatttaaaaaaacaaaaattcaacttttaggttcaggtacaattttacgtgaaatgatatcagctgctgaaattctacaaaatgattatcaaatagatagtgaaatttggagtgttacaagttttaatgagttaagaaaagatggaatggaagttgaaagatataatttattaaatccagataaagatcaaaaaatatcatatgtagagcaatgtttaggtaaaacagagggacctatcatggcagcttcagattatatgaggatgcattcagatcaaataagaccgtataccaataaaagtttttattctttaggaacagatggatttggcagaagtgatactagaaaaaaacttagaaaattttttgaagtggataaagaacacttggttgcttatagtttaagtgtcttagctaaagagcagttaataacttcaaaatatgcgaaagaggctataaaaaaatacaatattgatggtgaaagaccaatgcctactaaattataa

SEQ ID NO: 216803 - DNA, 1226 bp, Unknown
  Bacterial polypeptide expressing nucleotide sequence isolated from the Sargasso Sea
gatgtaccgcgatgatgatcccattgaaaccagcgaatggctcgacgcactagagtcgttaatcgaaaacgaaggcgtcgaccgtgccaaatatattctggagcgcttgtctgagcgcgccagccgcgacggcaccgagctgccgtattccattaccacgccgttccgcaacagcattcccgttacccaggaatcccggatgccgggtgacctgttcatggagcgccgtatccgttccctgattcgctggaacgccatggccatggtggtgcgggccaacaagcgcccgggtgacctgggtggccatatctccaccttctcttctgcagccaccctttatgacgtgggcttcaactacttcttccacggcggtggcgacgaacgcgcgtcagacctggtgtatttccagggtcacgcatcgcccggtatctacgcccgttccttcctggaaggccgcttcagcgaagcgcagttggacaagtatcgtgaagaggtagatggcgacggcctgtcttcctacccgcacccctggctgatgccggattactggcagttcccgactgtatccatgggtctgggccctatccagtctatctaccaggcccacgtaatgaagtacctgcacagccgtgagctgatcgacatggacggccgcaaggtgtgggcatttgtgggcgatggtgagtgcgatgagccggaaaccctgggttctatctccaaggccggccgcgagaagctggacaacctgatctgggtggttaactgcaacctgcagcgcctggacggcccggtacggggcaacggcaagattgtccaggaactggaaggcgtgttccgtggtgccggctggaatgtgatcaaggtggtctggggtcgcatgtgggatccgctgttcgagaaagacgaagacggcgtgatgcaacgggccatggacgagatctgtgatggcgagctgcagaacctgaccttcaagggcccggcttacacccgcaaggaattcttcggcaagcatccggaactggccaagctggcggaaaacctttctgacgaagatatccagaagctgaaccgtggtggccacgacccgtacaaggtttacgcggcctaccacaaggcggtaaaccacgcgaacggcaagcccaccgtgattctggcccacaccatcaagggttatggcttcggtgcagcgggcgaagcccagaacaccgcgcactccctgaagaagc

SEQ ID NO: 216804 - DNA, 1216 bp, Unknown
  Bacterial polypeptide expressing nucleotide sequence isolated from the Sargasso Sea
ttcaggtgaccgtcaagtttcatcaacaatgacgtttgtacgtgtacttaacgcgctactgaaagacaagaaaattggtaagcgtattgtgccaattatacctgatgaagctcgtacattcggtatggaaggcttgttccgtcaggtaggtatttacgccaatgaaggccagaaatacgtccctcaagatgccgaccaagtcgcttactatcgcgaagataagaaaggtcaggtattacaagaaggtattaacgagctaggtgcaatggcatcgtgggttgcgtcgggtacgtcttactcaacgtgtaacgctaccactattccgttctacatctactactcaatgtttggtttccaacgtgttggtgacttggcgtgggcagcaggcgatagccaagcacgtggtttccttttaggcgcaactgcgggtagaaccacacttaacggtgaaggtctacagcaccaagacggccactcacatgttcaagcgaacctaattcctaactgtattacttacgacccaacgtatggttacgaagtagcagttatcgttcaagacggtctacgtcgcatgtacggtaacaatgaaaatatcttctattacctaacgttgatgaacgagaactatcagcaccctgcaatgccagaaggtgatgatgttgctgagcagatcattaagggtatttacaagcttgagcgtgttgaaaacgacaagtctaagcttaacgtacagctaatgggctcaggtactatcttgaacgaagtgcgtaaagcagctcagatactatgtgacgactacaacgtgtcttctgacgtttactctgtgacctcattcaacgagctagcccgtgaaggtcaagacgttgcgcgttggaacatgctaaatccagaagctgagcaaaaagtaccttacattggtcaggtaattacgaaagacgcaggtcctgcgatttctgccactgactatgtgaagaactactcagaccaagtacgtgcgtttatcgacactgaataccgttgtctaggtacagacggtttcggtcgaagcgacagccgtgaaaacttgcgtactcactttgaagttaatgcgtcatacattgtggtggcatcactatacgaattagctcagcgcggcgacgttgagaagaaagtggtagcagaagccattaagcgttttgatattaacgctgaaaaacttaacccactttacgcgtaa

SEQ ID NO: 216805 - DNA, 1345 bp, Unknown
  Bacterial polypeptide expressing nucleotide sequence isolated from the Sargasso Sea
atgagtgaaaaaatacttgtacctgacattggtgattttgaaaatgttgaggttatagagatacttgtaaaacctggtgatcaaattaaagaaaatgatccaatagttacaattgaaagtgacaaatcaagtgttgaaattccttctactgtttctggaaaagtagataatgtgacggttaaagttggtgataaagtttccaagggagatttattgctcaatcttacatcaaaaacatcgcctgaaagcattcttccaaaagatacagaaaatataattaaacaagcagaagaagcaatagctgaaaaaaaagaggaaaaaaaaattattagagaaacagttgtagagaaaaaacaacctacaattcaagttgtaaatggttctgatattgatccacttgaaactcaagattggttagagtctttatctgcggtaatttccaaagatggaaatcaaagggctcatttcttaataaaagaattaattaataaagcttatcgtgaaggagcaaatattccttatactcaaaatacaccatacattaatacaatacctcctgaggctgaagtaaagtctagtggtgatcaaaatattgaaagaagaattagatcgttaattagatggaatgcggcggcaatggtagttcgagcaaataaaaaatatcctgaacttggtggacacattggtacatttgcatctgctgcaacattatatgatgttggcatgaatcatttttggagagcaaaaaataacaaatttggtggagatttaatttattttcaaggacatagtgctccaggaatgtatgcaagggcattcttagaaggcagattaagtgaaaaacaattagatagctttagacaagaagtaaagcctggaggtctatcgtcatatccacacccttggttaatgccaaaattttggcagtttcccacagtatctatgggtttaggtcccatgcttgctatatatcaagctaggtacatgaaatatttaattaatagaggtttgattaaagatgaaggaagaaaggtgtgggcttttttaggcgatggggagatggatgagcctgagtcaatgggagctattggattagctgccagagaaaatttagataatttaatatttgtaataaattgtaatcttcaaagattggatggtccagttagaggtaatggaaaaattattcaagagcttgaaggaagtttcagaggatctggctggaacgtaattaaagttatttgggggtcatattgggactcattgcttgctaatgataaaactggtgacttaataaaaattatgaacgagacagtagatggtgaataccaagcaagaaagcaag

SEQ ID NO: 216806 - DNA, 1153 bp, Unknown
  Bacterial polypeptide expressing nucleotide sequence isolated from the Sargasso Sea
attgggtgcaattggtttagcagctagagaaaaattagataatttaatttttgtagttaactgtaatttacaaagattagatggacctgtaagaggaaatggcaaaattattcaggagttagaagggatttttagaggatctggttggaatgttataaaagtaatttggggttcatattgggatcaattattagcaaaagataaaactggtcatttagttaaactaatgaacgagacagttgatggagagtaccaagcttacaaagctagaaatgggctatatgtgagagaaaaattttttggcaaataccccgaaacaaaagaattagtatccgctttatcagacaaagatatatggaggttgaatagaggtggtcatgatccacacaaagtttatgcagcatatgatcaggcttcaaaaaatgtgggaagtccaacagttattatagctaagactataaaagggtatggaatgggtaaatcgggagaaagtgttaataccactcaccaacaaaaaaaaatggatactgacgatttaatgtattacagggataggttcgatgttcctttgaccgacaagcaagttagagaaattcagtattttagaccagatgaaaattctccagaaataaaatatttgaaggaaagaagaattaatttaggtggatttattccagaaagaacaacttatgccaaaccaattaaggctccaccaaaagatatttttgactctttaaaagcatcaactggaacaaaagaaatgtctacaacaatgatttttgttcgattattaacaaatctactaagagataaaaatgttgctccaagacttgttccaataattcctgatgaagctagaacttttggaatggaaggtttttttaaaaaaatagggatttatgcacatgagggtcaaaagtatgaaccagaagattcagaacaattaagttcttacagagaagataaaaaaggacaagttttagaagaaggaattaatgaagcaggatcaatgtcatcgtggattgcagcggggacagcctattcaaaccatgatattgaaatgataccaatatatcttttttactcaatgtttggatttcaaagaacaggtgattttaattgggccgcaggagatagtcagtctagaggtttt

SEQ ID NO: 216807 - DNA, 1276 bp, Unknown
  Bacterial polypeptide expressing nucleotide sequence isolated from the Sargasso Sea
atgacttggggcgaagagcgacgaaaggggggggttgtgagtcagttagaagccactgaagttgaggaatggacagagtcgctggattctgtattgagggtgaatggtcctgcggccaccagccagctactcaggcacctctctgagcacgcacaaagcgcccgagtcccgctccccagcgccattacgacaccgtttcgcaacaccatttctccgcaggatgagcggtccatgccgggtgatctgttcatggagcgccgtatccgttccttggtgcgatggaacgcgatggcgatggtgatgcgtgccaacgacaacgaggacggattggggggacatatttcaagcttttcatcgagcgcgacgctctacgacgtcgggatgaatcacttttttcgaggcactgtaaatggccaccccggcgatttggtgtattaccaggggcacagcgcgccgggtatgtatgcgcgctcctatctcgagggcgtgattagcgaggcgcaactcgaaaactttcgtcgcgaagtgggtgggcaggggctgtcgtcttacccgcacccctggctaatgcctgactactggcagtttccaactgtttcgatggggcttggcccgatacaggcgatttatcaggcccacgtgatgaaatatcagagtaagcggggactcgtagatcatcgtgaccgcaaaatctggtgttttctcggagacggtgagtgcgacgaacccgagtcactgggcgcgattgcgttggcaggtcgggagcgcctggggaacttgcactttgtcatcaactgcaatttgcagcgccttgatggtcctgtcaggggtaatggcaaaatcattcaggagctggagggcgtgttcagaggcgcgggctggcacgtcatcaaagtagtgtggggacgcaaatgggatcccctgatcgagcgcgatcaaagcgggctgttgcagaaaatcatggacgatgtctgtgatggggagcttcagaactgcaaattcaatgggggtgcctatacccgcgagcatttcttcggcagatatccggagacccttgagttggttaaggatttgagcgatgaggacatcatgtacctcaatcgcggcggtcatgacccctacaaggtctacgcggcctacgctgcagcctgtgaggaggtggagcgacccactgtcattctggccatgacggtcaagggatatggcaccagtgaagcgggcgaagccagtaacgaaacccattctctgaaaaagctcgatctcaaaagttgcaggc

SEQ ID NO: 216808 - DNA, 1858 bp, Unknown
  Bacterial polypeptide expressing nucleotide sequence isolated from the Sargasso Sea
atttttagaaggaagaattacagaaaaacaattagataaatttagacaagcagttgagaaaggcggattatcttcttacccacatccttggttaatgcctaaattttggcagttcccaactgtgtccatgggacttggtcctatgatggcaatctatcaagctaggtttactaagtatttaataaatagaggtcttttaaaagatcaagataggaaaatttggtgtcatctgggtgatggtgaaatggatgaacctgaaagttttggggctgtagggctagcagcaagagagaaattagataatttgatttttgtaattaattgtaaccttcaaagattagatggacctgtaagaggaaatggaaaaattattcaagaacttgaaggaagatttagagggtcaggttggaatgtgattaaagtaatttggggatcttactgggatcagcttttgtctaaagataaaactggtttactagttaaaagaatgaccgaagcagttgacggtgaatatcaggcattcaaagcaaaaggtgggtcttacgtaagagagaaattttttggtaagtatcctgaattaaaagacttagtagcaaatatgactgatgcggatatttggaaattaaatagaggtggacacgatcctcataaagtttactcagcttatcatgctgctgttcaatgcaaaggtaagccgactgtcataatagctaaaacaattaaaggttatggaatgggtaaatctggtgagagtataaatacaacacaccaacaaaagaaattagacgaggaagatttattattttacagagatagatttaacgtgccgcttactgataagcaggttaaaaatattgaatattacaaaccagcagaaaattcaccagaaataaagtatttaaaaaattgcagagttaagcttggtggacacattcctgagagaactacttttgcaaaaccagttaaaacacctcctcaagatatatttgaaagttttatgaagtccactggtgataaggaaatgtctactacaatggctcttgtaagaatgcttgcgaatttactaagagacaaaaatgttgccccaagattggtgcctataattgctgatgaggctagaactttcggtatggaaggtttttttcaaaagattggtatttatgcgcacgaaggccaaaaatatgaaccggtggattcagaacaattaagttcctacagagaagacaagagcggacaagttttacaagaaggtattacagaagctggggcaatgtcatcatggattgctgctggaacctcttacactaatcatgatttagaaatggttcctatttatttgttttactctatgtttggttttcaaagaattggggacttggcttgggccgcagcagactctcagacaagaggttttttaattggagcaacatctggaaaaacaactttagccggtgagggattacaacaccaggatggacatagtctactactagcatctgcaatacctaactgtgtgagttatgaccctacattttcatatgagatggcagttatttttagagatggattaaaaaggatgcacgagaaaaaagaaaatatttactactacataactgcaatgaacgaaaattatacacatcctgcaaaacccattggtgcagatcaaggaattttgaaagggatgtatttgtttaaaagttttaagggaaaaggaaaagcaaaagtacagatgttaggatctggatcaattttaagagaaattataaaagcagctgaagttttgtctgatgactacggaattgattgtgatgtttggagtgttactagtttcaatgaattaaagaaagatggcatggaa

SEQ ID NO: 216809 - DNA, 1343 bp, Unknown
  Bacterial polypeptide expressing nucleotide sequence isolated from the Sargasso Sea
gatgaatgaccttgacccccaggaaaccctggaatggatcgaggccatggaggctgtcattgagcgagacggtttcgaacgagcccagtttcttttacgaagattggccgaccgtgccgtaacttccggcgtggatgctccttacacggcttacaccccgtacctcaacaccattcctccggagctcgaggtccgatcatccgggaatcaggaattagaatccaaaatccgctctatcatccgctggaacgcggcaatgatggtgatgcgtgccaaccgtgattcatcagaactcggtggccatattgccagttttgcttcttctgcactgctttatgacataggtttcaaccacttctggaatgcccccgaaccagaacatggtggagacctagtctacatccagggacattcggctcccgggatctatgccagggcttttctcgaaggtcggatcacagaagaacagatgaatcacttccgccaggaatccaccgggaagggagtttcatcctatccccacccctggctgatgccggaattctggcagtttccaacggtctcgatgggtttgggtccgatcatggcaatttaccaggcccgttttctaaaataccttcacaaccgtgaattgttggatactgaaccaaggaaagtctggtgctttcttggggacggagaaaccgatgagcctgaatcgatgggtgccattcatctcgcagctcgtgaaaaactggacaatcttatttttgtcatcaactgcaaccttcagcgactggacggcccagtccgcggaaacggcaaaatcatccaggaactggaaggagagttcaggggcgcaggttggaatgtgatcaaagtcctatggggttcctactgggatccgcttctggccaaagacgaccaagggctcttgcggaagagaatggaagaagccatcgacggagaataccaggccttcaaagccaaggggggtgcttatacacgtacccatttttttggcaagtatccggaactgctggaaatggtctccaacatgagtgatgaggatatttggagactgaatcgcggaggccatgatccacacaaagtttatgctgcttatcaagctgcagtaagtcataccgggcaacccaccgtgatattagcaaaaaccgttaagggttacggcatgggcggatccggagaaggtgccaacatcactcaccaacagaaaaaaatccgtcctgaagatctcttggtgttccgtgatcgttttcaccttccactctccaatcagcaggtggaacagatggagttcttccatccaggagattcgtcccaggaagtcgaatacctgcatc

SEQ ID NO: 216810 - DNA, 2228 bp, Unknown
  Bacterial polypeptide expressing nucleotide sequence isolated from the Sargasso Sea
tgaaaaagaatttcaagagtggcttgaagctttagaaaatgtatttatttctgatggtaaagaatatacagaagaattactaaaagccttatatacagaagctagactaaaaggtattgaggtgtctgaacttaatgatcctccttttaagaatacagttcattcagatgaagaacatccttatccaggcaatttagaatatgaagaaaagattagacattttataagatggaatagtcttttaactgttttaaaagcaaacaaagaatctgatttagggggacatatctcaacttattcttcggcagccactttgtatgaagtgggatttaatcatttctttcgaggttccgataaatcattaggagatttaatatattttcagggccattcatctccaggaatatatgcaagatcttttttagaaggtcgattaacctctgaacagcttgataatttcagacaagagataaaaggtcagggcttatcttcatatccacatccatggttaatgcctgattattggcaatttccaacagtctcaatgggtctagggccaatttttggtatttttcaagctcatgtaatgagatatctagaaaaaagaggcttgattgaatcaattgacaatagaaaagtttgggttttttgtggtgatggagagatggatgaaccagaatcgatgggttctataagtttagccggaagagaaaaactcaataaccttgtatttgttgttaattgtaatttgcagaggctagatggccctgttagaggaaattctaaaattattactgagctttctaagcagttcagtggagcaggttggaatgtcgtacatttaatctggggaagaaaatgggatgaattaataaataatgataaagatggcttattacaaaaaattatggatgagacagttgatggagaatatcaaaattacaaagcaaagggcggcaaatacactagagaaaacttttttggcaaagatccagaagttcttaaaatggtagattcattaagtgatgaagaagtagaagaattaaatagaggagggcatgacccaactaaaatttataatgcttatcgcttggcttacgaggaaaaagataagccaacagttattcttgcttttacaattaaaggttatggcatcggttcaagacaagcagataataccgctcatcaggtaaaaaaacttacaaaagagaacctagaagattttattaataaatttgatttaccaataaagaaagagaatttagataatccaaattttttaaatctaaatagaaataaaaaaattaaagaatatttactctcaagaagagaagagctaggaggtttattgccttcaagaaaagtttctaagaaaaagttaataacaaaaaaagaatcttttatagattttgataaaaaattagatagagaacaatcaacaacaatggtttttgtaaggctcctaactaaacttttaagagatgcagcaataggttcaagagtagtaccaattgttccagatgaagcgagaacatttggtatggacgctttattcaggcaatttggcatttattcatctgaaggtcaaaaatacgaaccagaagatgctgataaagtaatgttttatagagaaagtgagtctggaataatgcttgaggaaggcattaatgaagccggtgcattctcagcatggctagctttagcaacttcttattcaaacaataatttaccaatgattccattttatatcttttactctatgtttggttttcagcgtacccatgatttagcttgggctgctggagattctagagcaagaggatttttacttggtgcaacatcaggcaggacaacattaaatggtgaaggtttgcaacatcaggatggacatagtcatattcttgcatcaacaatacctaattgtcgctcatatgatccatgttactcatatgaattgtcagcaataatacaagaaggtataaatgatatgtatgtaaatggcaatgataggtactattacattactttaatgaatgaaaattattctcacccagccaaaccaaaaaaacttaaaaatgaagagattcttaagggagcttataagctgaaagaaaataaaaatacaaaccttagaatattagcttcaggtgttactctaaattttgtattggaagctgaaaaagaacttaaaaattatggtattaatgctgatatttggtccataacaa

SEQ ID NO: 216811 - DNA, 1374 bp, Unknown
  Bacterial polypeptide expressing nucleotide sequence isolated from the Sargasso Sea
aataaatttggtggagatttaatttattttcaaggtcatagcgctccgggtatgtacgctagagcttatctggaaggtagacttaatgaaaaacaattagatagttttagacaagaagtaaaccctggtggtctttcctcatatcctcatccttggttaatgccaaatttttggcaatttccaacggtgtctatgggattaggtccaatgcttgcaatctatcaggcaagattcatgaagtacttaattaataggggcctcattaaagatgaagggagaaaagtttgggcatttttaggtgatggagagatggatgaaccagaatctttaggagcgattggtttagccgcaagagaaaaattagataacttaatatttgttgtaaattgtaatcttcaaagactggacggaccagttcgtggaaacggaaaaataattcaggaattagagggaattttcagaggtgcaggatggaatgttataaaagttatttggggttcttattgggatccattgcttgcaaatgataaaacaggtcatttagttaaaacaatgaacgagactgtcgatggcgagtatcaggcaatgaaagcaagagatggtgcatatgtgagagaaaaattttttggaaaatttttggaaacaaaagaattagtttcaagtctttcagacaaagatatttggcggttgaacagaggtggtcatgatcctcataaagtttttgcagcctatgataaagcatctaaaaatgttggaagtcctacagttgtaattgcaaagactattaagggttatggaatgggaaagagtggtgaaagcgtaaatacaactcaccagactaagaagttagatattgacgacctaatgtattacagagataggtttgatgttccattaacagatcaacaagttaagaatattgaatactacaagccagatcagaattctccagagattaaatatataaatgagagacgaattcagttgggtggttttattcctgagagaactacttatgcgaaatctgttaaagcaccaccaaaagatatttttgataatatgaaagtttctacaggcaaaaaagaaatgtcgaccacaatggcattagttagaatgttgacaaatcttttgagagataaaaatgttgcaccaagactggttccaatcatacctgatgaggctagaacattcggaatggagggtttttttcaaaagataggaatttatgctcatgaaggtcaaaaatatgagccagaggattttgctcaactaagttcttataaagaagaaaagagtggtcaagttttagaggaaggaattaacgaagctggagcgatgtcatcttggatcgctgcaggaacttcatatacaaac

SEQ ID NO: 216812 - DNA, 979 bp, Unknown
  Bacterial polypeptide expressing nucleotide sequence isolated from the Sargasso Sea
atgagagaaattcaatttagagaagctatttgtgaggcaatgactgaagaaatgagattagatgaaaccatctatctcatgggtgaagaagttgctgagtacaatggcgcatataaagcttcaaaggggatgttagatgagtttggagataagcgtgtaattgatactccaatttctgaactgggatttgctggtattggtgttggatcaacaatgactggaaacagacctataattgaatttatgacttttaattttgctttagttggtattgatcaaataattaataatgcagcaaaaattcgtcaaatgtctggtggacaattcccttgtccaattgtttttagaggacctactgggtctgcaggtcagttggcagctacacattcacaagcttttgaaagttggtatgcaaattgtccgggtctcaaagttatagtgccttcaaaccctcatgatgctaaaggacttctaaaatctgcaattagagatgatgatcctgttatttttatggaatcggaacaaatgtacggagataaaggtcaagttccagaagatgaatatctaattccaattggtgaggctgaagttaaaaaagagggtagtgatgtgacagttgtctcctttggaaaaattttgaaagaagtttttaaagcatcagaaaaactcgcagaagaaaatattaatattgaaattattgaccttaggactataaggccacttgatatcgaaacaattattaattccgtaaaaaaaactaatagacttgtaattttagaagaagcctggccatttggaaatgtgtcaactgaaataacatatcaagtccaaaataaagctctagattatttggatgctccaattataaaaatcaatacagctgacactcccactccgtactcacctgttttactaaaagagtggttgcctaattatgatgatgtaataaaggctgtaaagaaggtgctttacaaataat

SEQ ID NO: 216813 - DNA, 1282 bp, Unknown
  Bacterial polypeptide expressing nucleotide sequence isolated from the Sargasso Sea
aatgaaaaaagatcttttagtacctgatattggtgattttgaaaacgttgaaattatagagctgttagtaaaacaaggccaaaaaatttctattaatgatccaatagtaacattagaaagtgataaatctagtgttgaagtaccatcaacagaggaagggattatagaaagtatatcagtcaagataggagataaagtttcaaaaggtgataaattagtttcaatttctgtagaaggcgaaagtgaaaaaatcgaggaagttaaggaagttaaaaaagatacggaaataccaaaagatacagaaaaaattataagtgatgcagaaaaaatacaaaaaattgatgaacctaaaattattagacaagaagtttctgagactaaaaaaacttccaaactagaaaattcaaaaattgagattgtttctgatacaaatgatatagatcctagtgagactaaagagtggctcgagtcattatctgcagtacttaatagcgatggtaaagaacgggcacaatatataatcagacaattaatagagcactcatacagagaaggttctggattagtaatgtctagaaatactccgtacattaatacaatacctcccgaggaagaaaaaaaattacctggtgatcaaaatatagaaagaaaaattagatctctaattagatggaacgcagcagctatggttgtaagagctaataaaaaaaacccagaattaggtggacacattggaacttttgcttcagccgcaactttatacgatgtaggaatgaaccatttttggagagcaaaaaataataaatttggtggagatttaatatattttcagggtcatagtgcaccgggaatttatgcaagatcttatcttgaaggaagattaacagaaaaacaattagataatttcagacaagaagttaaaccgggtggactgtcatcttatccacatccatggttgatgccagagtattggcagtttccaactgtatcaatgggattaggtccaatgcttgcaatttatcaggcaagatttatgaaatacttaattaatagaggtctcattaaagatgaaggtagaaaggtttgggctttcttaggagatggagaaatggatgaacctgagtctttaggagctataggattagctgctagagaaaaattagataatttaatttttgtagtaaactgtaaccttcaaagactggatggaccagtaagaggtaacggtaaaattattcaagagcttgagggtattttcagaggagctggctggaatgtgctt

SEQ ID NO: 216814 - DNA, 1484 bp, Unknown
  Bacterial polypeptide expressing nucleotide sequence isolated from the Sargasso Sea
attaatcaagaaggtgcaattccttcttataatcttacaacaccatttagaaatacaatttctgtgaaagatgaggcacaaatgcctggagatctttttatggaaagaagaatacgttccttaattagatggaatgcacttgtcatggtactaaaagcaaataaaaatgatgatgaattgggtggacacatatcaactttttcttcagcagcaactttgtatgatgttggatttaattatttttttagaggatctgataatcaacttgaagatatggtttactatcaagggcattgctcgccaggaatatatgctcgaagttttcttgagggatatttaaatgaagaagacttagacaattttagaagagaagtaaataaaccaggactttcctcgtacccacatccttggttgatgccgaattattggcaatttcctgtagtatctatggggttaggaccgatacttggaatctatcaagctcatgtaatgagatatttatctgcaagaggtttagtgccaagaaatgacagaaaagtatgggttttttgtggcgatggtgaaatggatgagcctgagtcaaaaggagctattggtctagcaggaagggaacagttagaaaatcttatttttgttgtgaattgtaatttacagagacttgatggacctgtaagaggtaatggaaaaattatccaagaattagaaggagcttttagaggagagggttggaatgtcattaaagtggtatggggtagattctgggatccaataattgctaaagactctcaaggaaagcttcaagaaattatggatgctgtcgttgatggcgaattacaaaactttaaagcaaaaggcggtgcctatactagggaaaacttttttgcaaaggacccatctgttttagaaatggttaaagatttatctgatgacgatatttacagattaaatagaggaggtcatgacccttataaagtttatgctgcttatcataaagctgttaattctaaaggtgcgcccactgttattttagcacttaccaccaaaggctatggaacaggatcaagagaagctgacaacactactcatcaggtcaaaaaattgtcgattgaaaatatcaaatcctttagagatagatttgatatacctgtatcagattcagaaattgaagaactcccatacgttcggccgccagaagattctcctgaaattcaatatctcaaaaaaacacgaaaagcattaggaggatttatacccagaagacgaacaacttctgaagcactaaaacttccagataactctatctttgaaaaactctatgaatctagtggtgataggaagatatcaacaaccatggcaatagtaagaataattacagaattattgaaagataaagaattaggtgaacgaattgttccaatagttcctgacgaagccagaacttttggaatggaagctttattcagacaggttggtatttattcttc

SEQ ID NO: 216815 - DNA, 1687 bp, Unknown
  Bacterial polypeptide expressing nucleotide sequence isolated from the Sargasso Sea
aaaacctgaaataattcaagctgtaaataaaggtgatattgatcctcttgaaactaatgaatggttagagtctttatctgcagtaattgaaaaagatggaaatcaaagagctcattatttaataaaggaattaattaataaagcgtatattgaaggagcaaatattccttatacacaaaacactccttatataaatacaattcctgtaatggatgaaaaaaaatctaatggtgatcaaaatatagaaagaagaattagatcacttataagatggaatgcagctgcaatggtggttagagcaaataaaaaatttccagaacttggaggtcatattggaacattcgcatctgcggcaactctatatgatgttggaatgaatcatttttggagagcaaaaaataataaatttggaggtgacttaatttattttcaaggtcatagtgcaccaggtatgtatgcaagagcttttcttgaaggaagacttaatgaaaagcaattagatagttttagacaagaagttaatccaggtggattatcttcttatcctcatccatggttaatgccaaacttttggcagtttccaaccgtatcgatgggactaggcccaatgttagcaatctatcaagcaagatatatgaagtatttgattaatagaggtttaataaaagatgaggggaggaaagtttgggcatttttaggagatggagaaatggatgaaccagaatctttaggagcaattggtttagcagcaagagaaaaattagataatctaatttttgtaattaattgtaatttacaaagattagatgggccagttagaggaaatggaaaaataattcaagagttagagggaatttttagaggcggtggatggaatgtaattaaagtaatatggggatcttattgggatccattattagcaaatgacaaaacaggtcatcttattaaaactatgaacgaaactgttgatggagagtaccaagccatgaaagcaagaaatggcacttatgtaagagaaaatttttttggtaaatacccagaaacaaaaaaactagtatctagcttatctgataaagatatttggagattaaacagaggtggtcatgaccctcataaagtttttgccgcttatgataaggcttccaaaaatattggtagtccaacagtagtaattgctaaaactattaaaggttatggaatgggcaaaagtggagagagtgtaaatacaacccatcaaactaaaaaattagatatagatgatctgatgtattacagagatagatttgatgttccgctgactgataatcaagtaagaaatattgaatattataaacctgatcaaaattcaccagaaataaaatacatcaaagagagaagaattcagttaggtgggtttattccagaaagaacaacttatgcaaaacctataaaagctccacctaaaaatatttttgaaaatatgaaagagtctactggtaagaaagagatgtccacaacaatggctttagttagaatgttgactagtcttttaagggacaaaaatgtagcgccaaggttggttccaattatccctgatgaagcaagaacatttggaatggagggtttttttcaaaaagtaggaatatatgctcatgaaggtcaaaagtatgaaccagaggattctgctcagctaagctcttatagagaa

SEQ ID NO: 216816 - DNA, 1639 bp, Unknown
  Bacterial polypeptide expressing nucleotide sequence isolated from the Sargasso Sea
ttcagaattagtgtccagtctttctgataaagacatttggagattgaacagaggagggcatgatcctcataaagtttatgccgcatatgatcgagcaactaagaatcaaggaagtcccacagtcatcattgctaaaactattaaagggtatggtatgggaaaatctggagaaagtgtaaatacaactcatcaaacaaaaaaattagatgttgatgacttaatgtactacagagatcgatttgatgtgccgttgactgacgagcaggtaagaaacattgaatactttagaccagatgaaaaatctcaggagattaaatatttaaaagagagaagaattaaattaggtggatttttaccagaaagatcaacctttgcgaaacctattaaagcaccctcaaaggatatttttgactttatgaaagtatcaactggtgaaaaagaaatgtctacaacaatggctcttgtcagaatgctgactagtttaatgagagataaaaatatctctccaagattagtgcccatcattccagatgaagcaagaacatttggtatggagggtttttttcaaaaaatcggaatttacgcgcatgaaggtcaaaaatatgaaccagaagactctgctcaattaagctcatatagggaggaaaaaagtggacaagttttagaggaaggaattaatgaggcaggtgcaatgtcttcatggattgctgctgcaacagcatatactaatcatgatatcgaaatgatccctatttatactttttattctatgtttggttttcaaagaataggagatctggcgtgggctgctggggatagtcaagctagaggatttttaattggcgctacagcgggaaggacaactttggctggagaaggtttacaacatcaagatggtcatagccacttaattgcatctacaattccaaattgtgtaacttatgatccaacattccattacgaactagcagtaatttttagagaaggtttgagacgaatgcacgagaagaaagaaaatgttttttattatattacaacaatgaatgaaaattattctcatccagaaatacctaaagataaaaatatagaagagggaattcttaaaggaatgtacaaaattaaggattttaacaaacataaaaaaactaaaattcaacttcttggatcaggcacaatactcagagaaatgatctcagctgctgaaattttacaaaaagagtatcaagttgacagtgaagtttggagtgtcactagttttaacgagcttagaaaagatggaatggaagtagaaagatataatttattaaatccagataaagaggcgaaaatatcttttgtggaacaatgtttaggtaaaaccgaaggtccaatcatggcagcatcagattacatgagaatgaattcagatcagattagaccatatacaaataaaagtttttattcactaggagccgatggttttgggagaagtgatacaagaaaaaatcttagaaaattttttgaagtagataaagaacatttggtagcttatggactaagtattttggcaaaagagcaacttattgcttcaaaacatgcaaaagaggcaatgaaaaagtacaatattgatagcaataagccaatacctactaaattgtaa

SEQ ID NO: 216817 - DNA, 1440 bp, Unknown
  Bacterial polypeptide expressing nucleotide sequence isolated from the Sargasso Sea
attggtggtcacatttcaacatatgcatcagcggcaaccctttatgaggttgcatataatcatattttaaaaggcgcagcccacccctctggccaagacatggtcttctttcagggtcacgcatcaccgggtatctatgcccgtgcttttctagaaaagcgattatcaatagagaacctgcacaattttcgtcgtgaactatctgaaggtggggggctctcatcatatccacacccatatctaatgcctgatttttggcaatttgcaacagtttccatgggtcttggccctctaatggccatttatcaagctcggtttatgcgctacatggatgatcggggtttcgttgaggatacaggcagaaaggtctttgcttttcttggagacggggaaatggatgaacccgaatcaacgggagccctaactctcgcaagtagagaaagccttgataatcttatttttgtggtaaactgtaacctgcaaagactggatggacccgttcggggaaactctaaggtggtccaagaacttgagggtgcctttaggggggctggttggaatgtgataaaggttctttgggggtctgagtgggatgatctgtttgaaaaagacacaacaggaatgtttctaaaaagaaccgaagaggttgtagatggtgacctcttaaaatacattgttgagggtggcgcctatatgcgtgaacactttttcggtaaatacccagaacttttagaacttgtatcacacataacagatgaagaccttgaaagaatgaaactgggggggcatgacccggtaaaaatgtatgcggcatatcaagaagcgatcaaccataagggagccccaactgttattctggccagaacaataaagggctatggtcttggtgaagcgggagaggggcgaaatatcacccacaaccaaaaaaagctcaatgaagatgaacttctgtattttagagacaggtttaaagtgccgctaacagatgaggaggccagcaaggctccgttctatagattttcagaggattcaaaagaatataattatttagttgaaagaagaaaaaacctaggtggctttctaccagaaagaattaacacccccgctcctattgacgtgcccgacctatcgatatttgaagagatgctagccggaacaggagatcgggctatttctacaacaatgtcatttgtcaggctgttgaccatcttaacaaaggacaaaaccataggtaaaaacatagtgccaattgttcctgacgaagccagaacctttggcatggacccccttttcaggcagctgggaatatatgcacacggtggtcagctatatgaccctgtagactctgatcagtttctttattataaagaagcaaagaatggacagattcttgaggagggaatcaatgaggctggggcgatatcctctttcatcgccgca

SEQ ID NO: 216818 - DNA, 2598 bp, Unknown
  Bacterial polypeptide expressing nucleotide sequence isolated from the Sargasso Sea
aggaagaaaaagaaaataaattctgaaccaaaagaaattataaaaaaagagataataaaagaggagagaccatcaaatggtttaaaaaatggaaaacaaaaaatatttgcccaaccaatttcaaaagacgatatagatcctgcagaaacacaagaatggctagactcacttagagctgttgttagaacagatggctcatccagagcaggttatttgctaaaaaaagtaattgatgaagcctacactcaaggattaattttacctgataccagaactacaccttatattaatacgataccatcagcagcggatgtcagatcacctggtgatcaaaacatagaaagaaaaattagagcctacataagatggaatgcagctgccatggtcgtcaaagctaataaaaaaaatccggagttaggtggacatataggtacttttgcatctgcagcaacgttgtatgacgttggtatgaaccacttttggagagcaaaaaataataagtttggtggtgatttagtttattttcaaggtcacagtgcgcccggcatgtatgcaagagcatttttagaaggaagaatctcagaaaaacaattggataaatttagacaagaagttgaaaaaggtggactgtcctcttacccacatccttggttaatgccaaaattttggcagttcccaactgtatcaatgggacttggtccaatgatggcgatttaccaggctcgtttcactaagtatctgataaatagaggtcttctaaaagatcaagatagaaaaatatggtgtcacttaggtgatggcgaaatggatgaaccagaaagttttggcgccgtaggtttggctgcaagggaaaaattagataatttaatttttgtaattaactgtaaccttcaaagattagatgggcctgtgagaggaaacgggaaaattattcaggaacttgagggcagatttagaggggctggatggaatgtaataaaagttatttggggctcttactgggatcagcttttgtctaaagataaaaccggtttgctaataaaaagaatgaatgaagctgttgacggcgaatatcaagcttttaaggcaaaaggtggtgcttatgtaagagaaaagttttttggaaaatatcctgaattaaaagaattggtggcaaatatgacggatgcagatatttggaaattaaatagaggtggacacgatcctcataaagtttactcagcttatcatgctgctgttcaatgcaaaggtaagccaactgtcataatagctaaaacaataaaaggttacgggatgggtaaatctggtgagagtataaatacaacacaccaacaaaaaaaattagacgaggaagatttattattttacagagatagatttaatgtgccacttactgataatcaggttaaaaatattgaatattacaaaccagcagaaaattcaccagaaataaagtatttaaaaaattgcagagttaagcttggtggacatattcctgagagaactacttttgcaaaaccagttaaaacaccacctcaagatatctttgaaagttttatgaagtccacaggtgataaagaaatgtctactacaatggctcttgtaagaatgcttgcgaatttactaagagataaaaacgttgcgccaagactagttcctataattgcggatgaagcaagaacttttggtatggaaggtttttttcaaaaaattggtatctatgcacacgaaggccaaaagtatgaacccgtggactctgaacaattaagttcttacagagaagataagagtggtcaagttttacaagaaggtattactgaggctggagcaatgtcatcatggattgctgctggaacttcttatactaatcatgatttagaaatggttcctatttatttgttttactctatgtttggttttcaaaggattggagacttagcttgggccgcagctgactctcagactagaggttttttaattggagcaacatctggaaaaacaactttagcaggggaaggattgcaacaccaggatgggcatagtcttctactagcatctgcaatacctaactgtgtgagttatgaccctacattttcatatgagatggcagttatttttagagatggattaaaaaggatgcacgagaaaaaagaaaatatttactactacataactgcaatgaacgaaaattatgctcatccagaaaaacctgttggctcagatcagggaattttaaaaggaatgtatttatttaaaaactataagggaaaaggtaaagctaaagttcaaatgcttggttcaggatcaattttaagagaagttataaaagctgccgaaactttatcaaaagattacggagtagattgtaatgtttggagtgctactagtttcaatgaattaaagaaagatggtatggaagttgaaagaaaaaatttattaaatccaaatgagaagcctaagaaaagttatgtacaaaaatgtttagactcacaagagggcatcatatttgcagcatcggactatataagatcacatacagaccaaataagaccatatcttaataaaccattctatacattgggaactgatggtttttga

SEQ ID NO: 216819 - DNA, 1285 bp, Unknown
  Bacterial polypeptide expressing nucleotide sequence isolated from the Sargasso Sea
caagttgaacatgagacaattagcaaaatcttagacgaaaaaattccaccttcaaccgaaaaattaatagaggaagcagaaactgctacaaaacctgaaacaaaagttatagagccaacgcaaatcaagcaaacaagattagttaatgaagttaaaatggtcagtagtaacgatgatattgatccaattgaaactaaagagtggctagattcattaagtgcagttctgcaaaatgatggctctgaaagagctcattttttaattaaacaattaattgatcaatcttataaagctggatctaaaattcctcatactcaaactactccttatgtgaatactataccccctgaagaggaaaaaagatcacctggagatcaaaacatagaacgtaagttaagatctttaattagatggaatgctgctgcgatggtagtaagagcaaataaaaaatatcctgaacttggcggtcacataggaacatttgcatcagctgcaaccttgtatgatgttgggatgaatcatttttggcgagctaaaaataataaatttggaggtgatctagtatattttcaaggtcatagtgcaccaggaatgtatgcaagagcttttcttgagggaagattaaatgaaaagcagttagatagatttagacaagaagtacaaactggtggactttcatcttatcctcatccttggctaatgccaaatttttggcagtttcctacagtctcaatgggtattggtccaatgttagcaatatatcaagcaagatttatgaaatatctaattaatagaggattaattaaggatgaaggaagaaaagtttgggtttttcttggagatggagaaatggatgagcccgagtcacttggggcaattggtttagcggctcgtgaaaatttagataatttaatatttgttgtaaactgcaacttacaaaggttagacggtccagttagaggaaatggaaaaataattcaagaattagaaggtatttttagaggtggtggctggaatgttttaaaagttatttggggatcttattgggactcacttttagcaaatgataagacgggacatttagtaaaaattatgaatgagacagtagacggcgaatatcaagcatttaaagcaagaaatggactttatgtgagagaaaagttttttggcaaatatcctgaaacaaaagaattagtttcatcaatgtcagatactgatatttggagacttaatagaggaggccatgatcctcataaagtttatgcagcatatgataaagcggtca

SEQ ID NO: 216820 - DNA, 613 bp, Unknown
  Bacterial polypeptide expressing nucleotide sequence isolated from the Sargasso Sea
atgaaaacagttcaatttagagaagccatatgcgaggcaatgtcagaagaaatgagaagagatgagagtgtctatcttatgggtgaagaagttgcagaatataatggtgcttacaaggcatcaaagggaatgttagatgaatttggtgaattaagagtaatagatacgcctatttctgaagctggtttctctggagttggagttggttctacgatggttggagcaagaccaattattgagtttatgacatttaacttttctttagttgggattgatcaaataataaataatgctgcaaaaataagacagatgtctggtggccaatttccatgtccaattgtttttagaggtccaactgcatctgctggacagctgggtgcaacccactctcaagcatttgaaagctggtttgctaattgccctggtcttaaagtaatcgtgccatcaaatccatatgatgcaaaaggacttttaaaatctgcaataagagatgatgatccagtcatattcatggaatctgaacaaatgtatggtgataaaggtgaaattcctgaaggggaatatactttgccaatcggagttgctgataaaagagaaaaggaaaagatgtaac

SEQ ID NO: 216821 - DNA, 934 bp, Unknown
  Bacterial polypeptide expressing nucleotide sequence isolated from the Sargasso Sea
tggtttgttagtgaaggtcaaaaagtaaagcctggtgatgttatagctgaaatagaaaccgacaaggccactatggaagttgaagcagttgatgagggttttataaagaagttattttataaagagggtgataataatattcctgttaataagccaatagctcttatttctgatcagattggagaaaagattaaagaaaaaaataaaactattattgaaatcaaatctaaagataaaaaggaattagaacaaactgaagcgagtgagaaagaaaattctaaattagggcaagatcaaattactatgcgtcaagcaataagagatactattgctgaagagatgagaaaagataggaaagtatttattctcggtgaagaagttgcagaatatcaaggagcttataaagttacacaaggattattagaagagtttggtgaaaaaagagtgattgatacacctatatcagaacagggattcactggattagcggttggagctgcattcaaaggattaattccaattgttgaatttatgacatttaatttttcaatgcaggcaatagatcaaattattaattcagcagcaaaaactttatatatgtctggagggcaaattaattgtccgattgttttcagaggtcctaatggtgcagcagctcaagtagcagcacagcatagccaagatttttcatcttggtattcccatgttcctggtcttaaagttgttgcaccgtcaacttctttaaatgctaaggggctcttaagatctgctataagagatcctaatcctgttatatttcttgaaaatgaaattctttacggtttaaaaggagaaaattcttcagaagattttacaattccttttggtaaggctaatattgcaaaagaaggatcagataccacaatagttacttattctattatgtacacaaatc

SEQ ID NO: 216822 - DNA, 1093 bp, Unknown
  Bacterial polypeptide expressing nucleotide sequence isolated from the Sargasso Sea
gttgatgatggcaaaataggacaattattagttgcagagggtactgaaggagtgaaagtcaatactcctattgctttgttagtagatacaaatgaatcacctcatgcaacgattaaagatattgctgataaaccgtatttagaaaaagaaaagattccatccaaacctacaaatgacaaaccaatctcaattgaagctaattctagtttaatcacagtaagggaagcattaagaaatgctatggctgaagaaatgagggctgacaaaagtgtgtttgtaatgggagaagaagttgctgaataccaaggtgcatataaagtaactcaaggtttactagaagaatttggagataaacgagtatatgacaccccaattacagaacatggtttcgctgggataggtataggggctgcttttggaaatttaaaacctattgttgaatttatgacgtttaattttgccatgcaagcaatggatcaaataataaattcagcagctaaaacactttatatgtctggtggtcaaatgggttgtccaatagtttttagaggtcctaacggagcggcatctagagttgcagcacaacatagtcaatgttatgcaagttggtacgcacattgtcccggtttaaaagttgtttctccatggtcaagtaaagatgctaaaggtcttcttaagtcagcaattagggatcctgatccggtaatttttctagaaaatgaagtgatgtatggtcaaagttttagctgtccagatgatgaaaattttactttacctattggtaaagcgaatattgaaaaagaaggaaatgacgtaacaataattgctttttccataatggttggaaaatccttagaagctgcagaaattcttgaagataaaaacataaacgcagaagttattaatcttagaacattacgtccattagatattgacactataattgaatctgtcaaaaaaacaaatagagttgttacttgtgaagaaggttttcctttttctggaattggatcggaaatttcagctttaattactgaaaaagcttttgattggcttgatgctcctgttgtaagagtgacagggaaaagatgtt

SEQ ID NO: 216823 - DNA, 841 bp, Unknown
  Bacterial polypeptide expressing nucleotide sequence isolated from the Sargasso Sea
catgaataaaaaaattaataattccttctctgatgaccagctattaaaattttatgaaaagatgtttttaatacggaaatttgaggaaaaggcagctcagttatatggtgctggtaaaattggaggtttttgtcatttatatattggtcaagaagcggttgtaataggtattctttcctctattaattctgaggacactgttatcactgcttacagagatcatggacatattttagctcgtggagtagatcctaaatcagttatgtcagaattaactggtagaagtgatggaatatcaaaaggtaaggggggctctatgcacatgttttctaaagctaataggttttatggtggacatggtattgttggcgctcaagtaccattgggtgttggtattggttttgcccacaaatatagaaatgaaaaaaaaatttctagagtctatcttggtgatggagcaatgagtaatggccaagtatttgaagcttttaatttagcatcactatgggagctacccgtcttgtttattattgaaaataataaatatggaatgggaacatctataggtagatcagcagcaggaaatgagctgtttgaacgagctaccgtatttggtattaaaggtgaaaaggtagacggtatgaacttctttacagtgagcgatgctgctataagagcaagagaatacataaataataacttcaaaccatacatcattgaaatggatacttacagatttagagggcactcaatgtctgatcctggtctttatagaacaaaagatgaggtaaataaaatgaaagaaatagacccagtgctagtgatgaaagaaactctttaa

SEQ ID NO: 216824 - DNA, 850 bp, Unknown
  Bacterial polypeptide expressing nucleotide sequence isolated from the Sargasso Sea
gatggaggttgaaactgtggaagacggcattgttactaaattggtaattgatgagggcacactggcaatacccgttggaacagtaatagcaactatctcggttgataatggggatgaaccaaaagaaattggtaaagatggttctgatgcagaagaaacagcagatatgttgagggatgaagagcaagaaatccaatctgcggtaataaaaaaacaagaagcaaaatctttgtcaccaaatacgaattgggacggcgcagttataaatatgactgtccgtgaggcattaagggatgcaatggcagaagaaatgagaggcgatgataaaatttttattatgggcgaagaggttgctgaatatcagggggcttacaaagtcactcagggtttgcttgaagagttcggtgagcggcgtattattgatacacctataactgaacacggttttacaggcttggcagtaggcgctgcttttggagatttgcgaccaattgttgaattcatgacatttaatttttcaatgcaggcaatagatcaaattataaattcggctgcaaaaacactttatatgtcaggtgggcaaatgggttgtcctattgtgtttaggggacctaatggtgcagcgagcagagtagcagctcaacattctcaatgttttgcaagctggtacgctcattgtcctgggttgaaagttatatcgccatggtcttctgccgatgctaaaggattactaaaatcagcaatacgagatccaaaccctgtaatatttcttgagaatgaagttatgtatgggcaaagttttgatgtcccagatacggatgattggatagtgccaataggtaaaagaaat

SEQ ID NO: 216825 - DNA, 721 bp, Unknown
  Bacterial polypeptide expressing nucleotide sequence isolated from the Sargasso Sea
gatgtattcctacatgctcaaaattagaagatttgaggaaagggcagctcaactttacggtatggggaaaataggtggtttttgtcatttgtatattggccaagaagctgttgttgtaggtattttaatgacaattgataaaaatgattcagttgtaaccacttatagagatcatggccacatgattgcaagaggattagacccaaaacgtattatggcagagttgactggaagagaagatggttattccgctggtaaaggtggttcaatgcatatgttttcgaaacaaaataatttttatggtggtcatggtattgtcggagctcaagtacctattggaactggtattgcattcacacataaatacaatggagaaaaaaatatatgtagaacatacattggtgatggtgcaatgaataatggacaggtttttgaagcttttaatctagctgctttatggaaacttccagtattatatattattgaaaataataaatatggaatgggcacgtctgtagatagggctgcagcaggattagatttatataaaagaggtgaagcattcggtatccctggtgagaaggtagatggaatgaatgtattttcagttatagaagcagcagataaagcaggaaaatatgtcagagaaggaaatgggccttacattattgaagtacaaacatatcgctacagagggcattcaatgtcagaccctgcaaaa

SEQ ID NO: 216826 - DNA, 887 bp, Unknown
  Bacterial polypeptide expressing nucleotide sequence isolated from the Sargasso Sea
gtcaagcactaaagagatacaatgggctgaagaaatgagaaaagataataaagttttcatactaggagaagaagttgctgagtatcaaggtgcttataaagtaacgcaaggtcttcttgaagaatttggtaaagaaagagtattggatactcctatttctgagcatggatttactggattggcagttggtgcagcatttaagggattgagaccaattttagaattcatgacttttaatttttctatgcaagcaattgatcaaattatcaattccgctgcaaaaacactttatatgtctggagggcaaattaattgtcctatcgttttcagggggccaaatggtgctgcagctcaagtagctgcacaacatagtcaggatttctcttcatggtattctcaagtgccaggtttaaaagttattgcaccttctactccttataattcaaaaggcttgttaagatctgcgatatcagatccaaatcccgtaatttttctagaaaatgaaattctttatggattaaaaggtcctgttaataatgatattaacttctcaataccaattggaaaagcaaatattgaaaaagaaggaaaagacttaacgattgtcacttattccataatgttgcaaaaatctaaagaagcagccttaagattaaaagatgaatacaatttggatgcagaaataattgatttacaaactttaagaccattggactcagaaacagtaattaattcagttaaaaaaactaacagacttattactgtggaagagtcttggccatttggtagtgttggttctgaaatagctaatattgttcaaagggatgcatttgattatttagattcaccagtaataaaagttaatagtgctaatgttccaatgccat

SEQ ID NO: 216827 - DNA, 643 bp, Unknown
  Bacterial polypeptide expressing nucleotide sequence isolated from the Sargasso Sea
ttttcggtggaatggtatcgttggtgctcaggtatctattggaacgggattggcatttggacaacagtacaagggagacaatggaattacgctggcttactttggagatggggccgctaatcaggggcaagttcacgaatcttttaatatggcggctctttggaaacttccggtagtctacgtgatagaaaacaatcggtatggaatgggaacttctgttcagcgggcatcagcaactgaagacttatcgcaactaggagccgggagaggtattcatggtatgcaagtcgatggtatggatgttgtcgcagtcgcggaagccggtgagatggctgcaaaaaaatgtagaaaagggaagggacctgttatcttggaaatggtcacctaccggtatagaggtcactcgatgtcagatcctgctacctaccgaactaaagaggaagtgtccaaagttcgtgatgaacaagatcccatcggaaatctaaaaacaagaattttaaaaggtaaaattttatctgaaaatgacttgaagggcattgataaggaaatcagagaattagtcgctgaggctgcggagtttgcccagaatagtcctgaaccaaaaccatccgaactttataccgatgtcttggttgatggataa

SEQ ID NO: 216828 - DNA, 847 bp, Unknown
  Bacterial polypeptide expressing nucleotide sequence isolated from the Sargasso Sea
gaatttggtaaagaaagagtattagacacgcctatatcagaacatggatttactggattagcagtgggtgcagcatttaagggcttaagaccaatccttgaatttatgacttttaatttttctatgcaagcaatcgatcaaatcataaattctgctgcaaaaacactatacatgtctggaggacaaataaattgtccaattgttttcagaggacctaatggtgctgctgctcaagtagctgcacaacatagtcaggatttttcttcttggtactctcaagtaccaggtttgaaagttatttcaccatccactccttataatgcaaaaggcttattaagatctgcaatttcagatccaaacccagtaatttttttagaaaatgaaattctttatgggttgaaaggtcctgttaataatgacacgaacttctcaattccaattggaaaagcaaatattgaaaaagaaggaaaagatttaacgttagtaacctattccataatgttgcaaaaatctaaagaagcagcattaagattaaaagaggaatataatttagatgcagaaattattgatttacaaactttaagacctttagatacagaaacaataataaattcagtaaaaaaaaccaatagattaattactgttgaggagtcttggccatttggtagtgttggttctgaaatttcaaatattgttcaaagggatgcatttgactatttagattcacctattataaaagttaatagtgctgatgttccaatgccttattcattgagtttagaaaaattatatcttcctcaagttgatgatattataaatgctgcaaaaaaagtaagttatataaaat

SEQ ID NO: 216829 - DNA, 667 bp, Unknown
  Bacterial polypeptide expressing nucleotide sequence isolated from the Sargasso Sea
cttattcaggaatttggcaaagaaagagtattagatactcctatttctgaacatggatttattggattagcagttggagcagcgtttaagggattgagaccaatcttagaattcatgacttttaatttttatatgcaagcaattgatcaaattataaattcagctgcaaaaacactttacatgtcaggagggcaaattaattgtcctattgtttttagaggaccaaatggtgttgcggtgcaagttgctgcacaacatagtcaggatttttcttcctggtattttcaagttccaggtttaaaagttattgctccatctactccttataacgcaaaaggtttgttgcgttctgcaatatcagatccaaatcctataatttttttagaaaatgaaattctttatggattaaaaggtcctgttaataatgatgttaacttttcaatacctattggaaaagcaaatattgaaaaagaaggaaaagatttaacaattgtcacttattctataatgttacagaaatcgaaagaagcggcattaagattaaaagaggaatataatttagatgcagaaattattgatttacaaactttacgacctttagatacggaaacaattttaaattcagttaaaaaaactaatagactaatcactgtcgaagagtcatggc

SEQ ID NO: 216830 - DNA, 822 bp, Unknown
  Bacterial polypeptide expressing nucleotide sequence isolated from the Sargasso Sea
tttgtcatcagaagcgtcacacttagaatctgctgaagtttctactaaaactattactgtaagagaagctataaataatgcgattgcagaagaaatgcgccgtgacgaaaacgttttcattatgggagaagaagtaggagaataccaaggtgcttataaagtaagccaaggtctgctagaagagtttgggccagatagagtaattgatacccctattacagaacacggcttcactggcttggcaataggcgccgcattcacgggcttgaggcctattgttgagtttatgacatttaatttcgctctacaagctatagatcagattgtaaactctgcagcaaaaacccattacatgtcaggaggtcaaatcacttgcccaattgtttttagaggtcccaatggagcggctgcaagagttggtgctcaacatagccaagacttttcctcactttacgcatctataccaggattaaaagttatccaaccttttgactcaggggatgctaagggtttattaaaatcagcgatcagagataacaatccagttatatttttagaaaatgagatcttgtatggaaaatcttttatttctgaagataaagaagaagctttagtacctataggtaaagcaaaaatattaaaaacaggcactgacgtaacaattataagttatggaattggattaatgcactcacttgaagctgagcctatattagctgatatgggtgtagctgcagagatcatcaacttaagaacgttaagacctattgattttgatacaataatagagtctgttaagaaaacaaatagatgtataactgt

SEQ ID NO: 216831 - DNA, 817 bp, Unknown
  Bacterial polypeptide expressing nucleotide sequence isolated from the Sargasso Sea
aatattaatgcctgcgcttagccctactatggaagagggtactttgtcaaaatggcttgtaaatgaaggtgatgctatttcgtctggcgatttaatcgctgaaatagaaactgataaagctactatggaagtggaagcagttgatgatggcaaaattggtcaactattagtagctgaaggcactgaaggagttaaagtaaatacacctattgcattattaattgatactaaagaaatacctcacgctaccattaaaaatattgctgataaaccttatctggaaaaagaaaaaatcccttcaataccaataaatgaaaatccagtttcaattgaagcaaattcaagccttattacagttagagaggctctaagaaatgcaatggctgaagaaatgagagttgacaaaagtgtatttgtaatgggagaagaagttgcagaatatcaaggtgcctataaagtaactcagggcttgcttgatgaatttggagacaagcgagtttatgatactcctattacagaacatgggtttgctggcattggcattggagcagcttttggaaatttaaaacctattgttgaatttatgacctttaattttgctatgcaagcaatggatcaaataataaattcagcagctaaaacactttacatgtctggtggtcaaatgggttgtccaatagtgtttagaggccctaacggagcagcatctagagttgctgcacaacatagtcaatgttacgcaagttggtacgcacattgtcctggtttgaaagttgtttcaccatggtcaagtaaagacgctaaaggcctactaaag

SEQ ID NO: 216832 - DNA, 868 bp, Unknown
  Bacterial polypeptide expressing nucleotide sequence isolated from the Sargasso Sea
tgatttgatcgcagaaattgaaactgacaaagcaacaatggaagtagaagcggtagatgaaggtgttgttcttgatcttttatttaaagaaggagaggtaaatattccagtaaataaagctatagctattattggtgatccaaatgaaaaaattgaagtaaaaaaagaagctcctgttgaaaaagttattgaagaaaagaaaattgaaaaaaatattgagacaaaaattgagaataagaaagatgatctaattgatataccatcacctaaaacagaagaagatacaaatttaagttcgtcagaaattaccatgcgtcaagcgctaagagatacaatggctgaagaaatgagaaaagataataaagttttcataattggagaggaagttgccgagtatcaaggtgcgtacaaagtaacacaagatctgcttcaagaatttggtaaagaaagagtattagatactcctatttccgaacatggatttactggattagcaattggtgcagcatttaagggattgaaaccaatcttagaatttatgacttttaatttttctatgcaagcaattgatcaaatcattaattcagctgcaaaaacactttacatgtctggaggacaaattaattgtcctattgtttttagagggccaaatggtgctgcagcgcaggtagctgcacaacatagtcaggatttctcttcttggtattctcaagtgcctggtttaaaagttattgcaccatctactccatataatgctaaaggtttattgcgttctgcaatatcagatccaaaccccgtgatttttctagaaaatgaaattctttatggattaaaaggtcctgttaataatgatgttaacttttcaata

SEQ ID NO: 216833 - DNA, 826 bp, Unknown
  Bacterial polypeptide expressing nucleotide sequence isolated from the Sargasso Sea
atgtattcctttatgcttaaaataagaagatttgaggaaagggcagctcaactttacggtatgggtaaaataggtggtttttgtcatttatatattgggcaagaagccgttgtggttgggattttaatgacaattgataagaatgattcagttgtaactacttacagggatcatggccacatgattgcaaggggattagatccaaaacgaattatggccgagttgaccggcagagaagatggctattctgctggtaagggcggttcaatgcatatgttttctaaagaaaataatttctatggtggacatggaattgttggagctcaagtaccaattggaaccggtattgcattttcacataaatataatggagaaaaaaatatatgcagaacatatatcggtgatggagcaatgaataatggacaagtttttgaagcttttaatttagctgctttatggaagcttcctgttttatatattattgaaaataataaatacggaatgggcacgtctgtagatagagcagcagctggattagatttatataaaagaggtgaagcatttggcattcctggtgagaaggtagatggaatgaatatattttcagttatagaagcagcagataaagcaggtaaatttgtcagggaaggaaatggtccttatattattgaagtacagacatatcgatatagaggtcattcaatgtcagatcctgcaaaatatagaacgaaagaagaattagataactataagcaaactgaccctatcgaaatagttaaaggcgaaatattaaagaaaaaaattgctactaatgatgaaattgaaa

SEQ ID NO: 216834 - DNA, 912 bp, Unknown
  Bacterial polypeptide expressing nucleotide sequence isolated from the Sargasso Sea
aatcagtccctgtaaactctcctatcgctgtacttgatggagaggataacgatcaatcatcagatagaaaagatgactcaagcattatgaataatgatgataataaagaagaaaacttaaaaatcgattctttaaataataaaaaaaaagatgatacagtcaaagaaacagattcaaatttaattcaaaaaaaacaaaaaagtaaaaaatttgaattttctaattataaatctattactatgagacaatccattagagatgctattgctgaagaaatgagaaaaaatgaatcagtttttgttataggtgaagaagtaggtgaatatgaaggtgcatacaaagttactcaaggtcttcttgatgaatttggttcttctagaattcttgatacacctatttctgaacatggatttactggattagcagttggaagtgcttttaaaggattgagaccaattgtagaatttatgactttcaatttttcaatgcaagctattgatcaaataattaattctgctgcaaaaactttatatatgtctggaggacaaattaattgtccgattgtttttagaggacctaatggagccgcatcacaagttgcggctcaacatagtcaagatttttctagctggtattctcattgtcctggattaaaggttgtagctccatctaacgcattcaatgctaaaggcttattaaaatcatctatagaagatgataaccctgtaatttttttagaaaatgaaattttatataatcaaaaaatggatgtgcctgaagatactaattttgatattcctttaggagttgctaatgtagctttagaaggtaaagatgctacaatagttacttattcgatcatggtttcgaaatctttagaagctgctgaaattttaaagaaagacttataac

SEQ ID NO: 216835 - DNA, 812 bp, Unknown
  Bacterial polypeptide expressing nucleotide sequence isolated from the Sargasso Sea
ccgatcaccgagtacggcttcgccggcatcggcaccggcgcggcgatgggcggtctgcgtccggtcatcgagttcatgacgttcaacttcgccatgcaggcgatcgaccacatcatcaactcggccgccaagaccaactacatgtccggcggccagatgcgctgcccgatcgtgttccgtggtcccaacggcgcggcctcgcgcgtgggcgcccagcactcgcagaactacggtccgtggtacgccaacgtccccggcctcgtggtcattgcgccgtacgatgcttcggacgccaagggcctgctcaaggcggccatccgttcggaagacccggtcgtgttcctcgagaacgagctggtctacggtcgttcgttcgaactgcccgaactggacgaccacgtcctgccgatcggcaaggcgcggatcatgcgcgaaggcaaggacgtgacgatcgtgtcctactcgatcggcgtcggcctcgctctcgaggcagccgagcgtctggccgaagagggcatcgacgccgaagtcatcgatcttcgcaccctgcgcccgctcgacaaggaaacggtgctcgccagcctcgccaagaccaaccgcatggtcgtggccgaggaaggcttcccggtctgctcgatcgcctcggaaatcatcgcgatctgcatggaagacggcttcgacaacctcgacgcgccggtcgtgcgcgtgtgcaacgaggacgtgccgctgccttacgccgcgaaactcgaaaagctggcgatcatcgacgctgaccgcatcgtggcggcggtgaaagaaggtcactacaggta

SEQ ID NO: 216836 - DNA, 817 bp, Unknown
  Bacterial polypeptide expressing nucleotide sequence isolated from the Sargasso Sea
aaaaggtgatactgttaaagctggtgatttgattgcagaaattgaaactgataaagctacaatggaagttgaagcggtcgatgaaggtgtagttcttgatcttttgtttaaagaaggggaggcaaatattccagtaaataaagctattgctataattggtgatccaaatgaaaaaattgaattaaaaaaagaacatcctgttgaaaaagtgattgaagaaaagaaaattgaaaaaaatatagagacaaaaattgagaataaaaaagatgatataattgattcaccatcacctaaaatagaagaagatacaaatttaagttctgaggaaattactatgcgtcaagcgataagagatacaatggctgaagaaatgagaaaagataataaagttttcatactaggagaagaagttgccgagtatcaaggtgcgtataaagtaacgcaaggtcttctagaagaatttggcaaagaaagagtattagatactcctatttctgaacatggatttactggattagcagttggtgcagcatttaagggattgagaccaatcttagaattcatgacttttaatttttctatgcaagcaattgatcaaattataaattcagctgcaaaaacactttacatgtctggaggacaaattaattgtcctattgttttcagaggacctaatggtgctgcggcccaagttgctgcacaacatagtcaggatttttcttcgtggtattctcaagtaccaggtttaaaagttattgcaccttctactccttataacgcaaaaggtttgttgcgttctgcaatatcagatccaaac

SEQ ID NO: 216837 - DNA, 963 bp, Unknown
  Bacterial polypeptide expressing nucleotide sequence isolated from the Sargasso Sea
ttacaaatgaaaaaaaaatttataaaagaagattatattaaaatatatagaaaaatgcttcaaataagaagatttgaagagagagctgctcaattatatggaatgggacacataggtggtttttgccacttatatattggacaagaagcggttgttgttggtgttctaatgactatagaaaataatgatagtgttgttactacatatagagatcatggacatatgatagcaagaggactggagccaaagaaaattatggcagagcttactggcaaacaaactggctattcaaatggtaagggtggttcgatgcatatgttttcaaaaaaaaataatttttatggagggcatggaatagttggagcacaagtaccaattggtactggaatagcttttactcataaatataaaaaagaaaaacaaatatgtagaacatacataggtgatggagctatgaataatggtcaagtttttgaagcctttaatctggcatcattgtggaaattgcctgttttatacataattgaaaataatatgtatggtatgggaacatcagttgacagagcttcagctggaactgatttatttaaaagaggagaagcgtttggaattaaaggaaaaaaaatagatggtatggatgtatttaaagtaattgaagccgctcagttagcaggcgatcatgttcgtagtggcaaaggcccctatatacttgaagttcaaacttaccgttataaaggccattcgatgtctgatcctgcaaaatacagaactaaagaagaattggaatcttataaggttaatgatcctataattttagcatcaaaagaaattttaaagaagaaaatattatctaaaaaagatcttgaaaaaatcaacacagaaatagttcaagaaattaaagatgctgctcaatatgcaattgatagtccattccctgaggagaaagaattattactaacgtct

SEQ ID NO: 216838 - DNA, 802 bp, Unknown
  Bacterial polypeptide expressing nucleotide sequence isolated from the Sargasso Sea
ggttcaaccgattctccagcaccagatataccaacatcaatggcggctctgacggcagacactcaaagtagtccatctttagttcatatgaagccacagccggcccaacctacccgagtgcgcccacctgatgtcgatgttccctgcggaacggaaatggtttcaacaaccgtgcgtgaggcgcttcgcgatgcgatgaccgaagaaatgcgccgcgatcccagcgtgttcctgatgggcgaagaggtggccgaatacgaaggagcctacaaggtcagtcagggtctgcttgatgagtttggtgctgagcgggtcatcgacacaccaatcactgagcagggttttgcaggtgttggggtgggcgcggccttcaatggtcttcggccaattgtagaattcatgacgttcaacttcgccatgcaggccattgatcaaattgtgaattcggctgccaagaccctctatatgtcgggtgggcagatgacctgtgccatagtgttccggggaccaaatggtgcggcttcgcgcgtagctgctcaacacagccaagactacgcatcatggtatgcaaatattccaggtctcaaagtagttgccccttgctttgcggctgacgccaaaggcttattgaaatccgcaattagggacccgaatcccgtagtgttcctggaaaatgagttgctgtatgggagacatggtaatgtgcctttgctcgatgatttcaccgtaccgatcggccgtgcgagtatcgtgcgcactgggtctgatatcacaatagtcagctattcgatgggcgtagaaa

SEQ ID NO: 216839 - DNA, 886 bp, Unknown
  Bacterial polypeptide expressing nucleotide sequence isolated from the Sargasso Sea
aggggtgcgtataaagtaactcaaggtcttctagaagaatttggtaaaaaaagagtgttagatactcctatttctgaacatggatttactggattagcagttggagccgcttttaagggattgagaccaatcctagaatttatgacatttaatttttccatgcaagcaattgatcaaataataaattctgctgcaaaaacactctacatgtctggtggacaaattaattgccctattgttttcagagggccaaatggtgctgcggcacaagtagctgcgcaacatagtcaggacttttcttcttggtactctcaagtgccaggtttaaaagttatcgcaccatctactccttataacgcaaaagggttgttaaggtccgcaatattagatccaaatccagtaatttttctagaaaatgaaattctttatggattaaaaggtcctgttaataatgatgctaacttctcaattccaattggaaaagcaaatattgaaaaagaaggaaaagatttaacaatcgtaacttattcaatcatgctacaaaaatctaaagaagcagcattaagattaaaagaggaattcaatttagatgcagaaattattgatttgcaaactttaagacctcttgacactgaaacagtaataaattcagtcaaaaaaactaatagactaattactgttgaagagtcttggccatttggtagtgttggttctgaaattgtaaatattgttcaaagggatgcatttgattacttagactcaccagtggtgaagattaacagcgctgatgttccaatgccatattcattgagcttagaaaaattatatcttcctcaagtcgatgatattataaatgctgcaaaaaaagtaagctatataaaataaa

SEQ ID NO: 216840 - DNA, 624 bp, Unknown
  Bacterial polypeptide expressing nucleotide sequence isolated from the Sargasso Sea
aatgaaaacagttcagtttagagaagctattgcggaagcgatgtcagaagagatgagaagagatgagagtatttttttaatgggtgaagaagttgccgagtataatggtgcttataaagcttcaaaaggaatgttagatgaatttggtcctaaaagagtaattgatacccctatttctgaggctggtttttctggtataggagtgggatctacaatgactggtaatagaccaataatagaatttatgactttcaattttgctttagttgggatagatcaaattatcaataatgctgccaaaataagacagatgtctggaggacagtttccttgtccaattgtttttcgtggtccaacgggttctgcaggtcagttaggcgcaacccattctcaggcttttgatagttggtatgctaactgtccgggtttaaaagtaattgttccttcaaacccttatgatgctaagggattacttaaatctgctataagagacaatgatcctgtaatttttatggaatctgaacaaatgtacggtgacaaaggagaaattcctgaaaatgagtatactttacctattggcgtagcggaaatcattaaagcagggaatcacgtaactattgtttc

SEQ ID NO: 216841 - DNA, 616 bp, Unknown
  Bacterial polypeptide expressing nucleotide sequence isolated from the Sargasso Sea
atgacaaacataaaaatgccagctttgtcacctacaatgacttcaggcactttagctaaatggttggttaaagagggagataatgtaaaaagtggagatattatcgctgaaattgaaaccgataaagcaacaatggaattagaaagtatagatgatggtatagttaataaaatcttatttaaagaaggtgagcaaaatatagaggttggaactgtaattgcaaaaattggtgatgatgatcaaaatgatgaggaaacaattagtattcttcctaatataaacaaagatgaaaatttgaatttaacgaaaaatacaataactgttcgcgaggctttaagggatgccatggcagaagaaatgcgtttagatcaaaacatttttgttatgggagaagaagtcgcagaatatcaaggtgcttataaggttacccagggtctactggaagaatttggtgaaaaaagagtgatcgatacacccattactgaacaaggctttgcaggtttaggtgtaggtgcagcatttggtggtttgaaaccgataattgaatttatgacctttaatttttctatgcaggctattgatcaaataattaattctgctgcaaaaacattatata

SEQ ID NO: 216842 - DNA, 815 bp, Unknown
  Bacterial polypeptide expressing nucleotide sequence isolated from the Sargasso Sea
tatgccagtagaagttttgatgccggcgctctcgccgacaatgaccgaaggtaagctcgcccgatggctgaaggccgagggtgacgacgtaatcgcgggtgatgtcatagcggaaatcgagacggacaaagcgacgatggaagttgaggcggtggacgaaggcaaactcggtaagattctcgtcgctgagggtgctgaaggggtcgccgtcaacacgcctatcgctgtcatccttggcgagggagaaaacgctaacgacgttgttgctgcaaccgcgcccgcacctgtcgagacgcctcctgcggcagcaacgcaggtgccgagccccgcacctgccattgctgctgagcctcagtcatctggtcctcaggcggaaccggattgggacggcgagacggtatcgctaaccgtccgcgaagcgctgcgcgatgccatggccgaggaaatgcgccgcgaagattcggttttcctcatgggcgaagaagtcgcgcaatatcaaggtgcttacaaggttagccaaggattgcttgaggaattcggcaaacgccgcgtcatcgacacaccgatcacggagcacggttttgctggccttggcgtcggtgctgccttcatggggttgaagccgattgtcgaattcatgacttttaacttcgccatgcaagcgatggatcatctcatcaattccgcggcgaagacgctttacatgtccggcggccagatgggatgcccgatcgtctttcgcggtccaaatggagccgccgcacgcgttggcgcgcagcactcacaatgttacgcaagttggtacgcacattgtc

SEQ ID NO: 216843 - DNA, 926 bp, Unknown
  Bacterial polypeptide expressing nucleotide sequence isolated from the Sargasso Sea
taccaagttattaggtcaatatgatgtatttgatgaaaaagaagtaagtaatgagcaattaaaatctttttatgaaaaaatgttatatttgagaaggtttgaagaaagagttggtcaactatatggtcttggattaattggaggtttttgtcatttatatattgggcaagaagcagttgcagttggtatggaagctgcaatagataaagaagataacgtaattacaggctatagatgtcatgcgcatttattatcaagaggagcttctccatataaaatattatgtgaattaatgggaaaaggagaaggaatatctaagggaaaaggtggatccatgcatatgtttgatccagcaaataatttttggggtggacatggaattgttggagctcaagttcctataggtacaggtttagcttttgcatctaaatatttaaataagcaaactttatccgttacctacttcggagatggtgcagccaatcaagggcaagtatatgaatcttataatatggcttccttatggaaattacctatcattttttgcattgaaaataatcaatatggaatgggaacgtccactaagcgagcaagcgctggaacagatttgagtaaacatggagaatcttttggtattcctggttttgcagttaatggaatgaatccagtttctgtatatctatctgcactgaaagcagtaaagtgggttagggatggtaatggaccaattatacttgaaatgaaaacatatagatatagaggtcattctatgtcagacccagcaaagtatagaactagggaagaggttcaaaaaatgagagaggagcaagaccctatagaatatataaaaaagaagttattagatttagacatatttgataaagacagacttcaagaaatagatgataatattagatggaaataag

SEQ ID NO: 216844 - DNA, 837 bp, Unknown
  Bacterial polypeptide expressing nucleotide sequence isolated from the Sargasso Sea
tatgataaataaaactaaaaaaatcaacagaaaactatctaaatctgatgcaattgaagcatacaagaaaatgcttttaattagacgatttgaggaaaaggccggccagtcatatgggctaggtcaaataggaggcttctgtcatctatatatagggcaggaagctgttgttgtgggtctacaaatgtgcattagagagggtgatcaggttataaccacttatcgagatcatggacatatgttagcttgtggtatgagtccaaatggcgtgatggcagaactttatggtcgagcagacggttattcgaaaggaaaaggcggctcaatgcatatgttttctaaagtagcaaatttttttggtggacatggtattgttggtgcgtctgttccactcggaactggtttggcattttcaaacaaatataaaaaaaataaagctattaccctgacatattttggtgatggtgcggctaatcaaggtcaggtatatgaaagttttaatatggccaaattatgggaactcccttgtatttatattatagaaaataataggtatgctatgggaacttcagtgcaacgttcatcagctcagaaagatttatctcaaaggggaataagttttgggattgaaggtgaacaggttaatggcatggatattgagtctgttattgatgctggaaaaagagctgtgacaaaagttagaaataatggtggaccatacatattagagatgcttacatataggtacaggggtcattctatgtctgatcccgcgcaatataggactcgcgatgaggtaaaggaggttagagatcactctgacccgatagaaagcct

SEQ ID NO: 216845 - DNA, 850 bp, Unknown
  Bacterial polypeptide expressing nucleotide sequence isolated from the Sargasso Sea
catgttagatgaatttggtgaaaagagagttattgacacaccaatttctgagttaggttttgctggaataggagttggttcaactatgactggtaacagaccaattattgaatttatgacttttaattttgcattagttggaatagatcaaatagtaaataatgctgctaaaattagacaaatgtcaggaggacagtttccttgtccaattgtttttaggggaccaactgcatctgccggtcaactagctgcaacacattcccaagcatttgaaagctggtatgctaattgtcctggtttaaaagtaattgtaccatcaaatccatatgatgctaaaggtttattaaaatctgctataagggacaatgatccagtaattttcatggaatctgaacagatgtatggtgataagggtgaagtccctgaagaagagtatcttattccaattggaaaggctgatgtaaagaaaacaggtaaagatgtgactgtggtgtcgtttggtaaaataattaaagaagtctatgctgcagatcaaaaattaaaagaaaatggaattgatattgaaataattgacattatgactgtaagacctttggattttcaaactattattgagtcggttaaaaaaactaacaggttagttattgttgaagaagcatggccttttggaaatgtatcaactgaaattacatatcaagttcaaaaccaagctttcgattatttagatgcacctgttgttaaagtaaatactgctgatactcctgcaccatatagtcctgtattattaaaagaatggctaccaaaccatgaagatgtaataaatgcagttaacaaggtactttataagtaa

SEQ ID NO: 216846 - DNA, 682 bp, Unknown
  Bacterial polypeptide expressing nucleotide sequence isolated from the Sargasso Sea
gatgcgacgattggagatcgcggcggatgtgttgtacaaggggaagtttattcgcgggttttgtcacctgtacgacgggcaagaagccgtcgtcgtcggtatggagacggtgttgacgaaggatgacgcggtcgtgacgtcgtatcgggatcactgcgtgcatctcggtcgaggcgggacgccgttggaggtgatggcagagctcatgggacgcgtggacggcgcggcgaagggcatcggcggatccatgcacatgtatcgcagagaggccaactttttcggcggtaacggtatcgtcggcgcgcagacggcgatcggtgcgggtttgggattcgcgttcaagtataacaagcaacccaacgtcgcggtgaccatgtacggcgacggtgcggccaaccaaggtcagttgtttgaggcgctcaacatggcggcgctgtgggatttgcccgtgattttcatgtgcgaaaacaaccattacggcatgggcaccgcgcaagagcgtagtgcgaagagtccggtgtactacaaacgcggtgattacgtgccgggattaaaggtggacggcatggacgcgctcgcggtgaaacaagcgatgaagtttgccaaggagtattgcgtctccggcaagggaccaatcgtcatggagatggacacgtatcgttaccacggtcactccatgagc

SEQ ID NO: 216847 - DNA, 859 bp, Unknown
  Bacterial polypeptide expressing nucleotide sequence isolated from the Sargasso Sea
gaggtttttgtcacttatacatctggtcaagaagcggtggttgtcggtatgcaatcagtttctaatgaaggagatagtgttataacctcttatagagatcatgggcacatgttagcctgtgggatggatcctaaaggagttatggcagaacttactggcagagaggatggctactctaagggtaaaggtggttccatgcacatgtttagtaaagaaaaaaatttttatggtggacatggcattgttggggcgcaagttccaattggtgtaggattagctttctcacataaatacaaaaatgatggttttgtttgtatgacttatttaggcgatggagctattaatcaaggtcaagtttatgagagttttaacatgtctgctctttggaacttgcctgtcatttttataattgaaaataataaatatggaatgggaacctctgtagacagagcttcagcaggcagttcattagcagataggggaaaggcttatggtattcctggtatggaagtagatggcatgaatattttttcagtaagagaagctggaaaagaagctttagattttgtaaggagtggtaaaggacctttcattttagaaatgaaaacttaccgttacagggggcattcaatgtctgatccagctaaatacagaactcgatcagaggttgacgctgtacgtcaacaaaaagattgtattgaaaatttaaaagaagttttacaagagcaaaaagtaactgatcaagaacttaaaaatattgacggtgaaattaaatcattagtaacgaatgcatcagattttgctttagagagtaaattacctgatgacaatgaattgttaacagatatttatttataaa

SEQ ID NO: 216848 - DNA, 580 bp, Unknown
  Bacterial polypeptide expressing nucleotide sequence isolated from the Sargasso Sea
aatgagagaattacaatttagacaagccatatgtgaagcaatgtcagaggagatgagacttgacgattcaatatatctaatgggtgaggaggttgctgagtacaatggtgcttacaaggcatctaaaggaatgttggatgaatttggagataaaagagtaatagatactcctatatctgaattaggttttgcaggcataggtgttggttcgactatgactggaaatagacctatcattgagtttatgacttttaattttgcactagttggaattgaccaaataattaataatgctgcgaaaattagacaaatgtcaggaggccaatttccatgcccaatagtttttagaggtccaactggttcagcaggtcagttagcagcgacacattctcaagcttttgagagctggtatgcaaattgtcctggtttaaaagttattgttcctgcaaacccatatgatgctaaaggattacttaaatctgcaataagagatgatgatcctgttattttcatggaatctgaacaaatgtatggtgataaaggacaagtgcctgaagaagaatatttaattccaattgga

SEQ ID NO: 216849 - DNA, 883 bp, Unknown
  Bacterial polypeptide expressing nucleotide sequence isolated from the Sargasso Sea
aatcaaaaaaataaaaaattagaattctctaattataaatcaattactatgagacaatctatcagagacgctatagctgaagaaatgagaaaaaatgaatcagtttttgttataggtgaagaagtaggtgaatatgaaggtgcatacaaagttacacaaggtctacttgatgaatttggtccttctagaattcttgacacacctatttctgaacatgggtttactgggttagctgtagggagtgctttcaaaggattaagaccaatagtagaatttatgactttcaatttttcaatgcaagctattgatcaaataattaattctgctgcaaaaactttatatatgtctggagggcaaattaattgtccgattgtttttagaggccctaatggtgctgcatcacaagttgcagctcaacatagtcaagatttttctagctggtattctcattgtcctggattaaaggttgtagctccatctaacgcatttaatgctaaaggcttattaaaatcatctatagaagatgataatcctgtaatttttttagaaaatgaaattttatataatcaaaaaatggatgtgcctgaagatactaattttgatatccctttaggtgttgctaatatagctttagaaggtagggatgctacaatagttacttattcgatcatggtttcgaaatctttagaagctgccgaaatactaaagaaagactataatttaaatgttgaaattattgatttgcaaacaattagacctctagacgtagatactattttaaattcagtaaaaaaaactaatagagctataactgttgaagaatcttggccttttgcaagtgttggatctgaaattgtgaatatttacaaagagaaattttgac

SEQ ID NO: 216850 - DNA, 742 bp, Unknown
  Bacterial polypeptide expressing nucleotide sequence isolated from the Sargasso Sea
cctcgagtacttcaagaccatgtacacgatgcgccgcatggagatcacctgcgacaacgagtacaaagccagaacgatccgcgggttctgccatttgtacgacggccaggaggcgatcggcacgggcgtgcaggcggcactcgccccggaggactcgtggatcacgtcctaccggtgccactgcatcgccttggcgagaggcggtacggtagagggcgtattagcggagctcatgggcaactcacacggccagacgggcggcaagggcggtagcatgcacttctacaacaaggagcacaacttcttcgggggccagggcatcgtcggcgcccaggtgccggtcggcacgggtctggccttcgcgaacaagtacaagacgcccatgggcgagccgatgcccgtcgccatcggctgctacggcgacggcgcggcgaaccagggccagatctgggagtccatgaacatggcggccctgtggaaattaccgatgatcttctgcatcgagaacaaccagtacggcatgggcacgtccatctcgaggtcgtcgtgcaacaacgactactacacgatggggaacgtcatacccggcctgaagatggatgggatgaatgtactcagtgtcagagaaggcatgaagcacgtgcgggactacgtctcccagggcaacgggcccatggtcgtcgagatgtcgacgtacagataccacggccactccatgtccgaccccggcacgacgtacaga

SEQ ID NO: 216851 - DNA, 933 bp, Unknown
  Bacterial polypeptide expressing nucleotide sequence isolated from the Sargasso Sea
gttagttaaagagggagatagtgttgtttcaggagatattttagcagaaattgagactgataaagctactatggaactagagtcacccgatgatggtaaagttgagagaatactagttaaagagggcactgaaaatataagtgttaatactgagatagctctacttaaagttgatggtgaggaaatagaggagataccagaaaaacccattgaaaaatctccgcaagtctcatctaaccaatctgatcctctttcatcagaagtaaatatctcaatgaattctcttttaaatcaaacaaaagaaaattcaggtggaaagaattggtctgaaaaagaaatatctatgagagaggcattgaatcaagctattgaagaagaaatgaaattagacaaagatgtttttctcttaggagaagaggtagctgaatacgatggtgcatataaagtaacccaagggcttcttgataaatttggatcaaaaagggttttagatactcctatttctgaacatggttttacaggtttagctattggagcagccatggcaggtcttaagcctatatgtgaatttatgacttttaatttttctatgcaagcgattgatcaaatagttaattctgctgctaaatctttatatatgtcaggaggagaaataaatgttccaatagtttttcgaggcccaaatggtgctgcggctagagttggtgcacaacatagccaatgttttatatcttggttctctcatattccaggcttgatagtaatcgctccttcaaatgcaagagatgcaaaaggtttattaaaatcatctattcgaaatcccaatcctgttgtttttttagaacatgaattactctataaagaaaaaaccaatgttcctgaacagaacgatttcttaattcctattggtaaaggaaatcttattaaagaagg

SEQ ID NO: 216852 - DNA, 877 bp, Unknown
  Bacterial polypeptide expressing nucleotide sequence isolated from the Sargasso Sea
tatgaaaatacttctaccagctttatctccaacaatggaaacaggtaacttagtaaaatggttagttaaggagggagatagtgttgtttcaggagatattttagcagaaattgagactgataaagcaactatggaactagagtcacccgatgatggtaaagttgagaaaatactagtcaaagagggaaccgaaaatataagtgttaatactgagattgctctacttaaagttgatggtgaggaaatagaggagataccagaaaaacctattgaacaatctccaaaagccccctctaacggctttgaaccttccacagcagaagtaaaaatttcaatgaattctcttctaaatcaaacaaatgaaaatttagactcaaagaactggtctgaaaaagaaataactatgagagaggcattgaaccaagctattgaggaagaaatgaaattagataaagatgtttttctcttaggagaagaggtagcagaatacgatggtgcatataaagtaactcaggggcttcttgataaatttggttcaaaaagggttttagacacccctatatctgaacatggttttacaggtttagctataggagcagcaatggcaggtctcaagcctatatgtgaatttatgacttttaatttttctatgcaagcaattgatcaaatagttaattctgctgctaaatctttatatatgtcaggtggagaaataaatgttcctatagtttttcgaggccctaatggtgctgcagctagagtaggagcacaacatagccaatgttttatatcttggttttctcatataccaggcttgatagtaattgctccttcaaatgcaagagatgcaaaaggtttattaaaatcatctattcga

SEQ ID NO: 216853 - DNA, 880 bp, Unknown
  Bacterial polypeptide expressing nucleotide sequence isolated from the Sargasso Sea
actgttaaagctggtgatttgattgcagaaattgaaactgataaagctacaatggaagtagaagcggttgatgaaggtgttgttcttgatcttttatttagagaaggagaagtcaatattccagtaaataaagctatagctattattggcgatccaaatgaaaaagttgaagtaaaaaaagaagctcccattgaaaaagtgattgaaaaaaagaaaattgaaaaaaatactgagacaaaaattgagaataagaaagctgatataatcgatacatcatcacctaaaatagaagaagatagaaatttaagttcagaagaaattaccatgcgccaagcgctaagagacacaatggcggaagaaatgagaaaagataataaagttttcatacttggagaggaagttgccgagtatcagggtgcgtacaaagtaacacaaggtcttctagaagaatttggtaaagaaagagtattggatactcctatttccgaacatggatttactggattggcagttggtgcagcatttaagggattgaggccaatcttagaattcatgacttttaatttttctatgcaagcaattgatcaaattataaattcagctgcaaaaacactttacatgtctgggggacaaattaattgtcctattgttttcagaggacctaatggtgccgctgcccaagttgctgcacaacatagtcaggatttttcttcctggtattctcaagtgccaggtttaaaagtcattgcaccttctaccccatataacgcaaaaggtttgttgcgttctgcaatatcagatccaaatcccgtaatttttctagaaaatgaaattctttatgggttaaaaggtcccgttaataatgatgttaacttttcca

SEQ ID NO: 216854 - DNA, 679 bp, Unknown
  Bacterial polypeptide expressing nucleotide sequence isolated from the Sargasso Sea
gttgactgttagaaatgcacttagagatgcgatggcagaagaaatgagaagggatgtaaatgtttttgtaatgggagaggaagttgcagagtatcagggagcttacaaagtaacacaaggtcttcttgaagagtttggaaagaaaagagtagtagacactcctattactgaacatggttttgctggagttggtattggagctgcatttgctaacctgaaacctgtagtggaattcatgacttttaactttgccatgcaagctatagatcaaattgtaaattcagcagccaagacattatatatgtcaggtggtcaaatgggatgtccaatcgtttttagaggtccaaatggtgctgctagtagagtagctgcacaacatagtcaatgttatgctagttggtattctcatatacctggtttaaaagttattgctccttggtcaagtgaagatgcaaaaggtcttttaaagtctgcgataagagatccggatccagttatatttttagaaaatgaagttttgtatggtcaaagttttttgtgtccaaccaatgaagattttcttattcctattggtaaatcaaaaattgagcaagttggaacagatgtcacaataatagctttttccataatggttggaaaagcactagaagctgctaagactttaaacaggaaggtatag

SEQ ID NO: 216855 - DNA, 856 bp, Unknown
  Bacterial polypeptide expressing nucleotide sequence isolated from the Sargasso Sea
tctagaagaatttggcaaagaaagagtattagatactcctatttctgaacatggatttactggattagcagttgaagcagcatttaagggattgagaccaatcttagaattcatgacttttaatttttctatgcaagcaattgatcaaattataaattcagctgcaaaaacactttacatgtctggaggacaaattaattgccctattgttttcagaggacctaatggtgctgcggctcaagttgctgcacaacacagtcaggatttttcttcctggtattctcaagtgccaggtttaaaagttattgctccatctactccttataacgcaaaaggtttgttaagatctgcaatatcagatccaaatcccgtaatttttctagaaaatgaaattctttatggattaaaaggacctgttaataataatgttaacttctcaataccaatcggaaaagcaaatatagaaaaagaaggaaaagatttaacgattgtaacttactcaataatgttgcagaaatcaaaagaagcggcattaagattaaaagaggaatacaatttagatgcagaaattattgatttacaaactttgagacctttggatacggaaacaatattaaattcagttaaaaaaactaatagactaatcactgtggaagagtcttggccatttggtagtgttggttctgaaattgcaaatattgttcaaagggatgcatttgattatttagattcaccagtgataaaagttaatagtgccgatgttccaatgccatattcattaagcttagaaaaattataccttcctcaagttgatgagattataaatgcagcaaaaaaagtaagttatataaaataa

SEQ ID NO: 216856 - DNA, 862 bp, Unknown
  Bacterial polypeptide expressing nucleotide sequence isolated from the Sargasso Sea
ggagggttggatggcgaagatcatcgtgccggagggcaccgaggacatcccggtgggcaagcccgtggcggtgctgtgcgaggaacaggccgacatcgccgcgttcaaggactacgttcccgaagcgagcgccgacgccccgcccgccgccgcggcggagcccgccagagccgtgctcgagcgacccgactaccgacccatcggcgaacgaagcgtgccgctcaccacggggctggcgagcaagcccctcgaggacggtgccgcggcgttggcgcccgtgctggacgccgactcgcccgtcatgaccgtgcgcgacgcgctcaacagcgccctggctgaggagatggagcgcgacgagaaggtcttcatcatgggcgaggaggtcggcgattaccagggcgcgtacaagatcacgaagggcctgttgcagcgcttcggcgccgaccgcgtgagggacacgcccatcaccgaggcgggtttcaccggcctggcgtgcggcgccgcgatgatgggcctcaagccagtcgtcgagtttatgacgtttaacttttcgatgcaagccatcgaccacatcgtcaacaccgcggccaagacgctgtacatgtccgcgggcaccatctccgtgccgatcgtgttccgcgggcccaacggcgccgcggcgggcgtcggcgcccagcactcccagtgcttcgcggcctggtacatgtccatcccgggcctcaaggtgctcgcgccctacgacgcggaggacgcccgggggttactcaaagccgctattcgcgacccggaccccgtcgtcttcctcgagaacgagctgatgtacggcgaatcgttcccggtgagcaaggaggcgcttccaccg

SEQ ID NO: 216857 - DNA, 949 bp, Unknown
  Bacterial polypeptide expressing nucleotide sequence isolated from the Sargasso Sea
gttgatcagggtactgttgaaaagttgctttataaagaaggagataacaacattcctgtaaataaacctattgccctaatttcagaggagcaagttaatcgtagtgatacatcagaaaataaaaaaaacactactctgaaaaaagaaaatcaaaaaaccacagaaccttcaataacaatcaaaaaagatgaacaagaagaagtaaatcttagtaaagatcaaactacgatgagacaagcaatcagagatacaattgctgaagaaatgagaaaagataaaaaagtttttatacttggggaagaagtagcagaatatcagggtgcatataaagtaactcaaggtttattagaagagtttggaaaaaaaagggttatcgacactcctatttctgagcaaggatttacagggttagcagtcggcgctgcttttaagggattgactcctattgttgaatttatgacatttaatttttccatgcaggctattgatcaaattattaattctgcagcaaaaactctctacatgtcaggaggacaaattaattgcccaatagtctttagagggccaaatggtgcagctgctcaagttgcggctcaacacagtcaagatttttcatcatggtactctcatgtgcctggattaaaggttgtggcaccatccacaccattaaatgctaaagggttattaagagaagctataagggatcccaacccagtaatatttttagaaaatgaaattctgtatggtttaaaaggggaagtttcagctgatgataatttcactattccatttggtaaagcaaatgttgcgaaagaggggaaagatacaactgttgtgacttactcaataatgttgcacaaatcattagaggcagcaaaaattttgaaaaatgaatttgatttagatgtagaagtcattgatttgcaaagcttaagacctatagacaaag

SEQ ID NO: 216858 - DNA, 758 bp, Unknown
  Bacterial polypeptide expressing nucleotide sequence isolated from the Sargasso Sea
aattgataagaatgactcagttgtaacaacttacttagatcatggccatatgattgctaggggattagatccaaaacgaattatggcagaattgactggtagagaagatggttattctgctggtaagggcggttcaatgcatatgttctctaaagaaaataatttttatgggggtcatggtattgttggggctcaagtgccaattggaacaggtattgcattcacacacaaatataatggagaaaaaaatatatgcagaacatatattggtgatggagcgatgaacaatggtcaagtttttgaagcttttaatttagctgctttgtggaagcttcccgttttatatattattgaaaataataaatatgggatgggcacatctgtagatagagcggcagccggattagatttgtataaaagaggtgaggcatttggtattcctggtgagaaggtagacggaatgaatgtattttctgttatagaagcagcagataaagcaggcaagtatgttagggaaggaaacggaccatatattattgaggtacaaacatatagatatagaggacattcaatgtcagatcctgcaaaatatagaacgaaagaagaattagataattataagcaaaccgatcctattgaaatagtcaaagctgaaattttaaagaaaaaaattgcaactaatgatgaaattgaaaaaattaataaaaatattttagaagaaataaaaaatgcagctgaatttgcaaccaatagccctt

SEQ ID NO: 216859 - DNA, 754 bp, Unknown
  Bacterial polypeptide expressing nucleotide sequence isolated from the Sargasso Sea
gatccaaatgaaaaagcagaagtaaaaaaagaagctcctattgaaaaagtgattgaagaaaagaaaattgaaaaaaatattgagacaaaaattgacacaaagaaagataatatattcaatgcaccatcacctaaaatagaagaagacagaaatttaagttcagaagaaattactatgcgccaagcactaagagacacaatggccgaagaaatgagaaaagataataaagtttttatacttggagaggaagttgccgaatatcaaggtgcgtataaagtaacgcaaaatcttcttcaggaatttggtaaagagagagtattagatacccctatttctgaacatggatttacaggattagcagttggggctgcatttaagggattaagaccaatcttagaattcatgacctttaacttttctatgcaagcaattgatcaaattataaattcagctgcaaaaacactttacatgtctggaggacaaattaattgtcctattgtttttagagggccaaatggcgctgcagcgcaagtagctgcacaacatagtcaggatttttcttcctggtattctcaagttccaggtttaaaagttattgcaccatctaccccttataatgcaaaaggtttattgcgttctgcaatatcagatccaaatcctgtaatttttttagaaaatgaaattctttatggattaaaaggtcctgttaataatgatgttaacttctcaataccaatggaaaagcaaatataga

SEQ ID NO: 216860 - DNA, 849 bp, Unknown
  Bacterial polypeptide expressing nucleotide sequence isolated from the Sargasso Sea
gataagacgttttgaagaaaaagctggtcaattatacgggatgggtcatataggtggtttttgtcatttatatattggacaagaagctgtagttacaggaatacagtctgtattatctaaaaatgatactttggtaacttcttatagagatcatggtcatatgttagcatgtgatatggatcctaaaggtgttatggctgaattaacaggaagatcaactggctactctaaaggaaagggtggttcaatgcatatgtttagtagagaaaaaggattttttggtggtcatggaatagttgctgcacaagtgccaattggtgcaggtttagcttttgcacataaatataattctaataatgcaatttcagtaacattttttggagatggagctgctaatcaagggcaagtttacgagacttataacatggcatctttatggaaattacccgtgatttttgtaatagagaataatatgtatggaatgggtacttctgtatccagatcatctgctggtaataattttgctaaacgaggtaatgcatttgatattaaaaataaagtcattaatggtatggatgttttagaagttagagaagctgctatcgaggcggttgaatattgtaggcgtggaaatggtccttttatattggaggtcaaaacttataggtataggggtcattcgatgtcagatccagcaaaatatagaacaagagaagaggtagaaaaagccagaaaaactggtccaataaaaacaattgaaaacttaattgttagtgcaggaataaatgaagaggaattaaaggttgtggatgaggaagtaagaaagattgttaatgaagcagcagattt

SEQ ID NO: 216861 - DNA, 844 bp, Unknown
  Bacterial polypeptide expressing nucleotide sequence isolated from the Sargasso Sea
atggccactgaaatcaaaatgccggcattatcgccgaccatggaaaccggaacattagccaaatggctggtagcagagggtgatcaggtgcgttcgggcgatgttattgccgaaattgaaaccgacaaaacgacaatggaagttgaaaccattgacgatggcgtcgtcggcaaattgctggtgccagcgggtgccgaaaatgtgccggtcaatacggtcatcgcaattttgattgatgatgccggtgagagtatagccagtgccagcatcgccgatgtggcggttgcggaaaatgttgccccggaaaatgctgccccggaaaatgctgcctcggaaaaagctgtcccggaaagcgccgccccggcaactgtatcggcgcccgtcattacagcagatgcagccgcgatcagcggcgcctcaaccatgctgaccgtgcgcgagtcgctgcgtgatgcgatggccgaggaaatgcgacgcgatgagcgggtgtttgtcatgggcgaggaagtcgccgaatatcagggtgcctataaggtgacacagggcctgcttgatgaattcggatcgaagcgggtgattgatacgccaatcaccgagcagggatttgccgggctgggtgttggtgccgcatttggcgaattacgtccggtcatcgaatttatgacctttaattttgcgatgcaggcgattgatcagattattaattctgcggcaaagactctctatatgtccggcggacagatggggtgcccgattgtgtttcgcgggccaaatggggcggccagccgggttggcgcacagcattcgcaatgctatgccagctggtatgcgcactgtcccgggc

SEQ ID NO: 216862 - DNA, 787 bp, Unknown
  Bacterial polypeptide expressing nucleotide sequence isolated from the Sargasso Sea
agaaggtgtattagtaaattcaccaatcgcgataatggcagacgaagcaaccgaaaatacggttgatgtacagccgattgagaaaaatgttcagactgatgcttctcccacgagggctgaaatcaaaagccaagaaataccattaagcggcatggaagccgagtggggcgctgacatccaaaccaaaacacaaacggtcagagaggccattcgagatgccatggcagaagaaatgcgccgtgatgaaaccgtgtatctcatgggagaagaggtagcagaatatcagggggcatataaagtttctcaaggtttattggatgaattcggctcaaaacgtgttatagatacaccaataactgagcatggttttaccggtatagcagtagggtctgcatttgcagggttacgacctatcgttgaatttatgacttttaatttttctatgcaagcgatcgatcagattatcaattccgcagctaagaccctttatatgtctggtggccaaatgggtgcaccaatggtgtttcgagggcccaatggtgctgctgctcgggttggcgcacaacatagccaagattataccgcttggtatgcccacataccgggattaaaagtagttcaaccatactcagcatccgacgctaaaggtttaatgaaaacggcaatacgtgatgacaacccagttatctttctagaaaacgaaatactttatggaaaatcattcgaagttccacttttggacgattacacggtgcctttcggcaaagcccgtgtttggcgcgaaggt

SEQ ID NO: 216863 - DNA, 847 bp, Unknown
  Bacterial polypeptide expressing nucleotide sequence isolated from the Sargasso Sea
cacttatacattggtcaagaagcggtggttgtcggtatgcaatcagtttctaatgaaggagatagtgttataacctcttatagagatcatgggcacatgttagcctgtgggatggatcctaaaggagttatggcagaacttactggcagagagaatggctactctaagggtaaaggtggttccatgcacatgtttagtaaagaaaaaaacttttatggtggacatggcattgttggggcacaagttccaataggtataggattagctttctcacataaatacaaaaatgatggttttgtttgtatgacttatttaggcgatggagctgttaatcaaggtcaagtttatgaaagttttaatatgtctgctctttggaacttgcctgtcattttcataattgaaaataataaatatggtatgggaacctccgtagacagagcttcagcaggcagctcactagcagataggggaaaggcttatggtattcctggtatggaagtagatggcatgaatattttttcagtaaaaaaagctggaaaagaagcattagaatttactaggagtggtaaaggacctttcattttagaaatgaaaacttaccgttacagggggcattcaatgtctgatcctgctaaatacagaactcgatcagaggttgacactgtacgtcaacaaaaagattgtattgaaaatttaaaagaaattttacaagagcaaaaagtaactgatcaagaacttaaaaatattgacagtgaaatcaaatcattagttacgagtgcatcagattttgctttagagagtaaattacctgatgacaatgaattgttaactggtatttatttgtaaa

SEQ ID NO: 216864 - DNA, 646 bp, Unknown
  Bacterial polypeptide expressing nucleotide sequence isolated from the Sargasso Sea
ctggaagatggcgaaagcgccagtgacgtgaagttaccaacgcctgatgcgcctgctgaaacagcatccttagaaacagtggccaaaacagtctcagaaatggttgcaatcccagcgtcagaaaccgattggtcaggcagctcgacaccgcttaccgttcgtgagtcacttcgcgatgcgatggccgaagaaatgcgccgtgatgaaaatgtatttgtcatgggtgaggaagttgccgaataccagggtgcctacaaggtaacgcaggggcttcttgacgaatttggctcgaaacgggtgattgatacgccaattaccgaacagggttttgccggtcttggtgttggcgcggcctttggcgaattacggccgattatcgagttcatgacgtttaattttgccatgcaggcgattgatcaggtcatcaattcagctgccaaaaccctttatatgtcaggcggtcagatgggctgtccgattgtgtttcgcgggccaaatggcgcggcaagccgcgttgcggcgcagcattcgcaatgttttgcgagctggtatgcgcattgtccgggattaaaggttgttgccccttattcggccgctgacgccaagggtatgttaaaagctgctattcgtgacccaaatccggtca

SEQ ID NO: 216865 - DNA, 637 bp, Unknown
  Bacterial polypeptide expressing nucleotide sequence isolated from the Sargasso Sea
tatgagagaagcaattcgagatactattgcagaagaaatgcgaaaagataaaaaagtgtttatcttaggtgaggaggttgctgaatatcagggagcatataaagttactcaaggtttattagaagaatttggagataaaagagtaatagatacgcccatttcagagcaaggctttacaggtcttgctgtaggtgctgcatttaaaggattgactccaattgtagagtttatgacttttaatttttctatgcaagcaatagatcaaattattaactctgctgcaaaaactttatacatgtcaggtggtcaaattaattgccctatagtttttcgaggacccaatggagcggctgctcaagtagcagcacaacatagtcaagatttttcatcatggtatgcccaagttcctggattaaaagttctagctccatcaactccattaaatgccaaaggattattacgttcagcaataagagatcaaatcccagtatatttctttggaaatgaattctgtatggggctcaaggggaaagttcatctgatgataactttacataccatttggaaaagcaatatcgctaaagaagggacagatacgactattgtaactttatctataatgcttcaaaaatctctt

SEQ ID NO: 216866 - DNA, 871 bp, Unknown
  Bacterial polypeptide expressing nucleotide sequence isolated from the Sargasso Sea
cttgagacaatactatgtcaagatgggacggaaaatgttccagtaaacacagaaatagccctaatctctgattcaaaccaagtaagtaaaaaaagtaatattattgatgcctcagaaaatataacgccaaaagaacaggaaaacatcagtcaaaagacaaaaatcgagatagcaccagatacaattaaaagtgccgatcaagaaattcttgaaaaagagaactatacaagcttaaccgttcgtgaggctttacgtgatgcaatctctgaagaaatggcactcgatgaaacagtatttttaatgggtgaagaggtcgcccaatatcaaggagcttataaggtttctcaaggccttcttcagcaatttggtgagacaagagttatcgatacgccaattactgagcatggcttcaccggtttaggcgttggcgccgcatttgccgggctaaagccaatcgtagagtttatgactttcaactttgctcttcaggctatggatcaaataataaattcagctgcaaagaccttatacatgtcagggggacaaatgaatgttccaatcgtgttcagaggagcaaatggcgcggcatctcgggtagcggctcaacactctcaatgctatgcctcctggtatgctagtattcctggactgaaagttgtggccccttggtctagcgaggatgcgaaagggctactaaaaacagcaattcgtgacccaaatcctgttatatttttggaaaatgaaatattgtatggtcaaagttttaataccccaatttcaccggattttactctgcctatcggcaaggcaaaaatagagcggacaggctcagacgtcacaatatgcgcctactccatttcagttcaacatg

SEQ ID NO: 216867 - DNA, 742 bp, Unknown
  Bacterial polypeptide expressing nucleotide sequence isolated from the Sargasso Sea
cttctacggcggcgccggcatcgtgggcgcgcaggtgccgctgggcgtcggcctggccttcgccaacaagtacacggcgggcggcgagccgccgtacaacgtggccatcgccgcgtacggtgacggcgcggccaaccagggccagatctgggaggtggcgaacatggcggcgctgtggaagctgccgcacatcttcgtcatcgagaacaaccagtacggcatgggcaccagcgtggagaggcacagctccaaccccgactattacacctggggcggccgcatcccgggcgtgcgcgccaacggcatggacgtgctcgcagtgcgcgaggcggcccgctactgccggcagcactgcagcgagggcaacggccccatcttcctcgagctcaacacgtaccgctaccacggccactccatgtccgaccccggcatcacataccgcgaccgcgacgaggtgtcgaccacgcgcaagacgcgcgaccccatcgagcatgtgaaggagctcatcctggaggcgggcttccgcacggaggaggagatcaaggcggtcgagaagcgcgtgcgcaaggaggtggccgatgccatcaagaccgctaaggccagcacgctgccagcggaggaggagctgtacaccgagatctacagcgacggcaagggcggcagcgagtaccctccgtacacgcgcgcggtcgagtacgtggattcgcttgggcccgacggcaagccgggcatgctgctgtaa

SEQ ID NO: 216868 - DNA, 944 bp, Unknown
  Bacterial polypeptide expressing nucleotide sequence isolated from the Sargasso Sea
acgtgggccgcgggtcgaccgccaaaaacggttgcctatggcgtaaatgatatcccagcgacagaagatttagtggcgatttataaggacatgcttttgatccggcgatttgaagaaaaggctggacaactttatggaatggggcaaattggcggcttctgccatctctacattggccaagaggcagtcgtcgttggtttgcaatcagcctctcagcctggcgataccgttgttacatcataccgtgatcatggccatatgcttgcctgtggtatggactcgaatggtgtcatggcagaattgactggacgcgctggcggatattcacggggtaaggggggctcaatgcatatgttcagtcgtgagaaaaacttttttggtggtcatggcattgttggtgcgcaggtacccattggcgtcggccttgctttttcccataaatataaagaagaacccaatgtttgcatgacttatcttggtgatggtgcggttaatcaaggccaggtgtatgagagtttcaatatggctgccttgtggaatctccctgtcgttttcgtaattgaaaacaatcaatatggtatgggtacaaaggtcacgcgtgccgcggcgggccgggccttggctgatcgtggtatggcatatggcatccccggaaagcaggttgatggcatgaatgtgctggcggtgcgcaccgctgccctcgaagcccttgcttattcccgggatggaaatggcccttatatccttgagatgaaaacttatcgataccgcgggcattcaatgtctgatcccgcaaaataccgcacccgcgaagaagtcgatgcgatgcgtaagcagcatgaccccattgaccaaattcgtgattttctgaaagaccagaatgttgatgatgtgcgcctgaaggaaattgactcagacgtcaaagcaatggtcacggcggcgac

SEQ ID NO: 216869 - DNA, 667 bp, Unknown
  Bacterial polypeptide expressing nucleotide sequence isolated from the Sargasso Sea
agcctataaggtaagccaaggtctagtgggagaatttggtaagaaacgcgtaatcgatacgccaataaccgagcatgggttcacagggctagcaataggagcagcattttcaggattgaggccaatcgtcgagtttatgacatttaatttttctttgcaggcaatggatcaaatagtaaattcagcggctaaaacactatacatgtcaggagggcaaatgggctgtccaatcgtatttcgtgggcccaatggagctgccgctagagttgctgcgcaacatagccaagatttttcagcttggttctcctcgattcccggactcaaagttgtatcgccttactcagcctcagatgctaagggactcttgaaatccgccattagagacccaaaccctgtcatatttttagagaatgagctgctttatggagaggtattcaaagttcccacttcagaacacctagtaccaattggtaaagcaaatataattcaagaaggttcagacatcacaataataagttttggcataggggtaaaatatgctgttaagacagcatcagaattaaagaaaaatggtgtcagcgtcgagattattgatctaaggtctttgcgtccgttggatgaagaaaaaatagtagaatcagtaaaaaagactaatcggtgtgtgaca

SEQ ID NO: 216870 - DNA, 2662 bp, Unknown
  Bacterial polypeptide expressing nucleotide sequence isolated from the Sargasso Sea
catgtctgatatcctgaagaacgatgtggacccgatagaaacgctggagtggcttgcctctctggaatccctgctgcgtgaagagggtccccaacgcgctcagttcatccttgaacagttggccgagaaagcccgcgcaagcggtgtggacgtggctgccaaggcaaaccgcgattacatcaacaccatcccgtccagcgaagaaccggactacccgggcgacctggagatggagcgccgcattcgcgccatcatccgctggaacgccatgatgatcgtgttgcgcgcttccaagaaagacctggacctgggtggtcacatgtcttccttcgcttcttccgcgaccatctacgaagtctgctacaaccacttcttccgcgctcgcagcgagaaggacggtggcgacctggtctacttccagggtcacatctccccgggcatctatgcccgtgccttcgccgaaggtcgtctgaccgaagagcagctggacaacttccgtcaggaagtggatggcaagggtatcccttcctacccgcacccgaaattgatgccggacttctggcagttcccgaccgtctccatgggtctgggccccatcgccgccatctatcaggctcgcttcctgaagtacctgaccgaccgtggcatcaaggattgctccgagcagactgtttacgccttcctgggtgacggcgagatggacgagccggaagccaagggcgccctgaccgttgccgtgcgtgaaaagctcgacaacctggtgttcgtggtcaactgcaacctgcagcgtctggatggtccggttgtcggcaacggcaaggtcatcaacgagctggaaggcctgttctccggcgccggctgggatgtcaccaaggtcatctggggtcgcaagtgggatgagctgctgaagaaagacacttccggcaagctgatccagctgatgaacgagaccgtggatggtgactaccagaccatgaagtcccgtgatggcggctacgtgcgcgagcacttcttcaaccgttacccggaaaccgccgcgctggtcaaagacatgaccgacgaggagatcttcgccctgaaccgcggtggtcatgatcctcgcaaactgttcgccgccttctccaaggctgcggcgaccaagggcaagccgaccgtgatcctggccaagaccatcaagggttacggcatgggtgaagcggccgaaggcaagaacatcgctcaccaggtcaagaagatggatctgggctccgtgcgtcacctgcgcgatcgtttcaacctgccggtcaccgacgagcagctggaaaccctgccgtacctgaagatcgaagagggtaccgaagagcacaagtacctgcacgcccgccgtgccgcgctgaagggctatgtaccgacccgtctgcgcgagagcaccaccaagctggaaatcccggcgctggatgctttcggtccgctgctgggtgaacaggcgcgcgaaatctccaccaccatggcgttcgtgcgttccctgaacgtgatgctgaaagacaagtccatcggcaagcgcatcgtcccgatcctggctgacgaagcccgtaccttcggtatggaaggtctgttccgccagatcggtatctacagcccgcacggtcagcagtacaccccgcaagaccgcgacatcgtctcctactacaaggaagacaagcagggtcaggttctgcaagacggcatcaacgagctgggcgccatgtcctcctggctggctgctgcgacctcttacagcaccaacgattgcccgatgatcccgttctacatctactactccatgttcggcttccagcggatcggcgacatggcgtgggcagccggtgaccagcaagcccgtggcttcctgctgggtgcgacctccggtcgtactaccctgaacggcgaaggtctgcagcacgaagatggtcacagccacatcctggccaacaccatcccgaactgcgtctcctacgacccgtcctacgcctatgaagtagcggtgatcgtacaggatggtctgcgtcgcatgtacggtgagaagccggagaacgtcttctactacatcaccaccctgaacgagaactacgccatgccggccatgccggaaggtgccgaggaaggtatccgcaagggtatctacaagctggaaaccgtggccggcaccaaggccaaggtacagctgctgggttgtggctccatcctgggtcacgtgcgcaccgccgcccagatcctggccagcgagtacggcatcggctccgacgtgttcagcgtcacctccttcaacgagctggctcgtgacggtcaggacgcggatcgctggaacatgctgcacccgaacgccgatgctcgcgtaccgtacatcgctcaggtactgggttctgaagccaccatcgccgcgaccgactacatgaagtccttcgccgatcaggtgcgtgctttcgtaccgaccgagaactaccgcgtgctgggtaccgacggttacggccgttccgacagccgtgccaacctgcgtcgtcacttcgaagtgaacgaattctacgtggtggtcgctgccctgaccgaactggccaagcgcggcgaggtagacaagcaggttgtggccgacgccatcgccaagtacggcatcgatgccgacaaggtcaacccgctgtacgcgtaa

SEQ ID NO: 216871 - DNA, 890 bp, Unknown
  Bacterial polypeptide expressing nucleotide sequence isolated from the Sargasso Sea
tgctgaataccaaggagcatataaagtcagccaaggactacttgaagaattcggctcaaaaagagtcattgacacgccaattactgaacatggctttgctggcatagctactggtgcctctttcgctggactaaggcctattgtcgagtttatgacattcaatttcgccatgcaggcaatcgatcaaattgtaaactctgcaggtaaaacactttatatgtctggcggacaaatgggagcagcaatggtgtttcgcgggccaaatggagcagcagccagagtcggagcacaacacagtcaagactatacatcttggtatgcccatatacctggtctaaaagtagcagcgccatattctgcgtcagatgcgaaaggcttactaaaatcggcgattagggacaataatccagtaatctttcttgaaaatgaaattctttatgggcgcacctttgatgtgcccgatatcgaagactatattgtcccatttggtaaagctagaatttggcgtaaaggaacagacctcactataatctcgtttggtattggcatgcaatacgcactagaagccgcagaaaaactagctgcagagggaatagaagtagaagttgtagatttaagaactattaggccaattgactacgaaacaataatacactcagtctctaaaacaaaccggtgtattacggtagaggaaggttttcctgttgcttcaataggaaatcatttatccgcctatgtaatggagcacgcatttgattatctagatgcacctataataaattgtactggcaaggacgtgcctatgccttacgccgcaaacttagaaaaactcgctcttgttacgactgaagaagtcgttaatgcagcaaaaaaagtttgctatcgataaa

SEQ ID NO: 216872 - DNA, 970 bp, Unknown
  Bacterial polypeptide expressing nucleotide sequence isolated from the Sargasso Sea
atgagagaggctttgaatcaagctattgaagaagaaatgaaattagacaaagatgtttttctcttaggagaagaggtagctgaatacgatggtgcatataaagtaacccaagggcttcttgataaatttggatcaaaaagggttttagatactcctatttctgagcatggttttacaggtttagctattggagcagccatggcagggcttaagcctatatgtgaatttatgacttttaatttttctatgcaagcaattgatcaaatagttaattctgctgctaaatctttatacatgtcaggtggagaaataaatgttcctatagtttttcgaggcccaaatggtgctgcggctagagttggagcacaacatagccaatgttttatatcttggttctctcatattccaggcttgatagtaattgctccttcaaatgcaagagatgcaaaaggtttattaaaatcatctattcgaaatcccaatcctgttgtttttttagaacatgaattactttataaagaaaaaactaacgttccagaagagagcgattttttaattcctattggtaaaggcaatcttattaaagaaggtaaagatgtcactattattggtttttcaatgactgttcaaagaatattaaacgctcttccatcaattgaaaaactagggattagtcctgatattatagatctaagatcaattaaacctctagatgaagaattgatatataaatccgttaagaaaaccaatagagttgtaattgttgaggatggctttggtagtacaagttttggatcacacttatcttatttaatccaatcaaattgctttgatttccttgactcagaaataattaaagttagtggaaaagatgtcccaatgccatatgcagaaaatttagaaaaattggcattacccaacactgatgaaattgtatctgctgtaaaaaaagtgtcatatataaattaat

SEQ ID NO: 216873 - DNA, 1241 bp, Unknown
  Bacterial polypeptide expressing nucleotide sequence isolated from the Sargasso Sea
ggaaattgaatctgctgatgaaggaacagtaacaaaactacttataaaagaaggaacagaatcagtcccagtaaattcccctatagctatacttaatggaaataatgatcaattaactgaaaaaagtaaagataaaataactgaaaaattagatgtagatttattaaataacgaaaaaaaagatatagaaattgaaaattcaaatcctaacataatttcaaaaaatcaaaaaaataaaaaattagaattttctaattataaatcaattactatgagacaatctatcagagacgctatagctgaagaaatgagaaaaaatgaatcagtttttgttataggtgaagaagtaggtgaatatgaaggtgcatacaaagttactcaaggcctacttgatgaatttggtccttctagaattctcgatacacctatttctgaacatggttttacagggttagctgttgggagtgcttttaaaggattaagaccaatagtagaatttatgactttcaatttttcaatgcaagcaatcgatcaaataattaactctgctgccaaaactttatatatgtctggaggacaaattaattgtccaattgtttttagaggccctaatggtgccgcatcacaagttgctgctcaacatagtcaagatttttctagttggtattctcactgtcccggattaaaggttgtagctccatctaacgcattcaatgctaaaggcttattaaaatcatctatagaagatgataatcctgtaatttttttagaaaatgaaattttatataatcaaaaaatggaagtgcctgaagatactaattttgatatccctttaggtgaagctaatatagctttagaaggaaaagatgctacaatagttacttattcgattatggtttctaaatctttagaagctgctgaaattctaaagaaagactataacttaaatgttgaaattattgatttacaaacaattagaccgttagactctgatactattttaaattcagtaaaaaaaactaatagacttatcactgttgaagagtcttggccttttgcaagtgttggttctgaaattgtaaatattgtacaaagagaaatttttgattatttggattctcctattatcaaagttaatagtgcagatgtacctatgccttattctagtgttttagaaaaaaaatatctacctcaagtacaagacattatttcagctattaaaaaagtttgttatatttaaa

SEQ ID NO: 216874 - DNA, 1261 bp, Unknown
  Bacterial polypeptide expressing nucleotide sequence isolated from the Sargasso Sea
tggcgatattatagctgaaatagagacagataaagcaacaatggaaattgaagctgtagaggaaggtattttgtcaaaaattctagttccagaaggctcaacaaatgtcccagttaattcagttattgctcatatatctcaagaagatgaaaaagaaggaggactatttgaggacaaggaaaaattaactttagaaaataaaaaattaatttctcaaagcaaagtaaataatcaaaaattgacttcttcaattaatgagttaaatgatgataaagcatatgaagaattgactgtccgtgaagctttaagggatgcaatggctgaagagatgagagttgatacaaatgttttcctgatgggtgaagaagttggtgagtatgaaggtgcttataaagtcagtcaaggtttgttaaaagaatttggacctaagagagtaattgatacaccaattaccgaacatggatttgctggtattggagtaggtgcagcttttagaggcttaaaacctattattgaatttatgacttttaattttgcaatgcaagctatagatcatataattaattcatccgcaaaaacactttatatgtctggtggaggggtttcagttccaatcgtattccgaggtccaaatggtgcagcctcaagagtaggtgcacaacactctcaaaactttgcatcctggtatgctcatattccgggtttaaaagttgtatctccttattctgcaaatgatgctaaaggtttacttaagtcttcaataagagaccctaatcctgttatttttctagagaatgagattctttatggagaaaaatttaaagttacatcagatgagaattatacagtaccaataggaaaagcaaatatagttactcaaggtgaagacctaacaattgttagttactcaataggtgtaaaattctctttagaagctgcagaagttttgaataaagactttggaatttcttgtgaaattattgatcttaggtcattacgtccattagatatagatacaattgttaattcagttataaaaacaaatagaattatagttgtagaagaaggttggccaatatgcagtatttcttcagaaatatctgcaattttaatggaaaatgcttttgatcatttagatgctcctatgattcgcgtgacaggggaagatattccaatgccatatgctgctaatttagaattgcttactttacctagcagagataaaattgtaaaagcagctaaggaagtttgctatatttaa

SEQ ID NO: 216875 - DNA, 1231 bp, Unknown
  Bacterial polypeptide expressing nucleotide sequence isolated from the Sargasso Sea
gtggttagtaaaagaaggagataaagttagttctggagatgtgatagcagaaatagaaactgataaagctaccatggaaattgaatctgctgatgaaggaacagtaacaaaaatacttataaaagaaggcactgaatcagtgccggtaaattctcctatagccgtacttgatggagaagatcaagatcaatcatcagacaagaaagatatttcaaaaattaataataatgatgatgctaaaaaagaaaacttaaaagtagattctttaaataatgaaaaaaaagatgaaactgctaaagatcctaattcgaatattattcagaaaaataaaaaatttgaattatctaattataaatctattactatgagacaatctatcagagatgccattgctgaagaaatgagaaaaaatgattcagtttttgttataggagaagaagtaggtgaatatgaaggagcttataaggttactcaaggtcttcttgatgaatttggtccttctagaattcttgatacacctatttctgagcatggatttaccggattagctgtaggaagcgcctttaaaggattaaggccaattgttgaatttatgacttttaatttttcaatgcaagctattgatcaaataattaattctgctgctaaaactttatatatgtctggaggacaaattaattgtccaatcgtttttagaggccctaatggtgccgcatcgcaagttgcggctcaacatagtcaagatttttctagttggtattcacattgtccaggattaaaagttgtagttccttctaacgcatttaatgctaaaggcttattaaaatcttcaatagaagatgataaccctgtaatttttttagaaaatgaaattttatataatcaaaaaatggatgtacctgaagatactaattttgatattcctttaggtgttgctaatatacctttagaaggtacagatgctacaatagttacttattcgattatggtttcaaaatctttagaagctgcagaaattttaaaaaaagaatataatataaatgttgaaattattgatttacaaacaattagacctttagattcagatacaattttaaattcagtaaaaaaaactaatagacttataactgttgaagagtcctggcctttcgcaagtgttggatctgaaattgtaaatattgtacaaagagaaatttttgactatttagattctccaattattaaaagttaa

SEQ ID NO: 216876 - DNA, 3025 bp, Unknown
  Bacterial polypeptide expressing nucleotide sequence isolated from the Sargasso Sea
ttgttagttcctgacataggtgattttgagaacgtggaagttatagaacttttagtaaaagagggtcaagatattaaaaaaaatgatcctgttgttactattgaaagtgataaatcgagtgttgaaataccatcaatattttctggcaaagtcgagtctgtaaatgttaaagttggagataaggtttcaaagggagatctattaataaatatttcttcaaatcaatcattatctcaaaaagaaagtgttccaaaagaaactgaaaatttaattcaagaagctgagagtactttaagaaaacatcaggaccaaaatattccacaaaaaataattgagaccaaaaaaccaaaaataatccaagtagttaaagaaggggatatcgatccactagaaacaagtgaatggctagagtctttgtcagcagtaatagaaaaagacggaaatcagagggcacattatttaattaaagaacttattaacaaagcttatatggagggtgccaatataccctatacgcaaaatactccttatataaacactataccagttaacgaggaaaaaaaatctaatggagatcaaaacttagagagaagaattagatctttaattagatggaatgctgctgcaatggtagttagagcaaataaaaaattcccagaacttggagggcatattggaacttttgcatctgctgcaactctttacgatgttggtatgaatcatttttggagagctaaaaataataaatttggtggagatttaatttattttcaaggtcatagcgctccaggtatgtacgcaagagcttatctagaaggtagacttaacgaaaaacaattagatagttttagacaagaagtaaaccctggtggtctttcctcatatcctcatccttggctaatgccgaatttttggcaatttccaacagtgtccatgggattaggtccaatgcttgcaatttatcaagcaagattcatgaagtacttaatcaatagaggtctcatcaaagatgaaggtagaaaagtttgggcatttttaggtgatggagaaatggatgaacctgaatctttaggcgcgattggtttagccgcaagagaaaaattagataacttaatatttgtagtaaattgtaatcttcaaagactagacggaccagttcgtggaaacggaaaaataattcaggaattagagggaatttttagaggtgcaggatggaatgttataaaagttatttggggctcttactgggatccattgcttgccaatgataaaacaggtcatttagttaaaacaatgaatgagactgtcgatggcgagtatcaagcaatgaaagcaagggacggtgcgtatgtgagagaaaaattttttggaaaatatttagagaccaaagagttggtttccagtctttcagacaaagatatttggcgattaaacaggggtggtcacgaccctcataaagtttttgcagcttatgataaagcatctaaaaatgttggaagtcctacagttgtaattgcaaaaactattaagggttatggaatgggcaaaagtggtgagagtgtaaatacaactcaccagactaagaagttagatatcgacgacttaatgtattacagagataggtttgatgttccattaacagatcaacaagttaagaatattgaatactacaagcctgatcaaaattctccagagattaaatacataaatgaaagacgaattcaactgggtggttttattcctgaaagaacaacttacgcgaaacctgttaaagcaccaccaaaagatattttcgataatatgaaagtttctacaggtgaaaaagaaatgtcgaccacaatggcattggtcagaatgttaacaaaccttttgagagataaaaatgttgcaccaagactggttccaatcatacctgatgaggctagaacattcggaatggagggttttttccaaaaaataggaatttatgctcatgaaggtcaaaaatatgagccagaagattctgctcaattaagttcgtataaagaggaaaagagtggtcaagttttagaggaaggaattaacgaggctggagcgatgtcatcttggatcgctgcaggaacttcatatacaaaccatgatatagaaatgatcccaatttatcttttttactcaatgtttggctttcagagaattggtgattttgcttgggcgggtgctgatagccagtccagagggtttttgatcggagcaaccgctggaagaacaactcttgctggggaaggtttacaacatcaagatggtcatagtcatttgatggcttcaactattcctaattgcagatcatacgatccaacatttcactacgagcttgcagtcatttttcgagaaggtttaagaagaatgcatgagaaaaaagagaatattttctattatattacgaccatgaatgaaaattatcctcatccagaaatgccaaaagataaatcatgtgaggatggtattttaaaaggaatgtataaaataaaggagtttaacaagtataaaaaaactaaaattcaatttcttggatctggcacaatcttaagagaaatgatagctggtgccgaaatattacaaaatgagtatcaaatcgatagtgagatttggagtgtaaccagctttaatgaattaagaagggatggccttgaggtagagagatacaatcttctaaatcctgataaagagcctaaaaaaagctatgtagaaaaatgtttgggtaatactgaaggaccaattttagcagcttctgattatatgagaatgaattctgaccagattagaccatacgtaaataaaagtttttattcattaggaacggatggatttggtcgaagtgatacaagaaagaagttaagaaaattttttgaagttgataaggaacatatcacaacatatgggttgagcatcttagctaaggaacagcttattgcatcaaaatatgcgaaagaagcaatcaaaaagtataagattgatattgataaacctatgccaacaaaattataga

SEQ ID NO: 216877 - DNA, 2656 bp, Unknown
  Bacterial polypeptide expressing nucleotide sequence isolated from the Sargasso Sea
atgctacaagacttagatccgttagagactcaggaatgggttgacgccctgcaagctgtattagaacaggaaggccctgaacgcgcccatttcttattagagaaactgatcgataaagcccgtcgcaatggcacgcacttgccttacactgcgaccacggcctatttgaacaccattccagcgggtcaagagccgcacatgccaggcaaccaagagatggaacgtcgcattcgcgccatcatccgttggaacgccttagctatggttctgcgtggttctaagaaagatttagagttaggcggccatatttcgagtttcgcgtcgagcgcaaccatttatgacgtgtgcttcaaccacttcttccgcgcgccaaacgagaaagacggcggcgacttagtgtatttccaaggccatatcgctccaggtatctacgcgcgttcattcttggaaggtcgtttaactgaagaccaactggctaacttccgtcaagaagtggatggcaaaggtttatcttcttatccgcaccctaagttgatgccggactactggcaattcccaacggtttctatgggtctgggtccaatccaagcgatttaccaagcgcgcttcttaaaatacctgactgaccgtggtctgaaagattgttctgatcaaaccgtttactgcttcttaggtgacggtgagtgtgacgagccagaagccttaggtgctatcggtttagccgcccgtgaagagttagacaacctagtcttcatcatcaactgtaacctgcaacgtctggacggcccagtacgtggtaacggtaagatcatccaagaactggaaggcgaattccgcggcgctggctgggaagtggtgaaagtgatttggggtcgttactgggatccattattggcccgtgataccagcggtaagttactgcagttaatggaagaaaccgttgacggtgaataccaaaactgtaaagccaaaggtggcgcttatactcgcgaacacttcttcggcaaatacccagaaaccgccgaaatggtggcgaacatgtcagatgatgacatttggcgcttaaaccgtggtggtcatgacccagttaaagtgtacgcggcattagaccatgcgcgtaagactaaaggtcgtccaactgtgatcctagcgaaaaccgttaaaggttacggcctaggtgatgcgggtgaaggtaagaacatcgcccacaacgtgaagaaaatgggtatcgagtctatccgttacttccgcgatcgtttcaatatcccaattccagacgatcaattagaagatctgccgttctaccacccaggtccagattcggaagaagtgaagtacatgatgagccgtcgtgccgagctgcatggcagcgtgccacaacgtcgcgagaagttcagcgaagagctggaagtgccatcactgaagattttcgactcgattctgcagggttctaacggtcgtgaaatttcgtctaccatggcgtttgttcgcgtactgacggcactgttaaaagacaagaagattggcaaaaacatcgtgccaattattcctgacgaagcgcgtactttcggtatggaaggtctgttccgtcaagtgggtatttatgctcacgaaggccaaaaatacgttccgcaagactctgaccaagtggcttactaccgtgaagataagtcaggccaagtattgcaggaaggtattaacgaattaggtgctatgtcatcttgggtatcggctgcgactagctactcagtgaacgatgtgccaatgatcccattctacatctactactcaatgttcggtttccaacgtattggcgacatggcatgggcagcgggtgatatgcgtgcacgtggcttcttagtcggtggtacttcaggccgtacaacgctgaacggtgaaggtctacagcatcaggacggtcacagccacgtactggctaacactattcctaactgtattacctacgatccaacttacggttatgaaattgccgttgtggtacaagatggtattcgtcgtatgtacggcgagaaccaagaagatatcttctactacctgaccacaatgaacgaaaactacgagcaaccagctatgccagaaggcgcagaagttggcatcgttaaaggtatctacaagttagaaaccgttgctggctcgggtaaaggcaaagttcagttaatgagctgtggcaccattcttgagcaaacccgcaaagcggctcaagcactggcaaaagacttcggtatcactgccgacgtatttagcgtaaccagcttcaacgaactgactcgcgatggtcaagcggttgagcgttggaacatgctgcacccaactgaaacgccaaaacaagcgtatatcagccaagtgatctccagtgatgcgcctgcaatcgcagcgactgattacatgaagatctatggcgagcagttacgtgcttacatgccaaccgattacaaagtgttaggtactgacggtttcggtcgttcagacagccgtgacaacctgcgtcaccacttcgaagtggacgctaagttcatcgttatcgcggcactgaagtcactggttgatcgtaaagagctgcctgttgatgtgttagcgaatgccatcaaggaatacggcatcgacgctgacaagatcaatccacagtacgcgtaag

SEQ ID NO: 216878 - DNA, 1381 bp, Unknown
  Bacterial polypeptide expressing nucleotide sequence isolated from the Sargasso Sea
tatgagcacagaaattttaatgcctgcattatctccaacaatgactgagggtaatctgtctaagtggttaattaaaaaaggggatactgttaaagctggtgatttgattgctgaaattgaaactgacaaagcaacaatggaggtagaagcggtagatgaaggtgttgttcttgatcttttatttaaagaaggtgaggcgaatattccagtaaataaagctatagctattattggtgatccaaatgaaaaagttgaagtaaaaaaagaagctcccgtagaaaaagtgattgaagaaaagaaaattgaaaaaaatattgagacaaaaattgagacaaagaaagataatataatcgatacaccatcacctaaaatagaagaagatacaaatttaagctcagaagaaattaccatgcgtcaagcactaagagacactatggctgaagaaatgagaaaagataataaagttttcatattgggagaagaagttgccgagtatcaaggtgcgtataaagtaacgcaaggtcttcttcaggaatttggcaaagaaagagtattagatactcctatttccgaacatggtttcactggattagcagttggtgcagcatttaaggggttgagaccaattttagaatttatgacttttaatttttctatgcaagcaattgatcaaataataaattcagcagcaaaaacactttacatgtctggaggacaaattaactgtcctattgttttcagaggacctaatggtgctgcggctcaagttgctgcacaacatagtcaggatttttcttcctggtattctcaagtgccaggtttaaaagtcattgcgccatctactccttataacgcaaaaggtttattaagatctgcaatatcagatccaaatcccgtaatttttctagaaaatgaaattctttatggattaaaaggtcccgttaataatgacattaacttctcaataccaattggaaaagcaaatatagaaaaagaaggcaaagatttaacgatcgtaacgtattcaataatgttgcagaaatcaaaagaagctgcattaagactaaaagaggaatacaatttagatatagaaattattgatttacaaactttacgacctttggatacagaaacaattttaaattcagttaaaaaaactaatagattaatcactgtcgaagagtcatggccatttggtagtgttggttctgaaattgcaaatattgttcaaagggatgcatttgattatttagactcaccagtgataaaagttaatagtgcggacgttccaatgccatacgcattgagcttagaaaaattatatcttcctcaagttgatgatattataaatgctgcaaaaaaagtaagttatataaaataa

SEQ ID NO: 216879 - DNA, 964 bp, Unknown
  Bacterial polypeptide expressing nucleotide sequence isolated from the Sargasso Sea
tatgaagaaacttcaaaaagccgattacattaaaatgtattcttttatgctcaaaattagaagatttgaggaaagagcagctcaactttacggaatgggtaaaataggtggtttttgtcatttgtatattggccaagaagctgttgttgttggtattttaatgacaattgataagaatgactcagttgtaacaacttacagagatcatggccatatgattgctaggggattagatccaaaacgtattatggcagaattgactggtagagaagatggttattcagcaggtaagggcggttcaatgcatatgttctctaaggaaaataatttttatggtggtcatggtattgtaggagctcaagtaccaataggaaccggtatagcattcacgcataaatataatggagaaaaaaatatatgcagaacatatattggtgatggagcgatgaacaatggacaagtttttgaagcttttaatctagctgctttatggaagcttcctgttttatacattattgaaaataataaatatggaatgggcacatctgtagatagagcggcggccggattagacttatataagagaggggaggcatttggtattcctggtgagaaggtagatgggatgaatgtgttctctgttatagaagcagcagataaagcaggtaagtatgtcagagaagggaatgggccttatattattgaagtacaaacatatcgatatagaggacattcaatgtcagatcctgcaaaatatagaacgaaagaagaattagataattataagcaaaccgatcctattgaaatagtcaaagctgaaattttaaagaaaaaaattgcaactaatgatgaaattgaaaaaattaataaagatactttagaagaaattaaaaatgcagctgaatttgcaaccaatagtccttttccaaaggacagcgaactttatacggatgtttatttataa

SEQ ID NO: 216880 - DNA, 1054 bp, Unknown
  Bacterial polypeptide expressing nucleotide sequence isolated from the Sargasso Sea
aatgagtatagataattttcaagataatacatcagttaacactaagttatttggtcaatatgatgtttttgatgaaaaagaagtaagtaatgagcaattaaaatctttttatgaaaaaatgttatatttgagaagatttgaagaaagagttggtcaactatatggccttggattaattggaggtttttgtcatttatatattgggcaagaagcagtttcagttggtatggaagctgcaatagataaagaggataatgtaattaccggctatagatgccatgcgcatttattatcaagaggagcttctccatataaaatattatgtgaattaatgggaaaaggagaaggaatatctaagggaaaaggtggttccatgcatatgtttgatcctaaaaataatttttggggtggacatggaattgttggagctcaagttcctataggtacaggtttagcttttgcatctaaatatttaaataaggaaaatttatctgttacctactttggagatggtgctgccaatcaagggcaagtatatgagtcttataatatggcttccttatggaaattacctatcattttttgcattgaaaataatcaatatggaatgggaacgtccactaagcgagcaagcgctggaacagatttgagtaaacatggagaatcttttggtattcctggtattgcagttaatggaatgaatccagtttctgtatatttatctgctctaaaagcagttaagtgggttagggatggtaatggaccaattatacttgaaatgaaaacatatagatatagaggtcattctatgtcagaccctgcaaagtatagaactagggaagaggttcaaaaaatgagagaggagcaagatcctatagaatatataaaaaagaagttattagatttaaccatatttgataaagataggcttcaagaaatagatgataatattagattggaaataagcaatttagctgaaaaagctactagtagtaagcctgttagtgaagatgaattgtatacagatgtattatgtgaggaaaaatatgagtaa

SEQ ID NO: 216881 - DNA, 2392 bp, Unknown
  Bacterial polypeptide expressing nucleotide sequence isolated from the Sargasso Sea
aatggcgatggtagtgtcggcaaacacaaacaatcccggcataggtggacacatttcaacatatgcatcagcagcaacattatatgaaatagggtttaaccattttttcaaaggccccaaacatccagatggagcagatttaatatttttccagggacacgcctcgcccggtatttatgctcgagcatttttagaaggaaggcttgataaaaacgcgctccaaaactttagacgagaacttaccccaggcggcggactttcatcctacccacacccctggttgatgccaaaattctggcagtttgctacagtatccatgggtttaggtcctttaatggcggtgtatcaagcgcgctttatgaactatttaattgatagaggtttaatgaaaaacaccaacagaaaagtttgggcttttcttggggatggagaaatggatgaaccagaatcaacagcaggcttaacattagcggcaagagaacagcttgataatttaatttttgtaattaattgtaaccttcaaagactagatggccccgtaaggggaaacagtaaggtaatccaagaactagagggggcttttaggggcgccgggtggaatgttataaaggtaatttgggggacagattttgatgaatatattaatcatgaaaacggacatttctttttaaagcgcgctgaagaaatagtagatggtgatctattaaaatacgtagttgagggcggtgcttatatacgcaaacatttttggggaaaataccctgagcttttagaaatggttgcaacaaaaaccgataaagagttagaaaaaatgagggtcggcggacatgaccctgttaaggtgtatgcagcttttaaagaagctgttgaaacgaaaggaaaaccaaccgttatacttaccagaacaataaaaggttatggtttaggtgaggctggagaaggcagaaacattacacaccaacaaaaaaaactaaaccaagaagagttattgtattttagagatcgtttcgatattccactatcagacaaacagtcgcaatcaaccttgttttataagccaagagcaaacagtaaagaagcacaatatttattaaaccaacgaaaaaaactaggcgggtttgtcccagaaagaaaaaccaaagggccaagaattaaaataccaaagattaccatatttgaagaacttttaaacggatcaggcgatagagaaatttcaaccaccatggcatatgtgcgactgttaaccatattaacgaaagataaagaaataggaaaaaatgttgtaccaataattcctgatgaggctagaacttttggcatggaccctctttttaggcagctcggcatatacgcacacaacggccagctttatgagcccgtggattcagaccagtttctttattataaagaatcaaaagatgggcaaattcttgaagagggcataaatgaagccggagctgtatcatcttttatagcggctggaacaagctatagcttaaatggcgtaaacatgatccctttttatatttactattctatgtttgggtttcaaagaatatgggattttatatgggcagcaagcgacatgagagcgagggggtttttaattggaggaacagcaggaagaacaacattaaacggagaaggattgcaacaccaagatggacacagtcatttagcagccgcagtaactccaaacatcaaagcttatgatttatcttatgggtacgaaattgcaacagttgttcattacggattaaaagatatgtatgaaaaaaataacgattgtatttattatattactgtagaaaatgaaaattacaaacacccgcaaatacctaaggatgtttctgcggacatcgtaaaaggtttatataaaattaaatcgacaaaaacccccacgattagactgttggggagtgggccgctgatgaatgaaacactaaaagctgcagaactattaaaaaaagactggggagtagagccgggaatttggaacgtaacaagttttagcgaactaagaaaagacgcagaagaaacagaaagatggaacttaattcacccaaacaaaacacagaaaaaatcacacattgaaaaatcacttagcaagcacaaagttccaaccgttgctgtttcagattatgttaaaatgttatctgagcaaatagcgccatatgtaccaggccctttttactctcttggaacagacggttttggaagaagcgacacaagagagaatcttagacatttttttgaaatagacaggtattatataacactcaccgctttacgagcattagcagatgaaggggttataaaaatgaatatagcagaacaggcgattaaaaaatataatattgacccagagaaaccaaatccaaccacagcataa

SEQ ID NO: 216882 - DNA, 3034 bp, Unknown
  Bacterial polypeptide expressing nucleotide sequence isolated from the Sargasso Sea
gctgcgactccgccggcgggcccgacggtcgcgccgagcgtgcgaaaagccgatcggtcaacatggcaggattgtagcgcagcgcaatacatggaaaacctataccggatatgttgaacggaaacggatttgttcagccgcgacgcgccggagagccccgaaatatgggtgcagcgcagcaatattccgcattgcgagaaaagatctcacgattcgaaaattttgttgcgccggcccgcgcacgctcattacaatccgtcggagcttgcccgcagccggtcgcgtcgcgtcgtctgcacgagagcgatcctcacattccaggacccaggagacgagaatgtccgctgtaccgaacgaagtgatgaaatatgtcgccgccgaacatgacgacgacccgcaagaaaccgtcgaatggctcgagtcgctcgacggcgtaatctcctccgtgggcactggccgcgcgcactacctgatcgaaaagcagatcgaattcgcccgcatgcacggcgaacacctgccgttttccgcgaataccccgtacatcaacacgatcccggtcgccgcgcaggcgaagatcccgggcgaccaggacatcgagcaccgcatccgttcgtacacgcgctggaacgcgctggcgatggtgctgcgtgcaggcaaggacacgaacgtcggcggccacatcgcgtcgttcgcgtcggccgcgacgctctatgacgtcggctacaaccacttctggcacgcagcgtccgagcagcacggcggcgatctcgtgttcgtgcagggccactcgtcgccgggcgtctactcgcgcgcgttcctgctcggccgcctgaaggaagagcagctcgacaacttccgccaggaagtcgacggcaacggcatttcgtcgtacccgcacccgtggctgatgccggacttctggcagttcccgaccgtgtcgatgggcctcggcccgatcatggcgatctaccaggcccgcttcatgaagtacctggaagcgcgcggcatcacgaagacggaaggccgcaaggtgtgggcattcctcggcgacggcgagacggacgaaccggaatcgctcggcgcgatcgggatggcgagccgcgagaagctcgacaacctcgtgttcgtgatcaactgcaacctgcagcgtcttgacggcccggtgcgcggcaacggcaagatcatccaggaactcgaatcggaattccgcggtgccggctggaacgtgatcaaggtcatctggggcagccgctgggatgcgctgttcgcacgcgacaagtcgggcgcgctgatgcgccgcatgatggaagtcgtcgacggcgagtaccagacgtacaagtcggaatccggcgcgttcgtgcgcgagcacttcttcaacacgcctgagctgaaggcgctcgtcgccgactggtcggacgacgacatctgggcgctgaaccgcggcggccacgatccgcacaagatctacgcggctttccacgaagccacgaacacgaagggcgcgccgaccgtcatcctcgcgaagaccatcaagggctacgggatgggcgagtcgggccaggcgatgaacatcacgcaccagcagaagaagctgccggtcgagcaactgaagaagttccgtgaccagttccgcctgccgatcaccgacgagcagatcgccgacgtgccgtacctgaagttcgaggaaggctcgaaggaactcgaatacatgcgcaagcagcgcatggacctcggcggctacctgccgcaccgccgcgagaaggcgacgtcgctgccggtgccggcgctcgacgcattcgagccgctgctgaagggcacgggcgaaggccgcgagatctcgacgacgatggcgttcgtgcggatcctgaacatcctgctgaaggacaaggcgctcggcaagcgcgtcgtgccgatcgtcccggacgaatcgcgtacgttcggcatggaaggcctgttccgccagatcggcatctggaaccagcagggccagaagtacgtgccggaagattccgaccagctgatgttctacaaggaatcggaaaccggccagatcctgcaggaaggcatcaacgaagcgggtggcatgtgcgactggatcgcggcggcgacgtcgtactcgacgcacggcgagatcatggtgccgttctacatcttctattcgatgttcggcttccagcggatcggcgacctggcatgggccgcgggcgacatgcgttcgcgcggcttcctgctcggcggtaccgcgggccgcacgacgctgaacggcgaaggcctgcagcacgaagacggccactcgctcctgtgggcggcatcggtgccgaactgcgtgagctacgacccgacgttcggctacgagctcgccgtgatcgtccaggacggcctgcgccgcatggtgcaggaccaggaagacgtgtactactacatcacggtgatgaacgagaactacgagcacccggcgattccgcagggcgagcacgtggcggccgacatcatcaagggcatgtacgcgttcaagaaggccgatgccgacaagaaggcgccgcgcgtccagctgctgggcgcaggtacgatcttcaacgaagtgatcgccgccgccgagctgctgaagaacgactggggcgtcgccgccgacctgtggagcgtgccgagcttcaccgagctcgcgcgtgaaggccaccaggtcgaacgctggaacctgctccatccgaccgaagagcgtcgtctgtcgcacgtgcagaagtgcctgaaggacacgcagggcccggtcatcgcatcgaccgactacgtccgtgcgctggtcgaccagatccgcggccagatcgatcgccgcttcgtcgtgctgggcacggacggcttcggccgttcggacacccgcgagaagctgcgtcacttcttcgaggtcgaccgtcactgggtcaccgtcgccgcgctcaacgcgctggccgacgagggcacgatcgagcgcaaggtggtcgcggaagcgatcgccaagtacaacctcgatccgtcgaagcccaacccgatgaccgtttaa

SEQ ID NO: 216883 - DNA, 2317 bp, Unknown
  Bacterial polypeptide expressing nucleotide sequence isolated from the Sargasso Sea
atgagtttagaattattagttccggatatcggtgattttgaaaacgtagagataatcgaaatcttggttaaaaaaggtgataaaatcaataaaaatgattctgttgtaacattagaaagtgacaaatcaagtgttgaagttccgtcaacctttgaaggcattattgaaaatatcaaagttaaaataggtgataaagtttctaaaggagatttaatattaactttatcttctagcgaaaatcaaattaacaaatcatctgaaaaacaaaaaattgatgaaaaaatacctcctgtaacagaaaaaattatccaagaagctgaaggttcaataaagaaaatagaagaaaaaattgaggataaaaaaattgaaaatgaagttaaaatgataactagcaaagatgatattgacccagttgaaacaaaagaatggcttgattcattaagtgcagttcttcaaaatgatggttcagaaagagctcattttttaattaaacaactaatagatcaatcatataaggctggatctaaaatcccttacactcaaacaacaccttatataaataccatacctccagaagaagaaaaaaaatcaccaggcgatcaaaacatagagcgcaaaattagatccttcataagatggaatgctgctgcgatggtagtaagagcaaataaaaaatttccagaattaggtggtcatattggtacatttgcatcagctgcaaccttatatgatgttggtatgaatcatttttggagagcaaaaaataataaatttggtggagatttaatttattttcaaggtcacagtgcgccgggtatgtacgccagagctttccttgaaggaagattaacggaaaggcaattaaatagttttaggcaagaagtaaaaaatgatggactttcttcctacccacatccatggttaatgccaaaattttggcagttcccaactgtttcaatgggtcttggacctatgttagcaatatatcaagctagatttatgaaatatttaattaatagaggtctaattaaagatgaaggtagaaaagtttgggcatttctaggagatggagaaatggatgaaccagagtcattaggcgcaataggtttagctgcaagagaaaagttagataatttaatttttgtaattaattgcaaccttcaaagattagatggcccagtcagaggaaatggaaaaattattcaagagcttgaggggatttttagaggaggaggatggaatgttataaaggtaatttggggatcttattgggactctttgttagctaatgacaagactggtcatctagttaaaataatgaacgaaacagttgatggagaatatcaagcatttaaggctagaaatggtctttatgttagagaaaaattttttggaaaatatccagaaacaacagagttagtttcatctatgtcagataaagatatttggagattaaacagaggaggtcatgatcctcacaaagtttatgcagcctatgacaaagcaataaaaaatattggaagccccactgtaataatagcaaaaactatcaaaggttatggaatgggtaaaactggtgaaagtgttaatacaactcatcagcaaaaaaaattagatgtagatgatttgttatattacagagatagatttgatgttcctttaacaaatgagcaagttaaaaatatagaatattataaaccagatgaaaattctgaagaaattaaatatttgaaaaaaagaagaatggaattaggaggctttattccagaaagaacttcatattcaaaaccaattaaaactccaaataaagatatttttgattttatgaaaatttcaactggagaaaaagaaatgtcaactacaatggctttagtaaggttgttgactaacttgttaagagataaaaatgtggcgcctaaattagttcctattattccagatgaagccagaacttttggtatggagggcttttttcaaaaaattggaatttatgctcatgagggtcaaaaatatgaaccagaagattctgctcaactttcatcttataaagaagaaaagagtggacaagttttagaggagggaataaccgaggcgggatctatgtcctcatggattgctgcaggtacatcttattcaaatcatgatattgaaatgattccaatttatttattttattccatgtttggttttcaaagaattggggactttgcttgggcagctggagatagtcaggctagaggatttttaataggagcaacagctggtagaacgacattagctggtgaaggtttacagcatcaagatggacatagtcatc

SEQ ID NO: 216884 - DNA, 1923 bp, Unknown
  Bacterial polypeptide expressing nucleotide sequence isolated from the Sargasso Sea
tagataatttaatttttgtagttaactgtaatttacaaagattagatggacctgtaagaggaaatggcaaaattattcaggagctagaagggatttttagaggttctggttggaatgttataaaagtaatttggggatcatattgggatcagttattagcaaaagataaaactggtcatttagttaaattaatgaatgaaacagttgatggtgagtaccaagcttacaaagctagaaatgggctatatgtaagagaaaaattttttggtaaatatcccgaaacaaaagaattagtatccgctttatccgacaaagatatatggaggttaaatagaggtggtcatgatccacacaaagtttatgcagcgtatgatcaggcttcaaaaaatgttggaagcccaacagttattatagcaaagactataaaaggctatggaatgggtaaatctggagagagcgttaataccactcatcaacagaaaaaaatggatactgatgatttaatgtattacagggataggtttgatgttcctttgactgacaagcaagttcaagaaattcagtattttagaccaaatgaaaattctccagagataaaatatttgaaggaaagaagacttgatttaggtggttttattccagaaagaacaacttatgccaaaccaattaaagctccaccaaaagatatttttgactctttaaaagcatcaactggaacaaaagaaatgtccacaacaatgatttttgttcgattattaacaaatttactaagagataaaaatgttgctccaagacttgttccaataattcctgacgaagcaagaacttttggaatggaaggtttttttaaaaaaataggtatttatgcacatgagggtcaaaagtatgaaccagaagattcagaacaactaagttcttacagagaagataaaagaggacaagttttagaagaaggaattaacgaagcaggatcaatgtcatcatggattgcagcgggtacagcttattcaaaccatgacattgaaatgataccaatatatcttttttactcaatgtttggatttcaaagaacaggtgattttaattgggctgcaggagatagtcagtctagaggctttttaataggagctacttctggcagaactacacttgctggtgaagggttacaacatcaggatggtcatagtcatatgctggcctccactatacctaattgtatatcttatgatccaacattcggttatgagctagcagtaatttttagagatggattaaagagaatgcatgaaaaaaaagaaaatattttttattacataacaacaatgaatgaaaattatcctcatccagaaatgccaaaagataaaaattgtgaagaaggaatattaaaagggatgtataaaattaaagaatttaataaatttaaaaaaacaaaaatacaattaataggatctggaactatattaagagaaattatagctggcgcagaagttttacaaaatgaatatcaaatagacagcgaagtatggagtgttacaagttttaatgaattaagaagagatggtatggaaactgaaagatacaaccttttaaatccagataaaaaacagaaagtttcatatgttgaaaaatgcctaggaataaaagaggggccaattttagctgcatctgactatatgagaagtcactccgatcaaatacgaccatatgtcaaaaaaagtttttattcactaggtactgatgggtttggcagaagtgatacaagagaaaatttaagaaaattttttgaagtagataaaaaacatatcgtaacttacgcgcttagtattctttctaaagaacaattaatagcatcaaaatatgcacaagaggcaataaaaaaatataacatagaaactgaaaaaccgtttccaagtaaattataat

SEQ ID NO: 216885 - DNA, 2152 bp, Unknown
  Bacterial polypeptide expressing nucleotide sequence isolated from the Sargasso Sea
ggaggtttgtcttcatatcctcacccttggttgatgccaaagttctggcaatttccaactgtgtccatgggtcttgggcctatcatggctatctatcaagctagatttttaaaatacttaatcaatagaggattaattaaagatgagggaagaaaaatttgggtatttcttggtgatggtgaaatggatgagccggagtcacttggtgctattggtttagctgctcgtgaaaaattagataatttgatttttgttgtaaattgtaatttgcaaagactggacggacctgttcgaggaaatagtaaaattattcaggaactagagggaagctttagaggttcgggttggaatgtaataaaagttatatggggatcatactgggaccaattactggctaaagataaaacaggtcttcttattaagaggatgaacgaatgtgtagacggagaataccaagcatttaaagctaaaggtggatcttatgtaagagaaaaattttttggaaaatatcctgaacttactgagcttgtttcctctttaaccgataaagatatttggagattgaatagaggaggtcatgatcctcacaaagtttatgcagcttacgcagcagcaatgcagcatagtggatcacctacggttatcttagcaaaaactatcaaaggatatggaatgggtaaaacaggtgaaagtgttaacacaacccatcaacaaaaaaaattagatgaagaggatcttctttactatagagatagatttaatgtgcctcttacagataaacaagtaaaagacatagagtattacaaaccaagtgagagttctgaggaaattaaatatttaaaagataagagaataaaactaggaggttttattccagaacgatcaacttttgccaaacaaatcaaagctccaccaaaagacatctttgatcaattcatgaaatcaaccggggaaaaagagatgtccacgacaatggctttagtgagaatgatgactgcactccttagagataaaaatgttgcaccaaggttagtgccaatcatccctgatgaagcgagaacttttggaatggagggattctttcaaaaaattggtatttacgcacatgaaggacaaaaatatgagccggttgattctgaacaacttagttcatatcgagaggataaaagtggtcaagttttagaggaaggtatcaatgagtctggagcaatgtcatcttggattgcagcaggaactgcttacactaatcacgatatcgagatgatacctgtttatattttctattctatgttcggatttcaaagagttggagatctagcatgggcagctggtgactctcaagctagaggatttttaattggagcaacagctggtagaaccacattagctggagaaggattacaacaccaagacgggcacagccaattattggcatcaaatattccaaactgcgttagttatgatccaacatttgcttacgagatggcaacaatatttagagaaggcttaaaaagaatgcatgaaaagaaagagaatgtcttttactacatcactgcaatgaacgaaaattactctcatccagaaaaacctaaggattgtgatgaaggaattctaaaaggtatgtacttatttaaagagggaaaaaataaaggaaaaactaaagttcaattattaggttcaggaactattttaagagaaattatagccgcttctaagatcctatcaaaagaatataatatagacgctgacatttggagtgtgacgagtttcaatgagttaagaagagatggaatggaaaccgagagattaaatcttcttaacccagataaaaaagcgaaaaaatcttatgttcagaaatgtttatcaaaaagagatggaccagttatagcagcttcagattatacaagagcattcactgatcaaataagaccttacacagacaaaaagttttattcattcggaacagatggttatggaagaagtgacactagaaaaaatcttagaaaattttttgaagtagataaagagcatatagtagcctttaccttaagcgcattagcaaaagaacaacttgtaggttctaaagaagcagaaaaagcgattaaaaagtacaaaatagataaagagaaagatttcccagcaaatttataaa

SEQ ID NO: 216886 - DNA, 964 bp, Unknown
  Bacterial polypeptide expressing nucleotide sequence isolated from the Sargasso Sea
atgaaaaaattatctaaatctgatcatttaaaaatatactcttatatgttgaaaattagacgttttgaggaaagatcagctcaactatatggaatgggacatatcggaggtttttgtcatctttatatagggcaagaggcagtcgtagttggtgttttaatgactattcataaaaacgactctgttgttactacctatagagatcatggccatatgattgctagaggcttggatccaaaaaaaataatggctgaacttactggaagagctgatggatattctgctggtaaaggtggctcaatgcatatgttctcaaaagaaaataatttttatggaggtcacggtatagttggagctcaagttcctataggcacaggtattgcatttactcataaatataatggtgagaaaaatatttgcagaacttatattggagacggagcaatgaataatggacaagtcttcgaggcttttaatttagcagctttatgggaattgcccgtactatacataattgaaaataataaatatggaatgggtacatccgttgatagggcagcagcaggatctgatttgtacaaaagaggagaagcttttggcattaaaggtgaaatagtagatggcatgaatgtgtattccgtaattaaagctgccgataaagctggagaatatgtaagatcaggtaagggtccttatatattagaggttcaaacatatcgttacagaggtcattcgatgtctgacccagcaaaatatagaactaaagatgaattagaggaatataaaaattctgaccctattgaaattgtaagattagaaatattaaaaaagaaattagcaacagaaagtgcactcgaaaaaatcagcaaagaaattattgaagaaataaaagcagctgctgattttgcactagaaagtaaatttccttcaagcgaagaattatacacggatgtttacatttaaa

SEQ ID NO: 216887 - DNA, 1807 bp, Unknown
  Bacterial polypeptide expressing nucleotide sequence isolated from the Sargasso Sea
aatggtagtaagagcaaataaaaaacatcctgaacttggcggtcacataggaacatttgcatcagctgcaaccttgtatgatgttgggatgaatcatttttggagagcaaaaaataataaattcggaggtgatctaatatattttcaaggtcatagcgcaccaggaatgtatgcaagagcttttcttgagggaagattaaatgaaaagcagttagatagatttagacaagaagtacaaactgatggactttcatcttatcctcatccttggctaatgccaaatttttggcaatttccaacagtttcaatgggaattggcccgatgttggcaatatatcaagcaagatttatgaaatatctaattaatagaggattaattaaagatgagggaagaaaagtttgggcttttcttggagatggagaaatggatgaacctgagtcacttggggcaattggtttagcagcgcgtgaaaatttagataatttaatatttgttgtaaactgtaacttacaaagattagacggtccagtgagaggaaatggaaaaataattcaagaattagaaggtatttttagaggaggtggctggaatgttttaaaagttatttggggatcttattgggactcacttttagcaaatgataagacgggacatctagttaaaattatgaatgagactgtagatggagaatatcaagcatttaaagcaagaaacggattgtatgtaagagaaaagttttttggtaaatatccagaaacttcagaattagtttcatcaatgtctgatactgatatttggaggcttaatagaggtggtcatgatcctcataaagtttatgctgcatacgataaagcggtcaatcacaaaggaagccccacagtcataatagccaaaacaataaaaggctatggcatgggtaaaagtggtgaaagtgtaaacactactcaccaacaaaagaaattggatgttgatgatttaatgtattacagagataggtttgatgttcctttaacagactctcaagtaaaaaacattgaatatttcaagccagatgaaaactctgaagaaataaagtacttaaaaaaaagaagattagaacttggtggatttataccagagagaacatcatattcgaaaccgattaaagccccagttaaagatattttcgattttatgaaaaagtctactggtgaaaaagaaatgtctacaacaatggcattagtaagaatgttaactaatcttttgagagataaaaatgttgcaccaaaattagttccaattattcccgatgaagctagaacatttggaatggagggtttctttcaaaaaataggtatttatgctcatgaaggtcaaaaatatgagccagaagactcagcacaactttcatcatatagagaagaaaaaagtggtcaggtattagaagaaggtattaccgaagcaggttctatgtcatcctggatagcagcaggaacagcatatacaaatcatgatattgaaatgataccaatttatcttttctattctatgtttggctttcaaagaattggagattttgcttgggctgcaggagatagtcaagcgagaggctttttaattggcgctactgcaggaagaacaacacttgcaggagaaggtcttcaacaccaagatggtcatagtcatttgttagcatcaacaattccaaactgtatttcttatgatccaacattccattatgaattagctgtgatttttagagaaggtttaagaaggatgcatgaaaaaaatgaaaatattttttattatattacaacaatgaacgaa

SEQ ID NO: 216888 - DNA, 1598 bp, Unknown
  Bacterial polypeptide expressing nucleotide sequence isolated from the Sargasso Sea
gaaagattcggacctgggcggtcacatctccagcttcgcttccagcgcaaccctgtatgacatcggcttcaactacttcttccaggccccgaccgacgaacacggcggcgacctgatctacttccagggccacacctcgccaggcgtctacgcccgtgcgttcatggaaggtcgcatcagcgaagaacaaatgaacaacttccgccaggaagtcgacggtcagggcctgtcgtcctaccctcacccttggctgatgcctgacttctggcagttcccgaccgtttccatgggccttggcccgatccaggcgatctaccaggcacgcttcatgaagtacctggaagcccgtgggttcatcccggaaggcaagcagaaagtctggtgcttcctgggcgacggcgagtgcgacgaaccggaatccctgggcgccatctccctggccggccgcgagaagctcgacaacctgatcttcgtcatcaactgcaacctgcagcgcctcgacggcccggttcgcggcaacggcaagatcatccaggaactcgaaggcgtgttccgcggtgctcagtggaacgtgaccaaagtcatctggggccgtttctgggacccactgctggccaaggacgtcgacggtatcctgcaacgtcgcatggacgaagtcatcgacggcgagtaccagaactacaaggccaaagacggcgcgttcgttcgcgagcactttttcaacacgcctgaactcaaggccatggttgccgacctgtccgacgacgaaatctggaagctcaaccgtggcggccacgacccgtacaaggtctacgcggcgtaccacgaagcggtcaaccacaaagaacaacccaccgtcatcctggccaagaccatcaagggttatggcaccggtgccggcgaagcgaagaacaccgcgcacaacaccaagaaagtcgatgtcgacagcctgaagttgttccgcgaccgcttcgacatcccggtcaaggacgaagagctggagaacctgccgttcttcaagccagagccaaacagcgccgaagcccgctacctgagcgagcgtcgcagcgcactgggcggtttcgtaccacagcgccgcgccaacagcttcagcgtaccgacgccagacctgagcaccctcaaggctatccttgacggctcgggcgaccgtgaaatctccaccaccatggccttcgtgcgcatcctggcgcagctggtcaaggacaaggacatcggcccgcgcatcgtcccgatcatcccggacgaagcccgtaccttcggtatggaaggcatgttccgtcagttgggcatctactcctccgtcggccagctctacgagccagtcgataaagaccaggtgatgttctacaaggaagacaagaagggccagatcctcgaagaaggcatcaacgaagcaggcgccatgagttccttcatcgctgccggtacttcgtactccagccacaaccagccaatgctgccgttctacatcttctactcgatgttcggcttccagcgtatcggcgacctggcctgggccgctggcgacagccgcacccgtggcttcctgatcggcggtaccgccggccgcaccacgc

SEQ ID NO: 216889 - DNA, 1579 bp, Unknown
  Bacterial polypeptide expressing nucleotide sequence isolated from the Sargasso Sea
atgtcagaacgtttcccaaatgacgtggatccgatcgaaactcgcgactggctacaggcgatcgaatcggtcatccgtgaagaaggtgttgagcgtgctcagtatctgatcgaccaactgctttcagaagcccgcaaaggcggcgtgaaagtagcggcaggtgcaggggccagcaattatgtaaacactattgccgttgaagatgaaccggaatacccgggcaatctggagctggaacgtcgtattcgttctgctatccgttggaacgccatcatgaccgtactgcgcgcgtctaaaaaggacctcgagctgggtggccacatggcatccttccagtcctccgcaacggtatatgatgtttgcttcaaccacttcttccgtgcacgcaacgagcaagatggcggcgatctggtgtacttccagggccacatctctccgggcatctatgcacgcgcattcctggaaggtcgtctgactgaagagcagatgaacaacttccgtcaggaagttcatggcaaaggcctgtcttcctacccgcacccgaaactgatgccagaattctggcagttcccgaccgtatctatgggtctgggcccaatcggtgctatctaccaggctaaattcctgaaatatctggaacaccgtggtctgaaagatacctctaaacaaaccgtttacgccttcctgggcgacggcgagatggatgagccagaatcaaaaggtgcgatcaccatcgcgacccgtgaaaaactggacaacctggtctttgtgatcaactgtaacctgcagcgtcttgacggcccggtaaccggtaacggcaagattgttaacgaactggaaggcatcttcgcgggcgctggctggaacgttatcaaagtcatgtggggcggtcgttgggatgagctgctgcgtaaagacaccagcggtaaactgatccagctgatgaacgaaaccgttgacggcgactaccagaccttcaaatccaaagatggtgcatacgtacgtgagcacttcttcggtaaatacccggaaaccgcagcactggttgctgactggactgatgagcaaatttggtctctgaaccgcggtggtcacgatccgaagaaagtttacgctgcactgaaaaaagcgcaggaaaccaaaggcagagcaactgtaatcctggcccataccattaaaggttacggcatgggtgacaccgctgaaggtaaaaacatcgctcaccaggttaagaaaatgaacatggacggcgtgcgttatatccgcgaccgtttcaacgttcctgtgaccgatgagcaggttgaaaacctgtcttacatcaccttcccggaaggttctgaagagcacacttatctgcacgctcagcgtcagaaactgcatggctacctgccagctcgtcagccgaacttcactgagaagctggaactgccggctctggaagacttcggtgcgctgctggaagagcagaacaaagaaatctccaccactatcgctttcgttcgtgccctgaacgtgatgctgaagaacaagtcgatcaaagatcgtctggttccgatcatcgctgacgaagcacgtactt

SEQ ID NO: 216890 - DNA, 3067 bp, Unknown
  Bacterial polypeptide expressing nucleotide sequence isolated from the Sargasso Sea
aatgagtgaaaaattactagttccagatattggagattttgaagaagtagaaatcatagaaattcttgtaaaagaaggtgataaaatctctaaaaatgaccctgtaataactttagaaagtgataaatcaagtgttgaagtaccatctgcttttgagggtgttgtagatagtattaacataaagattggtgataaagtttctaaaggagatttgatactaacattatcctctgagaatggaactcagcaaaaacaagaaactattgaaaagataccacccgcaacggaaaaaataattgccgaagcagaaaattctaatggatataataattctgaattagatactagtgcacataaagagatcaaagtagaaagtacacaagtagaacataatgaaagattagaaatagttgaaaataataatgatattgatcctcaagagacaaaagaatggttagaatctttgtctgcagtagttcaatctgaaggacctgagagagctcattttttaattaaacaattaattgatcaggcatataaagaaggatcaaatataccctacacacaaaatacaccatacataaacactataccagcagatgaagagataaaatctccaggcgatcaaaatatcgaaagaaaaatcagagcactaattcgatggaattcagcagtgatggttgtcagagcaaacatgagagatccttcattaggaggtcacattgggacatttgcttcagcagcaactctttatgatataggaatgaatcatttttggagagctaaaagcaataaatttggtggagatttaatttatttccaaggacattcagcgccaggtatttacgctagagcttttttggaaggaagacttgacgagaagcaattagatagattcagacaggaagtttacccaggaggtttgtcatcttatcctcatccatggctgatgcctaagttttggcagtttccaactgtttccatgggtcttggaccaatgatggcaacctatcaggcaagatttatgaaatatcttattaatagaaaattaataaaagatgagaatagaaaagtttggtctttcttaggagatggtgaaatagacgagccagaagctctaggatctattggtttagcagcaagagaaaagttagataacttgatttatgttgtgaactgcaacctacaaagattagatggtccagtaagaggcaatggtaaaattattcaagaattagaaggaatttttagaggagctggatggaatgtaataaaagtcatttggggatcatattgggatcctttactcgcaaatgataaatcaggtttacttgtaaaaagaatgaacgaagcagttgatggagaataccaagcctttaaagcaaaaggcggtttatatgttagagataacttctttgggaaataccctgaacttaaaaatctagttgcaagttatacggatagcgatatttggaaattaaatagaggcggtcacgacccgcataaagtttatgctgcttatcataaagctattaacacaaaagacagaccaacagtcatattagctaaaacaattaaaggatacggtatgggaaaatctggtgaaagtataaatacaacccatcagcaaaaaaaattaggtgtagatgatttgctatattatagagatagatttgatgttccattaacagatgaacaagtcaaaaatatagaatactttagacctgatgaaaattcagaggaaataaaatacttaaaaaaaagaagattggctttaggaggatatattcctgagagatcgtctttttcgaaaccaatcaaaacaccaagtaatgatatttttgactttatgaaaaaatcaaccggtgaaaaagaaatgtcaactactatggcacttgttaggatgttgacgaatttgctaagagataaaaatgttgctccaagacttgttccaataatccctgatgaagcaagaacatttggtatggaaggttttttccaaaaaataggtatatatgcgcatgaaggtcaaaaatatgagccagaggactcagctcaattaagctcttacaaggaagagaaaagtggtcaagttttagaggaaggaataaatgaggctggatccatggcatcatggatagctgcaggaacatcgtattcaaatcatgatatagaaatgataccaatttatcttttttattctatgtttggttttcaaagaactggcgattttgcttgggcagctggagatagtcaaacaagaggatttctaattggagctacagctggaagaacaactttggctggagaaggtcttcaacaccaagatggtcacagtcatttattagcatcaacaattccaaattgtgtttcttatgatccaacctttcattatgaattagctacaatttttaaagaaggtttaagaagaatgcatgaaaaacatgaaaatattttttactacattacaacaatgaatgaaaattattctcatccagagatgcccaaagattgtgaagaaggcatattaaaagggatgtataaaataaaagatttcagcaagaataaaaaaaataagattcaattattgggttcaggaacaattttaagagagatgattgaagcagcagaaattttacaaaatgaatatcaagttgatagtgaagtatggagtgttaccagttttaatgaattaagaagagatggacttgaaacagaaaggtataatttgcttaatccaggaggagagaaaaaaatctcttacgttgaaaaatgccttggaaaaaccgaaggtcctattttagcagcttcagattacatgagaatgaattctgaccaaattagaccttacataaataaaagtttttattcattgggcacagatggatttggtagaagtgatacaagaaaaaatctaagaaaattttttgaagtcgataaagagcatatagttgcatatggcttaagtattttatctaatgaacaattaattgcttctaaacatgcggttgatgcaattaaaaaatataaaattgataaagataagcctatgccgacaaaattataa

SEQ ID NO: 216891 - DNA, 957 bp, Unknown
  Bacterial polypeptide expressing nucleotide sequence isolated from the Sargasso Sea
tatgagcacagaaattttaatgcctgcattatctccaacaatgacagaagggaatctgtctaagtggttaattaaaaaaggagatactgttaaagctggtgatttgattgctgaaattgaaactgacaaagcaacaatggaagtagaagcggtagatgaaggtgttgttcttgatcttttatttaaagaaggagaagctaatattccagtaaataaagctatagcgattattggcgatccaaatgaaaaagttgaagtaaaaaaagaacctcccattgaaaaagtgattgaagaaaagaaaattgaaaaaaatattgagacaaaaattgagaataagaaagatgatgtaatcgatacactatcacctaaaatagaagaagatagaaatttaagttcagaagaaattactatgcgccaagcgctaagagacacaatggccgaagaaatgagaaaagataataaagttttcatacttggagaagaagttgccgaatatcaaggtgcgtataaagtaacacaaggccttcttcaggaatttggcaaagaaagagtattagatactcctatttctgaacatggatttactggattagcagttggagcagcatttaagggattgagaccaatcttagaattcatgacttttaatttttctatgcaagcaattgatcaaattataaattcagctgcaaaaacactttacatgtctggaggacaaattaattgccctattgttttcagaggacctaatggtgctgcagcccaagttgccgcacaacatagtcaggatttttcttcctggtattctcaagtgccaggtttaaaagtcattgcgccatctactccttataacgcaaaaggcttattaagatctgcaatatcagatccaaatcccgtaatttttctagaaaatgaaattctttatggattaaaaggtcccgttaataatgacattaa

SEQ ID NO: 216892 - DNA, 754 bp, Unknown
  Bacterial polypeptide expressing nucleotide sequence isolated from the Sargasso Sea
atggctgcaaaaaaagtcactaaaaaatctactgatgagaaccatgacttaatcaaattttatcgggacatgctcctgataagacgcttcgaagagaaagcagggcagctttatggcatgggattgataggtggtttctgccatttgtatattggtcaagaggcagttgttgttggcttggaggcagcggccagagacggcgataaaagaataacttcctaccgagatcatgggcacatgcttgcctgcggcatggaccctaatggtgttatggccgaactcactgggcgcagtggtggctactcaaaaggcaaaggtggatccatgcatatgttttccaaagaaaaaaacttttatggtgggcatggaattgtgggggcacaagtacctctcggtgccggcttggcctttgcagatcgctaccgagaaaacaattgcgtgacatttacttattttggagacggcgcagctaaccaaggtcaagtctacgaaacttttaacatggcagcattatggaaacttccagtaatatttgtaatagaaaataatcagtacgcgatgggaacagcccaagagagatcaacatcaagccctgaaatttatacaaggggtgaagcatttggaataaaaggtgaagctgttgatggtatggatgtaatagctgtaaaaactgcaggagacaaagctgcagattattgccgtgcaggtaaaggtccatatatcttagagattaaaacttaccggtatcgaggac

SEQ ID NO: 216893 - DNA, 2608 bp, Unknown
  Bacterial polypeptide expressing nucleotide sequence isolated from the Sargasso Sea
aatgcaaaatcctgattttgagaaagagttccaagaatggcttgaagccctagaaaatctacttatttcagatggtaaagaatatacagaagaactacttagggctttatataccgaagccaggttaaagggaattcagatacctgaattagataatccaccctttaaaaatacagtccattcggatgaagaacatccttatccaggcaatttagaatatgaagaaaaaattagacatttcattaggtggaacagtcttctaactgtcttgaaggcgaacaaagaagctgatctaggaggtcatatatcaacttattcatctgcagcaactttatatgaagtagggtttaatcatttttttcggggttctgataaatcactcggcgatttaatatattttcagggccattcatctccaggaatatatgcaagatcttttcttgaggaccgtatatctgcaaaacaacttaataattttaggcaagaaataaaaggtgaaggcttatcttcttatccacacccatggttgatgcctgattattggcaatttccgacagtctcaatgggtttaggaccaatttttggtatttttcaagctcatataatgagatatctagaaaaaagaggattaattaaaccaattgataatagaaaagtttgggtcttttgtggtgatggagagatggatgaaccagaatcgatgggttctattagcttagccggtagagaaaatcttaataatcttgtatttgtaataaattgtaatttacagagactagatggaccagttagaggtaattctaaaattattactgaactcgctaaacaatttagtggggccggttggaatgtagtacatctaatctggggaagaaaatgggatgaattgataaataatgatgaagatggactcttacagaaaattatgaatgaaacagtagatggagaatatcaaaactataaagctaagggtggtaaatacactagagaaaacttttttggcaaaaatccagaagttcttaaaatgatagaatcattaagtgacaaagaagtagaagacttaaatagaggagggcatgacccaactaaaatctacaatgcttatcgtttggcgtatgaggaaaaggataggccaacagttattcttgcttttacaattaaaggttatggtattggttcaagacaagcagataatactgcacaccaggtaaaaaaacttacaaaagagaatctagaagattttattgataaatttgatctaccaataaaaaaagaaaacttagataatccaaattttctaaacttaaataaaaacaaaaaggttaaagaatatttactctcaagaagagaagaattaggaggtttattgccttcaagaaaagtttctaagaaaaaattaatagcaaaaaaagaatcttttatagattttgataaaaagttagatagagagcagtcaacaacaatggtttttgtaagacttctaactaagcttttaagagatgcggcaataggttcaagagtggtgccaattgttccagatgaagcaagaacatttggtatggacgctttattcaggcaatttggtatctattcttctgaaggtcaaaaatatgaaccagaagatgcagataaagtaatgttttatagagaaagtgagtctggaataatgcttgaggaaggcattaatgaagccggtgcattctcagcatggttagctttagcaacatcttattcaaacaataatttgccaatgattccattttatatcttttactcaatgtttggttttcagcgtatccatgatctagcttgggctgctggtgattccagagcaagaggatttttacttggtgcaacatcaggcagaacgacattaaatggtgaaggtttacaacatcaggatggacatagtcatattcttgcgtcaacaatacctaattgtcgctcatatgacccatgttactcatatgaattgtccgcaataatacaagaaggcataaatgatatgtatgtaaatggaaatgataagtattactacattaccctaatgaacgaaaattattttcatccagctaaaccaaaaaaactcaaaaatgaagatattcttaaaggggcttataagttgaaagaaaataaaaatataaatcttagaatattagcctcaggcgttactctaaattttgcattggaagctgagaaagagcttaaggattatggaattaatgcagatatttggtctataacaagttttaatgagttgtacagagaagggatagagatagaaagagaaaataggctaaattcaacatcaaaaaaatcttatgttgagatttgttttagtgatgaaataccaacaattgcagtttctgaatatcaaaaagcgtatccaaatcaaataagagagtggattaacggagaatataaggttttaggtacagatggttttggtagaagtgatacaagagaagaattaaggaatttttttgaaataagcaaagagcatatagttttaaatagtttattgttgcatggaaaaaagaaagaagcagaaaaattcattaaagattctggtatggttttaaataaagaggcaccatggaagagttaa

SEQ ID NO: 216894 - DNA, 2419 bp, Unknown
  Bacterial polypeptide expressing nucleotide sequence isolated from the Sargasso Sea
aataaaatccatcgtcaggtggaatgcaatggcaatggtcaccaaggcaaataaagaaaccccaggaataggtggtcatatatcaacctatgcctctgcagcaactctctatgaggtggcattcaatcatatattcaaaggctccgaccactcctccgggcaagacctggttttttttcaaggccacgcctcgccaggtatatatgctcgcgcctatcttgaggggcgcctatcaaaagagaatttagataactttcgtcgagagctagcagaaggtggcggcctatcgtcctacccgcatccctatttaatgccagagttttggcagtttgcaaccgtttcaatgggcctggggcctatgatggccgtttaccaagcacgttttatgagatatatgatagaccggggttttgtagagaatacagggagaaaagtttttgcctttttaggggatggtgaaatggacgaacccgagtcaacaggcgccctgaccctggcatccagagaaaaccttgataaccttatttttgtggtaaactgtaaccttcaaagactagatggccccgttagaggaaactctaaagtaatacaggagcttgaaggagcctttagaggtgcgggctggaatgtcataaaggttatttggggctctgattgggatgagttgatagaaaaagatgttagcgggacctttttaaaaagaattgacgaaatagttgatggagaccttttaaagtatgttgtagagggtggagcttattttcgtgaacatttttttggtaaatacccagaacttttaaaacttgtagagcacctaacagatgaagaattgggaaagatgagaccaggtgggcatgaccccgtaaaggtgtatgctgcttaccaagaagcgatcaaccacaaaggaggcccaaccgttatattggcaagaacaataaaagggtatggtcttggtgaggccggagaaggtagaaatattacccacaaccagaaaaaactcaatgaaaatgaacttctgtattttagggaccggtttagcgtgcccctttctgatggtgatgcaagcaaggcaccgttctataggttttctaaggattcaaaagagcacaaatatttaattgaaaaaaggaaaagcctcggtggttttttacccgaaagaaaaaacaaccccaaaaaactgacggtcccagaagtttcaatatttgaagaaatgctatcaggcactggagatagggaagtttctactacaatgtcgtttattcgtcttctaactattttaactaaagacaagacgattggtaagcatgtggttcctattgttccagatgaggcaagaacatttggaatggacccgcttttcaggcagctaggtatctacgcacaccgaggtcagctatatgaccctgtggactcagaccagttcctatattataaggaggcaaagaatgggcagatccttgaagaaggtatcaacgaggccggtgcggtctcatcctttattgcctcagggatgagttatagcaaccacggtatacatatgatcccattttatatttactattccatgtttggttttcaacgagtttgggattttatttgggctgctggcgatatgcgggcaaaagggtttttgcttggtggtacggcgggcagaaccaccttgaacggagaaggattacagcatcaagatggtcatagccacttagctgctgcatcaacacccaacgtcaaggcatatgaccttgcctatgcatacgagatcgctgtggtcgtacatcgaggaatgcaggaaatggtagaagagaataaagatgttatttactacctgaccctagaaaacgagaactatgttcacccaccaataccggatgacgtaagtgatgatataataaagggcctatacaaaatacatagcacccaaaaaccaacagtgaggcttttgggaagtggcccgttaatgggcgaggcattagcagctgcagagttgttgaaaaaagactggggtgtagacccaggaatatggaatgttacgagttttagcgaactgcgtagggatgccgaagaggtagagcgttggaatcttctcaaccctgacaaaccttcaaaaagatcacacctagagaaaagtttaagcaagcatcgcgtaccgacagtagcggtctctgattatgttaaaatggtttcagagcagatagggccttatgtgccaggcccatattattccttgggcacagatggctttgggcgaagtgaaacgcgggaagcgcttagagaattttttgaagtggatagacactatattgttttgaccgccgtacgagctcttgccatagagggtgtgttaaatatggacaccgtggaaaaagtgatgaaaaagtataatttagacccggaaaaaccaagcccgataaatgtttag

SEQ ID NO: 216895 - DNA, 907 bp, Unknown
  Bacterial polypeptide expressing nucleotide sequence isolated from the Sargasso Sea
atgccagttgaaatcttgatgccagcactatcgcccactatgactgagggaaaattattcaaatggttaaaggaagaaggtgacagtatagaacctggcgacgctgtcgcggaaatcgaaacagataaagcgaccatggaagttgaagcggtggatagcggcatattgcaaaaaattttagttgcggaagaaacagaaggtgtccctgtgaatacaccaattgccttgcttttgttagatggggaggaagatggcaggcaatcaaataatcaaggcgatatagctccgctggttgttgaccgaccgacatttgattcatttgtatctcaatccgatgagggcagtccgccaaagggccaagaaagattagatgttaatactcaaacagttagggaagcccttagagatgcgatggctgaagaaatgagagcggacgactcagttttcgtaatgggggaagaagtggctgagtacgagggcgcttacaaagtaactcaggggcttttgaaagagtttggcgacaagcgtgtaatcgatacgcctatcactgagcatggttttgcgggtctaggtgttggcgcagcatttggtaatttgaaacctatcatagagttcatgactttcaactttgctatgcaggctatggatcaaataattaactcagctgctaagactttatatatgtcgggggggcaaatgggatgtcctattgtgtttagaggtcccaacggcgctgcatctcgtgtggcagcgcaacattcccaggatctaaccagttggtttgcccattgtccagggctaaaagttgtggcgccctggtcggccgctgatgcaaaggggttgcttaaagcagcaatcagagatcccaatccagttgtttttttggaaaatgaagttttatatggac

SEQ ID NO: 216896 - DNA, 1048 bp, Unknown
  Bacterial polypeptide expressing nucleotide sequence isolated from the Sargasso Sea
atggcaagatcgtctaaaagcgccaccaaacaacgttcttcaaagtcaaagaaagtaaagagcgcagctaataacagctttaacgacaaattaaaagatgaattactctcttattatcgggatatggtattaatacggcgttttgaagagaaggcaggacagctctacggcatggggttgatcgggggcttctgtcatctttatatcggtcaagaagccgttgttgttggaatgcaggcggccatcgatagtaaatcctctgttgtgactagttatcgtgaccatgggcacatgctagcgtgcggaatggaccctaatggtgttatggctgaattgactggacgagttggggggtactctaaaggcaaaggtggaagcatgcacatgtttagcagagaaaagaatttttttggcgggcatgggattgtagctgcgcaggttccaatcggcacgggattagcattcggtcacaagtacagagatgaaaaggccgtttgccttacttatctaggggatggtgcgataaaccaggggcaggtatacgaaagtttcaacatggctgctctatggcagttaccctgcatctacgttatcgagaataaccaatatggcatggggaccgcggtttcgcgggcggcagcaggcagagaactagcggacagaggtgcagcatacggtatacccggtgataagattgatggaatggatgttctcgaggttaagaaggctggagagcgagcggtcgagcatgctatttcaggaaaggggccatatattttggaaatgacaacatatcgataccgaggccactcgatgtcagatccagcaaaatatcgcactaaagatgaagtaaataaaatgcgtcaagaacgggacccaatagacaatgttaaggaaaagctcttactgacaggattagaagagaagtcacttaaagatatagatacatcgatcaggcaaattgtgtctgaagcggtcgaattcgcgcaaacaagtccagaaccggaccctcaagagttatacactgatgttttggtcaacaattaat

SEQ ID NO: 216897 - DNA, 1035 bp, Unknown
  Bacterial polypeptide expressing nucleotide sequence isolated from the Sargasso Sea
tatgagcacagaaattttaatgccagcattatctccaacaatgacagaaggtaatctgtctaagtggttaattaaaaaaggggatactgttaaagccggtgatttaattgcagaaattgaaactgacaaagcaacaatggaagtagaagcggtcgatgaaggtgttgttcttgatcttttatttaaagaaggagaagcgaatattccagtaaataaagctatagcaattattggcgatccaaatgaaaaagttgaagtaaaaaaagaagttcctactgaaaaagcaattgaagaaaagaaaattgaaaaaattattgagacaaaaattgagactaaaaaagataatgtaatcgatacaaaattaccaaaaatagaagaaaatagaaatttaagttcagaagaaattaccatgcgccaagcactaagagacacaatggccgaagaaatgagaaaagataataaagttttcatacttggagaggaagttgccgagtatcaaggcgcatataaagtaactcaaggtcttcttaaggaatttggcaaagaaagagtattagatactcctatttctgaacatggatttactggattagcagttggagcagcgtttaagggattgagacctatcttagaattcatgacttttaatttttctatgcaagcaattgatcaaattataaattcagctgcaaaaacactttatatgtctggaggacaaattaattgtcctattgtttttagaggacctaatggtgctgcggcccaagttgctgcacaacatagtcaggatttttcttcctggtattctcaagtgccaggtttaaaagtcattgcaccatctactccttataacgcaaaaggtttgttaagatctgcaatatcagacccaaatcccgtaatttttctagaaaatgaaattctttatggattaaaaggtcctgttaataatgatattaacttctcaataccaattggaaaagcaaatatagaaaaagaagggaatgatttaacgatcgtaacgtattcaataatgtt

SEQ ID NO: 216898 - DNA, 2247 bp, Unknown
  Bacterial polypeptide expressing nucleotide sequence isolated from the Sargasso Sea
aatgaatttagatttgttagttccagacattggagattttgaaaacgttgaaataattgaagtacttgtaaaaaaaggcgataaaattaataaaaatgaccctgtggtcacattagagagtgataagtcgagcgttgaagtaccatcaaattatgagggtaccatagaaaatattaacgtaaaagttggtgacaaagtttcaaaaggtgatttgatattatcactttcctcagacaaaaaagatgaagaggaagaaattactaaaactgtaaatgaaaaaatcccaccttcaactgagaagttaattgaggaagctgaaactgctacgaagcctgatatcaaagccgaaacaaaagttgttgagccaaaacagatcaaacaaactagactaataaatgaagttaagatggttagtagtaatgatgatattgatcctgttgaaacaaaagaatggttagactctttaagcgcagttctacaaaatgatggttcagaaagagcacattttttaataaaacaattaattgatcaatcctataaagccggatcaaaaattcctcatactcaaactactccatatgtaaatactatacctcctgaggaagaaaaaagatctcctggagatcaaaatatagaacgtaagttaagatcattaataagatggaatgctgcagccatggtagtgcgagcaaataaaaaatatcctgaactcggtgggcacattggaacatttgcatctgcagcaacattatatgatgttggaatgaatcatttttggagagcaaaaaataataaatttggaggtgatctagtatattttcaaggtcatagtgcacctggtatgtatgcgagggcttttcttgaaggaagattaaatgaaaaacaattagatagatttagacaagaggtaaaaacaggtgggctttcatcgtatcctcatccttggctaatgcctaatttctggcagttcccaactgtttcaatgggtattggtccaatgttagcaatatatcaagcaagatttatgaaatatcttattaatagaggattaattaaagacgaaggaagaaaagtctgggcatttctaggtgatggagaaatggatgagcccgagtctcttggtgcaatagggttagcagctcgtgaaaatttagacaatttaatattcgttgttaactgcaatttacaaagattagatggtccagttagaggaaatggaaaaataattcaagaattagagggaatttttagaggcgcaggttggaatgttttaaaagttatttggggttcttattgggatactcttttagcaaatgataagacaggacatttagtaaaaattatgaatgagaccgtggatggtgaatatcaagcttttaaagcaagaaatggactttatgttagagagaagttttttggcaaatatcctgaaacaactgaattagtttcatcgatgtctgatactgatatttggcgattaaatagaggaggtcatgatcctcataaagtttatgctgcttatgataaagcggtcaaccacaaaggaagtcccacagttattattgctaaaacgattaaaggttatggtatgggaaaaagtggagaaagtgtaaatactactcaccagcaaaaaaaattagatgtagatgatttgatgtattacagggatagatttgatgttcctttaacagatgcccaagtcaaaaatattgaatatttcaaaccagacgaaaattcagaagaaataaaatatttaaaaaagagaaggatagaattgggaggttttattccagaaagaacatcgtactcaaaaccaattaaagctccaagtaaagatatttttgattttatgaagacttccactggtgagaaagaaatgtctacaacaatggcacttgttagaatgctaacaaatcttttaagagataaaaatgttgctccaaaattagtcccaattattccagatgaagctagaacttttggaatggaaggtttctttcaaaaaataggaatttatgctcatgaaggtcaaaagtatgagcccgaggactctgcacaactttcttcttatagagaagaaaaaagtggtcaagtattagaagaaggaattacagaggcgggttctatgtcatcttggattgctgcaggcacagcttacactaaccatgatgttgaaatgataccaatttatcttttctattctatgtttggttttcaaagaattggagattttgcttgggcagctgg

SEQ ID NO: 216899 - DNA, 1930 bp, Unknown
  Bacterial polypeptide expressing nucleotide sequence isolated from the Sargasso Sea
gtcctacaaaatgatggttcagaaagagctcattttttgataaaacaattaattgatcaatcctacaaagctggatcaaaaattcctcatactcaaactactccatatgtaaacactatacctcctgaggaagagaaaagatctccgggagatcaaaatatagaacggaagttaagatcattaataaggtggaatgcagcagctatggtagtaagggcaaataaaaaatatcctgagcttggtgggcacataggaacatttgcatctgcagcaacattatatgatgtaggaatgaatcatttttggagagcaaaaaataataaattcggaggtgatctagtatattttcaaggtcatagtgcacctggaatgtatgctagggcttttcttgagggaagattaaatgaaaaacaactagatagatttagacaagaggtaaaaacaggtggtctttcttcgtaccctcatccctggctaatgcctaatttttggcagttcccaactgtttcaatggggattggtccaatgttagcgatatatcaagcaagatttatgaaatatctcattaatagaggattaattaaagacgaaggaagaaaagtctgggcatttcttggtgatggagaaatggatgagccagagtcacttggtgcaataggtttagcagctcgtgaaaatttagacaatttaatattcgttgttaactgcaacttacaaagattagatggtccagttagaggaaatggaaaaataattcaagaactagagggtatttttcgaggtgcgggctggaatgttttaaaggtcatttggggttcatattgggatacacttttagcaaatgacaggacgggacatttggtaaaaattatgaatgagactgtggatggtgaatatcaggcttttaaagcaagaaatggactttatgtgagagaaaagttttttggtaaatatcctgaaacaaaagagttagtttcatcaatgtctgatactgatatatggcgattaaatagaggaggtcatgatcctcataaagtttatgctgcttatgataaagcagtcaatcacaaaggaagtcccacagttataatagccaaaactataaaaggttatggtatgggaaaaagtggagaaagtgtaaatactactcaccagcaaaaaaaattagatgtagatgatttaatgtattatagggatagatttgatgttcctttaacagacgcccaagtcaaaaatattgaatatttcaaaccagacgaaaattcagaagaaataaaatatttaaaaaagagaaggatagaattaggaggatttattccagaaagaacatcgtactcaaaaccaattaaagctccaagtaaagatatttttgattttatgaagacttccactggtgagaaagaaatgtctacaacaatggcacttgttagaatgctaacaaatcttttaagagataaaaatgttgctccaaaattagtcccaattattccagatgaagctagaacttttggaatggaaggtttctttcaaaaaataggaatttatgctcatgaaggtcaaaagtatgagccagaggactctgcacaactttcttcttatagagaagaaaaaagtggtcaagtattagaagaaggaattacagaagcaggttctatgtcatcttggattgctgcaggcactgcttacactaaccatgacgttgaaatgataccaatttatcttttctattctatgtttggttttcaaagaattggtgattttgcttgggcagctggagatagccaagcaagaggttttttaattggcgcaacagctggaagaacaactcttgccggagaaggacttcaacatcaagatgggcatagtcatttactcgcatctacaattccaaactgcatatcctatgatcctacattccattatgaattag

SEQ ID NO: 216900 - DNA, 3040 bp, Unknown
  Bacterial polypeptide expressing nucleotide sequence isolated from the Sargasso Sea
aatgagcgaaaaactattagttcctgatataggtgactttgaaaatgtagaggtcattgaattgcttgtcaaagaaggccaaaaaattgccaagaatgatccagtagttactatagaaagtgataaatcgagtgttgaaataccttcaacgttatcaggcataattgagacaataaaagttaaagtaggtgataaagtttcaaaaggtgatttaattctgaatattttagggtcaaatgaagaacaatctacaacaaaaactattccaaaagacactgaaaatttgattaaagaagcagaaaaatcattagaaaaaaaacaagagcaaatcatccatacaaataatattgagagaaaaaaaccagaaataattcaagtagttaatgacagcgatattgatccattagaaactagtgaatggttagaatcactcactgcagtaattgaaaaagatggaaatcaaagagcccattatttaataaaggaattaattaataaagcttatatggagggtgcaaatattccctacacacaaaacacaccctatataaatacaattccagtaaatgaagagaaaaaatcaaatggtgatcaaaatattgagagaagaattcggtcattgataagatggaattccgcagcaatggtagttcgcgcaaataaaaaatttcctgaacttggaggacatattggaacatttgcatctgcggctacgctttatgatgtaggaatgaatcatttttggagagcaaaaaacaataaatttggaggagacttaatttattttcaaggacatagcgctccaggtatgtacgcaagagcatttcttgagggaagacttaatgaaaaacaattagatagttttagacaagaagttaatccaggaggtttatcatcttacccacatccttggctgatgccaaacttttggcaatttcctacagtttcaatgggtttaggaccaatgttggctatttatcaagcaagatatatgaaatatttgattaacaggggtctcattaaagatgaaggacgaaaagtgtgggctttcttaggagatggtgaaatggatgagccagagtctttaggggcgattggtttagcagctagagaaaaattagataatctaatattcgtgatcaattgtaaccttcaaagattggatggacctgtgaggggtaatggaaaaatcatacaagaattagagggtatttttagaggagctggatggaatgttattaaagtaatttggggttcttattgggatccgttattagctaacgataaaactggccatttaattaaagttatgaatgaaactgtcgatggagaatatcaagcaatgaaagcaagagatggagcttatgtgcgagaaaagttttttggcaaatatcctgaaactaaagagttaatctcaagcctttcagacaaagatatatggagattgaatagaggcggacatgatcctcacaaagtttttgcagcttatgataaagcctcaaagaatattggaagcccaacagttgtgattgccaagaccataaagggatatgggatgggcaaaagtggtgagagtgtaaatactacacatcaaactaaaaaattagatatagacgatttgatgtattacagagataggtttgatgttcctttaactgataaacaggtgcaaaatattgagtattataagccagaccaaaactcacctgaaataaaatatattaaagaaagaagacttcaattaggaggatttatcccagagagaactacttatgcaaaacctattaaagctcctccgaaaaacatttttgacaatatgaaagagtctacaggtaaaaaagaaatgtcgactacaatggcattagtaagaatgcttactaatcttttgagagataaaaatgttgcctcaagattagtaccaatcattcctgatgaggcgagaacatttggtatggagggtttttttcaaaaaattggtatttatgctcacgaaggacaaaaatatgaaccagaggactcagcacaattaagttcatatagagaagaaaaaagcggacaagttttggaggaaggaattaacgaggcaggtgcaatgtcttcatggattgctgcaggcacttcatacacaaatcatgatattgaaatgatccctatctatcttttttactcaatgtttggttttcaaagaataggtgattttgcttgggcaggagcagacagtcaatcaagagggtttttaattggagctactgctgggagaacaacattagcaggagaaggtttacagcaccaagatggacatagtcatttaatggcatcaactattccaaactgtaagtcttatgatccaacatttcattatgaactagcaacaatctttagagaaggattgaaaagaatgcatgagaagaaagaaaatattttttattacattacaacaatgaacgaaaattatcctcatcctgccatgccaactgaaaaatcatgtgaagaaggcattttaaaaggaatgtataaaattaaagaatttaacaaatataaaaaaaccaaaattcaatttctaggatcaggcacaattttaagagaaatgatagctggtgcggagattctacaaaaggaatatcaaattgatagtgaagtttggagcgtaactagtttcaatgaattaagaagagatggcttagaggtagaaagatataatttattaaatcctgaaaaagaaccgaaaaaatcatatgttgaaagctgtttaggcaaaactgaaggtccaattttggctgcatcagattatatgaggatgaattcagaccaaattagaccttatattaacaagagcttttactcgttaggaacagatggatttggtcgaagtgataccagaaaaaatttgaggaagttctttgaggttgataaagaacatgtcgttgcatatggactaagtgttttagctaaagaacaattaattgcatctaaatatgctcaagaggcaataaagaagtatcaaattgataaagataaaccaatgccgacaaaattataa

SEQ ID NO: 216901 - DNA, 919 bp, Unknown
  Bacterial polypeptide expressing nucleotide sequence isolated from the Sargasso Sea
ctcattcgaagggttgaagagaaggccggtcagttgtatggaatgggacttattcaaggtttctgtcatctttatattgggcaggaggcagtggttacgggtatgcgtgctgctagtaataaagaaaaagattcaataattactagttatcgtgatcatggacatatgatagcagctggtatggatccggggggagttatggcggagcttttaggtcgatatgatggctattcaaaaggtaagggcggatcgatgcatatgtttagcataaaaaacaagttttatggcgggcatggtatcgttggagctcaggttcctattggaactggcttggcttttgcccacaaatataagtctgatggcggagtatgcataacttactatggtgacggtgcggctaatcaagggcaagtatatgagtctttcaatatggcggcgttgtggaaattgccagtagtttatgtaattgaaaataatagatatggtatggggacctccgtttctagagcgtcagctacccaagaacttttttctaggggtagctcctttggtattccaggagaaaaagttgatggtatggatgtattagcagtaaaagaagcaggtgaaaaagctctaaactatgctagagaaggcaatggcccaattattcttgggatgcaaacttataggtatcgggggcattctatgtcagatccagcccaatataggactcgcgaggaagttagtaaagttcgggcagagagagatcctattgataagctgcgagattatatatccgagagtaattctttaactagcgatgaaatcaaagttatagatacagaagttaaggaggttataagtgcagcagcaaactttgcacaagaatcacctagacccccgcttactgagttatatacggatgtaataatttaag

SEQ ID NO: 216902 - DNA, 2668 bp, Unknown
  Bacterial polypeptide expressing nucleotide sequence isolated from the Sargasso Sea
atgtctgaagatatgctacaagacttagatccgttagagactcaggaatgggttgatgccctgcaagctgtattagaacaggaaggccctgaacgcgcccatttcttattagagaaactgatcgataaagcccgtcgcaatggtacacacttgccttatacggcgaccacagcctatttgaacaccattccagcgggtcaagagccgcacatgccaggcaaccaagagatggaacgtcgcattcgcgccatcatccgttggaacgccttagctatggtgctacgtggttctaagaaagatttagagttaggcggccatatttcgagtttcgcgtcgagcgcaaccatttatgacgtgtgctttaaccacttcttccgtgcgccaaacgagaaagacggcggcgacttagtgtatttccaaggtcatattgccccaggtatctatgcgcgttcattcttggaaggtcgtttaacggaagatcaactggctaacttccgtcaagaagtggatggcaaaggactgtcttcgtatccgcaccctaagctgatgcctgactactggcaattcccaacagtttctatggggttaggcccaatccaagcgatttaccaagcgcgcttcttaaaatatctgactgaccgaggtctgaaagattgttctgagcaaaccgtttactgcttcttaggtgacggtgagtgtgacgagccagaagccttaggtgcgattggtttagctgcccgcgaagaattagataacttagtctttatcatcaactgtaacctgcaacgtctggacggcccagtacgcggtaacggtaagatcatccaagaactggaaggcgaattccgcggcgctggctgggaagtcgtgaaagtgatttggggtcgttactgggacccattattggcccgtgataccagcggtaagttattgcagttaatggaagaaaccgttgacggtgaataccaaaactgtaaagccaaaggtggcgcttatactcgcgaacacttcttcggcaaatacccagaaaccgcagaaatggtagcgaacatgtcagatgatgacatttggcgcttaaaccgtggtggtcatgacccagttaaagtgtacgcggcattagaccatgcgcgtaagactaaaggtcgcccaacggtgatcctggcgaaaaccgttaaaggttacggcctcggtgatgcgggtgaaggtaagaacatcgcccacaacgtgaagaaaatgggtatcgagtctatccgttacttccgcgatcgtttcaatatcccgattcctgacgatcaattagaagatctgccgttctaccacccaggtccagattcggaagaagtgaagtacatgatgagccgtcgtgccgcgctgcatggtagcgtgccacaacgtcgtgagaagttcagcgaagagctggaagtgccatcactgaagattttcgattcgatcttagcaggctcaaatggccgtgaaatttcatcgaccatggcgtttgttcgcgtactgactgcgctgttaaaagacaagaaaattggcaaaaacatcgtgccaattattcctgacgaagctcgtactttcggtatggaaggtctgttccgccaagtgggtatttatgcgcacgaaggccaaaaatacgtaccgcaagactctgaccaagtggcttactatcgtgaagataaaacgggtcaagtgctgcaggaaggtattaacgaactgggtgcaatgtcatcttgggttgctgctgcgaccagctactcagtcaacgatacaccgatgatcccattctacatctactactcaatgttcggtttccaacgtattggcgacatggcatgggctgcgggtgatatgcgtgcacgtggcttcttagtcggtggtacttcaggccgtacaacactgaacggtgaaggtttacagcatcaggacggtcacagtcacgtactggctaacactattcctaactgtattacctacgatccaacttacggttatgaaattgccgttatcgttcaagatggtattcgtcgtatgtacggcgaaaaacaagaagatatcttctactacctgaccacaatgaacgaaaactacatccagcctgaaatgccagaaggtgccgaggaaggtatcgttaaaggtatctacaagctggaaacggtgagtggttctggtaaaggcaaagtgcagttactgagctgtggcaccattcttgagcaaacccgtaaagcggcgcaggcgctggcgaaagactttggtatcactgccgacgtatttagcgtgaccagcttcaacgaactgactcgcgatggtcaagcggcagaacgttggaacatgctgcacccaacgcaaacgccaaaacaagcgtatatcagccaagtgatctcaagtgatgcgcctgcaatcgcagcgactgactatatgaagatctacggcgagcagttacgtgcatttatgccaaccgattacaaagtgttagggactgacggtttcggtcgctcagacagccgtgacaatctgcgtcaccacttcgaagtggacgctaagttcatcgtcatcgcggcactgaaatctctggttgatcgtaaagagctgcctgttgatgtgttagcgaatgccatcaaggaatacggcatcgacgcagacaagatcaatccacagtacgcgtaag

SEQ ID NO: 216903 - DNA, 2020 bp, Unknown
  Bacterial polypeptide expressing nucleotide sequence isolated from the Sargasso Sea
tctgccgttctccgcaaacaccccgtacatcaatacgattcctgtgtcgcgtcaggcgccgattcccggcgaccaggaccttgaacaccgcatccgctcgtacacgcgctggaacgccattgccatggtgctgcgcgcgggcaaggacacgaacgtcggcggccacatcgcttcgttcgcgtcggccgccacgctgtacgacgtcggctataaccatttctggcacgcgccgtcggctgagcatggcggcgatctcgtgttcgtgcagggccattcgtcgccgggtgtgtactcgcgcgcgttcctgctcggccgtctgagcgaaaaccagctcgacaacttccgtcaggaagtgggcggcgagggcatctcgtcgtatccgcatccgtggctgatgccggatttctggcaattcccgaccgtctcgatgggcctcggcccgatcatggcgatctaccaggcgcgtttcatgaagtacatgcaggcgcgcggcattgcgaagaccgaaggccgcaaggtctgggcgttcctcggcgacggcgaaacggatgaaccggaatcgctcggcgcaatcggcatggccggccgcgaacgtctcgacaacctggtgttcgtgatcaactgtaacctgcagcgcctcgatggcccggtgcgcggtaacggcaagatcatccaggaactcgaaagcgaattccgcggcgccggctggaacgtcatcaaggtcgtctggggcagccgctgggatgcgctgttccaacgcgacaagtcgggcgcgctgatgcgccggatgatggaagtcgtcgacggcgaatatcagacgtacaagtcggaatcgggcgcgtttgttcgcgaacacttcttcaatacgccggaactgaaggcgctggtcgccgactggtccgacgaagacgtgtggaacctgaaccgcggcggccacgatccgcacaagatctatgccgcgttcagcgaggcgagcaacaccaagggccagccgaccgtcattctcgcgaagacgatcaagggctacggcatgggtgaagccggtcaggcgatgaacatcacccaccagcagaagaagctgcacgtggatcagctgaagaaattccgcgaccagttccgcctgccgatttccgacgaagatatcgtcaacgtgccgtacctcaagttcgaagaaggttcgaaggaactcgagtacatgcgcgctcgccgccaggagctcggcggctatctgccggcgcgtcgccagaaggccgagtcgctgccggtgccggcgctggacgcattcgagccgctgctgaagggcacgggcgaaggccgtgaaatctccacgaccatggcgttcgtgcggatcctgaacatcctgctgaaagacaaggcactcggcaagcgcatcgtgccgatcgtgccggacgagtcgcgtaccttcggtatggaaggcctgttccgtcagatcggtatctggaatcaggacggccagaagtacattccggaagactccgatcagctgatgttctatcgcgaatcggaatccggtcagatcctgcaggaaggcatcaacgaagccggtggcatgtgtgactggatcgcagccgcgacgtcgtactcgacgcacggcgagatcatgatcccgttctacatcttctattcgatgttcggcttccagcgtatcggcgatctggcatgggcggcgggcgatatgcgttcgcgcggcttcctgctgggcggcaccgctgggcgcaccacgctgaacggcgaaggtctgcagcacgaagacgggcactcgctcctgtgggcggcatcggtgccgaactgcatcagctacgacccgacgttcggttacgaactcgccgtcatcatgcaggacggtctgcgtcgcatggttgccgaccaggaagacgtgtactactacatcacggtgatgaacgagaactacgagcacccggcgattccgcagggcgacgctgtagcggccgacatcatcaagggtatgtattcgttcagaaaggctgacgcgaatcag

SEQ ID NO: 216904 - DNA, 1348 bp, Unknown
  Bacterial polypeptide expressing nucleotide sequence isolated from the Sargasso Sea
tttgtctaagtggttagtaaaagagggagataaagttaattctggagatgtaatagctgaaatagaaactgataaagctacaatggaaattgaatctgctgatgaaggaacagtaacaacactacttataaaagaaggaacagaatcagttccagtaaattctcctattgcagtacttgatggaaataatgatcaattaactaaaaaagatgatgatataaaaactaaaaaaaatagtgataatataaataaaatattagatgtagatactttagataatgaaaaaaaatacaaagaaattgaaaacttaaatcctaatataattccaaaaaatcaaaaaaataaaaatttagaattatctaattataaatcaattactatgagacaatctatcagagacgctatagctgaagaaatgagaaaaaatgaatcagtttttgttataggtgaagaagtaggtgaatatgaaggtgcatacaaggtaactcaaggtcttcttgatgaatttggtccttctagaatttttgatacgcctatttctgaacatggatttactggattagcagttggtagtgctttcaaaggattaagaccaatagtagaatttatgactttcaatttttcaatgcaagctattgatcaaataattaattctgctgcaaaaactttatatatgtctgggggacaaatcaattgtccaattgtttttagaggccctaatggtgccgcatcacaagttgcagctcaacatagtcaagatttttctagttggtattctcattgtcccggattaaaggttgtagccccatctaacgcattcaatgctaaaggtttattaaaatcatctatagaagatgacaatcctgttatttttttagaaaatgaaattttatataatcaaaaaatggatgtacctgaagatactaattttgatatccctttaggtgttgctaatatagcattagaaggcaaagatgctacaatagttacttattcgattatggtttcgaaatctttagaagctgctgaaattctaaagaaagactatgatttaaatattgaaattattgatttacaaacaattagacctttagattcagatactattttaaattcagtaaaaaaaactaatagacttattactgttgaagagtcttggccttttgcaagtgttggttctgaaattgttaatattgtacaaagagaaatttttgactatttagattctcctattattaaagttaatagcgcagatgtacctatgccttactcaagtgttttagaaaaaaaatatctacctcaagtacaagacattatttcagctattaaaaaagtttgctatatttaa

SEQ ID NO: 216905 - DNA, 1363 bp, Unknown
  Bacterial polypeptide expressing nucleotide sequence isolated from the Sargasso Sea
atgacaactgaaattttaatgcccgccctatcaccaacaatggaagagggaaccttggcaaaatggttagtcaaagaaggcgacacagtatccgcaggtgatatccttgcggagatagaaactgataaggcaaccatggaatttgaagctgttgatgaagggaccatcagcaaaatattagtatcagaaggttcggaaggaattaaagttaatagtccaatagctatattatcagatgatggagagaatatctcaaacttagaagtaagtgatgtatcaaaagaaaaactggcatctgcagatactaaaaattcagaatcaaaagtaaagacatctatcacagaggcaatctctgaacctgaatggaccgatgcgacagaggttagtcaacaaaccgtcagagaagcccttagggatgctatggctgaagagatgagacgcgatgaaaaagtgtttcttatgggagaagaggttggtgaataccaaggggcgtataaagtcagccaaggactactcgaagaattcggttcaaaaagagttattgacactccaattactgagcacggctttgcaggcatagcaactggcgcttcctttgctggactaaggcctattgttgaattcatgacctttaattttgcgatgcaggcaatcgatcagattgtaaattccgcggcaaagacactttatatgtctggtggtcagatgggagcaccaatggtgttccgtgggccaaatggagcagcagcaagagtaggcgcacaacacagtcaagactttacttcttggtacgcacatatcccaggtctaaaagtagcggcaccatattccgcgtcagatgccaagggcttactaaaatcggcgattagggatgataatccagtaatctttctggaaaacgaaattctttatgggcgcagctttgatatgcctgatatagaagactatatcgttccatttggtaaagctagaatttggcgtaaaggaaccgatatcaccatagtttcgtttggtattggcatgcaatacgcactaaaagccgcagaagagctggctgcacagggaatagaagcagaagttttagatttaagaactattaggccaattgactacgaaacaataatccaatcggtttccaaaacaaaccgttgtgttacagtagaagaaggatttccagtcgcttctataggaaatcatttatccgcctacgtaatggaacacgcattcgactatctagatgcaccaataataaattgtactggcaaggatgtgcctatgccttacgccgcaaacttagaaaagctcgctcttgtgacgactgaggaagtcgttagcgctgcaaaaaaagtttgctatcgataaa

SEQ ID NO: 216906 - DNA, 3043 bp, Unknown
  Bacterial polypeptide expressing nucleotide sequence isolated from the Sargasso Sea
tatgagtttaaaattattaattcctgatatcggtgatttcgacaatgtagagataatagaaattttggtaaaaaaaggtcaaaaaatcaataaaaacgatccagtagtaactttagaaagtgataaatctagtgttgaagttccgtcaaattacgaaggagaagtcgaaagtataagtgtaaaaataggtgataaagtttctaaaggagatttaatattaactttagcttcgagtaatgagaaaaataacgaaaaggtccctccagttacagaaaaaataattcaggaagccgaaagttcaataagtgaaaaaaattacaaaataaataatcaaactgaaaaacaaatagcaaaaaaaccaaaacaagaaactaaaatactagttaataacaaagatattgatcctcttgaaacaaaagactggttggattcaatttctgctgttcttaaaaaagatggaaaacttagagctcaatttttaattaaagaattaattgaacattcatataaacaaggatcagatttagttttgtctagaaatactccttacataaacaccatatcccctgatgaagaaacgaaatctccaggagatcaaaatatagaacgtaaattaagatctttaattagatggaatgcagctgcgatggttgttagagccaataaaaaatttccagaattaggtggtcatattggaacttttgcatctgcagctacattatacgatgtaggaatgaatcatttttggagagctaaaaataataaatttggtggagatttaatttattttcaaggacacagtgcacctggaatgtatgcaagagcatttttagaaggaagactaaacgaaaaacaattagataaatttaggcaagaagtaaaaaaaggaggactttcttcttatcctcatccatggttaatgccaaatttttggcaatttccaactgtgtcaatgggattaggaccaatgttggcaatttatcaagctagatttatgaaatatttaatcaatagagggttaatgaaagatgaggggagaaaagtttggtgtttcttaggagatggagaaatggatgaaccagagtcactaggagctataggtttagcagctagagaaaatttagataatcttatatttgtggttaattgcaatttgcaaagattagacggaccggttagaggaaatggaaaaataattcaagagttagaaggaatttttagaggcgcaggatggaatgttataaaggtgatttggggatcttattgggatccattattagcaaatgataaaactggtcatcttattaaaataatgaatgaaacagttgatggagaatatcaagcttttaaagctagaaatggcctatatgtaagagaaaaattttttggtaaatatccagaaactatagaattagtttcatcaatgtctgataaagacatttggagattaaaccgaggtggacacgatcctcacaaagtttatgcagcttatgagaaggctgttaaaaatactggtagcccaacagttattattgccaaaacaattaaaggttatggcatgggaaaatctggagagagcgtaaatactactcaccaacaaaagaaactagatatagatgatttattatattacagagatagatttgatgttccattaaatgatgaacaagttaaaaatatagaatattttaaaccagaagaaaattctgaagaaatcaaatatttaaaagaaagaagaatggaacttggaggtttcatacctgaaagaaattcctattcaaaacctattaaaactccaaataaagatatttttgattttatgaaagtttcaactggcgataaacagatgtctacaactatggccttggttagaattttaactaatttattaagagataaaaatgttgctcaaaaattagttcctattattccagacgaagcaagaacttttggaatggaaggcttttttcaaaaaattggtatttatgctcatgaaggtcaaaaatatgaaccagaagattctgcgcaactttcttcgtatagagaagaaaaaggtggacaagttttagaagaaggaattacagaggcaggttcaatgtcatcttggatagccgcaggaacatcttacacgaaccatgatattgaaatgataccaatatatttattttattctatgtttggatttcaaaggataggagatcttgcatgggctgcaggagatagtcaaactagaggttttttaattggtgctacagctggaagaactactttagcaggagaaggcttacaacatcaagatggtcatagtcatttaatatcctcaactataccaaattgtgtttcttacgatccaacttttcattatgagttggctgtaatttttagagaaggactaagaagaatgcacgaaaaaaatgaaaatattttctattatattacgacaatgaatgaaaattatccacatccagaaatgccaaaagataaaaattgtgaagaaggaatcttaaagggcatttataaaattaaagaatattctaaatataaaaagacaaaaatccagctgttaggatctggagctattttaagagaaatgatggcagcagcagagattttacagaatgaatatcaaattgatagtgaaatatggagcgtaaccagttttaatgaattaagaagagatggtttagaagttgaaagatacaacttattaaatccaacaggagaaaaaaaggttgcttatcttgaaaaatgtctaggaaaaactgaaggtccaattttagcagcatcagattacatgagaatgaatgctgatcaaattaggccatatatatcaaagagtttttattctttaggtacagatggctatggaaggagcgatacaagaaaaaatctaagaagtttttttgaattagacaaagaacatatagttgcgtacggcctaagtgttttagctaatgaacagttagtagcatcaaaatatgctgaagaagcaataaaaaaatataatattgataaaaataaaccaatgccaacaaaattataa

SEQ ID NO: 216907 - DNA, 979 bp, Unknown
  Bacterial polypeptide expressing nucleotide sequence isolated from the Sargasso Sea
aatgagagaaattcaatttagagaagctatttgcgaggctatgtcggaagaaatgagattagatgaaactatttatctcatgggagaggaagttgctgaatataatggggcttataaagcttccaaaggtatgctcgatgagtttggtgaaaaacgtgtaatcgatactcctatatctgaacttggttttgctggaataggagttggatcgacaatgacaggtaataggccaattattgaatttatgacatttaatttcgcattagttggtattgatcaaataataaataatgcagcaaaaattcgtcaaatgtcaggaggtcaattcccttgccccattgtttttagaggacccacagcttctgcaggtcagttagctgcaacccattcacaagctttcgaaagttggtatgcaaattgccccggtctcaaagtcattgtaccatcaaatccatacgatgcaaaaggacttttaaaatctgcaatcagggacgacgatccagttatttttatggaatctgagcaaatgtatggagataaaggtcaggttcctgaagaagaatatcttattccaattggggaggctgaagtaaagaaagaaggaagtgatgttactgttgtttcttttggaaaaattttaaaggaggtatttaaggcctcagaaaaattagctgaggataatatcaacatagaaataattgatttgagaactgttagaccactcgatatagacaccataattaattcagtaaaaaaaacaaatagacttgtgattttagaagaagcatggccatttggtaatgtttcaactgaaataacatatcaagtccaaaataaagcattagattatttggatgctccaattataaaaattaatacagctgatactccaacaccttactctcctgttttactaaaggagtggttacccaattataacgatgtaattaaagctgttaataaagttctatataaataa

SEQ ID NO: 216908 - DNA, 2669 bp, Unknown
  Bacterial polypeptide expressing nucleotide sequence isolated from the Sargasso Sea
atatagagtttgtttcaataaagatgatattgatcctgtagaaactaaagaatgggtggaatcacttacagctgttgttcaacaagaaggatctgagagagcaaattttttaattaagcaactaattgaccatgcgtacagacagggttcaaaaattccttacacccaaagcactccatatataaatacaattcctccagaggaagaaaagaaatctcccggtgaccaaaatattgagaggaggttaagatcattaattagatggaatgcagcagcaatggttgtcagagctaacaaaaaatttcctgaattaggtggccacataggaacttttgcatcagctgcaaccttatatgatgttgggatgaatcacttttggagagcaaaaagtgataattttggaggagacttaatctattttcaaggtcacagcgctccaggcatgtatgcaagagcttttctagagggtagactaaacgaaaaacaattagacagttttagacaagaagttaataaaggtggactgtcttcataccctcacccttggctaatgcctaatttttggcaattcccaactgtttcaatgggactaggtcctatgctagcaatataccaagctcgttttatgaaatatctaattaatagaggtttaatcaaagacgaagggagaaaagtttgggcttttcttggtgatggtgaaatggatgaaccagaatcattaggtgcaattggtttagcagctcgagaaaaattagataacttaatattcgtagtgaattgtaatcttcaaagacttgacggaccagtcagaggaaacggtaaaattatccaagagctagaaggaatatttagaggtgcaggctggaatgttattaaagttatctggggatcttattgggactctttattagccaatgataaatctggtcatcttgttaaattaatgaatgaaactgttgatggcgaatatcaggcatttaaggcaagagatggtttgtatgtaagagagaaattttttggaaaatttccagagacttttcaaatggtatctgcaatgtcagataaagatatttggagactaaacagaggtggtcacgatccccataaagtttatgcagcttacgataaagctgtaaaaaatataggcagcccaactgttattattgcaaaaacaataaaaggatatgggatgggtaaatctggtgaaagtgtaaatactacacatcaacaaaaaaaattagatgttgatgacttaatgtattacagagataggtttgacgtccctttaagcgatcaacaggttaaaaatatagaatattttaaacctgacgaaaattcacctgaaataaaatacttaaaacagcgtagatatgacttaggaggctttatcccagagagaacaactttttctaaaccaattaaaacgccagaaaaaaatatttttgacactatgacaaaatcaactggagaaaaagaaatgtccaccacaatggcattagtcagaatgttaacaagtttattaagagataaacatgttgcaaaaaaattagttccaataattcctgatgaagcaagaacgtttggaatggaagggttctttcaaaaaattggtatctatgcacacgaaggccaaaaatatgaaccagaagatgcagctcaattgagctcttatagagaggaaaaaagtggtcaagtgctagaggaaggtattaatgaggcaggtgctatgtcttcatggatagcagcaggaacatcttacacaaatcatgatattgagatgatcccaatatatctattctattcaatgtttggatttcagagaacaggagattttgcttgggcagccggagatagtcaggctagaggatttttaattggtgctacagcaggtagaacaactttagctggtgaaggtttgcagcatcaagatggacacagtcatttattggcttccactattcccaactgtgtttcatatgacccaacatttcattatgagttagcagtcatatttagagaaggccttaaaagaatgcatgaaaataatgagaatattttttattacataactactatgaatgaaaattattctcatcctgaaatgccaaaagggtgtgaagatggaattttaaaaggtatgtataggataaaggatttttcaaaacacaaaaaaaataaaattcaacttctcggttctggagctattttaagagaaatgatttctgctgcagaaattcttcaaaatgattacgaaatagacagtgaaatttggagtgttactagttttaatgaacttagaagagatggattagaggtagaaagatataatttgttgaaccctgataaagaaaaaaaaataacctatcttgaaaagtgtcttggtaaaaccgaaggacctatacttgcggcttcagattatatgaggatgaattctgatcaaatcagaccttatgtatcgaaaagcttttactcactcggcacagatggatttggaagaagcgatacgagaaaaaatttaagaaaattttttgaagtagataaaggacatatagttacatatggattaagcattttagctaatgagcaattaattgcatcaaaatatgtcaaggatgcaattaaaaaatataaaattgatcagacaaaaccaatgccaaccaaattataat

SEQ ID NO: 216909 - DNA, 1322 bp, Unknown
  Bacterial polypeptide expressing nucleotide sequence isolated from the Sargasso Sea
tgagggcaatttaactaaatggcttgttaaagaaggagatcaagtaaaagctggagatgtaatcgcggaaatagaaactgataaagccactatggaagttgaggcagttgatgagggaacaatagaaaaattattatttaaagaaggagatcaatcaattttagttaattcacctattgcaattctttcaaatgcagattcagaaacaaaaaaaaataaattagaaaacaaaaaaatcaataatgataatttaaaatcaaaaaataaaaatttaatatatgaagataaggcaaaaacacaagttattaataaagaaaaagaaaataataaagaaaataagaatatcattacaatgaggcaagcaattagagatgctatggcagaagaaatgagaaaaaatgaagctgtttttgtaataggtgaagaagttgcagagtatcaaggtgcatataaagttactgaggggcttttagatgagtttggatcaaaaagagttatagatactccaatttctgaacatggttttacaggtctggcagtcggtagcgcttttaagggtttaaggcctattgtagaatttatgacatttaatttttctatgcaagcaattgatcaaattataaactctgcagccaaaaccctttatatgtctggaggtcaaattaactgtccgatagtttttagaggaccaaatggcgctgcttctcaggtagcagcacaacatagtcaagattttacctcttggtatgcacattgccctggtttaaaagttgttgcgccttcaaatgcttataatgctaaaggtcttttaaaatcagcaattgatgatgataatccagttatatttttagaaaatgaaattttatatgggtataaagactttgttccaaatgatactaattttgaaatcccacttggagtagcaaaaatagctttagaaggttctgatgcaaccatagtaacttattctattatggtatcaaaatcactagaagcagcaaaaatattaaaagaaaaatatgatgttaatgttgaaattattgatttgcaaacaattaaaccaatggataaaaaaactattttagaatcagttaagaaaactaatagacttgttacagtagaagaatcatggccttttgcaagtgttgggtctgaaattgttaattttgttcaaaatgaaatctttgattatttggactcacctataaagaaagtaaatagcgctgatgtcccaatgccttattcaagtgttttagaaaaaaaatatttacctcaagtaaatgacattattcttgctataaaagaagtttgttatatttaat

SEQ ID NO: 216910 - DNA, 2680 bp, Unknown
  Bacterial polypeptide expressing nucleotide sequence isolated from the Sargasso Sea
agaaaaaaataatttagcaaattcagcgggagatatcgatccagttgaaacgaaggaatggatagagtctctttcttcagttctggaaaatgatggaagtaaaagagcccaatttttaataaaacaactgatagagcattcttacaaacaaggatcagatttagttttatcaagaaacactccttatataaatacaatacctccagaaaaagaagtcaagtctactggtgatcaaaatattgagagaaaaattagatctttaatcagatggaatgcggcagcaatggttgtgagagctaataaaaaatttccagaacttggtggccacattggaacatttgcgtctgcagcaactctttatgatgttggaatgaatcatttttggagaggtaaaaataataaatttggtggggatttaatttattttcaaggtcatagtgcacccggtatgtacgctagagcttttcttgaaggtagattaagtgaaaaacaattagacagcttcagacaagaagtagagattggaggtttatcctcatacccacacccttggttaatgccaaagttttggcagttccccactgtatcaatgggtcttggtccaatgcttgcaatatatcaagcaagatttatgaaatatttaattaatcgcggtttaataaaagatcaaaatagaaaagtttgggcatttcttggcgatggtgaaatggacgagccagaatctctgggtgccatcggtttggcagcaagagagcaacttgataatttaatttttgttataaattgtaatcttcaaagactagatggacctgtaagaggaaatggaaaaattatacaggagctcgaaggaatttttagaggagcagggtggaatgtcataaaagttatttggggatcttattgggattcattattagctaaggataaaactgggcatttggttaagataatgaatgaaactgtcgacggagaatatcaagcctataaagcaagaaatggcttatatgtgagaaagaatttttttggtaaatatcctgaaactgaaaaattagtttcttctttatctgacaaagatatttggagactaaatagaggaggtcacgacccacataaagtttattcagcatacagcgaagcaataaaaaatactggtagcccaactgttataattgcaaaaacaataaaaggttatggaatgggtaaaactggagaaagtgtaaatacaagtcatcaacaaaaaaaattagatatagatgatttaatgtattatagggatagatttgatgttcccttaacagataagcaggtacaagaaattcaatattttagaccaaacgaaaattctgatgaaattaaatatattaaagatagaagaattaaacttggtggttttattccagaaaggacaagttattctaaaccaataaaagcacctcctaaagatatctttgattttttaaaagagtctactggaaaaaaagaaatgtctactacgatggcattagtaagattattaacaaatttattaagagataagaatgtttctccaagacttgttccaataatacctgatgaagcaagaacttttggaatggaaggttttttcaaaaaaataggtatttatgcccacgaaggtcaaaaatatgaaccggaagatgctgaaaatttattttcatatagagaggataaaaaagggcaagttttagaggaaggcatcaatgaagctggttcaatgtcatcttggattgcggcaggaaccgcatattctaatcatgatattgaaatgataccaatttatcttttttattctatgtttggatttcaaagaacaggagattttaattgggcagctggcgacagccaggctagaggctttttaataggtgcaacagccggaagaacgacacttgctggggaaggattacaacatcaagacggccacagtcatatgcttgcatctacaataccaaattgtaaatcatatgatcctacttttgcttatgaacttgcagtcatttttagagaaggattaaaaagaatgcacgaaaaaaatgaaaatgttttttattatattacaacaatgaacgaaaattatccgcatcctgcaatgccaaaagataaaaattgcaaggaaggaatattaaaaggaatgtataaaataaaagaatttgataaatataaaaaaacaaaaattcagttaatgggatcaggaacaatcttaagagaagttatgtctgccgcagaaatattacaaaaagattatcaaattgacagtgaaatatggagcgttacaagctttaatgaattgagtagggacggaatggaggttgaaagatacaatttattaaatccagataagccccaaagagtttcttatgtcgaacaatgttttaaaaaaaaagaaggaccaattttagctgcctcagactacatgagaagtcattctgaccaaattagacaatatacaaaaaaaaatttttattctttagggaccgatggttttggtagaagcgatactagaaaaaaattaagaaaattttttgaggttgataaagaacatattgttgcatatgctcttagcgtactttcaaaagagcaattaattccaacaaaacatgcaaaagaagcaatgataaaatataaaattgatgcagaaaaaccatttccaaccaaaatataa

SEQ ID NO: 216911 - DNA, 691 bp, Unknown
  Bacterial polypeptide expressing nucleotide sequence isolated from the Sargasso Sea
ttacctcacggttttgaaggtcaaggtccagaacattcttctgcaagattagaaagatttttgcagttgtgttcaaatgacaatatgcaagtaatgaattgtactactcctgcaaattattttcatgctttaagaagacaaatgcatagagattttagaaagccattaattattatgacaccaaaatctttactaagaaataaatattgtgtttcacaaattgatgattttagtaaaaaaaactcttttcacagagttttatgggaccattcaatggatccaaaaacaaagggatttatcaaattaaaaaaaaataatgaaataaaaaaagtaatattatgttcgggaaaaatatattttgatcttttaacagctagagaaaaactaaaaaaagatgacgttattttatttagaattgaacaactttatccttttccagcaaaaagtttagtaaaagaaattaaaccatttgcacaaaatgccaaattttattggtgccaggaagagccaaaaaatatgggtgcatggttgctagtgagagattatatacaatggacattagattatataaaagctaaaaatagagaaatttcttatattgggagaaatcctgatgcaacgccagctacaggttatgcgaaaagacatttagctgaacaaaaagaaataattgatatagtttttaaataaa

SEQ ID NO: 216912 - DNA, 1075 bp, Unknown
  Bacterial polypeptide expressing nucleotide sequence isolated from the Sargasso Sea
ttgtggaagattggctatgaatatatgcatatttcaaacccaacagaaagaaaatggtttagagatagagttgagaaagatgaaaacgctttacaatttacaaaaaatggtaaggaagctattttgaataaaattattcaagctgagggatttgaaaaatttttacatacaaaatatgttggaacaaaaagatttggtttagatggagcggaaagtttaattcctgcgctagagcaaattataaaaattggtggtcaaaataaagtaaaagaagtcaaaattggaatgtctcatagaggaagacttaatgttttggcaaatgttttacaaaaatcgtataaaagaatatttaatgaattcgctggggaaatagactctacatcagatgacgatagtgctggtgatgtaaaataccatttaggagcatcatcagatagagcatttgacggcaattcagttcatgtaagtcttacagataatccatctcatttggaagctgtaaacccagttgttttaggacaaacaagagcaaagcaattttttcataatgataaagagagaaaaaaagtaattcctatattaattcatggtgatgcttcatttgctggccaaggtattgtatcagagtgctttgcaatgtcaggtttgcccggacataatactggtgggacgattcattttataattaataatcaaattggatttacaacaagcccaagatttgcacgttcatctccgcatccttctgatgtggcaaaaatggtagattcgccaatcatacatgctaacggtgatgatccagaatcagtcgtgtatgcagctagaatagctgctgagtttagacttaaatttaatagagacgtagtagttgatttagtttgttacagaagatttggtcataacgaaggagatgaaccttcatttactcaaccattaatgtataaaaaaattaaatcccatctttctactgtaaaaatatatggaaacaaattagttaacgaaaaaactatttcatctgaagatttaaataatcaaattaaaaaatttaaagatcttcttgatgatcaatataaaa

SEQ ID NO: 216913 - DNA, 887 bp, Unknown
  Bacterial polypeptide expressing nucleotide sequence isolated from the Sargasso Sea
aactattcacggtaaagttaattattatattaatgcgtatagaaattttggtcatacggctgccgatttagatccgctccaattagctcagaaagatatccatattgacttgatttatgctgaaaaattattggaaggcataagcccagaagaacgcgttggaaatgattatcctaaaggttcaaaaaataaaatctttttaaaagagttaaaagaatctattacaaaaaaatatagcagtaatataggcctggaattttcgcatatatctgatgaaagagaaagaaactggataattgatagatttgagaataatgattacaaaaaaataaatttaaatgaaaaaatctttgtattgaaaagattaatttctgcaagaggtttggcaaaatatctttccgcaaaataccctggtatgaaaagatttggtatagatggatgtgaatctctaatacctctcattgataccttaattgagcagacatcaaaaaatagtgctgaacaaatttgttttggaatggctcatagagggagattaaatttactgataaatgttttaggcaaaaaaccaaaagatttatttgccgaatttgaagaaaactatgatctgaagggttctagtactggtgatgttaaatatcatttaggattctcatcaaatatacatacgactagtggtgacgttcatgtctctctcattaataatccatcacatttagaaatagtagatcccgttgtggttgggtctgttcgagcaaggcaagatagattaaatgatagagaaagaaataaagttgtaccaatcctaattcatggtgatgcttcatttagtggacagggagttgttatggaaacgcttcaaatgtctcaaactagaggatatggag

SEQ ID NO: 216914 - DNA, 895 bp, Unknown
  Bacterial polypeptide expressing nucleotide sequence isolated from the Sargasso Sea
taaaaaggatattgttattgatttaattggttatcgaagaagtggccataatgaagcagatgatccatcttcaacacaacccgtaatgtataaaaaaatcaaacaacatccttccgtattgaaatcatataaagataaattaatgcaaaataatgatattacttcggaagaatttgatgaatttaaaaaattttacagatcatcaattgaaaaagatgaaagtgttgcccttaacttatcaaaaataaagaatgatgacttatggtttgaatgggaccagtttattgatgctaggtgggatgaaaatactgatacaactgtcaaacaagatcaactaattgatgatgctcgaacaatcgctgatattccaagtggttttgttttgcagaaaaaagtcaaaaatataattaagcaaagaatagatatggctgaaggaaaatgtgaatttaattggggatttgcagagattgcagcatattcgagtcttttgcgtgagggatacccaattagatttagtggacaagatataaggagaggaacatttgatcacagacatgctgtgatgtttgatcaagaggatgggagaacttactatccattgaataaatttgctgaaaaaggaaatacaaatatcggaatttatgactcaatattatcagaggaggcagttctagggtttgagtatgggtattcggcaacatggccaacaggcctagtgatttgggaagctcaatttggtgatttttctaatggagctcaagtggtaattgaccaatttattgctagcgcacaacataagtgggaaagattatctggtttagtccttttattgccccacggatatgaaggtatggggcctgagcatagtagtgctcgtatagagagattcttcaat

SEQ ID NO: 216915 - DNA, 769 bp, Unknown
  Bacterial polypeptide expressing nucleotide sequence isolated from the Sargasso Sea
ggagctcaagttataattgaccaatttatttcttcaggagaaagaaaatggctgagagcgtctggtttagtattattgttaccacatggttttgaaggtcaaggcccagaacattcttctgcaagattagaaagatttttacagctatgtgctaatgataatatgcaagttatgaattgcactactcctgcaaattattttcatgctttaagaagacaaatgcatagagattttagaaaaccgttagttattatgacaccaaaatctttactaagaaataaatattgtgtttcacaaattgatgattttagtaaaaaaaattcttttcatagagttttatgggaccattcaatggatccaaaaaccaagggatttattaagttaaaaaaaaataatgaaataaaaaaagtaatattatgttcaggaaagatatattttgatcttttattagctagagaaaaattaaaaaaagatgacgttattttatatagaattgaacaactttatccttttcctgcaaaaagcttagtgaaagaaattaaaccttttgcacaaaatgccaaattttattggtgccaggaagaaccaaaaaatatgggtgcatggttgttagtgagagattatatacaatggacattagattatataaaagctaaaaatagagaaatttcttatattggaagaaatcctgatgcaacaccagctacaggttatgcaaataggcatttttctcaacaaaaagaaattattaataaagtttttaaataaa

SEQ ID NO: 216916 - DNA, 882 bp, Unknown
  Bacterial polypeptide expressing nucleotide sequence isolated from the Sargasso Sea
aacggaaaagatgcaattttaaataagcttattcaagctgaaggttttgaaaagtttttacatactaaatacgttggaaccaaaagatttggcttagatggtggtgaaagtttgatacctgcattagagcagataataaaaattggaggacagtttaaaattaaagaagttaaaataggcatgtctcatagaggacgattaaacgtattagcaaacgtattacaaaaatcttataaaagaatttttaatgagtttgctggagaaataagtggtaacactaaagatagtgctggagatgttaagtatcatttgggagcttcctcaaatagagaatttgatggaaattcggtacatgtaagtcttacagataatccatctcatttagaggctgtaaatccagtagttttaggacaaacgcgagctaagcaattttttcatggtgataaagaaagaaataaagttatacctattcttatacatggtgatgcagcgtttgcaggccaaggagttgtatctgagtgttttgcgatgtcaggactccctggccacaacactggaggaacaattcatataattgtaaataaccaaataggatttactacaagcccaagatttgcacgttcatcaccatacccatctgatgttggaaaaatggtagatgcaccaataattcacgtcaatggagataatcctgaagctgtagtttatgcgacaagagtagcaacagagtttagattaaaatttaatagggatgtagttattgatctaatttgctatagaaggtttggtcataatgaaggtgatgagccatcttttacccagcctttaatgtataagaaaataagatcacacccgtctacggtaaatatttatggagaaaaa

SEQ ID NO: 216917 - DNA, 628 bp, Unknown
  Bacterial polypeptide expressing nucleotide sequence isolated from the Sargasso Sea
cctgagcatagcagcgcaagaaattgaaagatttttgcaattatgtgcatctgaaaatatacaagtttgtgttccaagttctccaaaacaaatttttcatcttttgagacgacaagcaataagaaaaatgagaactccactagttgtaatatcaccaaaaagccttctcagaaatcctatggctgtttctaacttaggcgaattaacaaacggaagttttgattgtgtaattgatgatgatataaaaaaacgtgaggcagtaaaacgcttaattctttgttcaggtaaagttttttacgatcttattgaaaagaaaaaagaagaaaaccgcgaagatattgctgttgtaagaatagaacaattgtatccatttccttatgatgaccttgaagaaatccttacaaagtatcaaaatgtacaagaatttatatggtgtcaagaagagcctttaaatcaaggtgcgtggtttagccatagacatagaattcaaagagttttagataggctaagtgatggttttgaggttagtttggtaagcagaccagcagcagcagcacctgcagttggattaatgaagcttcatcttcaacaacaaaaggatctagttaatgaggcaattgataaatga

SEQ ID NO: 216918 - DNA, 495 bp, Unknown
  Bacterial polypeptide expressing nucleotide sequence isolated from the Sargasso Sea
ctccactagttgtaatatcaccaaaaagccttctcagaaatcctatggctgtttctaacttagacgaattaacaaacggaagttttgattgtgttattgatgatgatataaaaaaacgtgaggcagtaaaacgcttaattctttgttcaggtaaagttttttacgatcttattgaaaagaaaaaagaagaaaaccgcgaagatattgctgttgtaagaatagaacaattgtatccatttccttatgatgaccttgaagaaatccttacaaagtatcaaaatgtacaagaatttatatggtgtcaagaagagcctttaaatcaaggtgcgtggtttagccatagacacagaattcaaagagttttagataggctaagtgatggttttgaggttagtttggtaagcagaccagcagcagcagcacctgcagttggattaatgaagcttcatcttcaacaacaaaaggatctagttaatgaggcaattgataaatgag

SEQ ID NO: 216919 - DNA, 979 bp, Unknown
  Bacterial polypeptide expressing nucleotide sequence isolated from the Sargasso Sea
gttttacaaaaatcttataaaagaatatttaatgaatttaccggagaaataagctcaaaatcaaaagatgatactggagatgtgaagtatcatttaggtgcctcatcaaacagagaatttgatggaaattctgtgcatgtaagcttaactgataatccatctcatttagaggcagttaatccagttgttttgggacaaacacgagctaagcaattttttcacaaggatagagaaagaaaaaaagtaattccaatattaattcatggagacgcagcttttgctggacaaggagtagttgctgaatgttttgcaatgtcaggacttccaggacacaatactggtggaacaattcacattattattaataatcaaataggtttcaccacaagcccaagatttgctagatcttcaccttatccatctgacgttgcgaaaatggttgaagctcctatcattcatgtaaatggtgacgatccagaagccgtagtttatgcagcaaggattgcaacagatttcagattaaaatttaatagagacgtagtgattgatcttatttgttacagaagatttggccacaacgagggtgacgaaccttcatttacccagccacttatgtataaaaaaattcgttcccacccttcaccagttaaagtttatggtgaaaagttaattcatgaaaagtctatttcaaaagaatacttggataactcaatttataattttaaaaatttattagatgagcaatttaaaaatgcaaaagattacaaaccaaaaattgaatggttcgaaggtacttggtctagatatagaccagaaagaggtaaagataaaagaggtgtgacaggttcagatattaatgatttagaaaatatttctaataaaatcaatactatacccaaagaaattaatgttcataaaactattaaaaaaattatagataatagaaaattatcggtctccaatggaaaaaaggaaattg

SEQ ID NO: 216920 - DNA, 606 bp, Unknown
  Bacterial polypeptide expressing nucleotide sequence isolated from the Sargasso Sea
tgcaagtaatgaactgcacatccccagcaaattattttcatgctttaagaagacaaatgcataggagtttcagaaagccactaatcataatgacaccaaaatcattattaagaaacaagtattgtgtttcaaatttagaagattttaacaaaaaaaatactttccatagagttctgtgggatcatgctatagatcctaagtctaaaggatttattaaactaaaagaaagttctaaaataagaaaagtaattctttgttctggaaaagtatattttgatttgttagatgccagagaaaagcttaaaagagatgatgtagtgatgtatagaattgaacaattgtatccatttccagcaaaagctttggttaaggagttaaaaccgtactctaaaaatgctgaattcttttggtgtcaagaagaaccaaaaaatatgggcgcttggttttcagttagagattatatccaatggacattagacactttaaaggctaataataataaaatttcttatataggaagaagcccagacgcaactcctgcaacaggatatgccaaaaggcataattctcaacaacaagaaataattaataaggtatttgattaat

SEQ ID NO: 216921 - DNA, 1021 bp, Unknown
  Bacterial polypeptide expressing nucleotide sequence isolated from the Sargasso Sea
ttttaccaagaatggtaaagaagcaatactaaataaacttgtacaagcagaaggttttgaaaaatttttagcaactaaatacgttggtacaaaaaggtttggtcttgatgggggtgaaagtttaataccagctcttgagcaaataattaaaattggtggacaaaatcagattaaagaagttaaaattggaatgtctcatagaggtagacttaatgttttggcaaatgtgttacaaaaatcatataaaagaatatttaatgaatttgcgggggaagtaagctcagactctgaggaaagtgcaggagatgtaaaataccatcttggtgcatcttcagataggcagtttgatggaaactctgttcacgtaagtttaacagataatccctctcacctagaagctgtcaatccagtagttttaggacaaacaagagcaaagcaattttttcataaagataaagaaagaaataaagttatacctattcttattcatggagatgctgcttttgctggccaaggagtggtagcagaatgctttgctatgtcaggacttcctggccataatacaggcggcacgattcatattatagtaaataatcaaattggttttactactagtccaagatttgctaggtcgtcaccatacccatcagatgttgcaaaaatggttgaagctccaattcttcatgtgaacggagacgacccagaagcagttgtttatgcgactagaattgctactgaatttagactgaagtttaatagagatgttgtagtcgacctaatttgttatagaagatttggacataacgaaggggacgaaccttcatttactcagccattgatgtataaaaaaattagagcacatccaagtgtttataagatatatggaaacaagttagttaatgaaaattcaattacccaaaatcttttagatcaaaatgttaaaggatttaaagatttattggacgaacaatataaaagcgcaaaagattataaacctaaaatagaatggtttgagggctca

SEQ ID NO: 216922 - DNA, 914 bp, Unknown
  Bacterial polypeptide expressing nucleotide sequence isolated from the Sargasso Sea
tgctaatggagatgatccagaagcagttgtttatgcggctagaatagcaacagagtttagattaaaattcaatagagatgtagtagtagatctaatttgttatagaagatttggtcataacgaaggagatgaaccatcttttactcaacctttgatgtatgaaaaaattagatcacatccctcaacaactaaagtttatggaaaaaaacttgttgaagaaaatgttatatcaagcgaaagcctagacaattcaattaagacttttaaaaacttacttgatgatcagtttaaaaatgcaaaagattataaaccaaaaattgcttggtttgaaggtacgtggtcagcttacaaaccagaaaaagggaaagataaaagaggtgtaacaggtgcggataccaaaaagctattagagatttcagaaaaaataaattcatcttttgatgaattaaatttacacaagactatagttaaaatattaaataatagaaaagaagctgttaaaagtggatctaatattgattggtcaacagctgaagctttagcgtttggatctctattagaagaaggctatccagtaagattagttggacaagattctggaagaggaacttttagtcaaagacattcagttttaagaaatcaaaaggataacacccgatatgtccctttaaataatatttctaataatcaaaaacaatttgaagttgttgatagctttttatctgaattggctgttctagggtttgagtatggttatagcttagttgagcctaacacacttactttatgggaagcacagtttggagattttgcaaatggtgctcaggttgtgatagatcaatttatagcttcaggagaaagaaaatggagaagagcttctggattagtaatgttattgccaccatggatatgaa

SEQ ID NO: 216923 - DNA, 634 bp, Unknown
  Bacterial polypeptide expressing nucleotide sequence isolated from the Sargasso Sea
aatgtgtggtcaggataattggatcgtagccaattgttctacgcctgctaactacttccatatcttgagacgccaagttcatcgggattttcgaaaacctcttgttctaatgacacctaaatcgcttctcaggcacaaactgtgtacttcaaaagttgacgattttacgaatggttcatctttccatcgtgttttatgggatgatgcggaaaagggaaactcaactactaatttagctaaagatatagaaatcaaacgggtagttatgtgttcaggaaaagtctacttcgatttgttagaagaaagagacgcaagagggataaatgatatctatttgctccgatttgagcagttttatccttttccagcaatgtcagcggttaaagagcttgagagattccaaaatgcagagatgatttggtgccaagaagaaccaaaaaatcaaggcgcatggtcattcatggaaccaaatatagaatgggttttaagtaggatgaacgcaaaatctaaaagaccaatttttgttggtaggccagcaagtgcctcaccggctacaggtctcgcaagtcaacataaagagcaacaaaaaatgcttattgatgaagctttaaatttaaaggaaaccaaaaaatga

SEQ ID NO: 216924 - DNA, 853 bp, Unknown
  Bacterial polypeptide expressing nucleotide sequence isolated from the Sargasso Sea
cgcgaaaaaaaaatcgaacagaaacgaaagcacatctcaacccgattcagttaagcaagtttcagttttacaacttataaacgcctatagattcagaggccacagaaatgccaacttggacccgctcaaccaatacaagcgacctcaggtgcccgagcttgatccctcttttcacgacctttttgaaagcgatctcgatacagtttttaacactggttctcttcaaggggtagaaaacgcgacgttgagagagattctcaaaatcgttagagaaacatattgtgagaatgtcggcgcagaatatatgcacattgttgaaactgccgaaaaacgttggatacagcagcaactagaacctagcaaagaaaatgtccttgcgaacgagcggcgaaaacaactactgagatgcattgttgctgctggctcactcgaacgttatctacacaaaaaatacgtaggacagaagcggttctcgttggagggaggagagagcactattgcattactagacactgtggtcgaggaatgcggaaaacacggcattaaggagtgtgttgtgggtatggctcacagaggaagattaaatgttttagtgaacataatcgggaagcacccttcggacttgtttgacgaatttgaaggcaaggggcgcccagaaaacctatcaggggatgttaaatatcatctaggctactcctccgacatacagacccctagcggcccagtacatctaacgcttgcatttaacccttctcatttagaaattatcgatccagtggtagaggggtctgtgcgagcaagacaggatagaagaagagactctggccgaaatgaggtgcttccattaatactt

SEQ ID NO: 216925 - DNA, 754 bp, Unknown
  Bacterial polypeptide expressing nucleotide sequence isolated from the Sargasso Sea
agtattaatgaaataatgtccaagttaagaaaagtatattgctcaacaattggagcagaatttatgcatatctcagacccaactgaaaaagtatggtttagagagagaatggaaaaagaagaaaatcaaattaattttacaaataatggaaaaaaagcaattcttaaaactataataaaagcagagggatttgaaaaatttttggcaaaaaaatttattggaaccaaaagatttggattagatggaggtgagtctttagtaccagcattagaacagatcattaaaagaggcggacaacttggtgttaaagaaattaaaatcggaatgccacacagaggaagacttaatgttttagcaaatgttttacaaaaatcttataaaagaatttttaatgagtttgctggagaactagattccaaaagcgaagattcagctggcgatgtaaagtatcacctcggggcgtcttcaaatagagaatttgatggtaattctgttcatgttagcttaacagataatccatctcatctagaggctgtaaatcctgtagtattaggacaagtgagagctaaacaattctatcataacgataaacaaagacgtcaagttataccaatattaattcatggtgatgctgcatttgcaggacaaggagtggttgcagaatgctttgctatgtctggtcttaaaggacataatactggtggcacaattcatataattgtaaataatcaaattggattcacaacaagtccta

SEQ ID NO: 216926 - DNA, 926 bp, Unknown
  Bacterial polypeptide expressing nucleotide sequence isolated from the Sargasso Sea
agttagtaaccttattggagcttatcgacaacgtggacatatgttctcaaaaaccaatcctgtgcgtccgcgtcgtgaacacgaaggtccaattgtactggagaattttggtttgagtgattcagatatggatacagagtttcacgctggggaacgtattggactcggtagtgcaacattgagagagatacatgagtttttagaacaaacatattgcggttctatcggcgttgaatacaaatttatgagaacaattgagatcattgaatggcttgagcaaaaaatggaatcatgccgaaacactccaaatttttcccgtgaagagaaaattgatcttttaagaaaaacgaatgaggcggtggcatttgagaattttctgcatacaaaatttgttggtcaaaaaagattttcacttgaaggaggagaatcaatcattcctgcactggatactgtagtcgagtttggtgcggaacttggaatccaagaatttgtgattggaatggcccataggggacggttgaatgtgctggcaaatattttaggcaaaacttacaacgatatatttgctgaatttgaaggtaaaggattcggagaagatatatttgcgggagacgttaagtaccatatgggttattcaagtgataaaaaagtcaggaacggaaaaatagtccacctaagcctgacgccaaatccatctcacctagaagctgtcaatcccgtagtggagggaatttcacgagcaaagattgatcattatcacgaaggaaatgcaaaaaaactggttccgattctgattcatggggatcattcaatggcaggtcagggcattgtatatgaagttttgcagatgtcaaaattacccggatacggaactggagggactgtacatctcgtaatcaacaatcaagttggatttactgctgatt

SEQ ID NO: 216927 - DNA, 530 bp, Unknown
  Bacterial polypeptide expressing nucleotide sequence isolated from the Sargasso Sea
tgatcaaggatcgggagatgttaagtaccacataggtgcaagttctgatagaagttttgggggaaatataattcatgtgagtatggcagcaaacccctcacatttagaggcagtaaatccagtagttgctgggaaaataagggctaaacagaccattattcaagataaaaataattcaaaagtttcaggactattaattcacggtgatgctgcaatagcaggacaaggtattgttgctgaaactttcacaatgtcacaattaaatggatacagaattggtggaataattcattttattattaacaatcaaattggatttacaacaagtcctcagtacagtaggtcagctccttattcatcagaaataggaaaagttgttcaatcccctatttttcatgttaacggagatgatccagaggcagtagttttagcatcaagagctgcaacagaatttagaaatacatttaaaaaagatacacttgtagatatgttttgttacagaaaacatggacataacatacacttgtaga

SEQ ID NO: 216928 - DNA, 931 bp, Unknown
  Bacterial polypeptide expressing nucleotide sequence isolated from the Sargasso Sea
aaaacataaaaaccctaaggatatttatgctaatcaattatttaaagagggaataattaatttaaattttgttaaagaaattgagaatagttacagaaacagtttagagagtgatctagaagaatcaagaaagtatataaaaacctttgtagctccatttatgaacaaatattgggaaaaattcaatatttcaggagaaattgatttagataaaataattgaaacgaaagtatcaatcgaggaattgactaaagttgctaaatcaataacctctcttccgaaaaataaaaactttttaagaaaaattcaaagaataattaacgaaaggaaattaatgttttttgaaaaaggcgaattagactgggctatgggggagatgcttgcttatggtacacttttaaatgaaggatataatgttagactttctgggcaagatgttcaaagagggactttttctcacaggcatgcgataactaaatctgaggattcagaggaggaaatcaatttactaaataatttagataatgataagcaagggtttttatcaatttttaattctcttttatccgaatatgcagttttaggttttgattatggttattcaatggctagtccaaatactttaactatttgggaggcccaatttggagattttagtaatggagctcaaataataattgaccagtatatttcttctgcagaagataaatggaaattacaaaatggaattgttatgctactaccacatggctatgagggtcaaggtcctgaacattcttctgcaagaattgaaaggtttttacaattatgtggtgatgataatatgattttggctaattgcactttaccctctaactttttccatttgttaagaagacaaattcatgcagaatatagaaaacctttaatagtttttactcccaaaagtctt

SEQ ID NO: 216929 - DNA, 118 bp, Unknown
  Bacterial polypeptide expressing nucleotide sequence isolated from the Sargasso Sea
tgttcttggttttgaatatggttattcgcaagctgatcccaaaacactactgatatgggaagctcaatttggtgattttgctaatggtgctcaagttatgattgatcaatttataagt

SEQ ID NO: 216930 - DNA, 460 bp, Unknown
  Bacterial polypeptide expressing nucleotide sequence isolated from the Sargasso Sea
agacggttcaagttttcatcgcatattaggggatgatgctgagcggggattatctgatacacagctggttgacgatcaaaagataagaagggtagttctttgctctggaaaagtctactatgaccttttggaagaaagagacaagcgaaaaattgatgacgtttatatattaagaatagaacagttctacccctttccagcggtgactttgagtaaagaattgtcacggtttaaaaacgcagatgtgatttggtgtcaagaagaaccaaaaaaccaaggggcatggacgtatttagaacctaatattgaacggttgttgcagaaagtaaacacaaaaatcaagcggcccaaatatgctggccgacccgccgctgcatctccagccaccggattggccgcccaacataaagcgcagcagctagagcttatcgaaaatgcattgctaaaaaaggggaattag

SEQ ID NO: 216931 - DNA, 925 bp, Unknown
  Bacterial polypeptide expressing nucleotide sequence isolated from the Sargasso Sea
ttaaatgtattaaataatattcttcaaaagccttttcgagccatcatttcagagtttatgggaaatccttctaatccagaagaaactggcggttctggtgatgtaaaatatcatatgggttcatcatcagacagagagtttgatggtgccaatgtacattttactttaaatgctaacccttcacatcttgaagttgtaaacccagtcgttatagggagagtaagagccaaacaaaaccaaagaaatgataaacttagaaacaaggttttaggactgcttattcacggagacgctgcatttgctggtcaaggaatacttgcagaaacttttgattttgcagaattaagaagttataaaactggtggaacacttcatttgattattaataatcaaattggatttactacttcgccagcctattcaagatcatcaccttattgtacagatgttgcaaaaattgtgatggcaccaatctttcatgtaaatgcagatgatccagaatctgttgttcatgtttcaagaattgcaactgaattccgtcaaaagtttgctgcagatgctgttatagatattattggatatagaagatatggtcataatgaaggggatgaaccatcatttacccagcctattatgtacaggaaaatcgctgatcatccttttgtaactaaaatatatgcagataagctaattaaagaaaaaaagattactgaagaacaggcaaaaagagtttacgataataggaaccaatttttagaagaagaatttcaagctggaagtaattatttacctaataaggctgattggcttgaaggcaagtggactggtctaaagaaagcacctgggttagaagaaagacgtggaattacaggcgttactattgacaagataaaaaaaattggagagatcctgacttccgtcccaa

SEQ ID NO: 216932 - DNA, 946 bp, Unknown
  Bacterial polypeptide expressing nucleotide sequence isolated from the Sargasso Sea
tccaaatcctagagatatatacgcatctaaacttaaggatcaaggaataataaatgatgatcatgtttctaaaattgaattagaatatttttcaaaactagaagctgagttaactgattctaagaaaaaacaaaaaacaaacattacaccattcatgcaagaagtatgggaagggtttacaagagttgatgagaaaaaaatgctcgaagattataaaacaagttcggtaaaaaaagatatactcaatgttgcaagatctattgtttcattaccgaacaaaccatttttgagaaagattattaagctatttgattctagagagaagttaatatttgaaaatggaaaggttgattgggctatggctgaactactcgcatatggaactttattaaatgaaggttttaatgtaagaatttcgggacaggatgtcgaaagaggaaccttttctcacagacatgcagttttaaaatctgaggattcagaggaagaatatctccctctaaataatgttgattcaattaacaaaggattatttagaatatataactctcctttatctgaatatggtgttttaggatttgattatggttatgcgcttgctagtcctaattgcttaacgatttgggaagctcaatttggagatttttcaaatggagctcaaataatcattgatcagtatatttcttctgctgaagataaatggaaattgcaaaatggtatagtattatatctacctcatggttatgaagggcagggagctgaacactcttctgcaaggatggaacgctatttgcaattatgtgcaaaggacaatatgtatgcagcaaattgtactactccatcaaatctttttcacctactaagaagggcaatgctaactaaatttagaaaacctttattttatttactccaaaaagtcttcttcgtcatcctaagttatctctaa

SEQ ID NO: 216933 - DNA, 847 bp, Unknown
  Bacterial polypeptide expressing nucleotide sequence isolated from the Sargasso Sea
tatgcagcaagaatagcgactgattttagattaaaatttaatagagatgtagtaatagatttaatttgttatagaaggtttggtcataatgaaggagatgaaccttcttttactcaaccgctaatgtataaaaaaatacgctctcatccatccccagtaaatgtttatggtgaaaagttaattaatcaagactcaattacaaaagagttcttagataattcaattaagaaatttaaagaattattaaatgaacagtttaaaaatgcaaaaaattataaaccaaaaatagaatggttcgagggaagttggtctagatataaaccagaaagaggaaaagacaaaagaggtatcactggatcagatactaaaaagttgaaggaaatttctgagaggattaatgttattcctgagcaattaaatgttcataaaacaattcaaaaaattttagataatagaaaaatttcagttttaaatggtaaagggatagactggtcaactgcagaagcactagcttttggatctctactagaggaaggttacccagtgagactagttggtcaagattctggtagaggcacatttagccaaagacattctgttttaagaaatcaattagacaattcaagatatattcctttaaataatatttcaaaaaaacaaaaaaattttgaagtagtagatagttttttatcagaattagcggttttgggttttgaatatggttatagccttgttgaacctaatacacttactgtttgggaggctcaatttggagattttgcaaatggtgctcaagtagtaattgatcaatttgttgcatctggagaaagaaaatggtcaagggcat

SEQ ID NO: 216934 - DNA, 409 bp, Unknown
  Bacterial polypeptide expressing nucleotide sequence isolated from the Sargasso Sea
gaagttgtattggatgattcaagccaatctgaatcctctattattaaaaaaataatcttgtgcagtggaaaagtgtactatgatctaagcgctgaaaaagaaaaacgaaaacttttggatgctgcaattatccgcatagaacaattatatccgttcccgcacgaagttctggaggcgactcttgcgaaatatcagaatgtgacttcaatcacttggtgtcaagaggagcctatgaatcaaggcgcctggtactccactcaacataacattcgaagagcgatgcaagataattttcccactttagagcttcgatatgccggaagggatgcatcagccgcagccgctgccggttatccagcattacatcaaagccaactagaaaaattcatcaatgaggcactaagctaag

SEQ ID NO: 216935 - DNA, 1017 bp, Unknown
  Bacterial polypeptide expressing nucleotide sequence isolated from the Sargasso Sea
tagatcgtcaccttacccaaccgacatagcattaatggtcgaggcccctatatttcttgtaaacggagatgatccagaggctgttgttcatgcagctaaagtagcaacagaatatcggcaaaaatttcaaaaagatgttgttttagatatcatttgttaccgtcgatttgggcataatgaaggggatgaacctatgttcacaaaccctttaatgtataaacacatcaaaaaacagaaaacttcactttcaatatatactgaaagactagtcaacgatggactaatccctgaaggtgaaatcgaagatatgaaagcgtcttttcaggcaaaaatgaacgacgaatttgaagctggtcgggattataaaccaaataaggctgactggctcgatggacgatggtcgcatttagatagaaataaagaagattatcaaagggggaaaacagcaattagcgaggaaactttcttcgatattggtaaagctttatctcaaccaccaaaagattatgaattgcacaagactgttgccaggcttttggctactaaagaaaaaatgttcgacagcggcaagggttttgattgggcaaccgctgaagctcttgcatttggatctcttttgacagaaggatttcccgttcgattatcaggacaggatagcacacgcggtactttcagccaaaggcattccggtctaatcaatcagtcgactgaagagcgttattatccactcaataatataaggaagggtcaagccaaatatgaagtgatagattctatgttatctgaatatgccgttcttgggtttgaatacgggtattctttggctgaacctaatgcactagttttatgggaggcacaatttggtgatttcgctaacggtgctcagattatgtttgatcagtttattagttctggcgaaagcaaatggctcagaatgtccggatttgacaatgtactacctcatggatttgaagggcaaggtccagagcacagctcagcaagattagaacggttttt

SEQ ID NO: 216936 - DNA, 793 bp, Unknown
  Bacterial polypeptide expressing nucleotide sequence isolated from the Sargasso Sea
acacccaaatccaagagatatatatgcaggtaaattaattgaacagggaataattaataaggcctatatctctaaaattgaatcagattattttgaatctttggaagaggagctagatgactcaaagaaaaaggataaaacaaaaattacgccttttatgcaagaagtctgggaagggtttaagcgtgttgatgaaaataaaatgctaaaagaatatgaaactaattctaatgaagaagctattttaaacgtaggtagatctatcacaaaacttcctaataaacaatttttaagaaaagtaattaagctatttaatgcaagagaaaaaatgctttttgaatcaaaaaaagttgactgggcattagctgaacaactagcctatggtacattaatgcttgaaggattcaatgttagaatatctggtcaagatgtagaaaggggtacattctctcaccgtcatgcagttttaaagtctgaagattttgaagaggaatacttacctcttaacagtattgattctaataaaaaaggagtattaaaaatttacaactctcttctttcagaatatggtgtcctaggttttgattatgggtatgcattagcaagccctaacagtttgacaatttgggaagctcaatttggtgatttttccaatggagctcaaataataattgaccagtacatatcatctgctgaggataaatggaaactacaaaacggtatcgtattatacctccctcatggatatgaaggacaaggagcagagcactcttcagctagaatggaaagatat

SEQ ID NO: 216937 - DNA, 862 bp, Unknown
  Bacterial polypeptide expressing nucleotide sequence isolated from the Sargasso Sea
gcaacacttcttgatgagggttacggtgttcgaatatctggacaagatgttggaagaggaacatttagtcatagacatggtgttctatacgatcaagaaaacgaaaatcgttttgttccattaagacactttcaaaacaagcaaggttatttcgaaattatagatagttttttatctgagtttggtgttcttggttttgaatatggatattctcaagttgatcctaagacacttgttatatgggaagcgcagtttggtgattttgcaaatggcgcacaaattatgattgatcaattcattagttctggagaaagaaaatggttgagaatgtctggtttaacgatgcttcttccccacggacatgagggccaaggtcctgaacatacaagtggaagattagaaagatttttacagatgtgtgcggaagataatatgcaaattgttaattgcacaagtcctgctaattattttcatgttttaagaaggcaactacatagaaactttaggaaacctctaattatatttacaccaaaatctacacttagacataaatctaatgtttctaatattgaggattatattaatggatcaactttccatagaattcttaatgataaattatctgtaaaagaaaaaaggaaaaataaaagattaatcatttgctctggtaaaatatattttgaacttgcagatcacatagcaaaaaataaaattaaaaatctctccataataagattggagcagatttatccatttccttatgaaaactttagagatgaattaaaacattatactaatgctgaaattatctgggcacaagaagagccaaaaaatatgggtgcctggggttttgtgaaaggta

SEQ ID NO: 216938 - DNA, 703 bp, Unknown
  Bacterial polypeptide expressing nucleotide sequence isolated from the Sargasso Sea
ttagttatgttgtacccccatggatatgaaggtcaaggtccagaacattcctcagcaagattagaaagatttttacaattatgttcaaatgataatatgcaagtaatgaattgcacaactccagcaaactatttccatgctttaagaagacaaatgcacagagactttagaaaaccattaataattatgacgcccaaatctctattaagacataaacaatgtgtctctgatattaatgattttagcaaagaaaattcatttcatagggttttatgggatcacgcaatagatccaaaggctaaaggttttataaaattaaaaaaaccaaaaaaaataaagaaagtagttctttgttcaggaaaaatttattttgatctaatagaagctagagaaaaattaaaaaaagatgatattattttctttagaatagaacaattatatccttttccagcaaaagctctagctaaagaacttaggccttattcaaaaaattcaaagttttattggtgccaagaagaacctaaaaatatgggagcatggttttcagtaagagattatatccaatggacattagataatataaaggctaataataataaaatttcttatattggaagaagtcctgatgcgtcaccagcaacaggatatgcaaaatggcatatttctcaacagaaagaaattataaagaaagtttttgaataaa

SEQ ID NO: 216939 - DNA, 587 bp, Unknown
  Bacterial polypeptide expressing nucleotide sequence isolated from the Sargasso Sea
tactacaccagcaaattattttcatgctcttagaagacaaatgcatagagattttagaaaaccacttataataatgacacccaaatccttgttgagacataaaaattgtgtatctaaacttgatgaatttatctcaaaaaaaacattccaccgtatcttaaatgatgacgcatacgaagaaagaagcggacttattaaattaaaagactacactgaaataaagaaagtagttatgtgttcaggaaaaatatattatgatttaatccaagctagagagacagctaaaaatgacgaagttgtttttattcgattagaacaattatatccttttcctgcaaaaacattagctaacttactcaaaaattatgagaatgctgaatttatatggtgtcaagaggagcctaaaaatatgggagcgtggaatacagtcagaaattatatagatagaaccttagaaataatatattttactaaggataaggtaaaatttataggaagaaaagcttcatcctcaactgcaactggaaacttaaataaacatcttgcacaacaaaaagaaatattagaaaaggtattagggaattaaa

SEQ ID NO: 216940 - DNA, 814 bp, Unknown
  Bacterial polypeptide expressing nucleotide sequence isolated from the Sargasso Sea
aatattaaaaagaacttattgtggtaattttgcattacattatatgcacatctctgatccagaacaggcatcatggctaaaggaacggatagaaggtttgggaaaagagattcaatttacccctcaaggtaaaagagcgattttgaacaaactgatcgaagcagaaggtttcgagaagtttctccatgtaaaatatatgggaacaaagaggttcggcctagatggtggggaagcattaatacctgctatggaacagattatcaaaaggggaggtaatctgggggtaaaggaaataattataggtatgccccacagaggaaggctttccgttctcgcaaatgtcatgggtaaacccttccgagcaatttttaatgaatttcaaggtggcagttataagccagaagatgtagatgggtcaggagacgtaaaataccatcttggtgcttcgtcggatcgggaattcgataataatagtgttcacttatcattaaccgcaaatccatctcatctcgaagcagtaaatccagtagttttaggcaaagtcagagctaagcaacagcaattcaaggatgacgagagaattcaagttttgcccattttattgcacggagatgctgcatttgctggtcaagggattatagcagagtgttttggtttatcaggtttaaaagggcacaaaacaggcggcaccattcatattgttataaataatcaaataggttttacaacatcccctttaaactctagatcatctccgtacccaaccgatatcgcactaatggttgaagcaccaatatttcatgttaatggtgac

SEQ ID NO: 216941 - DNA, 877 bp, Unknown
  Bacterial polypeptide expressing nucleotide sequence isolated from the Sargasso Sea
gagggatttgagaaatttttgcatactaaatatgtgggatcaaaaagatttggtcttgatggtggtgaaagtttgatacctgcgttagagcaaataattaaaattggcggtcagtcaaatattaaagaagtcaaaattggaatgtctcacagaggaagactaaatgttttagctaacgttttacaaaaatcttataaaagaatatttaatgaatttgctggtgaattaaataataccgatgaagacagtgctggcgatgtgaaatatcatttgggagcttcatctgatagagaatttgatgggaattctgttcatgtaagtctaacagataatccttcacatttggaagcagttaatccagtagtattgggtcagactagagccaaacaattttttcataaagatactgagagaaacaaagtaattccgattttaattcatggtgatgctgcttttgcaggacaaggtgttgttgctgaatgttttgcaatgtcgggtttacctggacacaatacaggtggaactattcatataatagttaataatcaaataggatttacaacaagtccaaggtttgcaagatcttcacctcacccatcagatattgcaaaaatggttgatgcacctatcatccatgttaatggagatgacccagaagctgttgtttatggctcaagaattgcaactgaatttagattaaagtttaatagagatgtagtcatcgacttagtttgttacagacgatttggacataatgagggagatgagccatcattcactcaaccattgatgtataaaaaaattagatcacatcaatcaacagcaaatatatatggatataagcttattaatgaaaatttaatatctaaagaaggtt

SEQ ID NO: 216942 - DNA, 849 bp, Unknown
  Bacterial polypeptide expressing nucleotide sequence isolated from the Sargasso Sea
tggagaacgtatcggacttggtaaagcaacattgaaggagattcatgaatttttagaacaaacatattgtggttccattggagttgagtacaaattcatgagaacaattgagatcattcaatggcttgagcaaaaaatggaatcttgcagaaacactccaaaattttcccgtaaggagaaaattgatcttttaagaaaaactaatgaggcggtggcatttgagaattttctacatactaaatttgttggtcaaaaaagattttcacttgaaggaggagaatctatcattcctgcactcgacactgtagtagagtttggtgctgaactcggcgtcgaagaatttgttattggtatggcgcataggggtcggcttaatgtgttggcaaatattttaggcaaaacctacaacgacatttttgctgaatttgaaggtaaaggattcggagaagatgtatttgcaggagacgttaaataccacatgggttattcgagtgataaaaaagccaggaacggaaaaatagttcacttaagccttacacccaacccttctcatcttgaagctgtaaatcctgtagtagaaggaatttctcgggcaaagattgatcagtatcacgaaggaaatgcaaaaaaacttgttccgattctaatacatggagatcattccatggcaggacagggcattgtatatgaagttttgcagatgtcaaaacttcccggctacgaaacgggggggacagtacacctcgtaattaacaatcaggtaggattcactgctgattttattgaagggcgttcaagtacctattgcactgatgtaggaaaaacaactctttcaccagttttccatgt

SEQ ID NO: 216943 - DNA, 585 bp, Unknown
  Bacterial polypeptide expressing nucleotide sequence isolated from the Sargasso Sea
cacctgcaaattattttcatgctctaagaagacaaatgcatagagattttagaaagcccttaattatgatgacgcccaaatctttacttagaaataaatattgcgtttcacaaattgatgattttagtaaaaaaaactcttttcatagagttttatgggatcatgcaatagatccaaaaacaaaaggattcataaaattaaaaaaaaataatggaattaaaaaagtaattttatgctcaggaaaaatatatttcgatcttttatcagctagggaaaaactaaaaaaagatgatgttattttatttagaattgaacagctttatccttttccagcaaaaagcttagtaaaagaaattaaaccctttgcacaaaatgctaaattttattggtgccaagaagagccaaaaaatatgggcgcatggttgttggtgagagattatatccaatggacattagattatataaaagctaaaaatagagaaatttcttatattgggagaaatcctgatgcaacgccagctacagggtatgcaaaaagacatttagctcaacaaaaagaaataattgatatagtttttaattaaa

SEQ ID NO: 216944 - DNA, 856 bp, Unknown
  Bacterial polypeptide expressing nucleotide sequence isolated from the Sargasso Sea
agctgaatataggaatctttttaaagaagatgttgttgtagatatgttttgttatcgacgttctggacacaatgaagcagatgaaccatcttttactcaaccattgatgtatcaagcaataaaaaatcaacctacaacattaaagatttatgaaaaaaaattaatagctgaaaaaattattaacaaagatgagtcaaataaaatacaaagtgattttaaaaaatttcttgatgaagaatttgagtctgcaaaatcttataagccaaataaagcagattggttagatggaacttggaagggttttaaaactgcttcattagattctagaaaaggaaacacttctgtttctgaaaaaaatataatagagattggaaaaaaaattcataatatccccaatgattttaatgttcacaaaaaaattagaaaaatttacaaagatagagagcagtcaataatcagtggtacaaaaattgattgggctacagctgagtcattggcctttgccactcttttaaaagaagggtatggggtacgcttatctggtcaagatagtggtagaggaacatttagccaacggcatggagttttatatgatcaagaaaacgaaaatcgatttgttccattgcgccatttttctaaagaccaaggactatttgaaatagtagatagttttttatcagaatttggagttctaggttttgaatatggattttctcaagcagatcccaaaactttagttttgtgggaagcacaatttggtgattttgcaaatggagctcaaataataattgatcaatttataaccacaggtgaaagaaagtggcttcgtatgtctggtctgacaattctattacct

SEQ ID NO: 216945 - DNA, 951 bp, Unknown
  Bacterial polypeptide expressing nucleotide sequence isolated from the Sargasso Sea
tgttggtcaaaaaagattttcacttgaaggaggagaatcaatcattcctgtactcgacactgtagtagagtttggtgctgaactcggcgtcgaagaatttgttattggtatggcgcatcggggtcggcttaatgtgctggcaaatattttaggcaaaacttacaacgacatttttgctgaatttgaaggtaaaggattcggagaagatgtatttgcaggagacgttaaataccacatgggttattcaagtgataaaaaaactaggaacggaaaaatagtgcacttaagccttacacccaacccttcccacctagaggctgtaaatcctgtggtggagggaatttctcgggcaaagattgatcagtatcacgaaggaaatgcaaaaaaacttgttccgattctaatacatggagaccattccatggcaggacagggcattgtttatgaagttttgcagatgtcaaaacttcctggctacggaactggaggtacagtacacctcgtaattaacaatcaggtaggattcactgctgattttatcgaagggcgttcaagtacctattgcactgatgtaggaaaaacaactctttcaccagtttttcatgttaacgctgatgatattgaagccgtggtttatgttacaaaactcgcactagagttccgtcaggaatttcatagagacgtgtttgtagatattttaggatataggcgtcagggacacaatgaatcagatgagccaagatttactcagcctgatttatatagaaggatagccaagcatcctaatgtcagggaagtttacagcagtaaacttgtagaatcagggagcctcaaggaagaagaaatactgcaaatagaatccgaattccagcagtttctcaatgatagacttgaagaggcaaaacagcaggaaactgcttctgttacttcatttcttgaaggagtttggtc

SEQ ID NO: 216946 - DNA, 931 bp, Unknown
  Bacterial polypeptide expressing nucleotide sequence isolated from the Sargasso Sea
gaggttaaaattggtatgtctcatagaggaagactaaatgttttggcaaatgttcttcaaaaatcttataaaagaatattcaatgaatttactggagatatgcaggataattcagaagatggtgcaggtgatgtaaaatatcatttgggtgcatcttctgatagagagtttgatggtaattcagttcatgttagcttaacagataatccatcacatttagaggcagtgaatccagttgttttaggacaaacaagagcaaaacagttttttcataaagatacacaaagaaataaagtgatcccaattttaattcatggagatgcagcttttgctggccaaggaattgtagctgaatgttttgctatgtctggtttgccaggacataatacaggtggaacaattcatataattattaataaccaaattggttttacaactagcccaagatttgctcggtcatctccgtacccgtcagatgttggtaaaatggttgatgctccaattattcatgttaatggtgatgatcctgaggcagtagtttatgcatcaagaatagcaacagaatttagattaaagtttaatagagatgttgttattgatttaatttgttacagaagatttggacataatgagggtgatgaaccttcatttacacaacctctaatgtataaaaaaataaaatctcatccatcatcaattaatatttatggagaaaaattagttaaagaaggacttttctccgatgaatctttaaagcaaaaattaaaaaattttaaagatttattagatgatcaatttaaaaatgcaaaaaattataaacctaaaattgaatggtttgaaggtacttggtctaggtataaacctgagaaaggaaaggacaaaagaggagcaactggatcagacttaaatgttttgaaaaaaaatatctgaa

SEQ ID NO: 216947 - DNA, 940 bp, Unknown
  Bacterial polypeptide expressing nucleotide sequence isolated from the Sargasso Sea
atatggatttaagaaggaggaatataataataaaatttttttagatggagtcattaacagacaatattccagcatttctgaaatcttaaaatttttaagagataaatattgtggacccttaggttttgaatatatgcatatctcaaatccaactgaaagaaaatggtttagagacagagtcgaaaaagcagatgattttaaatttacgcagaatggaaaagaggctattcttaaaaaattaattcaagctgaaggttttgaaaaatttttacacacaaaatacgttggcacaaaaagatttggtttagatggaggcgaaagtttaatccccgcccttgagcaaataattaaaattggtggtcaatcaaaaataaaagaagttaaaataggaatgtcccatagaggaagattgaacgttttagccaatgtcttacaaaaatcttataaaagaattttcaatgaatttgctggagagattagttcaaaatcagaggacgacacaggagatgtcaaatatcatttaggggcttcatcaaatagagaatttgatggaaatcaagtgcatgtaagtttaactgataatccatctcatcttgaagcagtaaatcctgtagttttaggacaaacaagagctaaacaatatttccataaggataaagagagaaataaagttataccaattttaattcatggagatgcggcctttgcaggccaaggagttgttgcagaatgttttgcaatgtctggtcttccaggacataatacaggtggaactatccatataatagtgaataaccaaataggatttactacaagcccaagatttgcaagatcatcaccttacccttctgatattgctaaaatggttgaagcaccaatcatacatgttaacggcgatgatcctggaagcagttgtttatgccgcaagaatagcaactga

SEQ ID NO: 216948 - DNA, 903 bp, Unknown
  Bacterial polypeptide expressing nucleotide sequence isolated from the Sargasso Sea
caaaaatggataaaaaatcctaaatctgttcctcaaatttggtcagattggttggatgatataggtaatcaaataattgatgaagtgccgagttggacaactaataaaacgaaagtcataggtgcagttgatgtcgaagaatctgttagagctgtggctaagggtattgctggaaagggcgatatttctgcaaatgatttaagatcagctactacagattctctaagagcaatcatgcttataagagcatatagaataagaggacatcttttagcgaatttagatcctttaggtcttcatgaagaagaagttcacccagagttagatccttctaattatgggttcaaggaaaatgattgggatagacccatatttattgacaatgttttaggtatggaaagtggaactttacggcaaataatggagatcttaaaagaaacttattgtggttctattggggtggaatttatgcatgtgcaagatccggctcaaaaggcatggattcaagaaaggatagaatcaataagaaataccactcaatttacaaatatggggaaaaaagcaatttatgaaagattagttggtgcagagacttttgaacaatttcttcacaaaaagtatactggaaccaagcgttttggtctagatggtgcagagtctgttgttccagctttagagcaaattctcaaaagaggtagccaattaggccttcgagaagtagtaattggtatggctcatagaggtagattgaatgtattatataacgttcttaataaaccatttagagcaataatttcagagttttcaggaaaccagtctaaccctgaagaagctggaggatcaggtgatgtaaaatatcatatgggagcttcagctgatagagagtttgagataagaaagtac

SEQ ID NO: 216949 - DNA, 946 bp, Unknown
  Bacterial polypeptide expressing nucleotide sequence isolated from the Sargasso Sea
cgtctggaaactctcaatatgtcgagtacccgaggcttttcgactggtggctcaattcacgtgattgtcaacaaccagattggattcaccactagcaatccgctggacgcccgatcgacactgtattgcactgaagtcgccaaaatggtgcaagcgcctattcttcacgttaacggtgatgatcctgatgcggtgctgtttgcagttcgactagcctacgactttcgcacgacttttgataaagatgtggtgatcgatctgattggctaccggcgtctcggtcacaatgaagccgacgaacctagcgtaacgcagcccacgatgtatgcccgcatcgataaattggctaccgtgagaaaacaatatgccgatcgcctaatggcagatggcatcattgacggcaccaaaagtgaacaaatgatgacggattaccgtgctgcactagatgcggggaaaatcgtggccacccatgtcagggcaggcaataatgcattagacggtgttgattggagtccatatctcgacagccactggagcgacgccagcgacacccgcgtttccagtgcacgtattagccatctgaatgcacaactgcaaaaaacaccccccgggttcagcattcaccctcggatcgctaagttgtttcacgaccgggatagcatggcaaccggcacacagcccatcgattgggggtttgccgagaccattgcctatgccagcctaattgaagacggatactctgttcgcctgtcgggacaggattccggacgtggcaccttttctcatcggcacgcggtcatcaaaaatgttaacgcacgcgagtcattggttccgttgcgctccattggcgctgatccaaaccagtttcttgtcatcaactccctgttgtcggaagaggcagtgctagcgtttgaatatggctatgccaccactgaaccccgcgcac

SEQ ID NO: 216950 - DNA, 858 bp, Unknown
  Bacterial polypeptide expressing nucleotide sequence isolated from the Sargasso Sea
aaattaaccgtgacgtgttatcgacatgtttgttacagacgttttggacatacgagggaagatgagccttcatttactcaaccaattatgtataaaaaaattaattctcacccgactacattaagtatatacggaaaaaaattatcttccgaaggattaacttcagatgaaaaattgcaaaacgaaaaaatagagttcaaaaaatatttagaaaaagaatttgatatatctaaaagctacaaatcagaattaaaatggtttgacggcgcatggtcaagatttaaacctggactaggtaaagataaacgtggtgtgagcggagttgatagggtaaaactaaaaagtataggtgaaaaaatatttaacataccagccaattttcatgcccataaaacactaaaaaaggtgtttgaactaagaaatcaaatgttatcaaaaggaaaactcgactggtcctcggcagaaagtttagcaataggtacactattaactgaaggattttcagtaagattatctggtcaagactcgggtagaggtaccttcagtcaaagacacgcaattttgcgaaaccaagataatcatgacagatttattccagtaaataatattgaaaagggtcaaatgaaatttgaagttatagatagtttactctctgaacttgcagttttaggatttgagtttggctattcattgtctgaaccagaaacattggtgctttgggaagctcaatttggtgattttgctaacgggggtcaggtaattattgatcaatttattacatcatcagagtcaaaatggggaagagcaagcggactcgtaatgttactaccccatggatatgaagggcaaggtcctgaa

SEQ ID NO: 216951 - DNA, 1022 bp, Unknown
  Bacterial polypeptide expressing nucleotide sequence isolated from the Sargasso Sea
actaaaatagacaccgaggagtccgtaaaagctatagccttaataagagcatacagaataagaggacatttgatagcaaaattagatcctttagaaatgatggaaagaaaataccttgaagatttacacccaagcgatcacggctttaaaaaagaagattataataagaaaatttatgtaggtgcttacatgaaaggtggtttctccacaataaatgagatccttacattttttaggaaaatatattgttcaactattggtgttgagtatatgcatatatctgatccagctgaaaagacatggttcagagaaagaatggaaaaaaaagaaaatcatttaaaatttacagaaaatggaaaaaaagcaattttaaataaacttatccaagcagagggctttgaaaaatttttagctgtaaaatttgttggaactaaaagatttggacttgacgggggagaagctctaatacccgctttggaacaaataataaaaagagggggacatcttggttttaaagaggtaaaaataggtcaaccccatagaggtagactaaatattctagcaaatgtgttacaaaaatcttacaaaagaatgtttaacgagtttacaggagagtatgcttctttcagttctgattctactggagatgtaaaataccatttaggggcttcatctaatagagaatttgatggtaacctagttcatgtgtccttgaccgataatccttcacatcttgaagctgtaaatcctgttgtactcggacaagtaagagctaaacagttttttcacaaagaccaaaaaagaaaacaagtagtaccagtattaattcatggtgatgcttcatttgctggacaaggtgttgttgcggagtgtttcgctatgtcaggtttgcctggtcacaatacaggaggcacaatacacataatagtaaataatcaaataggatttactaccagccctaagtttgctcgttccctcacgtatccatcagatttagcaaaaatggttgacgcgcctatctt

SEQ ID NO: 216952 - DNA, 805 bp, Unknown
  Bacterial polypeptide expressing nucleotide sequence isolated from the Sargasso Sea
agcaaaagaactagttttaggcatgtcccacagaggaaggttaaatgttcttattaatgtaatgggaaagaaacctagcatactatttacagaatttgatgaaaattttgaagaagacgatgcccacaccggagacgttaaatatcatttaggtttttcatcaaatattctaactagcggtggccaagttcatgtaactctagggtccaatccttcacatttggaagctgttaatccagttgtattaggatctgttcgtgctagacaagatagaagagaagataaagaaagcaatgaagttgttccaatattaatgcatggtgatgcatctttttctgcacaaggtgttgtaatggagattcttcagctttcacaaactagagcttatggcgtgggtggatctatacatatagttgtaaacaatcaaataggttttacaacaagcgtaaaagaagatgcaagatccacagaatattgtactgatgtagccaaaatgattaatgcgccaataattcatgtaaatggcgatgatccagaagcatgtgttatggcagctaaattagctgttgaatttagaaacactttcaagaaagacattattgttgattttgtttgttacagaagaagagggcacaacgaaacagatgaaccatttgcaacacagccagtaatgtataagcaaattagatcaaaagaaacggtaactgaaatttattcaaataaattaatagaaaaaagttcattagataagtctaaatatgaaaaatttaaaaaagattatagaaaaaacatgaaaaaggagaga

SEQ ID NO: 216953 - DNA, 697 bp, Unknown
  Bacterial polypeptide expressing nucleotide sequence isolated from the Sargasso Sea
aaggaaatcgtgatcggcatggctcaccgtggtcgcctgaacgtgttggtcaacaccttcggcaagaacccgcgtgagctgttcgacgagttcgaaggcaagaagaaggtcgagttgggttccggtgacgttaaataccaccagggcttctcgtccaacgtgatgaccaccggcggtgaagttcacctggccatggcattcaacccctcccacctggaaatcgtttcgccagtggtcgagggttcggtgcgtgctcgccaggatcgtcgtaacgacgccaccggtgagaaagtgctgccgatttccatccacggtgacgcggcatttgccggtcaaggcgtggtcctggaaacgttccagatgtcgcagactcgcggcttcaagaccggcggtaccgttcacatcgtcatcaacaaccaggtgggcttcaccatcagcaacccgttggatgcgcgctccaccgagtacgccaccgacgttgccaagatgatccaggcgccgatcctccatgtgaatggcgatgatccggaagccgtgctgttcgtgacccaactggctgtcgactaccgcatgcagttcaagcgtgacgtggtcatcgacctggtttgctaccgccgtcgcggtcacaacgaagcggacgagccaagcggcacccagccgttgatgtaccagcagatcaccaagcagcgcaccaccc

SEQ ID NO: 216954 - DNA, 853 bp, Unknown
  Bacterial polypeptide expressing nucleotide sequence isolated from the Sargasso Sea
ttagatccactccaattagctcagaaggatatccatattgacttgatttatgctgaaaaattattggaaggcataagcctagaagagcgcgttggaaatgattatcctaaaggttcaaaaaataaaatttttttaaaagagttaaaagaatctattacaaaaaaatatagcggtaatgtaggcctcgaattttcacatatatctaatgaaagtgaaagaaactggataattgatagatttgagaataatgattacaaaaaaataaatttaaatgaaaaaatctttattttaaaaagattaatttctgcaagaggtttggcaaaatatctttctgcaaaataccctggcatgaaaagatttggtatagatggctgtgaatctctaatacctctcattgataccttaattgagcagacatcaaaaaatagtgctgaacaaatttgttttggaatggctcatagagggagattaaatttactgataaatgttttaggtaaaaagccaaaagatttatttgccgaatttgaagaaaactatgacctaaaaggttctagcactggtgatgttaaatatcatctaggattctcatcaaatatacatacaactaatggtgacgttcatgtctcactcattaataatccatcacatttagaaataatagaccccgttgtaattgggtctgttcgagcaaggcaagatagattaaatgatagagaaagaaataaagttgtaccaatactaattcatggtgatgcctcatttagtggacagggagttgtcatggaaacgcttcaaatgtctcaaactagaggatatggagttggaggcactatccatgtcatcataaataatc

SEQ ID NO: 216955 - DNA, 888 bp, Unknown
  Bacterial polypeptide expressing nucleotide sequence isolated from the Sargasso Sea
accgccgacctggccatggtcaacggacaaggcactctgcgcgaaatcctgcaggcgctgcaagaaacctattgccgcaccatcggcgccgagtacatgcacatcgtcgattccgagcagcgcagctggttcgttcagcgcctggaaagcgtgcgtggccgcccggacttctcgccggagatcaagagccatctgctcgagcgcctgactgccgccgaaggcctggaaaagtacctgggtaccaagtatccgggcaccaagcgttttggtctcgaaggtggcgagagcctgattccgctgcttgacgagatcatccagcgttctggctcttatggcactaaggaaatcgtaatcggcatggcccaccgtggccgcctgaacgtgctggtcaacacctttggcaagaatccgcgcgaccttttcgacgagttcgaaggcaagaaggtcgagggcctgagttcaggtgacgtgaaatatcaccagggcttctcctccaacgtgatgaccccgggtggcgaaattcacctggccatggcgttcaacccgtcccacctcgaaatcgtttccccggtggtcgagggttcggtgcgggctcgtcaggatcgccgttgtgatccggtcggcgacaaggtgcttccggtaaccatccacggcgatgctgctgtcgccggtcaaggcgtggtgatggaaaccttccagatgtcgcagacccgtgcttatcgcacgggtggcaccattcgcatcgtggtcaacaaccaggtcggcttcaccaccaacaagcaggaagatgctcgttccaccgagtacacaaccgatgtggcgaagatgatccaggcgccgatcttcaaaggaacgcagacgatcccgaggcggtgctgttcgtcaccc

SEQ ID NO: 216956 - DNA, 929 bp, Unknown
  Bacterial polypeptide expressing nucleotide sequence isolated from the Sargasso Sea
ccgttcatctccacatccttctgatgtagcaaaaatggtagattcaccaattatacacgctaacggagatgatccagaatcagttgtatatgcagctagaatagctgctgagttcagacttaaatttaatagagacgtagtagttgatttagtttgttacagaagatttggtcacaacgagggagatgaaccttcatttactcaaccattaatgtataaaaaaattaaatctcatctatccactgtaaaaatatatggaaataaattagttaacgaaaaaactatttcatctgaagatttaaataatcaaattaaaaaatttaaagatcttcttgatgatcaatataaaaatgcaaaaaattataatcccaaaattgagtggtttgaaggaacatggtcaagatataagccaaggagaggacaagataaaagaggggacacaggctattcaactacaaaacttttagaaatttcagataagatacactccctttcagccgagctaaatatccacaagactatagtaaaaatttttgaagctagaaaaaattctatgaataaaggaaatggaattgactggtctactgccgaggcccttgcatttggttcattattagaagaaggatacccagtaagacttgttggacaagattctgggagaggaacttttagtcagagacattcagtattaagaaatcaaattgataattcaagatatattccattaaataatatttcaggaaagcaaaagaattttgaaatagttgatagctttttatctgaattagcagttttaggttttgaatatggttatagtttagttgaacctaatacattaactatttgggaagctcaatttggtgattttgcaaatggagcccaagttataattgaccaatttatttcttcaggagaaagaaaatggtaag

SEQ ID NO: 216957 - DNA, 838 bp, Unknown
  Bacterial polypeptide expressing nucleotide sequence isolated from the Sargasso Sea
ttgaacggtgtaattaataaaaaatatgcaaatattagagaaatactaaaatttttaaaaaaaacatattgtggaaatattggttatgagtttatgcatgtttcaaatccagttgaaagaaaatggtttagagacagaatagagcaagatcaaaatgctttaaactttaccaagaacggtaaagaggcaatactaaataaacttgtacaagcagagggttttgaaaaatttttagctactaaatatgttggtacaaaaagatttggtcttgatggaggtgaaagtttaataccagctcttgagcaaataattaaaattggtgggcaaaatcagattaaagaagttaaaattggaatgtctcatagaggtagacttaatgttttggcaaatgtgttacaaaaatcatataaaagaatatttaatgaatttgcaggggaagtaagctcagactctgaggaaagtgcaggagatgtaaaataccatcttggtgcatcttcagataggcagtttgatggaaactctgttcacgtaagtttaacagataatccctctcacctagaagctgttaatcctgtagttttaggacaaacaagagcaaagcaattttttcataaagataaagaaagaaataaagttatacctattcttattcatggagatgctgcttttgctggccaaggagtggtagcagaatgttttgctatgtcaggacttcctggccataatacaggcggcactattcatattatagtaaataatcaaattggttttactactagtccaagatttgccaggtcatcaccatacccatcagatgttgcaaaaatggttgaagctc

SEQ ID NO: 216958 - DNA, 894 bp, Unknown
  Bacterial polypeptide expressing nucleotide sequence isolated from the Sargasso Sea
tttaaaagaatttaaagttgttaaacttataaatgcatatagaacacgtggccatctgtttactaaaacaaaccccgttcgtgaaagaagaaaatatatacctaatctagatttggaaaactttgagctttcaaacaatgatttagaacttaaatttaatgctggtgaaattattggaattggaaatgcaagtcttgcggatattttaattcatcttgaaagaatttattgtgattctataggaattgaatatatgtatatcagaacacctgaaagaataaaatggattcaaagtaaactaaatcagaatgataatagaccaaattttagcaaggatcaaaagaaacatattttaaaaaagttagttcaagcaactaattttgagcaatttttacaaaaaaagtatgttggtcaaaaaagattttctttggagggaggtgaatctcttattccagcattggattcaatttttgagaatgctgcaataatgggggtaaaagaatttgtagttggaatggctcatagaggcagactcaataccttatcaaatatttttggcaaaccagccaaggaaatttttaatgaatttgatggcaaagattatgaagaacaaatttttgatggagatgtaaagtatcatctaggttggacatccaaaaggaagtcggattctggtattggcatatatatgaacttggcacctaatccatctcatcttgaatctgttggccctgtagttcaaggaatttcaagagctaaacaagacaagtatcataaaaaaaatccaaaaaatgtattgccagtaataatacatggagatgcagcaatagctgctcaaggtgtagtatatgaagtggttcaaatggaaagattaaaaggatataaaacatcagg

SEQ ID NO: 216959 - DNA, 485 bp, Unknown
  Bacterial polypeptide expressing nucleotide sequence isolated from the Sargasso Sea
tgataatatttctccaaaaagtttattgagaaatcctcaatgcgtttcatcaattgaaaatctaactgatggatcttttgagtatgtaattgatgatgttaattcaaattctaaattggttgagaaaattatcctgtgttctggaaaggtattttatgatctggcggccaaaaaagaggagcttaagatcaaaaatactgccatattacgcatagagcaactctatccatttccttatgacacacttgaaaaaattattcagtcctatgagaatgccaagcaatttatttggtgccaggaggagcccagcaatcagggggcttggttcagccatcgccatagattacaaatagttttagatagaattaataataccgagatacaattaatcagcagaaaagcatcatctgctccagcagttggtctaaataaattacacaatcaacaacaagaagctttggttaacgaggctttaacatcctaga

SEQ ID NO: 216960 - DNA, 940 bp, Unknown
  Bacterial polypeptide expressing nucleotide sequence isolated from the Sargasso Sea
ataggagttgatatatgcacatctccgatccgggttgaaaaagtatggttcagagaacgaatggaaaaagaaaaaaatcagttaaaatttaccgataatggaaaaaaatctattttaaataaattaatacaagcagaagggtttgaaaaatttttagcagttaaatttgtaggaacaaaaagattcggcttagatggaggcgaagctttaataccagctttagaacaattagtaaaacgtggaggccaacttggggttaaggaaattaaaattggacaaccgcacagaggaagattaaatattttggcaaatgtattgcaaaaatcttataaaagaatgtttaacgaatttgctggagagtatgcctcttacagtgccgattctactggagatgtaaaatatcatttaggtgcttcttcaaatagagaatttgatggaaacttagttcatatttctttaacggacaatccttcacatcttgaagctgtaaatccagtagtattaggacaaacaagggctaagcaattttttcataaagataaaaaaagaaaaaatgttgttccaattttaattcatggagatgcatcatttgctggtcaaggagttgttgctgaatgttttgcaatgtcaggtcttcctggccacaatactggaggcacaatacatatcattattaataatcaaataggatttactactagtcctaagtttgctcgttcatctccatatccatctgatttagcaaaaatggtcgatgcaccaattttacatgttaacggtgatgaccctgaagccgtcgttcattgtgctagaattgctatggagtttagacaaaaatttaacaaagatgttgttatagacatgatttgctatagacggtttggacataatgaaggtgacgaacctgcttttacacagcctgtgatgtataaaaaataaa

SEQ ID NO: 216961 - DNA, 1021 bp, Unknown
  Bacterial polypeptide expressing nucleotide sequence isolated from the Sargasso Sea
gaatacagacaaaaatttaatcgagatgtagttattgatatggtttgttatagaagatttggtcataacgaaggagacgaaccatcttttacacaaccaataatgtataagaaaattaaatcgcacccctccactttaactttatatggaaaaaaattatcttcagagggattaacttcaattgaaaatttacaaaatgaaaaattaaaattcaaaaattttcttgaaaaagaatttgatatatcgaaaaactataaatcagaattgaaatggtttgatggtgcttggtcaagatttaaacctgggctaggtaaagataaaaggggtgttagtggcgttgataaagtgaaactaaataaagttggaaaaaaaattttcaacattccttcaaatttttatgctcataaaactcttaaaagagtatttgaattgagaaaaaaaatgttaacaacaggtttactcgactggtcttcagctgaaagtttggctattggaactttattaactgagggcttttcagttagattatcaggacaagactcaggaagaggaacattcagccaaaggcatgcagtattacgtaaccaagaaaatcacgatagatatattccagctaacaacattaaaaaaggtcaaatgaaatttgaagtcatagatagtttgctatctgaacttgcggtcttaggttttgaatttggttattctctgtcagagcctgaaaccttagttttatgggaagctcagtttggtgattttgcaaacggaggtcaagttataatagatcaatttataacctcatctgagtctaaatggggaagagctagtggtttagttatgttgctacctcacggatatgaagggcaaggtccggaacactcttcagctagattagaaagatttcttcaactttgtgcaggtgaaaatatacaagttgtgaactgcacaacaccttctaactactttcatgttttaagaagacaaatgcatagagaatttagaaaacctttaattattagactcc

SEQ ID NO: 216962 - DNA, 514 bp, Unknown
  Bacterial polypeptide expressing nucleotide sequence isolated from the Sargasso Sea
atgacgccaaaatcactactaagacataaaaaatgtatatcaaatcttgaggattttagtaagaaaaattcttttcatagagttctttgggaccatgccttagaaaaaaatagtggacttattaaactcaaaaaaaataataaaattagaaaagtcattttatgttctggaaaaatatattttgatttaattgaagcaagagaaaatttaaagattgatgatgtaataatatttcgaatcgaacagctttacccttttcctgtaaaatctttagtaaaagaaataaaaccatatgccaaaaatgcaaaattctattggtgtcaagaagaaccaaaaaatatgggagcttggttttctgtaagagattatattcaatggactttagattatattggagctaataataataaaatttcttttattggaagaagtccagcagcctctccagctactggatatgctaaaaggcatataaaacaacagagagagattataaataaagtatataaataaa

SEQ ID NO: 216963 - DNA, 895 bp, Unknown
  Bacterial polypeptide expressing nucleotide sequence isolated from the Sargasso Sea
gaaaatggaaaaaaagcaatattaaataaaattattcaggcagaagggttcgaaaaatttctagcaaaaaaatatgttggcacaaagaggtttggtttagatggagcagaatctttaattccagccatggaacagattattaaaagaggggggcaattaggagttaaggaaataaaaattggtatgcctcatagaggtagattgaacgttttggcaaatgttttgcaaaaatcatataaaaggatatttaatgagtttgctggagaattttctagcactgctgaagagtccgcaggagatgttaagtatcacttgggagcgtcatcaaacagagaatttgacggcaattctgtacatgtaagcttaactgacaacccttcccacttagaagctgtagatccagttgttcttggacaaacaagagcaaaacaattttttcataatgatttaaaaagaagcaaagtaataccaatattaattcatggtgatgcagcatttgcaggtcagggtgtggttgcagaatgttttgcaatgtcaggtttaccaggacataatactggaggaacaatacatattattgttaataatcaaattggatttacaacaagcccaagatttgcaagatcaagtccttatccttctgatttaggaaaagttgttgatgcgccgattttacactgtaatggtgatgatccagaatcggctattcattgtgcaaaaattgctattgaatttagacaaaaatttaaaaaagacgtcgttatagatatgatttgttatagaagatttggtcataatgaaggagacgaaccatcatttacacagccattaatgtataaaaaaatcagacaacatcccactacacttaatgtttatggaaacaagttagttaaag

SEQ ID NO: 216964 - DNA, 926 bp, Unknown
  Bacterial polypeptide expressing nucleotide sequence isolated from the Sargasso Sea
cagattaaaccttttggttaatgttcttggcaaacttccctcagatttattttcgtcctttaatgaagagggtgtgcttgaaggagcaaatactggtgacgtgaaatatcatttaggtttttcttcaaatttcataacacctggtggtgaagttcatgtttctcttagcaataatccatcacatctcgaaatagtagatccagttgtacttgggtcagttagagcaagacaagatagacttcatgataaaaaaagagaaagtgtaattcctgttttacttcatggagatgcatctttttcaggacagggtgtcgttatggaatctcttcaaatgtctcaaactagaggattttttgttggaggaacaattcatgtcattgtgaataatcaaataggctttacaacaagtaacaaaagtgatgcaagatctactgattattcaacagatgtagctaaaatgattcaagctccagttattcacgtaaatggcgatcatccggaaatggtaataaatgctgtcaaagtagctacaaagtatagaaaaaaattcaaaaaagatattgtaatagacttattttgttacagaagaagaggtcataacgaagccgacgatccatctgcaactcaaccattgatgtatgaaaaaataaaacaacatccatcagtattaaaacaatatcaaactaaacttattaaagaaaatattcttactattaaggatgctgaaaatataaaaaataattatagaaaatcacttgattcaggtaagacagtagccaaaaatttagcaaaaaatccgaataatgatatgtggtttgattggaagccatatcttgatgttttatggtggccaaaagttgatactacttttaataaaaataaactcgaagaattaggtatagatgtttcatctactccagataatt

SEQ ID NO: 216965 - DNA, 884 bp, Unknown
  Bacterial polypeptide expressing nucleotide sequence isolated from the Sargasso Sea
agagggatttgaaaagtttcttcatacaaaatatgtaggtacaaaaaggtttgggttggatggaggtgaaagtttaataccagctttagaacaaataataaagataggtggtcaatcaaaagtaaaagaggttaaaattggaatgtcccacagaggaagattaaatgttttagcaaacgtactccaaaaatcttataaaagaatatttaatgaatttgctggagaaataaattcttccaaagaggatagcgctggagatgtcaaataccatttaggcgcttcttcaaacagagaatttgatgggaattctgttcatgtaagtttaacagataacccctctcatttggaagcagtgaatccggtcgtattaggacaaacaagagcaaaacaatatttccataaagataaagagagaaaaaaagtaattccaatactaattcatggggacgcagcttttgctggtcagggggtagttgcagaatgttttgcgatgtctggtcttccaggtcacaacacaggtgggactattcatattatagttaataatcagataggttttacaacaagtccaagatttgccagatcttcaccatatccatctgatattgcaaaaatggttgaggctccaataattcacgtaaatggagatgaccccgaagctgtagtttatgcagcaagagtagcaactgattttagattaaaattcaatagagacgttgttatagacttaatttgttatagaagatttggacataatgaaggagatgaaccttcgtttactcaaccacttatgtataaaaaaatacgatcacatccatcacctgtaaaagtttatggtgaaaaattaattagtgaagagtctatttcaaatgattttttaaatg

SEQ ID NO: 216966 - DNA, 913 bp, Unknown
  Bacterial polypeptide expressing nucleotide sequence isolated from the Sargasso Sea
aatgaattttgctggagaaatagactctacatcagatgatgatagtgctggtgatgtaaaataccatttaggagcttcatcagatagagtatttgacggtaatccagttcatgtaagccttacagataatccatctcacttggaagctgtaaatccagttgttttaggacaaacaagagcaaagcaattttttcataacgataaagagagaaaaaaagtaattcctatactaattcatggtgatgcatcatttgctggacagggtattgttgctgagtgttttgcgatgtctggtttacccggacataatactggtggcacaattcattttataattaataatcaaataggatttacaactagtccaaggtttgcccgttcttctccacatccttctgatgtagcaaaaatggtagattcaccaattatacatgctaatggtgatgatccagaatcagttgtatatgcagctagaatagctgctgaatttagacttaaatttaatagagacgtagtagttgatttagtttgttatagaagatttggtcacaacgaaggagacgaaccttcatttactcaaccattaatgtataaaaaaattaaatctcatttatccactgtaaaaatatatggaaataaattagttaaggaaaaaactatttcatctgaagatttaaataatcaaattaaaaaatttaaagaccttcttgatgatcaatacaaaaatgcaaaaaactataaacccaaaattgagtggtttgaaggaacatggtcaagatataaaccaagaagaggacaagataaaagaggagatacaggctatccaacttcaaaacttttggaaatttcagataaaatacactcgctttcagccgagctaaatattcataagaccatagttaaaaatttttga

SEQ ID NO: 216967 - DNA, 607 bp, Unknown
  Bacterial polypeptide expressing nucleotide sequence isolated from the Sargasso Sea
caggttgtcaaatgcacaactccagctaattattttcatgtgcttagaagacaaatgagaagagattttagaaagccattaatagttatgactcccaaatctttattgagacataaaagatgtatttcttatcttgaagacttcacaaaaaagacaagatttcacagaattttagaagaccatgcttaccttgaaaatagtaaacttataaaactaaaaacaaataaaaaaataaaaaaagttgttatgtgttcaggtaaaatatattttgatctattagaggctagggaaaaaagtaaaaatgatgaaatagtctttataagagtagagcaactatatcctttccctgtaaaacatttaggaagggagcttcaaaagtacaaaaatgcagaatttatttggtgccaagaagaaccgatgaatatgggagcatggaatactgttaaatattatatcgaaagaacattagaaatcgttaaaatcaaaggtgaaacagtaaaatatgttggaagaaatgctgcggcatcaccagccacaggaaacttgaacaaacatcttgcagaacaaaaagaaatattagaaaaggtagtaggtaagttaaattaat

SEQ ID NO: 216968 - DNA, 815 bp, Unknown
  Bacterial polypeptide expressing nucleotide sequence isolated from the Sargasso Sea
tgtaggaacaaaagatttggattagatggaggtgagtcgttaattcctgcattagaacaaataattaaaaggggcggacaacttggagtaaaagaagttaaaattggaatgtctcatagaggaagattaaatgttttagctaatgttcttcaaaaatcatataaaagaatctttaatgaattttcaggagaacatttaaacttaccagaagaatcagcaggagatgttaagtatcaccttggtgcttcttcaaatagagaatttgatggtaatttggttcatgttagtttaaccgacaatccatcacatttagaggctgttgacccagttgtactaggacaaacaagagcaaaacagttttttcacaaagatttaaaaagaaacaaagttataccaattttaattcatggagatgctgcttttgctgggcaaggcatagtagctgaatgttttgccatgtctggtcttccaggacataacacaggaggaacaattcatataattttaaataatcaaattggatttactacgagcccaagatttgcaagatcaagtccttatccatcagaccttggtaaagtaatcgactcaccaattttgcactgtaacgcagacgatcctgaggcagtagttcattgtgcaaaaattgcaatagaatttagacaaaaatttaacaaagatgttgttatagacgtaatttgttatcgtaggtttggtcataatgagggtgacgaaccatcatttacacaacctttaatgtataaaaaaattagggaacaccctactacacttacagtttatggaaataaactttc

SEQ ID NO: 216969 - DNA, 922 bp, Unknown
  Bacterial polypeptide expressing nucleotide sequence isolated from the Sargasso Sea
attataaaaaggggcggtcaattaggagttaaagaagtaaaaattggcatgtcacatagaggaagagtaaatgttttggctaatttattgcaaaaatcttataaaagaatttttaacgagtttgttggagaatttgccaacacaccagaagagtctgctggagatgttaagtatcatttgggagcttcatcaaatagagagtttgatggtaattcagtacacataagtttaacagataatccttcacatttagaagcagttaatcctgtcgttcttgggcaaacaagagcaaaacaattttttcatcaagataaaaaaagaaataaagtaattccaattttaattcatggtgatgctgcttttgctggacaaggaatagttgcagagtgttttgcaatgtcagggttaaaaggtcataacactggtgggacaattcatattattgtaaacaatcaaattggttttactacaagtccaagatttgcaagatcaagtccatatccttcagatttaggaaaagtaatcgagtctcctattttgcattgtaacggagatgatcctgaagcagtagtgcattgtgcaaaaattgcaattgagtttagacaaaagtttaacaaagatgttgttatagatatgatttgttatcgtagatttggtcacaatgaaggagatgaaccttcatttactcaacctttaatgtacaaaaaaatcaaacaacatcctacaactttgaatgtttatggaaaaaaactaataaaagaaaatgttattactgaagaagaatttgataaaatgaaaaaagaattcaaaagtcttcttgatgaacaatttaaaacagcaaaagactataaaccaaaaattgaatggtatgaaggaacttggagcagatacaaacctgaaaaaggtaaagatagaagaggaa

SEQ ID NO: 216970 - DNA, 927 bp, Unknown
  Bacterial polypeptide expressing nucleotide sequence isolated from the Sargasso Sea
gctggagatataattggaattggtccttctactttgtctaagatagtaggtgttttagaacagatttattgtgactcaattggtgttgaatatatgtatataagaaatcctgaaagggttgattggatacaaagaaaattaagagtaaatcaaaatcatggagatttctcaaaaaatcaaaaaaggcacatacttaaaaaacttagtcaagcagtgacatttgaaaattttttacatactaaatatgttggtcaaaaaagattttctttagaaggaggagaagccttaatacccgccttagatgaaatggttgaacttgctgctgaaagtggtgttaaggaatttgtaatgggaatggcgcacagaggaaggttaaatacattaataaatatttttggaaaatcagccagagacgtttttagtgaattcgagggtaaggattactcagatgaaatgatttttgatggtgacgtaaaatatcatttaggatggacagttaatagaaaaactagatcaggaaattctataaatatgaacctagccccaaatccctcgcatctcgagacagttagtgcaattgttcagggtataactagagcaaaaattgataacaactttgacggtgatagttccaaagcactcccaattattattcatggagatgcagcaatagcaggtcagggtttgccttatgaaattgttcaaatggccagacttgatggatataccaatggaggaactattcacatagttgttaataatcaaattggctttacaacaaattatttagatgcaagatcaagcacatactgtacggatgttgcaaaagtgaccttatgtcctgtttttcatgtaaattctgacgatgtggaggcagttgttcatgcttcaaaaattgctttagaatacagaactagattaaaagag

SEQ ID NO: 216971 - DNA, 880 bp, Unknown
  Bacterial polypeptide expressing nucleotide sequence isolated from the Sargasso Sea
actaagtatgtagggactaaaagatttggacttgatggtggtgaaagtttaattcctgcccttgaacaaattattaaaattggtggtcaatccaaaataaaggaagttaagattggaatgtctcacagaggcagactaaatgtactagcaaatgttctacaaaaatcttataaaagaatatttaacgagtttgctggtgaaataaattcaacatcagaggatggagctggcgatgttaaatatcatttgggcgcatcatctaatagagaatttgatggaaattcagtccatgtaagtttaactgataatccttcccatttagaggcagtcaatccagttgttcttggtcaaactagagcaaaacaatttttccatcaagacaaagaaagaaaaaaagtaataccaatattaatacatggtgatgcagcttttgctggacaaggggtagttgcagaatgttttgcaatgtcaggtcttccaggacataatactggtggtacaattcatattattgttaataatcaaataggctttactacaagccctagatttgcaaggtcatcaccttatccctcggatattgcaaaaatggttgatgcaccaattatccatgttaatggagatgatccagaagcagttgtttatgcagcaagaatagctacagatttcagattaaagtttaacagagatgttgttatagatttaatttgttatcgaagatttggtcataacgaaggtgatgagccgtcatttactcagccattaatgtataaaaaaattcgatcacatccttcgcctgtaaaagtttatggtgaaaagcttgtacatgaaggttcaatttcaaaagaccatctaaataattcaattaaaaaatttaaag

SEQ ID NO: 216972 - DNA, 997 bp, Unknown
  Bacterial polypeptide expressing nucleotide sequence isolated from the Sargasso Sea
aaatttatttagatggtgtataaatagaagttattcaaatataaaagaaattttaacttttttaaaaaaaatatattgtggaaaaattggttatgaatatatgcatatttcaaatccaacagaaaggaaatggtttagagatagagttgaaaaagatgaaaatggtatacaatttacaaaaaatggtaaagaagctattttaaataaactcattcaagcggagggatttgaaaaatttttgcacacaaaatatgttggaacaaaaagatttggtctcgatggaggagaaagcttaattcctgctttagaacaaataataaaaattggtggtaaaaataaagtaaaagaagttaaaattggaatgtcccaccgaggaagactaaatgttttagcaaatgttctacaaaaatcatataaaagaatatttaatgaatttgcaggagaaatagattcttcatctaaagatgatagtgctggagatgtaaaatatcatttaggagcttcatcagatagaatatttgatgataattcagtacatgtaagtcttacagataatccatcacatttggaagctgtaaaccctgttgttttgggacaaacaagagcaaagcaatattttcataatgataaagaaagaaaaaaagtaattcctatattaattcatggagatgcttcatttgctggtcagggcattgttgcagagtgttttgcgatgtctggtttacctggtcataatactggtggaacaattcattttataattaataatcaaataggttttactacaagtccaaggtttgcacgttcttcgcctcacccttcagatgttgcaaagatggtagattctccaattatacatgctaatggtgatgatccagaatctgtggtgtatgccgcaagaatagcaactgagttcagacttaaatttaatagagatgtggtagttgatttagtttgctacagaagatttggtcacaatgaaggagatgaaacttca

SEQ ID NO: 216973 - DNA, 882 bp, Unknown
  Bacterial polypeptide expressing nucleotide sequence isolated from the Sargasso Sea
gatgtatgaaaaatatttgcaagagccagacagtgtggaagcaagcctaagggctttctttcagggttttgattttggaatcgaaaacaatcaaaatggtcactctaaatctagtgaaaaagaagttccaaagcatttagaacgtgagtttaaagtagttcaattgatagatgcgtatcggaaaagaggtcatctatttacaaaaacaaatccagttcgtgaaagaaggacgtacagtccaaatcttgatatagaaaactttggtttatctatagatgatttgaatgaggttgttggggctggggaaacaatgggaataggaccctccacactttctcaaataataaaacatctccaggatatttattgtgactcaattggaatagaatacatgtacattagaaacccacagagagttaactggatccaaaacaggttgcataaaaataataatcacccaaactttacgactgaagagaaaaagcacatattaaaaaaactaacccaagctgtttcatttgaaaattttttacataaaaaatatgttggtcaaaaaagattttctctggaaggaggagaatcattgattcctgctttagatgcactgataatgaaagctgacaacaaaggtgtggaggagtttgtaatggggatggctcatagaggtaggttgaatactttgacgaatatttttggaaaatcaagtcgtgacatattctctgaatttgacggtaaagattatgatgaaattgtttttgatggagatgtcaagtatcatttaggctggacttctaaaattgatcctaatggcgatggaaaaaaaattaatataaacttagccccaaatccttctcatttggaaacagtaggtgctgtcgttca

SEQ ID NO: 216974 - DNA, 749 bp, Unknown
  Bacterial polypeptide expressing nucleotide sequence isolated from the Sargasso Sea
aaccaaaagatttggattagatggaggcgagtctttagtaccagcattagaacagatcattaaaagaggcggacaacttggtgttaaagaaattaaaatcggaatgccacacagaggaagacttaatgttttagcaaatgttttacaaaaatcttataaaagaatttttaatgagtttgctggagaactagatgccaaaagcgaggactcagccggcgatgtaaagtatcaccttggggcgtcttcaaatagagaatttgatggtaattcagttcacgttagtttaacagataatccatctcatctagaggccgtaaatcctgtagtattaggacaagtgagagctaaacaattctatcataacgataaacaaagacgtcaagttataccaatattaattcatggtgacgctgcatttgcaggacaaggagtggttgcagaatgctttgctatgtcaggtcttaaaggacataatactggtggtacaattcatataattgtgaataatcaaattggatttacaacaagtcctagatttgcaaggtcaagtccttatccttcagatttaggtaaagttgtagaatcgcctattttacattgcaatggtgatgatccagaagcagtagtccattgcgcaaaaattgcaatcgagtttagacagaaatttaataaagatgttgtcattgatttaatttgttacagaaagtttggtcataacgagggagatgagccttcttttactcaccatt

SEQ ID NO: 216975 - DNA, 580 bp, Unknown
  Bacterial polypeptide expressing nucleotide sequence isolated from the Sargasso Sea
tccatcaaattattttcatgttttaagaagacagatgcatagagagtttagaaaacctttagtaattatgacaccaaaatctttactcagacataaaagatgtatttcaaatatttctgaatttacatcgaaaagtacttttcatagagtattagaagatgatgcttataaaaaagaaaataatttaattaaattaaaaaaagacaaaaatgttaaaaaagttatcatgtgctcaggtaaaatttactatgatttaattgaagcaagagaaaaatccaaaaatgataagttagttttcatacgaatagaacaattgtatccttttcctgcgaaaacattagccactatcctgaaaagatataccaaagctaaatttatatggtgccaagaggagccaaaaaatatgggggcatggaataccatgagaaactatattgagagaactttagaaatgataaattttaaagatattcacttaaaatatgtgggtagaaaggcttcttcctctactgcgaccggaaatgcaaataaacatcttgcagaacaaaaagaaatattagaaaagatagtaaaaaactaa

SEQ ID NO: 216976 - DNA, 857 bp, Unknown
  Bacterial polypeptide expressing nucleotide sequence isolated from the Sargasso Sea
aaaatagtagactcacccattttacactgcaatggtgatgatccagaatctgttgtgcactgtgcaaaaattgcaatagagtttaggcaaaaatttagcaaagatgtagtaatagacatgatatgctatagaagatttggtcataatgaaggtgatgaaccatcttttacccagccttcgatgtacaaaaaaataagatcacatccgactactttaaaaatatatggtgaaaaattaattaaagaaaaaactataagtaaaaatgattttgaaaatcaaattactactttcaggtcactattagatgaacagtttaaaactgctaaagatattaaaccaaaacttgattggtttgaaggcacttggtctaggtatcaacctaaaaaaggtaaagatagaagaggagtaactggtgttaatttagatgaaatactaaaaatttcagaaaaaataaataaagttgatgaaaaattaaatatacacaaaacaatacaaaaaatattaaacaataggcataaatgtattttagataaaaaaaatattgattgggcaaatgctgaaagtttggcttttgcaacacttttagatgaaggttatccagtaagattagttggacaagactcaggcagaggtactttcagtcaaagacattcagttttaagaaatcaagaggataacagtagatttattccgttaaataacatctcaaaaaaacaaaaaaactttgaagtagtagatagtttgctatccgaattagcagttttgggctttgaatatggatatagtctggttgaacctgaaactctaacaatgtgggaggcacaatttggtgactttgcaaatggagctcaagttat

SEQ ID NO: 216977 - DNA, 898 bp, Unknown
  Bacterial polypeptide expressing nucleotide sequence isolated from the Sargasso Sea
atggttgatgcaccaattttgcacgttaacggagatgatcccgaggcagtcactcattgtgcaaaaattgcaactgactataggcaaaaatttaatagagatgttgttatagatatgatttgctatagacgatttggtcataacgaaggggacgaaccatcctttactcaacccactatgtataggaaaataaaaaaacatcctacaacactaaatatttatgcagaaaagttaatcgacgagggtgttattacaaatgaagaatttaataatatgaagacaaaatttaaaagtcttcttgaggaacaatttaagacagctaaagaatataaaccaaaattagagtggtatgaaggagtatggtcaagatttaagccagaaaaaggaaaagataaaagaggagtaacaggagtttctttagaaaagataataaaaattggaaaaaaaataactttaataccagaagacttaaatcttcacccaactttaaggaaaatatttgaaaataaaaaaaaaatgtttctaagtggaaaaggttttgactgggcgacagcggaacatctagcatttgcaacattattggaagaaggttatccagtcagactttctggacaagactctgcaagaggaacatttagtcaacgccattcagtattgaaagatcaattgaatggaaaaaaatatattcctcttaataatatttcaaaaaatcaaaaaaattttgaggtaatagatagtttactttctgaaatggctgttcttggttttgaatatggttatgctttatcagaaccaagcacccttgtaatttgggaagcacaatttggggattttgctaatggggctcaagtaattatagatcaatttgttgcttcagcagaaagaaagtggcgagagc

SEQ ID NO: 216978 - DNA, 511 bp, Unknown
  Bacterial polypeptide expressing nucleotide sequence isolated from the Sargasso Sea
tttgagacgccagatgactttccctttccgcaaacctctggtgatttttaccccaaagagcttattacgacatccaaaatgtgtcagtcctctagatagttttctggaaggtacacgattcatcgaagttattaaagatgagtattcggatactcaattcgtacaaaaggtattattatgcagtggtaaagtatactatgacttgctagaacatcagcaaacaaatcagattaaagatattgcaattatccgtttggagcagctatacccttttcctgaaaagcaacttctttctgttttaaatctttattctaatgccaagaatatttgttgggtacaagaagaacctgaaaatatgggtgcatggagttttatacttagaacatttactgaaacaaacaatagactaattctggtagcgcgagaagctgacagttctccagcagtaggatcctctcaagttcatttatcgcaacaggaaaaacttgtccaaaaagcattcgaagtctga

SEQ ID NO: 216979 - DNA, 862 bp, Unknown
  Bacterial polypeptide expressing nucleotide sequence isolated from the Sargasso Sea
gatttgataaaaaagattatgattaaaaaaatttatttagatggaatagcaaataaaaattactcaactataaaagagattttgtctttcctaagaaaaacttattgtggaaaaattggctatgagtatatgcatatttcaaatccaacagaaagaaagtggttaagagatagaatagaaaaggatgaaaatgctttacaatttacaaaaaatggcaaggaagctattttaaataaaattgttcaatcagaaggatttgaaaaatttttacatacaaaatatgttggaacaaaaagatttggtttagatggagcagaaagcttaattcctgcacttgaacaagtaatcaaaattggtgcccaaaataatgttaaagaagtcaaaattggaatgtcacatagaggaagacttaacgttttggctaatgttctacaaaagtcatataaaagaatatttaatgaatttgctggagaaatagattcatcatcaaaggaagatagtgctggagatgtaaaatatcatttgggagcatcatcagatagagtttttgatggtaaatcagtacatgtcagtcttacagacaatccatctcatttagaagctgtaaacccagttgttttaggacaaacaagagcaaaacaattttttcatgatgataaagagagaaaaaaagtaattcctatattaattcacggagatgcttcatttgctggccaaggtattgttgctgagtgttttgcaatgtctggtttaccaggacataatactggaggtacaattcattttataattaataatcaaataggatttactacaagtccaagatttgctcgttcatctccacatccttctgatgtagcga

SEQ ID NO: 216980 - DNA, 898 bp, Unknown
  Bacterial polypeptide expressing nucleotide sequence isolated from the Sargasso Sea
aatattgattgggctacagcagaagctcttgcgtttgcaacattacttaaagatggttacggtgttcgtctttcaggacaagatgttggcagagggactttcagtcatcgtcatgctgtattatatgatcaggagaatgaaaaaagatttgttcctcttcgtcattttagaaaagaacaagcgctgttcgaaattgttgatagttttttatctgagtttggtgttcttggttttgaatatggttattcacaagcagatccaaaaacattagttatttgggaggctcaatttggcgatttttctaatggtgctcaaacaataattgatcagttcatcactaccggcgaaagaaaatggcttagaatgtctggtttgactttgttattaccacacggtcatgaaggacaaggtccggaacatacaagtgcacgattagagcgttttttacaaatgtgcgcagaagacaatattcaagtagcaaactgtactagtcctgcaaactattttcatattttaagaagacaaatgatgagagactttcgaaaaccattagtgttgatgactcctaaatctactcttcgacataaggccaacagatctgcattgaaagattttgtaaatggctctacttttcaccgtgtacttagcaacccactttctgatgatgaatataaacacattaatcgtattgtattttgttcaggaaaaatttattttgaacttcaagaccatttaaacgaactgcagctaaataatgtttatataattcgtttagagcaattgtaccctttcccttacgaagcattaaaacaaggaattaaaaaatttattcattgtgaattaatctggtgtcaagaagagccaaaaaatatgggagcctgggaatttatgaaaagag

SEQ ID NO: 216981 - DNA, 809 bp, Unknown
  Bacterial polypeptide expressing nucleotide sequence isolated from the Sargasso Sea
acaaaaatttaacagagacgtggttatcgacatggtttgctatagaagatttggtcataatgagggagacgagccctcttttacccaaccaataatgtataaaaaaatcagatctcatcctacaacgctatcaatctacggaaaaaaattaagtgaagaaggtttgacatctgagatcgatttacaaaaagataaaataaacttcaagaaattcttagagaaagaatttgaatcatcaaaaaattataagtcagaactgaaatggtatgatggagtttggtctagatttaaaccaggtctgggcaaagataaaagaggtgttagcggtgttgataaggttaaattaagaaatattggaagaaaaatttctgaaattccaaaagaatttaatgtccataagaccttaaaaaaaatatttgatttaagaatggcagccatcgagaatggaaaatcgattgactggtccactgcagaaagtttagcttttggaactctacttacggaaggattttctgtaagattatctggacaggactctggaagagggacttttagccaaagacatgctgttttaagaaaccaggaaaaccatgaaagatatatcccacttaataatatttcgggcaaccaaaaaaactttgagataattgatagtcttctttcagaattggcagtcttaggatttgaatttggatactccctatctgaacctgaaacacttgttttatgggaagctcagtttggagattttgcaaatggagcacaaatcataattgatcaatttatttcatcagcagagtcaaaatggg

SEQ ID NO: 216982 - DNA, 751 bp, Unknown
  Bacterial polypeptide expressing nucleotide sequence isolated from the Sargasso Sea
acaaataattaaaattggtggtcaatctaaaataaaagaagttaagattggaatgtctcacagaggcagactaaatgtactagcaaatgttttacaaaaatcttataaaagaatatttaacgagtttgctggtgaaataaactcaacatcagaggatggagctggcgatgttaagtatcatttgggtgcatcatctaatagagaatttgatggaaatttagttcatgtaagtttaactgataatccatctcatttagaggcagtcaatccagttgttcttggtcaaactagagcaaaacaatatttccaccaagacaaagaaagaaaaaaagtaatcccaatattaatacacggtgatgcagcttttgctggacaaggggtagttgcagaatgttttgcgatgtcaggtcttccaggacataatactggtggtacaattcatattattgttaataatcaaataggctttactacaagccctagatttgcaagatcatcaccttatccctcggatattgcaaaaatggttgatgcaccaattatccatgtcaatggagatgatccagaggcagttgtttacgcagcaagaatagcaacagattttagactgaaattcaacagagatgttgtaatagacttaatttgttatcgaagatttggtcataacgagggtgatgagccatcatttactcagcctttaatgtataaaaagattcgatcacatccttcacctgtaaaagtttatggtgaa

SEQ ID NO: 216983 - DNA, 889 bp, Unknown
  Bacterial polypeptide expressing nucleotide sequence isolated from the Sargasso Sea
attgattttgtttgctacagagaaagaggacacaatgaaagcgacgagccttttgcaacccaacttcttatgtattcaaagatacattctaaaaacactgtaattgagctctattcaaaaaagctcattgaaagcaaggcaataagtgaagaggtttttgaagcttataaaaaagattacagagaccacatggaaaaaggagaaatggttgcagaatcattatcatctgatccagataaatcaatatatttcgattggacaccttatctacagcctgatttaaaaaagagctatccaacgcttgtcagtagagcaaatcttgaaatagcagtcaaacactgtttatcttttccagagaacttgcagatgcagaaacaggttcaaaaaatgtattccgatagagaaaaaatgctcaagggggaattgaaactaaattggggatttgcagagatggcagcttatgccactttacttcaagagggatatccagtgagaatcactggtcaagatactagaagaggcacattctcgcatagacatcttgttgttaaggatcaaaaaagtggagagggtacagtcccacttgcaactctaaataaaggaaataaaaaatttgaaatctttgactcacttttatcagaagaagcagtgcttggatttgaatatggttactcatcaacatggcctgaaggtttagtaatttgggaagctcagtttggggatttcgcaaatgttgcacaagttgttattgaccagtttattgtaagtgcagaaacaaagtggggaagactatcggggctaactatgtttcttcctcacggatatgaaggacaaggccctgagcatagtagctcaaggctagagaggtttttacaacaatgtgcatacg

SEQ ID NO: 216984 - DNA, 922 bp, Unknown
  Bacterial polypeptide expressing nucleotide sequence isolated from the Sargasso Sea
atttgcaaggtcttctccttatccatcagatttagcaaaaatggttgatgctcttattttacatgtgaatggtgatgatcctgaagcggtagttcattgtgcaagaatcgcaatggaatttagacaaaaatttaatcgagatgtggtactggatatgatttgctatagaagatttggtcataatgaaggtgatgaaccatcttttacccaacccgtcatgtataaaaatattaagaaacatgaaacgacattaaatatttatgctaataaattaattaaagagggaaccattagcaaagaagaatttaatagcatgaaaatgcaatttaaaaatcttcttgaagagcaatttaaaactgcaaaagaatataaaccaaaattagaatggtacgcaggtgtttggtcaagatataaaccagaaagaggaaaagacagaagaggagttactggtgtatcaattgaaaaaataaaaaaaataggagaaaaaattacgacaattccaaaagaatttaacactcacccaacaataaaaaagatattcgaaaataaaaagaaaatgtttcttacagggaagggatttgattgggctactgcagagcaattagcattcgcaacattattagatgagggatatccagtcagactttctggacaagattcaggcagaggtacatttagccaacgtcattctgttcttagagatcaaagagatagtacttactatacaccattgaataatatttcaaaaaatcaaaaaagatatgaggtaattgatagtttactttcagaaatggctgtagttggatttgaatatggatatgcattatcggaaccaacaacattggtagtttgggaagcccagtttggtgattttgcaaatggtgcacaagttataatagaccaatttattacttctgctgaa

SEQ ID NO: 216985 - DNA, 882 bp, Unknown
  Bacterial polypeptide expressing nucleotide sequence isolated from the Sargasso Sea
cacattgcgcaaaaattgccactgagtacagacaaaaatttaatcgagatgtagtaatagatatggtttgttacagacgctttggacacaacgagggggacgaaccttcatttactcaaccaattatgtacaaaaaaattaaaagtcatccgagtacccttaccatttacggaaagaaactttcaaatgagggacttactagtatcgagaaattacaacaagataaagttaaatttaaagaacttttagaaaaagaattctcattctctaaaaactacaagtcagatctaaaatggtttgatggagtatggtccagattcaagccaggtttaggaaaagataaacgaggaaaaagtggagttgaaaaaaaaatactagacaaagttggaaaaaaaatatttcatatacctagtgactttgatgcgcataaaacactcaaaagagtttttgatttaaaaagtcaaatgtttaatagtggcaaagttgattggtcttctgcagagtcattggcatttggcacactattgtcagagggattttcggtacgattatctgggcaagattctggaaggggaacatttagccaaaggcatgctgttttaagaaaccaaaataatcatgatcgctatttaccacttaacaatattcaaaataatcaaaagaaatttgaagtaattgatagcttactttcagaacttgcagttcttggatttgaatacggttattcgttatcagaaccggaaactttagttttatgggaagcacaatttggtgattttgcaaacggagcgcaagtaattatagatcagtttataacatcttcagagtcaaaatggggaagagcaagcggtcttgttatgcttttacctcatgggatatgaa

SEQ ID NO: 216986 - DNA, 976 bp, Unknown
  Bacterial polypeptide expressing nucleotide sequence isolated from the Sargasso Sea
aaagatactttagtcgatatgttctgttatcgtaaacatggtcacaacgaaggtgatgagccctcttttactcagccattaatgtaccaaactattaaaaagaaaaaatcagtggctgaaatctatgcaaataaacttattgaaaatgaaatactcaacaaacaacaaattgattttattaaagatactgtttggtcagatttagaaaagaaatttgaaaaagctaaaaactataaactaaaaacaaaatcttggatggggggacaatggagtggtttaagtaaagcacccaaagatacgcttagaagaggcagaactgcagaaccatctaaatcattaaaggatattggaaaaaagattgcccaaacccctgagggtttcaaccttcacccaaagctagaaaagtttaatgctgcaagacttaaagcaatcaaaaatggcaaaggtattgattggtcatttgctgaaacactcgctttcggatctctacttaaagaaggcttcaaagtgagactggctggtcaagattctggtcgcggtacctttagtcaaagacactctgtattttatgaccaaaaaactgaagaacgttatattcctttaaaccacttagctaaaaaccaaaaacaatttgaaattatcgatagttttctttcagagatgggtgtccttggttttgaatatggttactcattagcagatcccaatgccttagtgatttgggaagcacaatttggagattttgctaatggagctcagattattatcgaccaatttatcgctgcaagtgagagaaaatggatgcaaatgagtggattagtaatgcttttgccccacggtcatgaaggaatgggaccagaacattctagtgcccgaattgagagatttttacaaatggcagctgaagataatatccagatattaaactgtactactccggcaagttatttcatgctttcgaagacaaattcatcga

SEQ ID NO: 216987 - DNA, 937 bp, Unknown
  Bacterial polypeptide expressing nucleotide sequence isolated from the Sargasso Sea
ttatggagatcgattaacaagtgttatcaacggaaaaggtattgattgggcaacttctgaaagtttagctttagcaacacttcttgatgagggatacggtgttcgaatatctggacaagatgttggaagaggaacatttagtcatagacatggtgttctatatgatcaagaaaacgaaaatcgttttgttccgttaagacactttcaaaacaagcaaggttattttgaaattatagatagttttttatctgagtttggtgttcttggttttgaatatggatattcacaagttgatcctaagacacttgttatatgggaagcgcagtttggtgattttgcaaatggtgcacaaattatgattgatcaattcattagttctggagaaagaaaatggttgagaatgtctggtttaacgatgcttcttccccacggacacgagggccaaggtcctgagcatacaagtggaagattagaaagatttttacagatgtgtgcggaagataatatgcaaattgttaattgcacaagtcctgctaattattttcatgttttaagaaggcaactacatagaaactttaggaaaccgctaattatatttacaccaaaatctacacttagacataaatctaatgtttctaatattgaggattatattaatggatcaactttccatagaattcttactgataaattatctgttaaagaaaaaaggaaaaataaaagattaatcatttgctctggtaaaatatattttgaacttgcagatcacatagcaaaaaataaaattaaaaatctctccataataagattggagcagatttatccatttccttatgaaaactttagagacgaattaaaacattatactgatgctgaaattatctgggcacaagaagagccaaaaaatatgggtgcctgggggttttgtgaaaggtag

SEQ ID NO: 216988 - DNA, 871 bp, Unknown
  Bacterial polypeptide expressing nucleotide sequence isolated from the Sargasso Sea
catggtttgctatagaagatttggacataacgaaggtgacgaaccatcgtttactcaaccattgatgtataaaaaaataaaaaaccacccttcaaccttagaaatttacggtcaaaaattaattaaagagggtttagttacaaaagaagaaattgaaattagtaagaaaaaattcaaagattttttaaacaatgagtttgttggagcaaaaggttacaaagtaaaaatgaaatggtttgatggagtgtggtcacgttttaaaccagaaataggaaaagacagaagaggtataactggagtaaaaaaggaagatctcatggaaattggaaaaaaaattacacaattaccaaaaaatttaaatattcataaaactttaattaaaatttttgaaaataagcaaaaaatgtttacacaaaatcatccaattgattggtctacagccgaactacttgcattcgcaacacttttaaatgacggattctctgtaagactctcgggacaagactccggcagaggaacatttagtcaaagacattcagtcctaagagatcaggatagtcatgagagatatattcccttacaccacgtgtcaaaaaaacaaaaaaaatttgaggtaatagacagtcttctttctgagttaggtgttctcggttttgagtttggttactctctatcagaaccagaaaccttggtgctttgggaagcacaatttggagactttgttaatggcgcacaaatcgttattgatcaatttattgcatcaggagaatctaaatggtcaagagctagtggacttgtgatgcttttacctcatggatacgaaggccaaggtcctgaacactcttcaggtaggttggaaagatttttacaa

SEQ ID NO: 216989 - DNA, 805 bp, Unknown
  Bacterial polypeptide expressing nucleotide sequence isolated from the Sargasso Sea
attaaagaaatactatcttttttaaaaaaaacttattgtgaaaaaattggttttgaatatatgcatatatcaaatcctacagaaagaaaatggcttagagataggattgaaaaaaaagaaaatagtattcaatttactagaaatggtaaagaagctattctaaataaaattattcaagccgaaggttttgaaaaatttcttcatactaaatatgtagggacaaaaagatttggtcttgatggtggagaaagtttaataccagcgttagaacaaataattaaaattggtggacaattcaatattaaagaagttaaaattggaatgtctcacagaggaagattaaatgttttggcaaatgtacttcaaaaatcttataaaagaatatttaatgaatttgcaggtgaaattaattactcatcaagtgaagatagttctggagatgtaaaatatcatttaggagcttcatccaatcgtgaatttgatggaaattcagttcatgtaagtttaactgataatccatctcacctagaagcagtaaatcctgtagtactgggacaaacaagagctaaacaattttttcatgaagataaagatagaaaaaaagtaattccaattttaattcatggagatgcagcattcgcaggacaaggaatagttgcggagtgttttgcaatgtcaggtcttcccggacataatactggtggaacaatacattttattattaataatcaaattggatttaccacaagcccaagatttgctagatcttcaccacatccatccgatgttgctaaaatggttgatg

SEQ ID NO: 216990 - DNA, 927 bp, Unknown
  Bacterial polypeptide expressing nucleotide sequence isolated from the Sargasso Sea
tatggcgcatagaggacgactgaacttattggttaatgttttaggaaaatccccaaaagaattatttgcagagtttgaggaaaattttgagctagagggagcaagctcgggagatgtgaaatatcatctgggcttttcatccaatatattaactcctaatggagaagtgcatgtttctttggcaaataatccttctcatcttgagattgttgatccagtggttcttggttcagtgagaggtaggcaagatcgtctgaatgatataaaaaaagaactcgttattcctattttaattcacggagatgcttcattttgtggtcaaggggttgtaatggaaactcttcagatgtcacaaaccagaggctatggagttggaggaacaatacacgtaattgtaaataatcagataggatttactacgtccaatgaagaggactcaagatcaactcaatacgctactgatgtagctaaaatggttgaggcccctatccttcatgttaatggagatgatccagaaatggttgtatttgcagctaaactagcatgtgagtatagacataactttaaaaaagatattgttttggatctcttttgctacagaaggagaggtcataatgaagcagatgagccctcgtcaactcaaccaatcatgtatcaacagatctctaatcatccatccgttaaaagcttgtatcaagataagcttattaacgctggagtaaccacacaatctgaatgtgatgaaatagaaaaaaaatatagatctacaatagagaaaggagactctgttgctcataatttagcaactcaacccaacgaatctatgtggtttgattggaccccatatattaaccagagtggagatgaggaaatagaatcagcatttaataaagatagatttactgaacttgctcaaatagcttttac

SEQ ID NO: 216991 - DNA, 850 bp, Unknown
  Bacterial polypeptide expressing nucleotide sequence isolated from the Sargasso Sea
atgcttggagtggaagagtttattatcggtatggcccatcgtggacgattgaatgtattggcaaatatccttggtaaaccttacgaggatatttttatggagttcgagggtaaaatggtcggttccgatgggtttgacggagatgtcaaataccatatgggacattccagtgatcggctggtgagaaacgggaatactgtccatctcagcctgacaccaaatccctctcatcttgaagcggtcaatcctgtcgttgcaggaatttcaagaggaaagatcgaccggcgttatcatggggatgtagacaaactcgttccgattctgattcatggagatgcttctattgcaggacagggtatagtctatgaggtacttcagatgtctcagttgcctggttatcacataggaggaacggttcatgtggtgcttaacaatcaagtggggttcacggcggattattttgaaggccgttctagcacctactgcaccgatgtcgcgaagactacactttccccggtttttcatgtgaacggagatgaccttgatgccgttgcctatgtaacagaattggcgcttgaattccgacagaaatttcatcgtgatgtgtttgtggatattgttgcgtatcgccggcatggccacaatgaatctgatgagcctcgtttcacccaacctgctctctataaaaaaatcgctgaacatcccaatcccctccaagtctactctcaacgtcttattcaggaaggaagggtctctaaatcagatgtacagaaattagttgaggattttaaaaagcaactgtctgaaaagctagaaagcactagaaaacaggaagtttctgcttcgacat

SEQ ID NO: 216992 - DNA, 754 bp, Unknown
  Bacterial polypeptide expressing nucleotide sequence isolated from the Sargasso Sea
attaaagaaggaattttaacaagggatgattttaatagtcagaataataagtttaaaattttgcttgatgaacaatacaaaacatcaaaaaattataaaccaaaattagaatggttcgaaggaacttggagtagatataaaccagaaagaggaaaagacaaaagaggcaaaagtgcagtaagtgaagaaaagttattgcagatttctgaaaaaattaacttgatacccgaaagtgcaaaaatacataaaactataaaaagaatctttgataatagatatcaaacaaccagaaagaaaaaaaatattgattggtcgacagccgagtccttagcatttggctctcttttagaagaaggttttccagttagattagtgggtcaagattcgggcagaggtacatttagtcaaaggcattcagtattaaggaatcaattagataattcacgctatataccattgaataacatttcaaaaaaacaaaagcgatttgaaatagttgatagtttactttcagaaatggcagttttaggatttgaatatggttatagtttagtagaaccaaacacattaacactttgggaagcacaattcggagactttgctaatggagggcaaattataatagatcaatttatttcttctggtgaacgtaaatggtctagggcatctggtttagttatgcttttacctcatggttacgaaggtcaaggaccagagcattcatcagctagattagaaaggtttttgcaattat

SEQ ID NO: 216993 - DNA, 883 bp, Unknown
  Bacterial polypeptide expressing nucleotide sequence isolated from the Sargasso Sea
ggactaaaaacctcagaatatatagatgaattacaccctgagtatcatggttttagaaaagatgattatgatcataaaatttttctagatggtattttaaatagagattatggaactataagagaaatattaaaatttttaagaaagacttattgtggaacaattggctatgagtttatgcatatttcaaatcctaaagaaagaaaatggtttagagacagaatagaaaaagatgaaaatgctcttaaatttacaaaaaaaggaaagcaagcaatactgagtagattaatttatgcagaaggttttgaaaaatttttacatacaaaatatattggtacaaaacgttttggtttagatggtggagaaagtttaattccagctctggaacagattataaaagtagttggacaaaataaagttaaagaagttaaaatcggcatgtctcacagaggcagattaaatgttttagccaatttactacaaaaatcatacaaaagaatttttaatgaatttacaggtgaagttgatgcctcttctgaagaaagtgctggagatgttaaatatcatctaggtgcttcttcaaatagagaatttaatggaaactcagttcatattagcttaactgataatccatcacatttagaagctgttagcccggttgttttgggacaaacaagagcaaaacaatattttcaccaagattatgaaagaaataaagttataccaattttaattcatggagacgcagctttttctgcacaaggtgtagttgccgaatgttttgcaatgtcaggacttcctggacataatacaggcggaacaattcatataattattaataatcaaattggatttactactagtcctaggtttgcaagatctt

SEQ ID NO: 216994 - DNA, 655 bp, Unknown
  Bacterial polypeptide expressing nucleotide sequence isolated from the Sargasso Sea
tcagcaagattagaaaggtttttacaattatgttcaaatgataatatgcaagttatgaactgtacaactccagcaaactattttcatgcactcagaagacaaatgcatagagactttagaaaaccattaataataatgacaccaaaatctttattaagacataaatattgtgtctctaatttaaaagattttagcaaaaagaattcattccatagagttttatgggatcacgccattgatccacaaagtgaaggctttataaaattgaaaaaaccagaaaaaatcagaaaagtaattttatgttcaggaaaagtttattttgatttattagaagcgagagaaaaattgaaagtagaagatattattttatatagaattgaacagttatatccatttccagctaaagcattggttaaagagttaaaaccttatgctaaaaatgctacatttcattggtgtcaagaagaaccaaagaatatgggagcttggttttcagtcagagattatatgcaatggacattagataatattaaggctaaaaataatcaaatttcttatataggaagaagtccagacgcaacacctgctacaggatttgccaaaagacatatttttcaacaaaaggaaattattaataaagtatttaaaaaataat

SEQ ID NO: 216995 - DNA, 547 bp, Unknown
  Bacterial polypeptide expressing nucleotide sequence isolated from the Sargasso Sea
aatgcatagagaatttagaaaaccattgataattatgacacctaaatctttactaagaaataaaagatgtgtgtcaaatattgaggattttacaaaaaaaaatttctttcacagagttcttccagatcatgctgaaattgaatcttataatctgataaagctaagaaaagacaaaaaaattcaaaaagtaattatgtgttcaggtaagatttattttgatcttttagagtcaagggaaaaaataaaaaatgataaggtttttatcataagaatagaacagctatatccatttccagtgaaacctttagccacagaattaaaaagatttaaaaagaatgccaaatttttttggtgtcaagaagaacctcaaaatatgggcgcatggaactcagctcgcaattatattgagtggacgcttaattatatagatgccgaaaataaggaaataaggtatattggcagaaagcctgcggcatcaccagctacaggatatataacaaggcatattgaccaacaaaaaaaaatagtagaaaaggtacttagctaa

SEQ ID NO: 216996 - DNA, 917 bp, Unknown
  Bacterial polypeptide expressing nucleotide sequence isolated from the Sargasso Sea
cttcatactaaatattgttggtacaaaaagatttggtttagatggaggagaaagtttaataccagctcttgaacaaataattaagatagggggtcgatcacaagtaaaggaagttaaaattggcatgtcccatagaggaagattgaacgtattagcaaatgttcttcaaaaatcttataaaagaatatttaatgaatttgctggagaaataaactcatccaaagaagatagcactggagatgtaaaatatcacttgggtgcctcatccaatagagagttcgatggtaactcagtgcatgtgagcttgacagacaacccttcgcatttagaagcagtgaatccagtcgttcttggacaaacaagggctaaacaattttttcataaagataaagaaagaaaaatggtaattccaatattaattcatggagatgcagcttttgctggccaaggagtagttgcggaatgttttgccatgtcaggtcttccaggtcataatactggtggaacaattcatataataattaataatcaaataggttttacaaccagcccaagatttgcaagatcttcgccttacccttcagatgttgctaaaatggttgaagctcctatcattcatgtaaatggtgatgatccagaggctgttgtatatgcagctagaattgcaactgactttagattaaaatttaatagagatgttgtaatagatttaatttgttacagaagatttggacataatgagggagatgaaccttcatttacccaaccgctgatgtacaaaaaaatacgttctcacccatctcctgtaaaagtttatggtgaaaaattagtaaatgaaggttcaatttctaatgattatttaaatagctctataaaaaaatttaaagatttacttaatgaacaatttgaaaatgcaa

SEQ ID NO: 216997 - DNA, 610 bp, Unknown
  Bacterial polypeptide expressing nucleotide sequence isolated from the Sargasso Sea
ttgcaagttgtcaattgcacaactccagctaattattttcatgtacttagaagacaaatgagaagagattttagaaaacctttaatagttatgactcccaaatctttattgagacataaaaggtgtgtttcttatctcgaagacttcacaaaaaaaacaagatttcacagaatcttagaagatcatgcttaccttaaaaatagtaaacttataaaacttaaaacaaataataaaataaaaaaagttattatgtgttcaggtaaaatatattttgatctattggaagctagagaaaaaagtaaaaatgacgaaatagtctttataagagtagagcagctataccctttccctgtaaagcatttaggaagggagcttcaaaagtacaaaaatgcagaatttatttggtgtcaagaagaaccgatgaacatgggcgcatggaatactgttaaatattatatagatagaacactggaaatcgtcaaaattaaaggtgaaaaagtaaaatatgttggaagaaatgctgcggcatcaccagccacaggaaacttgaacaaacatcttgcagaacaaaaagaaatattagaaaaggttgtaggtaggtttaattaat

SEQ ID NO: 216998 - DNA, 819 bp, Unknown
  Bacterial polypeptide expressing nucleotide sequence isolated from the Sargasso Sea
aatgaaatactcacttttcttcaaaaagatatattgttcaaccataggagttgaatatatgcatatctcagatcctatagaaaagagatggtttagagacagaatggaaaaagaggaaaatcaattaagatttacaaacaacggaaaaatagcaattcttaataagcttatacaagcagaaggatttgaaaaatttttagctgttaaatttgtagggactaaaagattcggacttgatggaggggaagcattaatccccgcattggaacaaattataaaaagaggaggtcacctaggttttaaagaagttaaaattggtcaacctcatagaggaagattaaatattttagccaatgttttgcaaaaatcttataaaagaatgtttaatgagtttgcaggtgaatatgcgtctttcagttctgactccactggagatgtaaaatatcatttaggagcatcctcaaatcgagaatttgacggtaatttagttcatgtatctttaacagataatccctctcatctcgaagcagttaatccagttgtattaggtcaaactagagctaaacaattttttcataaagatgaaaaaagaagacaagttattccagttttaattcatggagatgcatcttttgctggccaaggagtagtcgcggagtgttttgctatgtctggggtgccaggccataataccggaggaacgatacatattattgttaataatcaaatcggattcactacgagtcctaagtttgctcgttcttcaccttacccatcagatttagcgaaaatggtagacgcaccaatattacatgttaa

SEQ ID NO: 216999 - DNA, 595 bp, Unknown
  Bacterial polypeptide expressing nucleotide sequence isolated from the Sargasso Sea
tttcttttcattatgtgcttcagaaaatattcaagtatgtgtaccaagctcacctaaacaaatttttcatctgctcagaaggcaggctataagaaaaatgcgcacacctttaattgttatttcgcctaaaagtcttttaagaaaccctcaggcagtttctacgcttgatgatttaagcaatggaagttttgagtgtgtaatcgatgatgaattagataataaaaatgatgtaaaaaagataattatgtgctctggtaaagttttttatgaattgattgagaaaagaaacaaagaaaagcgtcatgacatagcaattattagaatagaacaattgtatccttttccttacgatgaccttgaagaaattctcttaaggtatcaaaatgtacatgaatatatctggtgtcaggaagagcctttaaatcagggagcatggtttagccatagacacagaatacaaagggttttagataggcttggtaataataatgaggtcaagctcgtaagcagaccaccagcagcagcgcctgcagttggtttgatgaaacttcatttaaagcaacaagagacattaattaatgaggcaattgtttaa

SEQ ID NO: 217000 - DNA, 620 bp, Unknown
  Bacterial polypeptide expressing nucleotide sequence isolated from the Sargasso Sea
tgaggataatatgcaggtcgtgaattgcacgaccccggccaattattttcatgttctgcgccggcagctccgcagggatttccgcaagccgctcatcgtgatgacgccaaagtcgcttttgcggcataaagcctgtgtctctgagcttgcggatatggggccgggaacaagttttcaccggattcttgacgagcgagacacgaaagtaaaccacggcaatgcgaagcgcgtcgtgatgtgcagtggcaaggtctattttgatctttcggcaaaacgcgacgagcggggcgcctgggatactgagattgtccgcctcgaacaattatatccgttcccaagcaaggccctcgaggaagtgatcacaatgacgccagaggcgacattcgtctggtgtcaggaggagccaaaaaatatgggcgcctggacattggtccgtgactttgttgaggatatgatggctgacgttggtatcaagcagcaacggcttgtctatgccggacgtgtcgcggcagcgtctccggcaactgggtctctgtctcgtcacaatgcggaacagcaggggctggttgccgctgcattggggctgaatgctgcagataaggccgccgccgccgaataac

SEQ ID NO: 217001 - DNA, 841 bp, Unknown
  Bacterial polypeptide expressing nucleotide sequence isolated from the Sargasso Sea
tctaacataaaagaaattctctccgtattaagaaaaatttattgtggaaatattggttacgaatatatgcatatttcaaatccaacagagagaaaatggtttcgtgatagagttgaaaaagatgaaaatgcattgaaatttacagtaaatggtaaaggtgcaattttaaacaaattaatacaagctgagggatttgagaaatttttgcatactaaatatgtgggatcaaaaagatttggtcttgatggtggtgaaagtttgatacctgcgttagagcaaataattaaaattggcggtcagtcaaatattaaagaagtcaaaattggaatgtctcacagagggagactaaatgttttagctaacgtcttacaaaaatcatacaaaagaatatttaatgaatttgcaggtgaaataaacaatacagacgaggatagtgctggggatgtgaaatatcatttgggagcttcatctgacagagaatttgatggaaattctgtacatgtgagtttaacagataatccttcgcatttggaagcagttaatccagtagtattgggtcagactagagccaaacaattttttcataaagatactgatagaaacaaagtaattccaattttaattcatggtgatgctgcttttgcaggtcaaggtattgttgctgaatgttttgcaatgtcgggtctacctggacataatacaggtggaactattcatataatagttaacaatcaaataggatttaccacaagtccaaggtttgcaagatcttcccctcacccatcagatattgcaaaaatggttgatgcgcctataatccatgttaatggagatgatccag

SEQ ID NO: 217002 - DNA, 610 bp, Unknown
  Bacterial polypeptide expressing nucleotide sequence isolated from the Sargasso Sea
taatttgcaagttatgaactgtacaacaccagctaattattttcatgcacttcgtagacaggtattacgcgattttagaaaacctttgattatgatgacgccaaaatcattattaagaaataagtattgtaaatctaatcttagagattttagtaaagataactcatttcatagagtgatgtgggatcattctatggatcctgtaaataaaggttttataaaacttaaaaaaaattcggaaattaaaaaagtaattttatgttcaggaaaagtatattttgatttattagatgctagagaaaaagttaaaaaaaacgatgtaattcttttcagaattgaacaactttatccttttccagcaaaaagccttataaaagaactaaaaccattcgcaaaaaatgctaattttttttggtgtcaggaagaaccaaaaaatatgggtgcatggctattagtaagagattatatccaatggactttagaaactattaaggctaaaaatactgaaatttcttatataggaaggaatcctgatgcatcacccgcaactggttatgcaaaaagacatctttcagaacaacaagaaattataaacaaagtatttgaataa

SEQ ID NO: 217003 - DNA, 619 bp, Unknown
  Bacterial polypeptide expressing nucleotide sequence isolated from the Sargasso Sea
atgtgcaggagaaaatattcaagttgtaaattgtaccactccatcaaattatttccacgtcctaagaagacaaatgcatagagagtttagaaaacctctaattataatgacacctaaatctttacttagacacaagcgttgtatatctaaaatttctgaatttgtttcaaaaagttcatttcatagagttttagaagacgatgcctatgacaaagagaaaaatttaatttctttaaaaaaggatagcaagataagaaaagtagtaatgtgctctggtaaaatttattatgatttaattgaacagagggaaataaccaaaactgatgatgttatttttgtccgtttagagcaattatacccgttcccagctaaaacattagctggagttttaaaaaggtataaaaaagcccaatttatatggtgtcaagaagaaccaaaaaatatgggagcttggaacacagtgaggaattacatcgaaagaactttagatatgataaattttaaggatattaacattaaatttgtaggtagatcagcatcttcaaccactgcgactggaaatgcaaacaaacatcttgcacaacaaaaagaaatattagaaaagatactaaaacactaa

SEQ ID NO: 217004 - DNA, 945 bp, Unknown
  Bacterial polypeptide expressing nucleotide sequence isolated from the Sargasso Sea
atcgtcacgtggacatatgttttcaaaaccaatcctgtgcggccgcgccgcgaacacgaaggtccaattatacttgagaattttggtttgagtgatgcggatatggatacaaagtttcaagttggagaacgtatcggaattggtaacgcaacattaagggagattcatgaatttttagaacaaacatattgtggttctatcggagttgagtacaaattcatgagaacaattgagattattcaatggcttgagcaaaaaatggaatcttgccgaaacactccaaatttttcccgtaaggagaaaattgatcttttaagaaaaactaatgaggcggtggcatttgagaattttctgcataccaaatttgttggtcaaaaaagattttctcttgaaggaggagaatcaatcattcctgcacttgacactgtagtggagtttggcgctgaactcggtgtcgaagaatttgttattggaatggcgcatcggggtcggcttaatgtgctggcaaatattttaggtaaaacttataacgatatttttgctgaatttgaaggtaaaggattcggagatgatgtatttgcaggagacgttaaataccacatgggttattcaagtgataaaaaagccaggaacggaaaaatagtgcacttaagccttacacccaacccttctcacctagaggctgtaaatccggtggtgcagggaatttctcgagcaaagattgatcaatatcacgaaggaaatgcaaaaaaacttgttccgattctaattcatggtgaccattccatggcaggacagggcattgtatatgaagttttgcagatgtcaaaacttcccggctacggtactggagggacagtacacctcgtaattaacaatcaggtaggattcactgctgattttatcgaaggacgttcaagtacttattgcactgatgtaagaaaa

SEQ ID NO: 217005 - DNA, 745 bp, Unknown
  Bacterial polypeptide expressing nucleotide sequence isolated from the Sargasso Sea
acaatttggagattttagtaatggtgcgcaaatcatgattgatcagtatctctcctcagcagaagataaatggaaacttcaaaatggacttgttttaatgcttccacatggatatgagggtcaaggagcagaacattcctcagcaagattagaaaggtatttacagctatgtgctaaaaataacatgtacgttgcaaattgtacaacgccatctaacttatttcacattctacgtagacaacaaattacaagttttagaaaaccattggtattgctcacaccaaagagtttgctgagacatccaaaagtaatttcaaaggccagtgatttaataaatggagaatttttatctatcattgacgataaagatgatgaaaaaaatctcaaatcattagtcttttgtagtggaaaattttattatgatcttcttcactacaagagagtcaataaaattacaaatgtggctattgttagaattgagcaattatttccattacccaaaaaagaaattaatgatattatcaaaagttattcttatgatgaaatagtgtgggcgcaagaagagccaagaaatatgggcgcatggggatatttattaatgcatctagatattgcaaaaaacttcagagtagcctctagaagattttatggagcaccagcatctggaagtaaagccagatttgataaaagacatagtgaagttattgaatatgtttttgataaatcaaaaaataatatgcgataa

SEQ ID NO: 217006 - DNA, 808 bp, Unknown
  Bacterial polypeptide expressing nucleotide sequence isolated from the Sargasso Sea
tttagggatcgtatggaaaaagatgaaaatcatttaaagtttaccactaatggaaaaaaaaatattttaaataaattaattcaagctgaaggatttgaaaaatttttagcattaaaatttgtaggaactaaaagatttggattagatggcgctgagtctttaataccagccttggaacaaataattaaaagaggaggacaactaggagttaaagaaattaaaattggaatgccgcaccgaggtagattaaatgtcttagctaatgttttgcagaagtcttataaaaggatttttaatgaatttgctggagagttttccaatactccggaagattcagctggagatgttaagtatcatttgggagcttcgtcaaatagagaatttgatggaaattctgtccatgtaagtttaacagataacccttcgcatttagaggctgtcaatcctgttgtacttgggcaaactagagcaaaacaattttttcataaagatagtaaaagaaataaggtaataccaattttaattcatggtgacgcagcttttgctggacaaggtgtagttgcagaatgttttgcaatgtcaggtctgccaggtcacaatactggaggaacaattcatattattgttaataatcaaattggatttacaactagcccaagatttgcaagatcaagtccttatccttcagatttaggaaaagttgttgacgcacctataatacactgcaatggagatgaccctgaagcagtagtgcattgtgcaaaaattgcaattgagtttagacaaaaatttaataaagacgtagtta

SEQ ID NO: 217007 - DNA, 910 bp, Unknown
  Bacterial polypeptide expressing nucleotide sequence isolated from the Sargasso Sea
tttatgcatatttcaaaccctaaagaaagaaaatgttttagagatagaatagaaaaagatgaaaatgctattaaatttacaataaaaggaaagcaagcaatattgagtagattaatttatgcagagggctttgaaaaatttttacatacaaaatatattggtacaaaacgttttggtttagatggtggagaaagtttaattccagctttggaacaaattataaaagtagttgggcaaaacaaagtcaaagaagttaaaattgggatgtctcacagaggtaggctaaatgttttagctaatttattacaaaaatcatacaaaagaatttttaatgaatttacaggtgaaatcgaagctacttcagaagaaagtgctggagatgttaaataccatctgggagcttcttcaaatagggaatttgatggaaactcagttcatattagtttaactgataatccttcacacttagaagctgttagcccggttgttttgggacaaacaagagcaaaacaatattttcaccaagattatgaaagaaataaagttataccaattttaattcatggagacgcggctttttctgcacaaggagtagttgccgaatgttttgcaatgtcaggacttccaggacataatactggtggaacaatccatatcattattaacaatcaaattggatttactactagtcctaggtttgcaagatcttctccatatccttcagatattgcaaaaatggttgaagcaccaatattacatgtaaatggtgatgatcctgaagcaacagtttatgcagcaagaattgcaacagaatttagattaaaatttaatagagatgtggtaattgatatgttttgctacagaagatttggtcataacgaaggtgatgagccatctttacacaaccact

SEQ ID NO: 217008 - DNA, 803 bp, Unknown
  Bacterial polypeptide expressing nucleotide sequence isolated from the Sargasso Sea
catggctcaccgtggccgtctgaacgtgcttgtcaacacgctgggcaagatgccggccgacctgttcgccgaattcgaaggcaagcacgtcgacgacctgccggccggtgacgtgaagtaccacaagggcttctcgtcggacgtgtcgacggaaggcggcccggtccacctgtcgctcgcgttcaacccgtcgcacctcgagatcgtgaacccggtggtcgaaggttccgcgaaggcgcggatggaccgtcgcggcgacgaagacggcctgcaagtgctgccggtgcagatccacggtgacgcggccttcgctggccagggcgtcgtgatggaaacgctgaacctcgcgcagacgcgcggctacggcacgcacggcacgctgcacatcgtcatcaacaaccagatcggcttcacgacgtccgacccgcgcgatgcgcgctcgacgctgtactgtaccgatgtcgtcaagatgatcgaagcgccggtgctgcacgtgaacggcgacgatccggaagctgtcgtgctcgcgatccagatcgcgatcgactaccggatgcagttccacaaggatgtcgtgatcgacatcgtctgcttccgcaagctgggccacaacgagcaggacacgccggcggtcacgcagccgctgatgtacaagaagatcgcgcagcacccgggcacccgtgcgctgtacgccgagaagctcgtgcagcagggcgtgatcaccgcggaagacgccgacaactacgtgaaggcgtaccgcaaggcgatggacgacggtcaccacacggtcgacccggtcctgt

SEQ ID NO: 217009 - DNA, 905 bp, Unknown
  Bacterial polypeptide expressing nucleotide sequence isolated from the Sargasso Sea
agaaatttatgaaaagagattaataaatgagaagatacttaaaaaagatgaatcaattaaaataaaaaaagaatttataaagtttctagataaagaatttgaattagcaaaatcttacaaaccaaataaagcagattggttagatggaacatggaaaggatataaaaccgcttcttttgacgctagaaaaggtataacttctatatcaaaaaaggattttttagagattggaaatcaaatacataaaataccaaatagttttaatatccataaaaaaattcagaagattttcgataatcgaaaacaatctactcaagagggaaaaaatattgattgggctactgctgaagctttagcctttgcatctcttcttaaagaaggaaacggagttagattatcaggtcaagatgtaggtagaggaacttttagtcaaagacatgcagttctatatgatcaagaaaatgaaaatagatttgtcccactccgacattttataaaggaacaaggtctttttgaaatagttgatagttttttatctgaatttggtgttcttggttttgaatatggttactctcaaactgatcctaaaactttagttttatgggaagctcaatttggtgattttgctaatggagcccagatagtcattgatcaatttattaccacaggagaaagaaaatggttacgtatgtcaggattaacaattttattgccccatggacatgaaggacagggtccagagcatacaagttcaagaatagaaagatttttattaatgtgtgcagaggataatattcaagtagcaaattgtacaagtcctgcaaattattttcatatacttcgtcgtcagcttttgagagattttcgcaaaccccttgttttaatgacaccaaaatcaacttaag

SEQ ID NO: 217010 - DNA, 838 bp, Unknown
  Bacterial polypeptide expressing nucleotide sequence isolated from the Sargasso Sea
caggattcagggagaggcacattttctcagcgtcatgccatcattacggcagaggataacacaaaatacgttcccttaaaccacatttctgaagatcaggcaaggtttgaagtatataattcctttctttctgaatacggtgttcttggttttgagtatggctatgcttatgcttcgccaaactcccttacaatatgggaagcgcaatttggagattttgtgaacggtgcacaaatagtaatcgatcagttcgtttcttcttcagaaacaaaatggcagcgaatgaatggtgttgtattgatgcttccccacggtcatgaaggacagggaccggaacatacttctgcacgtattgaacgtttcctgactctttgtgcagataacaatatgcagataataaattgcactaccccagccaatttttttcacgttttgagacgtcagatgactttccctttccgcaaacctctggtgatttttactccaaagagcttattacgacatccaaaatgtgtcagtcctctagatagttttctggaaggcacacgattcatcgaagttattaaagatgaatattcacatactcagtctgtacgaaagttattattatgctgtggtaaagtttactatgacttgctagaacatcagcaaaaaaatcagatcaaagatattgcaattattcgtttggagcagctatacccttttcctgaaaaacaacttcgctctgttttaaatctttattctaatgccaagaatatattctgggtacaagaagaacctgaaaatatgggtgcttggagttttatgcttagaacattccctcaagaaaataggcttt

SEQ ID NO: 217011 - DNA, 832 bp, Unknown
  Bacterial polypeptide expressing nucleotide sequence isolated from the Sargasso Sea
aaaattaaagaagttaagattggaatgtcacatagaggcaggttaaatgtattggcaaatgttttgcaaaaatcatataaaaggatctttaatgaatttgctggagaagtaaataatgctaacgatgatggagctggagatgtaaaatatcatcttggagcatcatcagatagggaatttgacggaaattcagttcatgtaagtttaacagataatccttcacatctagaagcagtcaatccagttgtattaggtcaaactagagcgaaacagtttttccataaagatgtagaaagaaataaagttattcccatactaattcatggtgatgcagcttttgcaggtcaaggtattgttgcggaatgttttgcaatgtcaggtttaccaggccataacacaggtggaacaatacatattattgttaataatcaaattggttttacaactagcccaagatttgcaagatcttctcctcatccttcagatgttgcaaaaatggttgaagctccaattatacatattaatggagatgatcctgaagcagtagtatatggagctagaatagcagctgaatttagattaaaattcaatagagatgtagtaatcgatttagtttgttatagacgatttggtcataacgaaggtgatgaaccttcatttactcagcccttgatgtacaaaaaaatcagatctcatccttcaactgttaatatttatggaaagaaattggtaaatgagagcttgatatctgaagaaagtcttaattctcaaattaataaatttaaagaactgttagataagcaatttaaaactgctaaagattataatccaa

SEQ ID NO: 217012 - DNA, 969 bp, Unknown
  Bacterial polypeptide expressing nucleotide sequence isolated from the Sargasso Sea
ggggaggctttaatacccgcaatggaacaaattataaaacggggtggcaatttaggcgttaaggaaatagtgattggaatgccccataggggtagattatctgtactagcaaatgttatgggaaaaccatttaaagccatttttaacgaattccagggtggtagttataaacctgatgaggtcgaaggttctggggatgtaaagtaccatctaggagcttcttcagatagagagtttgacggaaataaagttcacctatccctcacagctaaccctagtcatttggaggctgtaaatcccgtagtactaggtaaagttagggccaaacaagaacaacttaatgacgatagccgtaaacaggttcttcctatcctcttacatggagatgctgcttttgctggtcagggagtagttgcagaatgttttgggctatcagggctaaagggtcacaaaactggcggaacaattcatataattgttaataatcaaataggtttcaccacctccccaagtaactccagatcttccccataccccactgatattgctcttatggtagaagccccaatttttcacgtcaatggagatgacccagaagcagtggttcatgctgcaaaagttgcaactgagtttagacaaaaatttcgaaaagatgtagtgatagatattttctgttaccgccgttttggtcacaatgaaggtgatgagcctatgttcacccaacctaacatgtacgcaaaaataaaatcacaacctactgcactacaaaaatataccaaaagattaattgaagatggattattgccagaaggtgagatagatcaaattaaaactaaatttcaatcttttttaagccaagaatttgaggcaagcaaatcttataagcctaataaggctgattggcttgatggtaaatggtcaggtgtaaaaagtagagaacaatttaccagagaggcaagacgtctctta

SEQ ID NO: 217013 - DNA, 792 bp, Unknown
  Bacterial polypeptide expressing nucleotide sequence isolated from the Sargasso Sea
tatgaaaaagacctattgtggaaaaataggttatgagtttatgcatatttcaaatccagatgaaagaaagtggtttagagatagaatagagcaagataaaaatgcacttcaatttactaaaaatggaaaagaggcaattctaaataaattagtacaggcggaaggttttgaaaaatttttagccactaagtatgtggggacaaaaagatttggtttggatggtggagaaagtttgatacctgcgcttgaacaaattataaaaattggtggtcagaataatataaaagaagttaaaataggaatgtctcacagaggtagacttaatgttttagcaaatgttttacaaaagtcttacaagaaaatttttaatgaatttgcaggtgaatttagttctgatactgaggatagtgcaggagatgtaaaatatcatcttggagcatcatcagacagagagtttgatggaaattcagttcacgtaagtttgacggataacccttctcacttagaagctgttaatccagttgtcttggggcagacaagagctaaacaattttttcacaaagaccgagagagaaataaagttatacctatcctcattcatggagatgcagcatttgcaggtcaaggtgttgtagctgaatgttttgcaatgtctggactaccaggacacaacactggaggaacaattcatattattgttaataatcagataggatttactactagtccaagatttgcaaggtcttcaccctatccatctgatgttgcaaaaatggtagaggcaccgatcct

SEQ ID NO: 217014 - DNA, 862 bp, Unknown
  Bacterial polypeptide expressing nucleotide sequence isolated from the Sargasso Sea
gactctgctggagatgttaaatatcatttaggagcatcatctaatagagaatttgatggaaactcagtacatgtaagtttaacagacaatccatctcatttagaagctgtaaaccctgttgtattaggtcaagtgagagctaaacaattttttcataatgataaagaaagaaaacaagtaattccaatattaatacatggtgatgcagcatttgcaggacagggtgttgttgctgagtgttttgccatgtctggattgaaaggtcataataccggtggaaccattcatattattgttaacaatcaaattggctttaccacaagtccaaggtttgcaagatcaagtccatatccatctgatttaggaaaggtagtagaggctccaattttacattgtaatggggatgatcccgaagcagtcgttcattgtgctaaaatagcaattgagtttaggcaacgatttaaccgagatgttgtgattgatttaatttgttacagaagatttggtcataatgaaggagacgagccttcctttactcaaccgttaatgtataaaaaaataaggtctcatccttcaactttaaagatttatgctaaaaaacttatagatgaaggatctattactgttagtgattttgaaagtgaaaaaaaagcatttaattcacttttagataatcagtttaaatcagcaaaagaccataaaccaaaattagactggtttgagggaacttggtctagatacagaccacaaaaaggtaaggataaaagaggaaataccggtgttaatcttgatactttagccaaaatctctgaaaaaagtaatatactaaatgaagatttaaatgttcacaaaacaattaaaa

SEQ ID NO: 217015 - DNA, 850 bp, Unknown
  Bacterial polypeptide expressing nucleotide sequence isolated from the Sargasso Sea
aatgaatttgcaggtgagctctttagtactcacgacgaatcagctggagatgtaaaatatcatttgggtgcttcgtcagacagagaatttgatggtaattccgtgcatataagtttaactgataatccttcacatttagaggcagtagacccagttgttttaggacagacaagagctaaacaattctttcataaagatttaaagagaaataaagtaataccaattttaattcatggagatgctgcttttgctggacagggtatagtggctgaatgtttcgctatgtcaggtttgccaggacataatactggtggaacaatccacattattgttaataatcaaattggatttacaacaagtcctagatttgcaagatcaagcccttatccatctgatttaggcaaagttgtcgatgctcctattttgcattgtaatggtgacaacccagaatcagttgtacattgcgcaaaaattgcaatcgaatttagacagcaatttaataaagatgttgttattgatatgatttgttatcgtagatttggtcataatgaaggtgacgaaccatcttttacccaaccattgatgtataaaaaaattagagaacatccaacaacacttaacgtatatggcggcacattggttaaacatggaacactcaatcaagaagaatttgataaaatgaaaatagaatttagaaatttacttgatgaacaatacaaaactgcaaaagattacaaacctaagatcgaatggtatgaaggaacatggtcgaggtataaaccagaaaaaggaaaagataaaagaggaaaaagtggagtaaatttagataaaattataaaaatttcagaaa

SEQ ID NO: 217016 - DNA, 730 bp, Unknown
  Bacterial polypeptide expressing nucleotide sequence isolated from the Sargasso Sea
atcaggtcaagatgtaggtcgaggcacttttagtcaacgtcacgcatttttgtatgatcaagaaaatgaaaatcgttttgttccattacgtcattttacaaaagaacagggattatatgaaattgtagatagttttttatctgaatttggtgttcttggttttgaatatggatattctcaagctgatccaaaaactttggttttatgggaagcacaatttggtgattttgccaatggcgctcaaataattattgatcaatttattacaacaggtgagagaaagtggcttcgtatgtctggtttgacaattttgttaccacatggtcatgaaggtcaaggccctgaacactcaagctctagaattgaaagatttttaactatgtgtgccgaagataatattcaagttgctaactgcactagtcctgcaaattattttcatattttgcgtcgacaacttttaagagattttcgaaaaccattaattttaatgacaccaaaatctaccttgaggcataaaaaaaatacttcatctatagatgaatttattaatggctcaacctttcaccgtgttctaagcgaccctattcaagaaggtgaacaaaaaaatattaaaagattaattttatgttctggaaaaatatattttgaattacaagattatatagaaaaattaaaaaaaacagggatacacattgtgagaatagaacagctgtatccttttccatatgaa

SEQ ID NO: 217017 - DNA, 831 bp, Unknown
  Bacterial polypeptide expressing nucleotide sequence isolated from the Sargasso Sea
agcagttactcattgtgcaaaaattgcaactgattatagacaaaagtttaatagagatgttgtcattgatatgatttgttatcgaaggtttggtcataatgaaggggacgaaccttcttttactcagcccacaatgtatagaaaaataaaaaaacatcctacgacacttaatatctatgcaaaaaaattgatcgatgaaggagttgttacatccgaggaatttaataacatgaagacaaaatttaaagaccttcttcaagaacaatttacaacagccaaagagtataaacccaaattagaatggtatgagggagtatggtcaagatttaaacctgaaagaggcaaagataaaagaggtgttactggggtaccattagaaaaaataaaaaaaattggtgaaaaaataactttaataccagagagttttaatgcgcatccaactttaaaaaaaatttttgaaaacaagaaaaaaatgtttcaaactggagaagggtttgactggtcaacagcagaacacctagcttttgcaactttattggatgaaggttacccagttagactttctggacaagattctgctagagggactttcagtcagcgtcattcagtgttgaaagatcaacttaacggaacaaaatatatacctttaaataatatttcaagaaatcaaaaacgatttgaagtaatagacagtttattatctgaaatggcggttcttggattcgaatatggttatgctctttcagaaccaagtacgctagtaatttgggaagcacaatttggagactttgctaatggagctcaagttattatagatcaatttattacttc

SEQ ID NO: 217018 - DNA, 739 bp, Unknown
  Bacterial polypeptide expressing nucleotide sequence isolated from the Sargasso Sea
gatggataacttgtcatacattggtaatgctgacccttcagctattgaatatttgtataaagaatacttaaaaaaccctgaaaacgttgatacagggtggcaaaagttttttgaaggttttgattttgctagaaccaactatgatcaagatggagaaattcctgaaaactacattaaagaatttcaagtaataaacctcattcagggataccgaactagaggtcatttgtttactaaaacaaaccctgttcgtgaaagaagaaaatataatcccacccttgaactgtcaaactttggacttcaagaatcggaccttgatctgatttttcaagctggagaacaagttggaattggccctgcacctcttaaagaaattattgcacatcttaattcgacatattgccaatctataggaattgagtatacctatatgagagaccccaagcgtttagaatggtttacaaaaaaaatagacttccatcaagaagttaaatttagtaaagaaagaaaacttgacatttactcaaagcttaataaagcttctcaatttgaaagtttcttaggaaaaaaatttgtgggacaaaaaaggttttcaatagaagggggagaatctctaattccagcattaagcgcattaattgaaaaaggctcggagcttggcgttgcatattttgtgatgggaatggctcatagaggcagactaaacacccttaccaatattttgaaaaaagacctagag

SEQ ID NO: 217019 - DNA, 677 bp, Unknown
  Bacterial polypeptide expressing nucleotide sequence isolated from the Sargasso Sea
tgatttaggggttgaagaatttgttatgggaatggcacatagaggaagacttaatacattagctaatatttttggaaaatcaacaaaagacatatttagtgagtttgatggtaaagattacgatgatgatgtttttgatggagatgttaaataccatatgggatggacttcaaaaatagatccaaataaagacggaaaaaaaatcaatataagtcttgcaccaaacccttcacatttagaaactgtaggagcagttgttcaaggtattgcaagggcaaaacttgaaaatagttattcaaatgacacttccaaagtattaccaataatagttcatggtgatgcagctattgctggacaaggattagcatatgaaatagttcaaatggcaagtctcaagggttattcaactggaggtactgttcacataattgttaataatcagattggcttcacaacaaactatctagatgcaaggtcaagcacctattgtactgatgttggtaaagtaactctatctcccgtgatgcacgttaatgcggatgatgtcgaagctgttgttcatgcagttctttttgccttaaattatagaatgaaatttaatagtgatgtatttatagatttacttggatacagaaagtatggtcataatgaaggagatgaaccaagatttactcagc

SEQ ID NO: 217020 - DNA, 943 bp, Unknown
  Bacterial polypeptide expressing nucleotide sequence isolated from the Sargasso Sea
aatggagatgatccagaaaatggtagtttttgctgcaaaattagcatgtgaatatagatacaactttaaaaaagatattgttatagatatgttttgctatagacgaaggggccacaatgaggctgatgagccgtcttcaactcaacctatcatgtatcaaaaaattgctaagcaaatttctgtgaaaagagcatatcaggaaaaactcatttcatcaggagttactagtcaatctgagtgtgatgagatagaaaaaaattataggtcagcgatagaaaagggagactctgttgttcataatcttgctacaaaaccaaatgagtcaatgtggtttgactggactccatatatggatcaaaaaggagatgttaaaatcaagtcttcatttagtaagaaaagattcaaagatcttgctgacaaagcatttatgcctcccaaagatttcactttacaaaagcaggtagataaaattttttctgacagacgccaaatggcagagggaaacattcctgttaattggggctttgcagagaatatggcatatgcaaccttgctcgatcaaggctatccaataagattttctgggcaagacataagacggggaacattttcgcatcgtcatgccattgtgttaaatcaacaggatggaagaggctgcatacctttagttgatattgcaaaaaatgcagatacaacatttgatgtatatgactcgcttttatctgaagaagctgtccttggttttgaatatggttattctgcaacgagtccaaaaggactggtcatgtgggaggctcaatttggcgacttcgttaatggagcgcaggttgttattgatcaatttattgtttctgctgaacacaaatgggaaagactctctggattagtcatgctgcttccgcatggttatgaaggacaaggtcctgagcatagtagcgcaaga

SEQ ID NO: 217021 - DNA, 718 bp, Unknown
  Bacterial polypeptide expressing nucleotide sequence isolated from the Sargasso Sea
aaaatatatggagaaaaattaattaatgaagaaattatttcttctgaagattttaataataatattaaaaaatttaaagatctacttgatgatcaatataaaaatgcaaaaaattataagcctaaaattgaatggtttgagggaacatggtcaagatataagccaagaagggggcaagacaaaagaggtgatactggctaccaaactacaaagcttttagaaatttcagataaaattcattcacttccgtccaaattaaatattcacaaaactataatgaaaatttttgaagctagaaagaattctgtgcttgaaggaaatcaaatcgattggtctactgcggaggcccttgcttttggttcattattagaagaaggatacccagtaagactcgtaggtcaagactctggaagaggaacttttagccagagacattcagttcttagaaatcaagttgataattcaagatatatcccgctaaataatatttcatcaaagcaaaaaaaatttgaaatagttgatagttttttatctgaattagctgttttaggttttgagtatggatatagtttagtagagcctaacacgctaactatatgggaagctcaatttggtgactttgctaatggagctcaggttatcattgatcaatttatttcttcaggagaaagaaaatggtcaagagcttctggtttagtgttattgttgcctcacggat

SEQ ID NO: 217022 - DNA, 838 bp, Unknown
  Bacterial polypeptide expressing nucleotide sequence isolated from the Sargasso Sea
cttagagatagagttgaaaaagatgaaaatgctttgcaatttacgaaaaacggtaaggaagctattttgaataaaattattcaagcggaaggatttgaaaaatttttacatttaaaatatgttggaactaaaagatttggtttagatggtgcagaaagtttaattcctgcgctagagcaaataataaaaattggtggtcaaaataaagtaaaagaagtcaaaattggaatgtcccatagaggaagactaaatgttttggcaaatgttttgcaaaaatcttataaaagaatatttaatgaattcgctggagaaatacactcttcatcagatgatgatggtgctggcgatgtaaaataccatttaggagcatcatcagatagagtatttgatggtaatccagttcatgtaagtcttactgataatccatctcatttagaggctgtaaaccctgtagttttgggacaaacaagagcaaagcaattttttcacaacgataaagagagaaaaaaagtaattcctatattaattcatggtgatgcttcatttgctggccagggtatcgttgctgagtgctttgcgatgtctggtttgcctggccataatactggcgggacgattcattttataataaataatcaaataggatttacaacgagtccaagatttgcccgttcatccccacatccttctgacgtagcaaaaatggtagattcaccaattattcacgccaacggcgatgatccagaatctgtagtatatgcagctaggatagctgctgaatttaggcttaaatttaatcgagacgtagtagtcgatttagtttgttacagaaggtttg

SEQ ID NO: 217023 - DNA, 992 bp, Unknown
  Bacterial polypeptide expressing nucleotide sequence isolated from the Sargasso Sea
tatattgcatatttcaaatcccactgaaagaaaatggtttagagatcgtgttgaaaagactgatgattttaactttacacaaaacggtaaagaagcaattcttaacaaactaatacaagctgagggttttgaaaaatttcttcatacaaaatatgttgggactaaaagatttggtcttgatggcggtgaaagcttaattcctgcacttgaacaaataattaaaattggtggtcagtcaaatgtcaaagaagtaaaaattggaatgtctcatagaggtcgactaaacgtattggctaatgttcttcaaaaatcttacaaaagaatatttaatgagtttgcaggagaaataagttcaaagtctaaagatgatactggagatgttaaatatcatttaggtgcctcatctaacagagagtttgatggaaattcagttcatgtaagtttgacagataatccctcacatttagaagcagttaatccagtcgttttaggtcaaactagagcaaaacaattttttcataaagataaagagagaaaaaaagtaattccgattcttattcatggagatgcagccttcgctggacaaggagtggtagctgaatgttttgcaatgtctggtcttccaggacataatacaggtggcacaattcacattatagtaaacaatcaaataggttttacaacaagcccaagatttgcaagatcttcaccatatccttctgatatagcaaaaatggttgaagcaccaattattcatgtgaatggtgatgatccagaggcggttgtttatgcagcaagaattgcaacagactttaggttaaaatttaatagagatgttgtcattgatttgatttgttatagaagatttgggcataatgagggagatgagccttcattcactcagcctttaatgtataaaaagataagatctcatccctccactatcaaagtttatggtgaaaaactggtaagtgaagggtcattacaaatga

SEQ ID NO: 217024 - DNA, 799 bp, Unknown
  Bacterial polypeptide expressing nucleotide sequence isolated from the Sargasso Sea
agaagatttggtcataatgagggcgatgaaccttcattcacgcagccgattatgtataaaaaaattaaacaacaaccttcaactttaaaattatattcatctcaattgataaacgaaaatattttaactgttgaacagtataaaacacaaatagaaaattataataaatatttggatcaggagtttcaaagttctaaaaattatatatcaaatgaacaagattggtttacaggagtttggtctaagtttacaacagaagttggttctgacagaagaggggtaacaggagttgacgagaatattattagaagtttaggccataagttatctgaaataccaaaagactttaatcctcatcatactattaaaagaatttttgataacaaaaaacaaatgattaaaacaggcgagaatattgattgggcaacagcggaaagtttggcatttgcaacattacttaatgaaggatatccagtaagattagttggacaagattctgtaagaggtacatttagtcagaggcatgctggaattacagatcaactaaatggagaaaaatattttcctttaaaaaatttgactgatagtcaagctcaagcagaaataatagatagtttgctgtctgaaatgggggtcttaggatttgaatatggatattcgctttctgaacctgatagtttagttctatgggaggcacaatttggagattttgcaaatggtgcccaagtcatatttgatcaatttataagctcaggagaaaaaaaatggtctcgtgcaagtgggctggtggtgcttctac

SEQ ID NO: 217025 - DNA, 535 bp, Unknown
  Bacterial polypeptide expressing nucleotide sequence isolated from the Sargasso Sea
aaacctttgatagttatgactcctaaatctttattgagacataaaagatgtatttcttatcttgaagattttacaaaaaaaacaagatttcatagaattttagaagatcatgcttaccttgaaaatagtaaacttataaaacttaaaacaaataataaaattaaaaaagttattatgtgttcaggtaaaatatattttgatctattagaggctagagaaaaaagtaaaaatgacgaaatagtctttataagagtagagcagctataccctttccctgtaaaacatttaggaagggagcttcaaaagtacaaaaatgcagaatttatttggtgccaagaagaaccaatgaacatgggggcatggaatactgtgaaatattatatagagagaacactagaaatcgttaaaatcaaaggtgaaaaagtaaaatatgctggaagaaatgctgcggcatcaccagcaacaggaaacttgaacaaacatcttgcagaacaaaaagaaatattagaaaaggttgtaggtaggtttaattaat

SEQ ID NO: 217026 - DNA, 784 bp, Unknown
  Bacterial polypeptide expressing nucleotide sequence isolated from the Sargasso Sea
acgctgggcaagatgccggccgacctgttcgccgaattcgaaggcaagcacgtcgacgacctgccggccggtgacgtgaagtaccacaagggcttctcgtcggacgtgtcgacggaaggcggcccggtccacctgtcgctcgcgttcaacccgtcgcacctcgagatcgtgaacccggtggtcgaaggttccgcgaaggcgcggatggaccgtcgcggcgacgaagacggcctgcaagtgctgccggtgcagatccacggtgacgcggccttcgctggccagggcgtcgtgatggaaacgctgaacctcgcgcagacgcgcggctacggcacgcacggcacgctgcacatcgtcatcaacaaccagatcggcttcacgacgtccgacccgcgcgatgcgcgctcgacgctgtactgtaccgatgtcgtcaagatgatcgaagcgccggtgctgcacgtgaacggcgacgatccggaagctgtcgtgctcgcgatccagatcgcgatcgactaccggatgcagttccacaaggatgtcgtgatcgacatcgtctgcttccgcaagctgggccacaacgagcaggacacgccggcggtcacgcagccgctgatgtacaagaagatcgcgcagcacccgggcacccgtgcgctgtacgccgagaagctcgtgcagcagggcgtgatcaccgcggaagacgccgacaactacgtgaaggcgtaccgcaaggcgatggacgacggtcaccacacggtcgacccggtcctgtcgaactacaagagcaagt

SEQ ID NO: 217027 - DNA, 799 bp, Unknown
  Bacterial polypeptide expressing nucleotide sequence isolated from the Sargasso Sea
caggcagagggatttgaaaaatttttagctaccaagtatgtgggaacaaaaaggtttggtttagatggtggtgaaagtttaatacctgcacttgaacaaataataaaaattggtggtcagaataatattaaagaagttaaaataggcatgtctcatagaggtagacttaatgttttggcaaatgttttacaaaaatcatacaaaagaatttttaatgaatttgctggggagtatagttctgatactgaagatggcgctggagatgtaaaatatcatcttggagcatcctcagatagagagtttgatggaaactcagttcatgtcagtttaacagacaatccttctcatttagaagctgttaacccagttgttttaggccaaacaagagccaaacaattttttcacaaagaccgtgaaagaaataaagttatacctatactcattcatggagatgcagcttttgcaggccaaggagttgtagcagaatgttttgcaatgtctggactaccaggacacaacactggaggaacaattcatattattgttaataaccagataggatttactactagtccaagatttgccaggtcttcaccttatccatctgatgttgcaaaaatggtagaggcaccaattcttcatgttaatggtgatgatccagaagccgttgtttatgcaactagaatagcaacagaatttcgacttaaatttaatagagacgttgtagtagatttaatttgttatagaagatttggacataatgagggggatgagccttcatttactcaacctttaatgt

SEQ ID NO: 217028 - DNA, 607 bp, Unknown
  Bacterial polypeptide expressing nucleotide sequence isolated from the Sargasso Sea
tatgcaagtgatgaattgtacaactccagctaattactttcatgctttaagaagacaaatgcatagagattttagaaaacctttaatattaatgacacctaaatctttactaagacacaagcattgtgtttctgacttagaggattttaataaaaaaaattcttttcatagagttttatgggatcatgcaatagatccaaaaaccaaaggctttatcaaactcaaaaagtcaaacaaaattaaaaaggtgattctctgttcaggtaaaatatattttgacctacttgaggctagggaaaaattaaagagagatgatgttgtattttatagaatagagcaactttatcccttcccagcaaaaagtcttgttaaagaacttagaccttatgctaaaaaagctaagttttattggtgccaagaggagccgaaaaatatgggagcatggttttcagtaagagattatatccaatggacattggataatataaaagctaataataataaaatttcttatatagggagaagtcctgatgcatcacctgcgacaggttatgcaaaaacgcatatttcccaacaacaagaaattgtaaagaaagtttttgaataa

SEQ ID NO: 217029 - DNA, 787 bp, Unknown
  Bacterial polypeptide expressing nucleotide sequence isolated from the Sargasso Sea
tatttgttacagaaggtttggtcataatgaaggtgatgaaccttcatttactcaaccacttatgtataaaaaaattcgctctcatccttcaccagtaaaagtttatggagaaaaattagttaatgatagatctatctcgaatgagtatttgaataattcaattaagaaatttaaagacttgctagatgaacaatttaaaaatgcaaaaaattataaaccaaaaattgaatggttcgaaggtacttggtctagatataagcctgaaagaggtaaagataaaagaggtgttactggctcagatactaaaaaattaaaagaaatttctgataaaattaacagcattcctcaagaaattaatatccataaaacaatcaaaaaaattttagataacagaaaattatctgtatcaaatgaaaaaggtatagattggtcaacggctgaagctttagcatttggatcattattagaggagggttatcctgtaagactagtaggccaggactctggaagaggtacatttagtcaaagacactcggttctgagaaatcaacaagataattcaagatatgtgccactaaataatatttcaaaaaaacaaaaaaattttgaagttgtagacagttttctttctgagctcgctgttttaggttttgaatatggttacagtttagttgaacctaatacgcttactatatgggaagcacagtttggagattttgctaatggggctcaagtagacattgatcagtttgttgcctcaggtgaaagaaaatgtcaagggcctctg

SEQ ID NO: 217030 - DNA, 637 bp, Unknown
  Bacterial polypeptide expressing nucleotide sequence isolated from the Sargasso Sea
agatttttacaattatgctcaaatgacaatatgcaggtaatgaattgcacaactcctgcaaattattttcatgctttgagaagacaaatgcatagaagttttaggaagcctctaattataatgacaccaaaatcattattgagaaacaaatattgtgtatcaaatttagaagattttaacaaaaataatacctttcatagagttctgtgggaccacgctattgatcctaagtctaaaggatttattaaacttaaagaaaattcaaagattaaaaaagtaattctttgttctggaaaagtatattttgatttattagatgctagagaaaaactcaaaagagatgacgttgttatgtatagaatagaacaattatatccttttccagcaaaagctttagttaaggagttaaaaccatatgctaaaaatgctcaatttttttggtgccaagaagaaccaaaaaatatgggtgcctggttttcagtaagagattatatccaatggacattagacactttaaaggctaataataacaaaatttcttatatgggaagaagcccagacgcaactcctgcaacaggatatgccaaaaggcataattctcaacaacaagaaataattaataaggtatttgattaat

SEQ ID NO: 217031 - DNA, 982 bp, Unknown
  Bacterial polypeptide expressing nucleotide sequence isolated from the Sargasso Sea
agaagacgttgtgattgatattttttgctaccgacgttttgggcataacgaaggtgatgaacctatgtttacccaacctataatgtacaaaaaaattaaaacccatccgacagctcttgaattatactccagaaagctgaaggcagaaggagtactggaagatggtgaatttaacaagctaaaatctaattttcaaagctatctgaatgacgagttcgaggctggaaagacctacaaaccaaataaggcggactggcttgatggaaaatggtctgggcttacgaagcgaccggacaattacgaaaggggaaaaacctccataaagaaggatgtgtttaaaaaaatatcgaaggtactgacaaccgtcccaaataatttcaatatacacaaaacagtgtccagaatgatagaaaataaaaaggataccttaaacaaaggagaaggtattgactgggcaacggctgaagcgcttgcatttggctctttgttaaatgaggggttttcggttaggctgtctggccaagattcgaaaagaggtactttttcccagaggcattccgcaattatagatcaagagactgaagaacgtttctatcctctttacaacataacacaaaattccattgagtttggtgtgtctaaaataggtggcaaattggatattagtcaaaaaacccaatttgaggtgattgactccatgttatccgagtacgctgtcttgggttatgagtatgggtactctcttgcggaaccgaattgcttaactctgtgggaagctcagtttggagattttgttaatggggcacagataatgatagatcaatttatatcctcaggagaaaaaaaatggttgagaatgtctgggcttgtaatgctactacctcacggttatgaaggtcaagggccagagcactcttctgctagattagaaagatttcttcaggcatgtgcagaagaaaattggatagtggctaatgtttcg

SEQ ID NO: 217032 - DNA, 887 bp, Unknown
  Bacterial polypeptide expressing nucleotide sequence isolated from the Sargasso Sea
cgttttggcaacgttttacaaaaatcttacaaaaaaatttttaatgaatttgcaggtgagtttagtactgatactgaagatggcgctggcgatgtaaaatatcatcttggagcatcatcagatagggaatttgatggaaactcagtacatgtaagtttaacagataatccttcccatttagaagctgttaacccagttgttttaggtcaaacaagagccaaacaatttttccacaaagaccgtgaaagaaataaagttatacctattcttattcatggggatgcagcttttgcaggtcaaggagttgtagcagaatgttttgcaatgtctggactgccaggacataacactggagggacaattcatattattgttaataatcagataggatttactactagcccaagatttgcgaggtcttcaccttatccatctgatgttgcaaaaatggtagaggcaccaattcttcatgtcaatggagatgatccagaagcagttgtttatgcgactagaatagcaacagaatttcgactaaaatttaacagagacgtagtagtagacttaatttgttatagaagatttggacataacgagggagatgaaccttcatttactcaaccattaatgtataaaaaaattagatctcatcccagtgtttacaaaatttatggaaataaattagtaaacgaaaaatctataactcaagaattacttaatcaaaatgttaaatcatttaaagacttacttgatgaacaatataaaagtgcaaaagattataaacctaaaatagaatggtttgagggaacatggtcaagatataaacctgaaaaaggtaaagataagaggggtataacaggttttgatgaaaataaattaaaaataatctc

SEQ ID NO: 217033 - DNA, 871 bp, Unknown
  Bacterial polypeptide expressing nucleotide sequence isolated from the Sargasso Sea
aattattaagataggcggtcaatcaaaagtaaaagaggttaaaattggtatgtcgcatagaggcagacttaatgtattagctaatgttttacaaaaatcttacaaaagaatatttaatgagtttgctggagaaataagttcgaaatctaaggatgatactggagatgttaaatatcatttgggagcttcctcagacagagattttgatggaaacctagttcatgtaggtttaacagataatccatcacatttagaggcagtaaatcctgttgtactaggacaaacaagagcaaaacaattttttcatggagataaacaaagaaataaagttataccaatattaatccatggagacgcagcttttgcaggacaaggagttgtggcagaatgttttgcaatgtctggtcttcctggtcacaataccggtggaactattcatatcataattaataatcaaataggttttacaactagccccaggtttgcaagatcttctccttacccgtctgatattgctaaaatggttgaagcaccaattattcacgtgaatggtgatgatccggaagctgtagtatatgcagcaaggatagctactgattttagattaaagtttaatagagatgtattgatagatttgatttgttatagaagatttggtcataatgaaggagacgaaccttcatttactcaaccattaatgtataaaaaaattagatctcacccatccccaatcaaagtttatggccaaaatttgattaatgaaggctcaatctcaaatgattatttaaacaactctataaagaagtttaaaggcttattagatgagcaatttaagaatgctaaaaattataaaccaaaaattgagtggttg

SEQ ID NO: 217034 - DNA, 598 bp, Unknown
  Bacterial polypeptide expressing nucleotide sequence isolated from the Sargasso Sea
tttttgcaattatgtgcatctgagaatatacaagtttgtgttccaagttctccaaaacaaatttttcatcttttgagacgacaagcaataagaaaaatgagaactccactagttgtaatatcaccaaaaagcctactcagaaatcctatggctgtttctaacttagacgaattaacaaatggaagttttgattgtgtaattgatgatgatataaaaaaacctgaggcggtaaaacgcttaattctttgttcaggcaaagttttttatgatcttattgaaaagaaaaaagaagaaaaccgcgaagatattgctgttgttagaatagaacaattgtatccatttccttatgatgaccttgaagaaatccttacaaagtatcaaaatgtacaagaatttatatggtgtcaagaagagcctttaaatcaaggtgcgtggtttagccatagacacagaattcaaagagttttagataggctaggtgatggtcttgaggttagtttggtaagcagaccagcagcagcagcacctgcagttggatttatgaagcttcatcttcaacaacaaaaggatctagttaatgaggcaatttgtaaatgag

SEQ ID NO: 217035 - DNA, 865 bp, Unknown
  Bacterial polypeptide expressing nucleotide sequence isolated from the Sargasso Sea
tttgattccttgcctcaagtagatggctcaaatgaagaaatttctcatcaagaagttatcaacaggtttaaagaagacgaagttaatccttcaattcaaaatatttcaggagaaactaaattaaatgctaatcaaactaaagtatttcaagtaattgaagcatatagaaatagaggacatcaaaaagctaatttagatcccttgggattaaatccgatcagacatacagaggatttagagattgaattttatggattggattcatcaaatctatcagaagtttttaacctagattcattaaatataggcaaaagatcagcctctttgtcagagattttaaaagcattagaatcaatatattgtcagactttgggtatagaatataatcatatttcctcattgtctgagagattgtggtttcaaaaacgtctcgagcccaacttaggaaaattaaattttaatactgaagagcagaaatacattttaaagcgcttaagttcagcggaaggccttgcaaaattcttggcatcaagatatccaggcatgaaaagattcggaatcgatggcgctgaatcattaattccgctagtcgatagccttattcagaattgcggggtgtttggcgctgaacaaatttgttttggaatggctcatagaggtagattaaatctgttggtaaatgttttagggaaatctccaaaagaactatttaccgagtttgaggaagattatgaattagagggcgctagcactggagatgtaaagtatcatcttggctcttcgactaatatactaactcctaacggagaggtgcacgtatcactagcaaataatccgtcccatcttgaaattgtggatccagttg

SEQ ID NO: 217036 - DNA, 781 bp, Unknown
  Bacterial polypeptide expressing nucleotide sequence isolated from the Sargasso Sea
ttagtctgctacagaagatttggccacaacgagggagatgaaccttcttttacccaaccagtgatgtatacaaaaattagatctcatccttcttcagtaaaaatatatggggaaaaattaattaatgatggattaataacttcagaagatttagataacaaagttggtaaattcaaaatattacttaatgatcaattaaaaaacgctaaaaattataagccaaaaattgagtggtttgagggaacttggtctaggtacaaacctgaaaaaggaaaagacaaaagaggagtaactggagctgataaaaaaattctttcgaatatttctgaaaagataaatactattccaaaagaattaaatatacataaaactataactagaattttcgaaaatagaaaacaagtaattcagcaaggatataatattgattggtctactgcagaatctctagcttttgctacattgttggaggaaggttatccagttagacttgtgggtcaagattctggaagaggaacttttagtcagagacattctattttgagaaaccaaaaagataattctagatatattcctctaaataatatttcaaataatcaaaaaagctttgaaattgttgatagttttctttcagaattggctgttttaggttttgaatatggatatagtttagtagaaccaaatacgcttacaatttgggaagcacaatttggagattttgcaaatggtgcacaaattattattgaccagtttatttcttctggagaaagaaaatggaaaa

SEQ ID NO: 217037 - DNA, 741 bp, Unknown
  Bacterial polypeptide expressing nucleotide sequence isolated from the Sargasso Sea
tttcaaatggggctcaaattatcattgatcaatatatttcatccgctgaagataaatggaagttacaaaatggaatagttctatttttaccccatggttatgaaggacaaggagctgaacattcctcagctagaatggaacgttacctacaattatgtgcaaaggataatatgtatgcagcaaattgtactactccatctaatcttttccatcttttaagaaggcaaatgttgacaaaattcagaaagcctttaattttattcactccaaaaagtcttttacgtcaccctaaggttatgtctaatgttgatgatttaacgaagtctaaatttattccagtaattactgattctgaaattgatccatctaaggcagtctctcttgtattctgtagtggtaaattttactttgatttaatcgattacagagagaaaaataatataaaaaatgttgctattgtaagaatagagcagttattccctcttccagttaaattgataatttcagaaattaagaaattctcaaatgccaaagatattgtttgggctcaggaagaaccaaggaatatgggtgcttggaatcatattcagacttatcatccaattgctaaaaatatgaggcctgcaaccagaagattttatggatcaacagcatcaggaagttatactagatttgagagaagacataatcaagtaattgaatatgtttttgacaaaacaaaaaacaattttagaaaataat

SEQ ID NO: 217038 - DNA, 883 bp, Unknown
  Bacterial polypeptide expressing nucleotide sequence isolated from the Sargasso Sea
tatcgacgatacggacataatgagggagatgagccacgattcactcaaccaatgctatacaagtccattgctaagcatgaaaatgtgtttaagatttttaaagaccagttattaaaaaatgcggtgattactgagacagaatcagatgaaatggtggcgaaatttaaacaatcattgcaagagaagttagattccactcggaataaaaaaacaaaggctgagttggatatgtttaaacgaaagtgggaaggctttcgaacatctgaagagaaagatttcgaaaaatccacgaaaactggtgcaacaaaaacatcattggagcaggttgcaaaagcattaagcacagcaccaaaagggtttaatgttttcaaaaaaacggccaagttgcttaaacagcgtgaagagatgttttttaagcaaaaaaaagtggattggggattggctgagcaactcgcttttggaacgttaattcttgatggtaataatgtgaggctctctggtcaagattgccaaagaggcacattctcacatcgacactccgtcattaaagatgagattaatgaaactcattacacaccgttgaatcaactatccaaaacagctggttatgaagttttaaactcccatctatcggaatactgtgttatggggtttgaatatgggtattcattagcttcaccgaatgatttaaccatatgggaagcacaatttggggacttttcaaacggggctcaaattatgattgatcagtacttaacatcatctgaaaaaaaatggcagcggatgagtgggttaaccttgttattgcctcatggttatgaaggtcaaggccctgagcattcatcggcaaggcttgaacggtatcttcagctttgtgccgaaa

SEQ ID NO: 217039 - DNA, 991 bp, Unknown
  Bacterial polypeptide expressing nucleotide sequence isolated from the Sargasso Sea
agcaaagataaaaatgcactccaatttacaaaaaatgaaaaagaagcaattttaaataaactagtgcaggcggaaggttttgagaaatttcttgctacaaaatatgttggaacaaaaagatttggtttagatggaggagagagcttaataccagctctcgagcaaataattaaaattggtggtcaaaatcaaatcaaagaagttaaaattggtatgtcacatcgaggtagacttaatgttttagcaaatgtattacaaaaatcttataaaagaatatttaatgaatttgcaggtgaaattagttcagataaagaagatggggctggggatgttaaatatcaccttggagcgtcttctgatagaaagtttgatggaaattctgttcatgtaagtttaacagacaatccatctcacctagaagctgttaatccagttgtattgggacaaacaagggcaaaacagttttttcacaaagataaagagagaaacaaagttattccaattttgattcatggagatgcagcttttgctggacaaggagttgtagcggaatgttttgctatgtcaggacttcctggtcataacacaggtggcacaatacatataatagtaaataatcagataggatttactacaagccccaggtttgctagatcatcaccttatccctcagacgttgcaaagatggttgaagctccaatacttcatgttaatggagacgatccagaagcagttgtttatgcgactagaattgcatcagagtttagattaaaatttaatagagacgttgttgttgatttgatttgttataggagatttggacacaacgagggagatgagccttcatttacccaacctttaatgtataaaaaaattagatctcatccaagtgtttacaaaatttatggcaataaacttgttaatgaacaatctattaccgaagaattactgattcaaaatgtaaaatcatttaaacaattattagatgagc

SEQ ID NO: 217040 - DNA, 945 bp, Unknown
  Bacterial polypeptide expressing nucleotide sequence isolated from the Sargasso Sea
ccatatccatcagatattgcaaagatggtgaaagctccaataattcatgttaacggagatgatccagaagcggttgtatatgctgcaagaatagcaactgattttagattaaaatttaatagagatgttgttatagatttaatttgctatagaagatttggccataatgaaggtgatgaaccatctttcactcaaccactgatgtacaaaaaaatcagatctcatccctctccagttaaagtctatggagacagattagtcgacaatcatttgattactaaagattttttaaattcatcaatcaaaaaatttaaagatttgctagatgatcaatttaaaaatgcaaaagactacaaacctaaaattgaatggtttgaaggaacttggtctagatataggcctgaaagaggaaaggacaaaagaggtgttactggtgccgatactgataaattaattaaaatttcgaataagattaattcaattccaaatgaaataaatatccataaaacaatttcaaaaattcttgaaaatagaagactgagtgtaaataatggcactagtatcgattggtcaacagcggagtctctagcttttggttcacttttggaggaaggatatcctgtgagattagttggtcaagactctggtagaggtacttttagtcaaagacattcagttttaagaaatcaaattgataactcaagatatattcctttaaacaatatatcaaaaaaccaaaaaaatttcgaaattgtagatagttttttatctgaattagctgttttaggatttgaatacggatatagtttagtagaacctaacactcttactatctgggaggctcaatttggagatttcgctaatggagctcaagttgttattgatcaatttatagcgtcaggagaaagaaaatggtctagagcgtcgggtttagtgatgttatta

SEQ ID NO: 217041 - DNA, 898 bp, Unknown
  Bacterial polypeptide expressing nucleotide sequence isolated from the Sargasso Sea
gatggaaagaaaatatctcgaagagctgcatccagctgaccatggttttaaaaaagaagattacaataaaaaaatttatttaggaaaatacatgaacaaaaagtatgcaactattaatgacatacttacgttttttagaaaagtgtattgttctactatcggagtagaatatatgcatatctcagacccaattgaaaaaatctggtttagagaaagaatggaaagagaagaaaatcaattgaaatttactgaaaatggaaagaaagcaattttaaataaactaatacaagcagagggttttgaaaaatttttagctgtaaaatttgtaggaactaaaagatttggaatagatggcggtgaagctttaataccagctttagaacaaatcataaaaagagggggacatcttggttttaaagaagttaaaattggccaaccacacagaggaagacttaatattttagcaaacgtattacagaaatcttacaagagaatgtttaatgaatttgctggagaatatacttcttttagtgctgactccactggagacgtaaaatatcatctaggcgcttcatcgaacagagagtttgatggtaacttagttcatgtttctttaactgacaatccttcgcatcttgaggctgtaaatccagttgtgttagggcaaacacgggctaaacaattttttcataaagatagagaaagaaaacaagttattccgattttaattcatggtgacgcagcatttgctgggcaaggtgttgttgcagaatgttttgcaatgtctgggcttccaggccataatactggaggaacaatacatattattgttaataatcaaataggatttaccacaagtccaaaatttgcacgctcctcaccttatccatctgactta

SEQ ID NO: 217042 - DNA, 834 bp, Unknown
  Bacterial polypeptide expressing nucleotide sequence isolated from the Sargasso Sea
ttttgaaaaatttttagcagtaaaatttgttggcactaaaagatttggacttgatggaggtgagtctttgattcctgcgttagagcaaattataaaaagaggtggccatctaggttttaaagaagttaaaatcggccaacctcacagaggaagactaaacattttagctaatgttttgcaaaaatcttataaaagaatgttcaatgagtttgcaggagagtatgcttcttttaattcagattctacgggagatgtaaaataccatttaggagcttcttccaatcgagaatttgatggtaatttagttcatgtatctttaacggataatccttcacatcttgaggcagttaatcctgtagtactaggacaaacgcgagctaaacaattttttcataaagatgaaaaaagaagacaagttattccagttttaattcatggtgatgcatcttttgccggccaaggagtagttgctgaatgttttgctatgtcgggggtaccaggtcataatactggagggacaatacatatcattgttaataatcaaataggatttactacgagccctaaatttgctcgctcctcaccatatccttctgatttagcaaaaatggttgatgcacccattttacatgtgaatagtgatgatccagaagcagttgttcattgtacgaaaattgcaactgactacagacaaaagtttaacaaagatgttgttatagacatgatctgctacagacgatttggacacaatgaaggagatgaaccatctttcactcagcccactatgtacagaaaaataaaaaaacatccaacaacacttagtatttattcaaa

SEQ ID NO: 217043 - DNA, 808 bp, Unknown
  Bacterial polypeptide expressing nucleotide sequence isolated from the Sargasso Sea
ttagcgaatgtgttacaaaaatcttataagagaatttttaatgagtttgcaggagaaataagttcttcagaagatggagctggcgatgtaaagtatcatttgggtgcctcttctgatcgagaatttgatggtaattcggttcatgttagtttaactgataatccatcacatttagaggcagttaatcctgttgtattaggtcaaacaagagctaaacagttttttcataaagataaagaaaggaagaaggtaataccaatattaattcatggtgatgctgcttttgcaggacaaggagttgttgctgaatgttttgcaatgtctggattaccaggtcataataccggtggaactattcatattataattaataatcaaataggttttacaacaagcccaagatttgcaagatcttctccttatccatctgatattgcaaaaatggttgaggctccaataattcatgttaatggagatgatccagaggctgttgtttacgcaggaaggatagctacagattttagattaaaatttaacagagacgtagttatagatttaatttgttatagaagatttggacataatgaaggtgatgaaccttcttttactcaacctttaatgtataaaaaaataagaactcatccatctcctgtaaatgtatatggagaaagattagttagagatggaacaatttcgaaaagtttcttagatgaatctataaaaaaatttaaagttctgctaaatgatcaattcaaaactgcaaaagattacaaaccaaaaatagagtggtttgagggaacttggtcta

SEQ ID NO: 217044 - DNA, 916 bp, Unknown
  Bacterial polypeptide expressing nucleotide sequence isolated from the Sargasso Sea
aagccttttcgagccatcatttcagagtttatgggaaatccttctaatccagaagaaactggcggttctggtgatgtaaaatatcatatgggctcatcatcagacagagaatttgatggtgtcaatgtacattttactctaaacgctaacccttcacatcttgaagttgtaaacccagtcgttatagggagagtaagagccaaacaaaaccaaagaaatgataaacttagaaacaaggttttaggactgcttattcacggagatgctgcatttgctggtcaaggaatacttgcagaaacttttgattttgcagaattaagaagttataaaactggtggaacacttcatttgattattaataatcaaattggatttactacttcgccagcctattcaagatcatcaccttattgcacagatgttgcaaaaattgtaatggcaccaatctttcatgtaaacgcagatgatcccgaatctgttgttcatgtctcaagaattgcaactgaattccgtcaaaagtttgcagcagatgctgttatagatattattggatatagaagatatggtcataatgaaggggatgaaccatcgtttactcaacctattatgtacaggaaaatcgctaatcatccttttgtaactaaaatatatgcagaaaagctaatcaaagaaaaaaagattactgaagaacaggcaaaaagagtttacgataataggaaccaatttttagaagaagaatttcaagctggaagtaattatttacctaataaggctgattggcttgaaggcaagtggactggtctaaagaaagcacctgggttagaagagagacgtggaattactggcgttactattgacaagataaaaaaaattggagagatcctgacttccgttccaagagatttgaaattcataa

SEQ ID NO: 217045 - DNA, 638 bp, Unknown
  Bacterial polypeptide expressing nucleotide sequence isolated from the Sargasso Sea
aagatttttacaattatgttcaaatgacaatatgcaggtaatgaattgcacaacacctgcaaactattttcatgcactaagaagacaaatgcatagagatttcagaaaacctctaattataatgactccaaaatctttacttagacataaacactgtgtttcaagcttaagcgattttagtaaaaaaaacacatttcatagagttttatgggatcacgcaatagatccaaaggtaaaaggtttcatcaaattgaaaaaaaaggaaaaaattaaaaaagtaattttatgttcaggaaaaatttattttgatttgcttgaggctagagaaaaatttaaaagagatgatttgatattttatagaattgagcaactttatccttttccagctaaggcacttgcaaaagagctaaaaccttatgcaaaaaaagctaaattttattggtgtcaggaagagccaaaaaatatgggagcttggttttctgctagagattatatccaatggacattagataatataaaggctaataatagaaagatttcttatattggaagaagtccagatgcatcaccagctactggttatgcaaaaagacatatttcacaacaacaagaaattattaagaaagtttttgaataat

SEQ ID NO: 217046 - DNA, 879 bp, Unknown
  Bacterial polypeptide expressing nucleotide sequence isolated from the Sargasso Sea
caaatttttagggcaaaaacgcttctctctagagggcggtgagactttgattgcgatactcgatagtatatttcaaagatgtggaaaaaataaagtcgatgaaatcgtcatgggtatggcacatagaggccgcttaaatgtactcggtaatttcttaggcaagtcctttgaatatattttacgagaattttcagaaaactatatccccgacaccatctatggtgatggcgatgtcaaatatcacctaggctttgaaacaaaacgcaaaaccttggatgatcacttagtcgaattacgcctagcggctaatccttcacaccttgaagcagttgacccagtcgtccaagggaaagcacgtgctcgtcaaagaattcgacaagaccttgaacgcaaaaaagtccttccaatattgatccacggggacgctgccatagcgggacaaggtatcgtttctgaagtatttaatttctcgcaacttaacggctatcgaactggcggcaccatccatatagttgtaaataatcaaataggatttaccactggaccagcagacgcacgctcaagtcgttattgcaccgatgtagcaaaaattgtcgaagcccctattttccatgtgaattgtaatgacccactggctgttgtcgctgcggtagagacagcatttgactaccgacagacctttggcagtgatgtcgttatagatatgtactgctatcggaaacacggacataatgaatctgatgaacctgcatttacacaacctgtactgtaccaaaaaattagtagtatgcctaaaattagtcaaatcttggcagagcaactcaaatcacaaggcgatataagtgatgatgaagttcagtctatcaaagacgattattt

SEQ ID NO: 217047 - DNA, 915 bp, Unknown
  Bacterial polypeptide expressing nucleotide sequence isolated from the Sargasso Sea
tcatctccatatccatcagatgtgcaaaaaatcgctcaagcaccaatatttcatgtcaacggagacgatcctgaagcagtagtgcattgtgcgaaaatcgcaacagagtacagacaaaaatttaacagagatgtagtaatagatatggtttgctacaggagatttggtcacaacgagggcgatgaaccttcttttactcaaccgatcatgtataaaaagattaaatctcatccgactacattgtcaatttacggtaaaaaattaagcaaagaaggattaacttcagatgacaatttgcagaaagaaaaaataaaatttaagaattatttagaaaaagaatttgagtcctcaaaaaattataaatcagaattgaagtggtttgatggtgcatggtcaagatttaaaccaggtcttggtaaagataaaaggggtgtaagcggagtcgacaaaactaagcttattgatataggaaaaaaaattaccaatattccgcaaaattttgaagtacataagactttaaaaaagatatttgacttgagagctcaagctataaaaaaaggggaggcgattgactggtctacagcagagagcttagctttcgcaactttattaacagaggggttttcagtaagattatcaggtcaagattccggtaggggcacatttagtcaaagacatgccgttctgagaaatcagcagaatcacgaaagatatattccactaaataatatttctaagggacaaaaaaattttgaaattatcgatagtttgttgtcagagcttgctgttttaggttttgaatttggatattctatttcagagccagaaacactagttttatgggaagctcaattcggagattttgcaaatggagcacaaataataattgatcaattcatttcttcaggtgagtcg

SEQ ID NO: 217048 - DNA, 823 bp, Unknown
  Bacterial polypeptide expressing nucleotide sequence isolated from the Sargasso Sea
ggtgctggagacgtaaaatatcatttaggggcatcatctgatagagaattcgatggaaattcagtccatgtaagtttaacagataacccctcgcatttggaagctgttaacccagttgtacttggacaaactagagctaaacaattctttcataaagataaagaaagaaaaaaagtaataccaattttaattcatggtgatgcagcttttgctggacaaggagttgtagcagagtgttttgctatgtcaggattaccaggccataatactggcggtactattcatatcatagtaaataatcaaattggttttacaacaagtcctagattcgctagatcttcgccttatccatcagatatttcaaaaatggtagaggctccaataattcatgttaacggtgacgaccctgaagcagttgtatatgcagcaaggattgcaactgatttcagattaaaatttaatagagatgtagtcatagatttaatttgttacagaagatttgggcataatgaaggagatgaaccatcattcactcagcccttaatgtataaaaaaataagatctcatccatcaccgataaaagtatatggagaaaaattaataaatgaaggatcaataactaaaaattttttagataattcaattaggcaattcaaagatttgttagatgagcaatttaaaactgctaaagattataaacctaaaattgaatggtttgaaggtacttggtctagatataaacccgaaagaggtaaagataaaagaggtgttacaggcgcagatataaaaatattaatgaatatttcaaatcaaataaacttaa

SEQ ID NO: 217049 - DNA, 736 bp, Unknown
  Bacterial polypeptide expressing nucleotide sequence isolated from the Sargasso Sea
tttttagaacaaacatattgtggatctattggtgtagagtacaaattcatgagaacaattgagatcattcaatggcttgaggaaaaaatggagtcatgtcgtaacactcccaattttactcgtgaggagaaaattgatcttttaagaaaaacgaatgaggcggtggcatttgaaaattttttgcatacaaaatttgttggtcaaaaaagattttctcttgaagggggagagtctataattcctgctctggacactgtagtggagtttggtgcagatcttggtgtagaagaatttgttattgggatggcgcatcgtggacgacttaatgtgctggcaaatattttgggtaaaacttacaacgatatttttgctgagtttgaaggcaaaggatttggagatgatgtttttgcaggagatgtaaagtaccatatgggctactcaagtgacaaaaaagctaagaacgataaaatagtccatttaagcctgacgccaaatccttctcatcttgaagctgtaaatcctgtcgtggaagggatttcacgagcaaagattgatcaatattatgaagggaattctaaaaaacttgtcccgattcttattcatggtgatcattccatgtcgggacagggcattgtatatgaagttttgcagatgtcaaagctacctggctacggaactggtggaaccgtgcaccttgtaattaacaatcaagtaggattcactgctgattttattg

SEQ ID NO: 217050 - DNA, 813 bp, Unknown
  Bacterial polypeptide expressing nucleotide sequence isolated from the Sargasso Sea
ggaatttcttttaccaaaaatggaaaattagcaatccttaataaattgattcaagctgaaggatttgagaaatatttagcaaaaaaatatgttggaactaaaagatttggtctagatggtggcgagtctttaattccagctttagaacaagtaattaaagtaggaggacagtattcagtaaaagaattaaaaataggaatgcctcatagaggtaggttgaacgttttggcaaatcttttacaaaaatcttacaaaaggatatttaatgagtttgcaggtgaatatggagaaattgataaagatagtactggtgatgtaaaataccacttaggagcttcatcagatagggaatttgatggaaattcagtacatataagtttaactgataatccgtcacatttagaggcggttaatccagttgttctaggtcaaacaagagcaaaacaatttttccataaagatcaaaaaagaaaaaaagtaattccaatattattacatggcgatgctgcatttgcaggtcaaggtattgtagctgaatgttttgctatgtctggattgccaggtcataatactggaggtacaattcatataatcgttaataaccaaattggttttacaactagcccaagatttgcaagatcatctccctatccttcagatgtagcaaaaatggtcgaagcaccaattttacatgtaaatgcagatgacccagaggcagttgtatattgtgcaagaatagcaacagaatttagacttcaatttaatagagacgttgtaatagatttaatttgttacagaagatttggacataac

SEQ ID NO: 217051 - DNA, 907 bp, Unknown
  Bacterial polypeptide expressing nucleotide sequence isolated from the Sargasso Sea
gatgagagagtctgaatatttagatgaacttcacccagatttttatggttttaaaaaagaaaattacgataagaagatttttcttaatggagtaattaatcgcaagtatgcaaatataagagaaatacttaaatttatgaaaaagacctattgtggaaaaattggttatgagtttatgcatatttcaaatccagatgaaagaatgtggtttagagacagaatagagcaagataaaaatgcacttcaatttacaaaaaatggaaaagaagcaattttaaataaattagtgcaggcggaagggtttgaaaaatttttagctactaagtatgtgggtacaaaaagatttggtttggatggtggagaaagtttgatacctgctcttgaacaaattataaaaataggtggtcaaaataatatcaaagaagttaaaataggaatgtctcacagaggtagacttaatgttttagcaaatgttttacaaaaatcttacaagaaaatttttaatgaatttgcaggtgaatttagttcagacactgaagatagtgctggagatgttaaatatcatcttggggcatcttcagatagagagtttgatggaaattcagttcatgtaagtttaacggacaatccttctcacttagaagctgttaacccagttgttttggggcaaacgagagctaaacaattttttcacaaagaccgagaaagaaataaagttatacctatcctcattcatggagatgcagcatttgcaggtcaaggtgttgtagctgaatgttttgcaatgtccggtttacctggacataacactggaggaacgattcatattattgttaacaatcagataggatttactaccagtccaagatttgcaaggtcatcaccctatccatctgatgtcgcaaaa

SEQ ID NO: 217052 - DNA, 1054 bp, Unknown
  Bacterial polypeptide expressing nucleotide sequence isolated from the Sargasso Sea
ggagttattaacaaacaatattccaatgtttccgaaattttaaaatttttaagagataaatattgtggtcctttaggttatgaatacatgcatatctcaaatccaactgagagaaaatggtttagagatagagtagaaaaagctgatgattttaaatttactcaaaatggaaaagaggcaattctaaaaaaattaattcaggcagagggttttgaaaaattcttacacaccaaatatgtaggttcaaaaagatttggtcttgatggaggtgaaagcttaattccggcacttgaacaaataatcaaaattggtggtcagtcaaaaataaaagaggttaaaataggcatgtctcatagaggtagattaaatgtgctagccaatgttttgcaaaaatcctataaaagaatttttaacgaatttgctggagaaattaattcaaattctgaagatgacactggagatgtgaaatatcatttaggtgcttcatcaaatagagagtttgatggaaactctgtacacgtaagtttgacagataatccatctcaccttgaagcagtcaatccagtagtattaggacagacaagagcaaaacaatattttcataaagataaagagagaaagaaagtaataccgatattaattcatggagatgcagcttttgcaggccaaggagttgtcgccgagtgttttgcaatgtcagggttgccaggacataatactggtggaactattcacatagtagtaaataaccaaatagggttcactactagtcctagatttgcaaggtcatctccttacccttcagatattgcaaaaatggttgaagcaccaattattcacgttaacggtgatgaccctgaagctgttgtttatgctgcaagaatagcaatagattttagattaaaatttaacagagatgttgtagtcgaccttatttgttatagaaggtttggtcataatgagggggacgaaccttctttcactcaaccattaatatataaaaaaattcgttcacacccaacaactataaaagtttacggcgaaaagttaatca

SEQ ID NO: 217053 - DNA, 1354 bp, Unknown
  Bacterial polypeptide expressing nucleotide sequence isolated from the Sargasso Sea
attagagcttatagacagcgtggtcatttattatcaaaagttgatccattagaaatgagagaaagtgagtatcttgacgaattacatcctgaaaattatggatttaaaaaagatgactatagtaaaaaaatttacttagatggtgtcttaaataaagaatattctaacataaaagaaattctctctatattaagaaaaatttattgcggaaatattggttatgaatatatgcatatttcaaatccaacagaaagaaaatggtttcgagatagagttgaaaaagatgaaaatgcattgaaatttacagtaaatggaaaaaatgcaatcttaaataaattaatacaagctgagggttttgaaaaattcttacacacaaaatatgtgggatcaaaaagatttggtcttgatggtggtgaaagtttgatacctgcgttagagcaaataattaaaattggtggtcagtcaaatattaaagaagttaaaattggtatgtcccacaggggaagactaaatgttttagctaacgttttacaaaaatcatacaaaagaatatttaatgagtttgctggtgaaattaataatacagaggaaaatagcgccggtgatgtaaaatatcatttgggagcatcttccgatagagattttgatggaaatgtagttcatgtaagtcttactgacaatccttcacatttagaggcagttaatccagttgtcttaggtcaaactagagcaaaacaattttttcataaagattcaaaaagaaataaggttattccaattttaattcatggagatgccgctttcgctggacaaggtgttgtagctgaatgttttgccatgtctggtttaccagggcataatactggtggaacaattcatataattgtaaataaccaaattggatttacaactagtccaagatttgcaagatcttcacctcacccatcagatattgctaaaatggttgaagcgccgataattcacgttaacggtgatgatccagaggctgtagtttatggatcaagaattgcaactgagttcaggcttaaattcaatcgagatgtggttttagatttagtttgttatagaagatttggacataatgagggagatgagccatcttttactcaacctctaatgtacaaaaaaataaggtcacttccttccaccgcaaaaatttatggttcaaaacttatagatgaggatttactctcagaaaatgatttaaataatcaaattaataaatttaaaactttgttagataatcaatttaaaactgcaaaagactataaaccaaaaatagaatggtttgaaggagcttggtcgagttataagcctaaaaaaggaaaagata

SEQ ID NO: 217054 - DNA, 943 bp, Unknown
  Bacterial polypeptide expressing nucleotide sequence isolated from the Sargasso Sea
tgatgaaccatcttttactcaaccacttatgtataaaaaaattaaggatcatccaactactcttacgatatacgggcagaagctcagtcaagagggattaacttcggatgaaaaattaaaaaaaaataaatttgattttagaaattttttagagaaagaatttgatgcatcaaaaaattataaatctgaattgaagtggttcgaaggtgcttggtcacgttttaaaccaggtttaggtaaagacaaaagaggagcgagtggagttgaaaaaaataaattagttcaaattggaaaaaaaatttttaaaataccagtcaattttcaagttcataaaactttggaaaaaatatttaaattaaagcatcgaatatttgaagattcaggcaaaatagattggtctaccgcagaaatactagcatttggtacattgttaaccgagggattttcagtaagattgtctggacaagactcgggaagaggaactttcagtcaaagacatgctgttctcagaaatcaagttaatcatgatagatatattcctttaaacaatattcaatcccagcagaagaatatagaagtaattgatagtttgttatctgagtttgcagtcttaggttttgaatttggatattctctatccgaaccagagacacttgttctttgggaagctcagtttggagattttgcaaatggaggacaagttataatagatcaattcattacttcaggcgagtctaaatggggaagagcgagcggtttagtaatgcttttacctcatggctatgaaggtcaaggccccgagcattcatctgcaaggcttgaaaggtttttacagctttgtgcaggtgaaaatattcaagttgtaaattgcactactccatcaaattattttcatgttttgagaagacaaatgcatagggaatttagaaaaccccttatataa

SEQ ID NO: 217055 - DNA, 1333 bp, Unknown
  Bacterial polypeptide expressing nucleotide sequence isolated from the Sargasso Sea
agctgtagcaatgataagatcttatagacaaagaggccacctcatagcgaagcttgatccattaggtatgatgaaatcagaatatttagatgagttacatccagagtcatatggatttaaaaaagaagattataataaaaaaatatttttagatggtgtaactaacaaacaatattctaatgttaaagagattttggaatttttgagaaataaatattgtggaccacttggttatgagtatatgcatatagccaacccaacagaaagaaaatggtttagagatagagttgaaaaatcaaatgattttagttttaccaaaaatggaaaaaaagcgattttaaataaattgattcaagcagaaggatacgaaaaatttttacatacaaaatatgttggtactaaaagatttgggcttgatggtgctgaaagtttaattcctgcattagaacaaatcattaaaataggtggacagtctcaagtcaaggaggttaaaattggaatgtcccatagaggaagacttaatgttttagctaatgttttacaaaaatcttataaaagaatctttaatgaatttgcagaagaaattacctctgcagaagatggtgctggagatgtaaaatatcatttgggagcatcatcagatagagaatttgacggaaattcagtccatgttagtttgacagataatccatctcatttagaagcggttaatccagttgtgcttggacaaacaagagcaaaacaatattttcataaagataaagaaagaaaaaaagtcataccaattttgattcatggtgacgccgcttttgcgggtcaaggggttgttgctgagtgttttgcgatgtccggattaccagggcataatacaggagggactattcatattattataaataaccaaattggttttacaactagcccaagatttgcaagatcatctccttatccttcagatattgcaaaaatggttgaagctccaataatacatgttaatggagatgaaccagaggctgttgtatatgcagcaagaattgcaactgattttagattaaaatttaatagagatgtggttatagacttaatttgttatagaagatttggtcataatgaaggtgatgagccttcatttacgcaacctttaatgtataaaaaaattagatctcatccttctccagttaaagtatatggagagagactaataaaagaaaaagtaatttttaaaaattttttaaatgattctattaagatttttaaaaacttacttgacgaacaatttaaaactgcaaaagactataaaccaaaaatagaatggtttgagggaacatggtct

SEQ ID NO: 217056 - DNA, 1147 bp, Unknown
  Bacterial polypeptide expressing nucleotide sequence isolated from the Sargasso Sea
ttcactcagaatggaaaagaggccattcttaacaaattaattcaagctgaaggttttgaaaaatttttacacacaaaatacgttggtacaaaaagatttggtttagatggaggcgaaagtttaatcccagcccttgagcaaataattaaaattggtggtcaatcaaaagtaaaagaagttaaaataggaatgtcccatagaggaagattgaacgttttggccaatgttttacaaaaatcttataaaagaattttcaatgaatttgctggagagattagttcaaaatcagaggacgacacaggagatgttaaatatcatttaggggcttcatcaaatagagaatttgatggcaatcaagtgcatgtaagtttaacagataatccatcacatcttgaggcagtaaaccctgtagttttaggacaaacaagggctaaacaatatttccataaggataaagagagaaataaagttataccaattttaattcatggagatgcggcctttgcaggccaaggagttgttgcagaatgttttgcaatgtctggtcttccaggacataatacaggtggaactatccatattatagtgaataaccaaataggatttactacaagtccaagatttgcaagatcatcaccttacccttctgatattgcaaaaatggttgaagcaccaatcatccatgttaacggtgatgatcctgaagcagttgtttatgctgcaagaatagcaactgactttagattaaaatttaatagagatgttgttatagacttaatttgttatcgaagatttggtcataatgaaggggatgagccatcttttactcaaccactaatgtacaagaaaatccgttcacacccatcacccatcaaagtttatggtgaaaaattgattaatgagggatcaattacagatgaatattttagaagatctataaatgaatttaaggaattacttgatgatcaatataaaaatgcaaaaaattataagcctaaaattgaatggtttgagggtacgtggtcaagatataaacctgagaaaggaaaagataaaagaggggtcacaggttatgatgttaaaaaacttaaagatatttctgaaaagataaataccattcccaaagcaataaatattcacaaaacca

SEQ ID NO: 217057 - DNA, 1483 bp, Unknown
  Bacterial polypeptide expressing nucleotide sequence isolated from the Sargasso Sea
tttggtaaataaagatgctgatcttccagaaagttgggtaaattattttgagggaattggtgaagaattaaatgttatagcaaaagaaattaatggtccatcatggggacctactaaaaaaaagattgatattgatgaattacaaaaaaaaatagaagaacaagataaaaatgattttaataatgtcaaattagacacttcagaaaaatttaattttcaattacttgctgactcaaataaagattctattagtgctgtagcattaattagagcatatagactaagaggacatttattagcagatcttgatcctttagaaatgagagagtcagaatatctagatgagcttcatccagatttttacggttttaaaaaagaaaattacgataagaaaatttttctaaacggggtaatcaatcgtaaatatgcaaatataagagaaatacttaagtttatgaagaaaacctactgtggaaaaataggttatgagttcatgcatatttcaaacccagatgaaagaaagtggtttagggacaggatagagcaagataaaaatgcacttcaatttacaaaaaatggtaaagaggcaattttaaataaattggtacaggcagaaggatttgaaaaatttttagctacaaagtatgtgggaacaaaaagatttggtttagatggtggcgaaagtttaatacctgctcttgaacaaataataaaaattggtggtcaaaataatataaaagaagttaaaataggtatgtctcatagaggtaggcttaacgttttggcaaacgttttacaaaaatcttacaaaaaaatttttaatgagtttgctggtgagtttagtactgattctgaagatagtgctggagatgtaaaatatcatcttggagcgtcgtctgatagagaatttgatggaaattcagtacatgtcagtttaacagataatccttctcatttagaagctgttaacccagttgttttaggtcaaacaagagccaaacaattttttcataaagaccgtgaaagaaataaagttatacctattctcattcatggggatgcagcctttgctggtcaaggagttgtagcagaatgttttgcaatgtctggactaccaggacataacactggaggaacaattcatattattgttaataaccagataggatttactactagtccaagatttgcgaggtcttcaccttatccatctgatgttgcaaaaatggtagaggctccaattcttcatgttaatggtgatgatccagaagcagttgtttatgcaactagaatagcaacagaatttcgattaaaatttaatagagacgttgtagtagatttaatttgttatagaagatttggacataatgagggagatgagccttcatttactcaacctttaatgtataaaaaaattagatctcatcccagtgtttacaaaatttatggaaataaattagtaaatgaaaaaatctataactga

SEQ ID NO: 217058 - DNA, 1179 bp, Unknown
  Bacterial polypeptide expressing nucleotide sequence isolated from the Sargasso Sea
tattgctttaattagagcttatagaattagaggacatctaattgctaatattgatcctttaggaatgatggagagggaatatctgcacgaacttcatcccgctgatcatggttttaaaaaagaggactatgataaaaaaatttttttacactcttatatggatcgaggatatgcatcaattaatgaaataatttcttttcttaaaaaaatttattgctccagcattggagtagaatatatgcatatttctgatcctgttgaaaaagtatggtttagagaaagaatggaaaaagaagaaaatcaattaaaatttactggcaatggtaaaaaagctatccttaataaattaattcaagctgaaggttttgaaaaatttttggcattaaaatttgttggcacaaaaagatttggtttagatggcgcagaatctttaataccagcacttgaacagataattaagcgaggtggccaattaggagttaaagaaattaaaattggaatgcctcatagaggaagattaaatgttttagcaaatattttacaaaaatcttataaaagaatgtttaatgaatttgcaggtgaatttacaaataatccgtcagattctacaggtgatgtaaaatatcacttaggagcttcttcaaatagagattttgatggcaattcagtacatataagtttgacagataacccttcacatttagaagctgttgaccctgttgttcttggtcaaactagagctaaacaattttttcatcgcgatataaaaagaaataaagtaattcctattttaattcatggagatgctgcttttgcgggccaaggtgttgttgcagaatgttttgcaatgtcaggattacctggtcataatactggcggaactatccatataattgttaataatcaaattggttttactacaagtccaagatttgcaagatcaagcccttacccttcagaccttggaaaagttgtagaggctcctattttgcattgtaatggtgatgatcctgaagcagtagtgcattgtgctaaaattgcaattgagtttagacaaaagtttaacaaagacgttgtaatagatattatctgctatcgtagatttggtcacaacgaaggcgatgaaccatcatttacgcaacctatgatgtataaaaaaattagacagcacccaacagc

SEQ ID NO: 217059 - DNA, 1717 bp, Unknown
  Bacterial polypeptide expressing nucleotide sequence isolated from the Sargasso Sea
atgagcatttccagtaatcgtaaatttgaagagacttcctttctaagtaagtcaaatagtgcttttatagaacagatgtaccttaagtatcttaataaagataaggatttatcaactgaatggaaaacttattttgaaaaattaaatgaggaaacctccgtagctatgaaagagctagaaggaccgtcttggggtaaaaaaacacaatttaaaactgtacaactggaaaatatagtttcagaaaataaagacactgactttagtaaaaatgaaaattataattctgcagattttaaagaagccagcaatgaatctataaaagcaattgcattaataagagcttacagaataaggggtcatcttattgctaaattagatccattgggtctatccaccacagaatatttagatgagctgcatccagatttttatggatttaaaaaagaaagttacgataagccaatttttttaaatggtacaataaataaaaactattcttcaattaaagaaatattatcatttttgagaaaaacttactgcggatcggttggatatgaatttatgcacctttctgatcctttagaaagaaaatggttcagagatagaattgaattagatgaaaaaggaatttcatttacaaaaaatggtaaaatggcaatccttaataaattaattcaagcagaaggttttgagaaatatctagcaaaaaaatatgttggaactaaaagattcggtttagatggtggcgagtctttaattccagcattagagcaaattataaagattggtggtcagaattcagtaaaagaattgaaaataggaatgccacatcgaggtagattaaatgttttagcaaatcttttacaaaaatcttataaaagaattttcaacgagttcgcgggcgaatatggaaatatgtctaaagatagtacaggagatgtaaaatatcatttaggagcatcttcagacagggaattcgatggaaattcagtgcatataagtttaactgataatccatctcatttagaagcggtaaatcccgttgtgttaggacaaacaagggcaaaacaatattttcacaaagatcttaagaggaaaaaagttattccaattttattacatggagatgccgcatttgcaggtcagggtatagttgcagaatgttttgcaatgtcaggccttccaggccataatacaggaggcactattcatattattgtaaataatcaaatcggatttacaacaagcccacgttttgcaagatcatcaccttatccatccgatgttgcaaaaatggttgaggctccaatattgcatgtgaatgcagatgacccagaagctgttgtatattgcgcgaggatagctacagaatttagacttcaatttaatagagacgtagtaatagatttaatttgctacagaagatttggtcataatgaaggagatgaaccgtcatttacacagccacttatgtacaaaaaaattaaaagtcataaaacgagtttaagtatatatggagaaaaattagtaaaagaaaatacaattacagctgatgaatttgaaaagcaaaaatctgatttcaaaaatttgttagatcaacaatttcaaacagcaaaaaattataagccaaaaatagagtggtttgagggaacttggtcgaggtacaaacctcaaaaaggaaaggatataagaggagttagtggctttgatactaaag

SEQ ID NO: 217060 - DNA, 1351 bp, Unknown
  Bacterial polypeptide expressing nucleotide sequence isolated from the Sargasso Sea
ttaaaaaaaataagaaaagtttattgctcaaatataggagtggaatacatgcatatctccgatccagtagaaaaagtttggtttagggaaagaatggaaaaacaggaaaatcaaattaagtttacaacaaatggaaagaaagcaatattaaataaaatagtacaagctgaaggtttcgaaaaatttcttgcaaagaaatttgttggaactaaaagattcggtcttgatggagcagagtcattaattcctgccttagagcaaataattaaacgaggtggtcaacttggtgctaaggaaataaaaataggaatgcctcacagaggaagattaaatgttctagctaatgttttacaaaaatcatacaaaagaatatttaatgaatttgctggagaaatatctaattttagaaaggaagactctactggagatgtcaaatatcatttaggagcttcttctgatagagagtttgatggaaattctgtacatgtcagtttaacagacaacccttcgcatttggaagccgtcaatccaatagttttaggacagacaagagctaaacaattttttcacaaagatacaaaaagaaaaaaggtaattccaattttgatccatggagatgcagcatttgcaggacagggtattgttgccgagtgttttgctatgtctggactaaaaggacataacactggtggaacaattcatattattgttaataatcagattggatttactacaagtcctagatttgcacgttctagtccctatccatctgatttaggaaaaatagtagatgctcctattttacattgcaatggtgacgatccagaatcagttgtccattgtgcaaaaattgcaatagagtttaggcagaaattttccaaagatgtagtgatagatataatatgttataggagatttggtcacaacgagggagatgaaccatcttttactcaaccttcgatgtacaaaaagattagatcgcaccctactactttaaaaatatatggcgaaaaattaattagtgacggaactataaataaaagtgagtttgataatcaaattgttatgtttagatcattgttagatgaacagtttaaaactgcaaatgatattaaaccaaagcttgattggtttgaagggacatggtctagatatcagcctaaaaaaggtaaagacagacgaggacaaactggtgttgaactagataaaatatttaaaatttcagaaaaaattaataaggttgatgaaaaattaaatctacataaaacaattcaaaaaattctaaataatagacaaaaatgtatatcagataaaaaaaatattgattggtcaaatgctgaaagtttagctt

SEQ ID NO: 217061 - DNA, 990 bp, Unknown
  Bacterial polypeptide expressing nucleotide sequence isolated from the Sargasso Sea
caactgctccacgttttgcacgttcatctccatacccttctgatgtagcaaagatgcaccaagcaccaatttttcatgttaatggcgatgatcccgaggcagtagttcactgcgcaaaaatagctactgaataccgtcaaaaatttaatagagacgtagtaatagacatggtttgttatagacgttttggtcataacgaaggtgatgagccgtcttttacccaaccaattatgtataaaaaaataaagactcatcccacgactttgaaaatttatggcaatagattgtgtgaagaagggttaacttcatcaaataaaatagaggatcaaaaaacaaaatttaaggaatttttagagagtcaattggaattatctaaaacctataaatcagagttgacatggttcgaaggtgcctggtcaagatttaaacctggattaggtaaagataaaagaggtaaaagtggagtagacaaagataagttaatagatataggaaaaaaaatttctactattcctaataatctaagtgctcacaaaacaataaagaagatatttgatttaaaatatcaaatgtttgaaaaaaatgatccaattgattggtctacggcagaaaatttagctattggaagtttattaactgaaggtttttcagtaagactttctggtcaagattctggacgtggtactttcagtcaaagacatgcagtattaagaaatcaaaacaatcacgatagatacataccgttaaacaatattaaaactaatcagaaaaaatttgagataattgatagtcttttgtctgagttagcggttttaggtttcgagtttggatattctttatctgaaccagaaactttagttatatgggaggcacaatttggtgattttgctaatggcgctcaagtaattattgatcaatttattgcttcaggtgagtcaaaaatggggaagagccagtgggcttgtaatgttattacctcatggttatgaa

SEQ ID NO: 217062 - DNA, 1021 bp, Unknown
  Bacterial polypeptide expressing nucleotide sequence isolated from the Sargasso Sea
tccactaaatatgatggatagaaaatacattcatgaacttcacccagaagatcatggtttttcaagaaatgattatgataaaaaaatctttataggctcctatatggactctgggcatgcttctataaatgaaatacttacaaatttaagaaaagtttattgtggatcaatcggagttgaatatatgcatatttcagatcctaaagaaaaggtttggtttaggaatcgaatggaaaaaacagaaaatagaattaattttactgatcaaggaaaaaaaagtattttaaataagattattcaagctgaaggttttgaaaaatttcttgcaaaaaaatttgttggaacaaaaagatttggtttagatggcgcagaatctttaattcctgctcttgaacaaattatcaaaagaggtggacagctaggagtaaaagaaattaaaattggaatgccacaccgaggtagattaaatgttttggcaaatgtattgcaaaaatcttacaaaagaatatttaatgaatttgcaggagaatttactgccactcatgacgaatctgctggtgatgttaaatatcacttaggagcttcatctaatagagaatttgatggaaattctgttcatgtgagcttgaccgataacccttctcacttggaggccgttgacccagttgttttaggtcaaacaagggctaaacagtattttcataaagatttaaaaagaaataaagttatacctatactaattcatggtgatgctgcgttcgctggtcaagggattgttgctgagtgcttttcaatgtcaggtctgccaggacataacaccgggggaacaatacacattattgttaacaatcaaattggatttaccacaagtccaaggtttgctagatcaagtccttatccatccgatttaggaaaagttgtagacgcaccaattttacattgtaatggtgatgatcctgaagcagttgtacattgcgcaaagatagctatcgagtttagacaacaatttaataaggatgtt

SEQ ID NO: 217063 - DNA, 1092 bp, Unknown
  Bacterial polypeptide expressing nucleotide sequence isolated from the Sargasso Sea
aatggagttgcaaaaatttaatacacaatcaattagagctgtttcattaataagatcctatagacaaaggggtcatttaattgcaaatcttgatcctttagagattagaaagaatgagtatttagatgaactacaccctgaaagttatggttttaaaaaagaggattatgataccaaaatttatttggatggaattattaatagacaatactctgatatcagagaaattttgggatttttaaaaaaaacatattgtggcaaaattggatatgaatacatgcatatttcaaatccaattgaaagaaaatggtttagggacagagtagaaaaaaatgaagatatttctaaattcactaaaaatggtaaagaggcaattcttaaaaaattaattcaagcagaggggtttgaaaaatttttacataccaaatatgtaggcactaaaagatttggtctggatggaggtgaaagtttaattccagcattagaacaaataattaaaattggaggtcaatcaaaagtcaaagaagttaaaataggaatgtctcatagaggaagattaaatgttttagcaaatgttttacaaaaatcttataaaagaatctttaatgagtttgctggcgaagctgattttacaactgatgaagacacctcgggagatgttaaatatcacttaggagcatcatcagacagaatatttgatgctgatccggttcatgttagtttaactgataacccttcacatttagaggctgtaaatccagtagtattaggccaaacaagagcaaaacaatattttcataaagataaagagagaaaaaaagtaatacctattttaatacatggagacgccgctttcgctggtcaaggtatagttgctgaatgttttgcaatgtcagggcttcctggtcataatacaggaggcactattcattttattattaataaccaaattggatttacaactagtccaaggttcgctagatcttcaccacatccatctgatgttgccaaaatggtagatgcaccaataatccatgttaatggcgatgatccagaatcggtagtatatgctgcaagaattgctgctgaatt

SEQ ID NO: 217064 - DNA, 1837 bp, Unknown
  Bacterial polypeptide expressing nucleotide sequence isolated from the Sargasso Sea
gatgtcatcatcaaaaaatctagagtacaaaaaaacatcatttcttaataaatctaatagtgcatttattgagcaaatgtatttgaaatttataaataaagatgctgacctacctgaaagttggagaaattactttttagatataggagaagagatagatttagttgttagtgaaataaacggacctacatggagcccccaaaagaaaaaaattaatttagaagaaatacaaaaaaatttaaattataaagatcaaagtatatcaaaattaaaacaatctaaatatattgatgatgtagatattaaaaaaacaaatagaaattcaatcagagcagtttctttaattagatcatatagacaaagagggcacctgatatcaaaaattgatcctttagaattaagaaaaatcgaatatttagatgaacttcatcctgaaagttatggatttaataaagatgactataaaaagaaaatttatttagatggtattacaaataaagattattctaatattaaagaaatattatcttttctcaaaaaaacttattgtggttcaataggttatgagtatatgcacatttctaatccatcagaaagaaaatggatcagagacagggttgaaaaagatgaaaatgcactccattttacaaaaaatggaaaaaatgcaattttaaataaacttattcaagctgaaggttttgaaaaatttttaaatacaaaatttgtgggaacaaaaagatttggtctagatggagctgaaagtttaataccagctttagaacagataattaaaataggcggccaatataaaattaaagaagtaaaaattggaatgtctcatagaggtagacttaatgttttagcaaatgtacttcaaaaatcttacaaaagaatctttaatgagtttgcaggtgaaacgagcaatgatggagaagatacagctggtgatgtaaaatatcatttaggtgcttcttcagatagagaatttgatggaaattctgttcatgtaagtttaacagataatccttcacatttagaagcagtaaatccagttgtattaggacaagccagagcaaaacaattttttcacaaagataaagataggaataaagttattccaatattaattcatggagatgctgcttttgcaggacaaggtattgttgcggaatgttttgctatgtcgggtttgccaggacataatactggtggaacaattcatataataattaataatcaaataggttttactaccagtccaagatttgcaagatcttcaccacacccttcagacgttgcaaaaatggtagatgcaccaattatacatgctaacggtgatgatccagaagcagtagtttatgccacgagaatagcaacagaatttaggttgaattttaatagggacgtagtgatcgatttggtctgttacagaagatttggacataatgaaggggatgaaccttcgtttacccaaccattaatgtataaaaaaattaggtcacatccatcaacaatacatatttatggagaaaaattaataaaggaaaatataatattaaaggaagatttaaattctcaaattaaaaaattcaaagaactattaaatcagcagtttaaaacagcaaaggattataaacccaaaattgaatggtttgaaggaacttggtcaagatataaaccagaaaaaggaaaagataaaagaggagcaactggaatagacctaaatattttaaaaaatatatcaaataggatcaatacaataccatctgagattaatattcataagactattaataaaattttagagaatagaaaaaaatcaatcgacgaaggcttg

SEQ ID NO: 217065 - DNA, 1341 bp, Unknown
  Bacterial polypeptide expressing nucleotide sequence isolated from the Sargasso Sea
acagaggctatcaagtcgaatgcaaactcaataaaagctgtcgctttaataagatcttatcgtcaaagaggacatctcatagctaaattagatccattaggacttatgaaatcagaatatcttgaagagctgcatccagagtcatacggatttaaaaaagatgattacgaaaagaaaatatttttagatggagtaattaacaaacaaaattcaaatattagagagatacttaattttttaagagataaatattgtggttcattaggttacgaatatatgcatatatctaacccaacagagagaaaatggttcagagatagagttgaaaaaactgatgattttaaatttactcaaaatggtaaggaggcaatccttaacaaacttattcaggcagaaggttttgaaaaatttttacatacaaaatatgtaggaactaaaagatttggccttgatggtgcggaaagtttaatccctgctcttgaacaaattattaaaataggtggtcaatcaaaagtgaaagaagttaaaattggaatgtcacacagaggaagactaaatgtattagccaatgttttacaaaaatcttacaaaaaaatatttaatgaattcgctggcgaaataagttctaaatcaaaggatgatactggagatgtaaaatatcacttaggagcctcttcaaatagagattttgacggaaatttagtgcatgtaggtttaacggataacccttctcatttagaggctgtaaatccagttgtccttggacaaacaagagctaaacaatttttccataaagataaagaacgaaataaagtcattccaatattaattcatggtgatgcagcttttgcaggacaaggagttgtagcagaatgttttgcaatgtcaggtcttcctggccataacactggtggaacaattcacattataattaataaccaaataggttttactactagccctaggtttgcaagatcttccccttacccatctgatatcgcaaaaatggttgaagcaccaattattcatgtaaacggtgatgatcccgaagctgtcgtatacgccgcgaggatagcaactgattttagattaaaatttaatagagacgtattgatagatttaatttgctacagaagatttggtcataatgaaggagacgaaccctcatttactcaaccactaatgtataaaaaaataagatctcatccatctccaataaaagtttatggtcaaaatttagtgaatgaaggttcaatttcaaacgattatttaaatagttctataaagaaatttaaagatttattagatgagcaatttaaaaatgcaaaagattataaacca

SEQ ID NO: 217066 - DNA, 1000 bp, Unknown
  Bacterial polypeptide expressing nucleotide sequence isolated from the Sargasso Sea
atgaaaagagagtatttacatgagcttcatccttcagaccatggttttaaaaaagaggactatgataaaaaaatatttctaagctcttatttagacacagactatgcatctattaatgaaattttaaacagactaagaaaaatttattgttcaacaattggtgcagagtatatgcatatttctgatcctgttgagaaagtatggtttagagaaaggatggaaaaaaaagaaaatcaaattaattttactttaaatggtaaaaaggcaattctaaacaaaataattcaagcagaaggttttgagaaatttttagcaaaaaaatatgtcggtacaaaaagatttggtttagatggcgctgagtcgttaattcctgcacttgaacaaataatcaaaagaggtggtcaattgggggttaaagaagttaaaataggaatgccccatcgaggaagattgaatgttttagctaatgttttgcaaaaatcttataaaagaatattcaatgaattcgcaggtgaacaaatattgtcaaaagaagactctgctggagatgtaaaatatcatttaggtgcttcatctgacagggagtttgacggcaactcagtgcatgttagcttaacagataatccctctcatctagaggctgtaaaccctgtagttttggggcagacaagggctaaacaattttttcataaagataaagaaagaaaaaaagtgattccaattttaatccatggagatgcatcatttgcaggacaaggtgtagtagcagaatgttttgctatgtcaggtcttaaagggcacaatactggcggaacaatacatataatagtaaataatcaaattggatttacaacaagtcccgaatttgcaagatcaagtccttacccatcggatcttggaaaaattgttgatgctccaattcttcattgtaatggagatgatcctgaagctgtagttcattgtgcaaaaatcgctattgaattcagacaaaagtttaata

SEQ ID NO: 217067 - DNA, 1063 bp, Unknown
  Bacterial polypeptide expressing nucleotide sequence isolated from the Sargasso Sea
tatgaaggagctttgggggagctcacacgtctcggcgggacatgcagcctatcttgaaagtctctatgaaactttcataaacgatcctgaaaatttatcaaaagagtggcttgatttttttacaaatcttccaaagaactcaaactctaatggagaaatatctcatcaagaaataatcaaagaatttagaaacttttcaagaagcaaggtcaaggtatctggcaatagtaaaaaaacaatagacgaaagacagggtaaggttattagacttattcaatcatacagaaatagggggcatttaaaagcaactcttgatcctcttggcatgatggagagaagggttatagaagatcttagtattgagtttcatggactgtcgcatgatgatttagatgaagagttttacaccgatacttttacagactcaaacaaattaactttaagagagattttacttaggcttgaagaagtttactgtggaaatattggaattgagtgtaatcatattctcgattcagaagaaagaagatggtttcaaaagaaatttgagtcgaaactaactgaatacagtttcaatcctgatgaaaaacttaatatttatgaaagactaaactctgctgaaggtcttgcaaaatatttgtctgcaaaatatccaggaatgaaacgttttggaattgatggcgctgaagcattagtacccttggttgaaagtgttattcaaaactgcggatcaatgggagctacacaattatgttttggaatggcgcatagaggaagattaaatcttttggttaatgtgctaggtaaacttccatctgaactattctctgcttttgatgaagatactgagttagagggtgcttccacaggagatgttaagtatcacttaggcttctcatcaaactttgaaacacctggtggtgaagtacatgtttcactttttaataatccatctcatctagaaatcgtagatcctgtcgtaattggctccgtgagagctagacaagatcgaattggagacaaagatagatcacaagttgtaccaattcttcttcatggagac

SEQ ID NO: 217068 - DNA, 958 bp, Unknown
  Bacterial polypeptide expressing nucleotide sequence isolated from the Sargasso Sea
gatgacccccgaggcagtggtatattgtgcaagaatagctacagaatttagacttgaatttaatagggacgtagtaattgatttaatttgttatagaagatttggccataatgagggagacgaaccttcgtttacacaaccactaatgtataaaaaaattaagactcacaaaactagtttaaatatatatgctgaaaaattaattaatgagaacacaatttcttcagtagaatttgaaaaacaaaaattagatttcaacaatctgctagatcaacaattccaaacagcaaaagattataaaccaaaaatagagtggtttgagggaacttggtcaagatataagcctcaaaaaggaaaagatattagaggtgttagcggttttgatacaaaagaacttgttaaaatatctgaaaaaattcataaagttgatgaaaaactcaacattcacaaaactataaagaaaatttttaataacagacataaatctgttttggagggaaaaaatatagattggtctacctccgaagcattagcttttggttctcttctggtaaaaggtaatccaattagactagtaggacaagatactggtagagggacatttagtcaaagacattctgttttaagaaatcaaattgataacagtagatatattcctttaaataatatttcaaaaacacaaaaacaattcgaaatagttgatagtttactatcagaatttgctgttctaggttttgaatatggatatagtttagttgaaccagaaactttagttctttgggaagcacaatttggagattttgcaaatggcgcacaagtaattatagatcaatttattgcatcaggagaaagaaaatgggctagggcatcaggattagttttgcttttaccccatggatatagaaggacaaggaccagaacattcatccgcaagattagaaagatttttgcaattgtg

SEQ ID NO: 217069 - DNA, 535 bp, Unknown
  Bacterial polypeptide expressing nucleotide sequence isolated from the Sargasso Sea
aatgttttagcaaacctattacaaaaatcatataaacgaatttttaatgaatttgctggtgaatatggagaagtttctaaagatagtactggagacgtaaaatatcatttaggagcatcatcagacagggaatttgatggaaattcagtccatataagcttaacagataacccttctcatttagaggcagttaatccagtagttttaggccaaacaagggcaaagcaattttttcataaagatattgagagaaaaaaagtaattccaattttactacacggagatgctgcttttgcaggacagggaatagtcgcagagtgttttgcaatgtcaggtcttccaggtcataatactgggggaacgatacatataattgtaaataatcaaattggatttactacaagtccacgttttgcaagatcatcgccatatccttcagatgttgcaaaaatggttgaggcaccaatattacatgtaaatgcagatgacccccgaggcagtggtatattgtgcaagaatagctacagaatttaga

SEQ ID NO: 217070 - DNA, 541 bp, Unknown
  Bacterial polypeptide expressing nucleotide sequence isolated from the Sargasso Sea
gagtttcagaaagccactagtcataatgacacctaaatcactattacggaataaatattgtgtttcaaatttagaggattttaacaaaaaaaattcttttcatagagtattgtgggatcatgctattgatcctaagtctaaaggatttattaaactcaaagaaagttcaaagattaaaaaagtaattctttgttctggaaaagtatattttgatttattggatgccagagaaaagctcaaaagagatgatgtagttatgtatagaattgaacaattgtatccatttccagcaaaggctttagttaatgaattaaaaccatatgttaaaaatgctgatttcttctggtgccaagaagaaccaaaaaatatgggtgcttggttttcagtaagagattatatccaatggacattagatactttaaaggctaataataatagtatttcttatataggaagaagcccagacgcaactcctgcaacaggatatgccaaaaggcataattctcaacaacaagaaataattaaagaggtgtttgattaa

SEQ ID NO: 217071 - DNA, 1264 bp, Unknown
  Bacterial polypeptide expressing nucleotide sequence isolated from the Sargasso Sea
aatggacgatttatcatttatagggaatgcagacccaaatgcaatagaatatctttataaggaatacttaaagaatcctgataatgttgacgctggttggcaaaagttctttcaaggatttgattttgcaaaaacaaattatgaagaaaacggagagattcctgaaaactacataaaagagtttcaggtaattaatctaattcagggataccgaacaagaggacatttgtttaccaaaacaaatccggttagagatagaaggaagtattctccatctctagatctagaaaactttggtttatctgagtctgatttagatttaatatttcaagcaggggaagaggttggattaggtgcggcaagcttacgaagtataattactcatttaaacagtacatattgtcaatctatagggattgagtatatgtatcttagaaaccctgaaagacttaattggttcaaagaaaaaatagacagccatcaaagagctgcttttgataaagaaagaaagttagatatttatgaaaaacttaataaggcatctcaatttgaaagctttttaggtaaaaaatttgttggtcaaaaaaggttttccgttgaaggaggagaaagtctaataccaggactagatgctctaattgaaaaagggtcttcattgggtgtggaatattttgtaatgggaatggcccacaggggaaggttgaataccctgacaaatatttttgaaaaaaatccgagagatattttttcggaatttgatggaaaagaatttgattttgatcagacttttgatggagacgtaaagtatcatcaggggttctcttcgactgttaaattaaaaaacaacaaagaattaggaataacattagctccaaatccttctcatttagaggcggttgatccagttgtacaaggaatagcaagagcaaaaatagatcatgagtataaagatgaaaccaaagtttgtcccgtaatcattcatggagatgctgcaattgctggtcaaggagttgtttatgaggtcattcaaatggcacaattaaacggctataaaactggaggtagcgttcatattgttgttaataatcaagttggatttacgaccaactatcttgatgggaggtcttcaacttattgtacagatgttgcaaaaacaactttatctcctgtttttcatgttaacggagatgatgttgaggctgttataagtgcgattgaattcgcgatggaatatcgtcaaacattcaaaagtgatgtatttgtt

SEQ ID NO: 217072 - DNA, 796 bp, Unknown
  Bacterial polypeptide expressing nucleotide sequence isolated from the Sargasso Sea
aaaaattgcaactgaatataggcagaaatttaatcgggatattgttatcgatatggtctgttacagaagatttggacataatgaaggggacgaaccctcatttactcaaccaataatgtataagaagattaaaaatcatccaactacacttgatatatatggaaaaaaactttcagaggaggggttaatctctaatgacgacttacaaaaagacaaagtaaggtttaaaaattatctagagaatgaattttcatcatctaaaaattataaatctgaacttaaatggttcgatggtgtgtggtctagatttaaaccaggtttaggaaaagataaacgaggtaaaagtggtgttgaaaaaaatattttattcaaggttggaaaaaaagtattcaatattcctagcgattttaatgctcataaaacattgaaaagagttttcgaattgaggaacaaaatgttccaagatggtaaaattgattggtctgctgcagagacattggcaatcggcactttattaattgaaggtttttctgttaggctatcaggacaagactctggtagaggtacttttagtcaaagacatgcagttttacgtaaccaggataatcacgaccgttatataccacttaataatatccaagttggtcaaaaaaattttgaagttattgatagtttgttgtcagaactagcagttcttggatttgagtatggatattctttatctgaaccagaaactttggttttgtgggaggctcaatttggagattttgcaaatggtgctcaagtgattattgat

SEQ ID NO: 217073 - DNA, 577 bp, Unknown
  Bacterial polypeptide expressing nucleotide sequence isolated from the Sargasso Sea
aattattttcatgcattaagaaggcaaatgcatagagattttagaaaacctttaattatcatgacacctaaatctttacttagaaataaatattgtgtttctaatttagaagactttaataaagaaaattcatttcatagaatattatgggatcatgcgttagatacaaaatgtaaagattttataaaattaaaaaagaattcagaaataaagaaagtaatattatgttcaggtaaaatttattttgatttattaaatgaaagagaaaaattaaaaaaagatgatgttgtatttttaagaatagaacagctttacccatttccagcgaaaactttagtgaaagaacttaagcaatatgcaaaaaatgctaaatttttttggtgtcaggaagaaccaaaaaacatgggcgcctggttctcagtaagagattatatccaatggacattagatactattaaggctaataataataaaatttcttatataggaagaaatccagatgcatctcctgcaacaggatatgtagaaaggcatatttctcaacaaaaagaaataattaataaggtttttgagtaat

SEQ ID NO: 217074 - DNA, 1669 bp, Unknown
  Bacterial polypeptide expressing nucleotide sequence isolated from the Sargasso Sea
tctaatagtgccttcatagaacaaatgtatattaaatatattaataaagatccagaattgccagatagttggaaaaattattttttagatattggtgaagacattggtttaattgtcaaagaaataaatggaccttcatggagtccagaacagaaaaagatagatattaataaacttcaaaaagaaattggcacagaacaaaatactaataatcaaattaatcaaaaagattttgtacaagcaaatagtaattcaattagagcagtctcattaataagatcttatagacaaagaggccatcttcttgcaaaagttgatccattagaaattagacaaagtgaatatttagatgaactacatcctgaaaattatggattcaataaagatgattataagaaaaaaatttatttagatggtataattaacaaagaatattcaaatattagtgacatattatcttttcttagaaaaatatactgtggttctattggatatgaatatatgcatatctcgaatcctactgaaagaaaatggtttagagacagagttgaaaaagatgaaaataatttaaaatttacggaaaatggtaaaaatgcaattttaaataaattgatacaggccgaaggttttgaaaaatttttagctacaaaatatgttggtacaaaaagatttggtttagatggtggagagagtttaattcctgctttagaacaaataataaaaattggtggtcaatctaaaattaaagaagttaagattggaatgtcacatagaggaagacttaacgttctagcaaatgttttgcagaaatcttacaaaaaaatttttaatgaatttgctggagaaattaataatgtaggagatgaaggcgcaggtgatgttaaatatcatttgggagcttcatccgatagagaatttgatggaaattcagtacatgtaagcttgactgataacccatctcacttggaggctgttaatcctgttgtgctaggtcagactagagctaaacagttttttcataaagacaaagaaagaaataaagttataccaatattgattcatggcgatgcagcttttgctggacaaggagttgtagctgaatgttttgctatgtcaggacttcgagggcacaatactggtggaactatacatataatagttaataaccaaataggatttacaactagcccaagatttgcaagatcttccccacacccttcagatattgctaaaatggttgaagctccaattatacacgtaaatggagatgatccagaagctgtagtatatggatcaagaattgcagctgaatttagattaaaatttaatagagatgtagttttggatttagtttgttataggcgatttggacataatgaaggagatgagccttcattcacgcaacctttaatgtataaaaaaataagatctcatccatcaacaattaatatttatggacaaaaactagtaaaagaagatttaataagtgaagaagatttaagtttccagatcaaaaaatttaaagaacttctagacgagcaatttaaaactgcaaaagattacaatccaaaaatagaatggtttgaaggaacctggtcaagatataagccagaaaaaggcaaagataaaagaggtataacaggagctgatttaaaataccttaaggata

SEQ ID NO: 217075 - DNA, 582 bp, Unknown
  Bacterial polypeptide expressing nucleotide sequence isolated from the Sargasso Sea
cagcaaattattttcatgctttacgtagacaaatacatcgtgattttagaaaaccacttgtaattatgacgccaaaatctttgttaagaaacaaattttgtgtgtcaaccattgatgattttagtaaacaaacatcatttcaccgaataatgtgggatcatgcattaagcgatcaatccaaaaattttattaaattaaaaaaatctagtgaaataaaaaaagttataatttgttcaggaaaagtgtacttcgatcttttaaatgcaagagaaaagttaaaaagagatgatgtggtaatatttagaatagagcaactttatccttttccagcaaagagcttggtaaaagaacttaaaccatatgcaaaaaatgctaatttttattggtgtcaggaagagccaaaaaatatgggtgcatggttttcagtaagagattatatacaatggacattagataccattaaagctaaaaataacgaagtttcttatattggaagaagtcctgatgcatcaccagccactggatatgctaaaaggcatcaacttgagcaacaagaaattataaatgaagtatttaattaat

SEQ ID NO: 217076 - DNA, 1190 bp, Unknown
  Bacterial polypeptide expressing nucleotide sequence isolated from the Sargasso Sea
aatgttttacagaaatcatataaaaagaatatttaatgagttcgctggagaaatagactcttcttcagacgatgatagcgctggtgatgttaaataccatttaggagcatcatcagatagggtatttgatggtaattcagttcatgtaagtcttacggataatccatctcatttggaagctgtaaaccctgtagttttggggcaaacaagagcaaagcagttttttcataacgataaagagagaaaaaaagtaattcctatattaattcatggtgatgcttcatttgctggccagggtatcgttgctgagtgctttgcgatgtctggcttgcctggtcataatactggtgggacgattcattttataattaataatcaaataggatttacaacaagcccaagatttgcccgttcatccccacatccttctgacgtagcaaaaatggtagattcaccaattattcacgccaacggcgatgatccagaatctgttgtatatgcagctaggatagctggtgaatttaggcttaaatttaatagagacgtagtagttgatttggtttgttatagaagatttggtcacaacgaaggagacgaaccttcatttactcaaccattaatgtataaaaaaattaaatctcatctatccacagtaaaaatatatggaaataaattagttaatgaaaaaactattttatctgaagatttaaacaatcagattaaaaaatttaaagatcttcttgatgatcaatataaaaatgcaaaaaattataagccaaaaattgagtggtttgaaggaacatggtcaagatataaaccaaaaagaggacaagataaaagaggagattcaggctattcaactactaaacttttagaaatttcagataaaatacactcactttcgcctgagctaaatatccacaaaactatagttaaaatttttgaagctagaaaaaattctatgaataaaggaaatggaattgattggtctactgctgaggctcttgcatttggttcattattagaagaaggatatccagtgagacttgttggacaagattctggaagaggaacttttagtcagaggcattcagtattaagaaatcaaattgataattcaagatatatcccattaaataatatttcagaaaagcaaaaaaattttgaaatagttgatagctttttatctg

SEQ ID NO: 217077 - DNA, 1150 bp, Unknown
  Bacterial polypeptide expressing nucleotide sequence isolated from the Sargasso Sea
atgaaagagctatgggggagctcacatgtctcggcagggcatgcagcatacctcgaaaccctctacgatactttcttaaaaaatccagaacatttatcagaagagtggctagatttttttaccaatcttccaaaacagcctaattccaatggtgaaatatcacatattgagattatcaaagagtttaaaaatttttcaagaagcaaagctactccaaaaaatgaaactatgcttgatgataaacagggtaaagtcattagattgattcagtcatacagaaatagaggtcacctcaaggcaaagcttgatcctttgggtatgatggaaagacgggagatagaagatttaaatattgagtttcatggcctatctcatagtgacttagatcgagatttttttacagatacttttactgaaagcaataaattatcattaagaaacattattaaaaccctcgaagaggtatattgtggaaaaattggcatagagtgtaatcatattcttgattcagaagagagaagatggtttcaaaaaaaatttgaatcaaagctaactgaatatgtttttgatgatgatgaaaaagtaaacatattcgaacgactaaattctgcagatggattagctaaatatctatctgcaaagtatccaggaatgaagcgttttggaattgacggagctgaagcattagtacctctagtagaaagtgttattcaaaattgtggttcaattggtgcatcacaaatttgtttgggaatggcacacagaggaagattaaatctactggtaaatgttttaggtaaacttccaagcgagctattttctgcctttgatgaggattttgaattagagggagctagcactggtgatgttaagtatcatttaggattttcttctaattttgagactcctggtggagaagtgcacgtatctttgtttaataatccatcacatcttgaaattgtagatccagttgttcttggctctgttagagcaagacaagatcgaataggtgatacagacagaactgaggtagtaccaattcttcttcatggagacgcatctttttcaggccaaggggttgtaatggaatcattgcagatgtcacaaacaagaggctttaatgtaggcggaactattcatattatgtaaa

SEQ ID NO: 217078 - DNA, 949 bp, Unknown
  Bacterial polypeptide expressing nucleotide sequence isolated from the Sargasso Sea
ctggaattttctcatatatctgatgaaagtgaaagaaactggataattgatagatttgagaataatgattacaaaaaaataaatttaaatgaaaaaatctttattttgaaaagattaatttctgcaagaggtttggcgaaatatctttctgcaaaataccctggcatgaaaagatttggtatagatggatgtgaatctctaatacctctcattgataccttaattgagcagacatcaaaaaatagtgctgaacaaatttgttttggaatggctcatagagggagattaaatttactgataaatattttaggtaaaaagccaaaagatttatttgccgaatttgaagaaaactatgacctgaagggttctagcactggtgatgttaaatatcatttaggattctcatcaaatatacatacaactaatggtgacgttcatgtctcactcattaataatccatcgcatttagaaatagtagaccccgttgtaattgggtctgttcgagcaaggcaagatagattaaatgatagagaaagaaataaagttgtaccaatcctaattcatggtgatgcttcatttagtggacagggagttgtcatggaaacgcttcaaatgtctcaaactagaggatatggagttggaggcactatccatgtcatcataaataatcaaataggtttcacaacggataatccaaaggattcacgttcaacacgatattcaacagatatagcaaaatttattgaagcaccaatatttcatgtaaatgctgatgatcccgaagcagtaatttatatatctaaattggcttcagattatcgtgaagaatttaaaaaggatattgttattgatttaattggttatcgaagaagtggccataatgaagcagatgatccatcttcaacacaacccgtaatgtataaaaaaattaaacaacatccttccgtat

SEQ ID NO: 217079 - DNA, 637 bp, Unknown
  Bacterial polypeptide expressing nucleotide sequence isolated from the Sargasso Sea
tatggggcctgagcatagtagtgctcgtatagagagatttcttcaattatgtgctgaacaaaatatacaaatatgtatgcctagtaatgcagcccaaatgtttcatctcttaagaaggcaagctattagaaataatagaactccccttattgttattacccctaaaagtttgttaagaaataaatatgcatcttcaaatattgatgaacttacattaggaaaatttgaaaatatttttgatgatgaatcaaatttaacaaaaaaactaagaaaggtaattctttgtagtggaaaaatatatcatgatcttaaaaaacaaaaagatgaaaacaatcaaagtgatatagcaattatccgtttagaacaattatacccatttccgtatgaagaaactgaaaaaatattaagtaaatataaaaatgcttcagaatttatttggtgccaagaggagccaagaaatcaaggggcatggtatggtcaaagacatagattaaatagagttctaaaaaatattggtttaaagaaagaatttagattgatgagtaggccaccatcatctgctccagctgtaggacaaatgaaaattcatattaaacaacaaaaaaaattaatcgatttaactctaggtaaggattaa

SEQ ID NO: 217080 - DNA, 1573 bp, Unknown
  Bacterial polypeptide expressing nucleotide sequence isolated from the Sargasso Sea
tcatttttaaacacagcccatacagcttattttgctgagctttacgatcaatatttaattaatcctgaatcagttgaaccaacatggcgagccttttttcaaggatttgaatttggaattgataaagcatcaaaaaaagaagatattccagaaaatattttaaaagaattcaaggttgttaagctcattaatgcttatagaactagaggacatctatttaccaaaactaatcctgttcgtgacaggagaaaatattcaccaaatttagatttagaaaattttgaactttcaaaaggtgatttagagttaagttttagtgcgggtgaaataattggaattggtaactctactttggctgatatactaattcatttagaaagaatttattgtgattcaataggtattgaatatatgtatattagaacacctgaaagaattaagtggattcagagtaaacttaatgaaaatgacaacagacctaattttaataaaaaacaaaagaaacatatattaaaaaagttagttcaagccactaattttgaacagtttttacaaaaaaagtatgtcggacaaaaaagattctcactcgaaggtggagagtcattaattcctgctctagattcaatttttgagaatgctgcatcaatgggagttaaagaatttgtggttggtatggcacacaggggaagacttaatacattgtcaaatatttttggtaaaccagcaaaagaaatttttaatgagtttgatggaaaagactatgaggagcaaatttttgatggagatgttaaataccatcttggttggacatcaaaaagaaaatctgatggaggagtaaatgtatacatgaatttagcaccaaatccttcacatttagaatcagtaggtccggttgttcaaggaatttctagagctaaacaagataaatatcacaagaataatgtaagaaatgtattacctgtaattatacatggtgatgctgcaattgctgctcaaggagttgtttatgaagtagtgcaaatggaaaggttaaagggttatcgaacagccggaacaattcatatagtagttaataatcaaattggttttactacaaattatattgatggtagatcatcaacttattgtactgatgtaggaaaagctaatctttgtccaattcttcatgttaatgctgatgatgtcgaagcggttgttcacgcagctaattttgctttagaatatcgaatgagatatgagagggatgtattcattgaccttcttggttacagaaaatatggtcacaatgagggagatgaaccaagatttacgcaacccaaactatataaatcaatttcaactcaccctagtgttaaagaaatatattcgaaccaacttgtaaatgaaaaagtaattgatagagaggaaattaagaatattgaaaatgattatagtgaagatttaaatgaagacttatcagattctaaaaaggaaaaaaatgttgttattacaccttttatgcagcatgagtggaaaggtttatcaagagttaagagaaaagaaaatgctaaaaactttctttaccgatgttaat

SEQ ID NO: 217081 - DNA, 1600 bp, Unknown
  Bacterial polypeptide expressing nucleotide sequence isolated from the Sargasso Sea
atgtcatcatctacaaatctagaatacaaaaaaacttcatttcttaacaaatcaaatagtgcatttatagaacaaatgtatgtgaagtatgtaaataatgatccaaatttacctgagagttggaaaaaatactttatagatattggtgatgatattaattcaattgttaaagaggttaatggaccatcttggagtccaagaaaaaataaaattgatgagagtaaaatacttgaaaatgaaattgagactctagaaagtcaaaataaagaaatagatcaaaacgacgtagttgcaagtaacagtaattctattaaagcagtctctttgattagagcttacagacagcgtggtcatttattatcaaaagttgatccattagaaatgcgagaaagtgaataccttgacgaactacatcctgaaaattatggatttaaaaaagatgattatagtaaaaaaatttacttagacggtgtcttaaataaagaatattctaacataaaggaaattctctctgtattaaggaaaatatattgtggaaatattggttatgaatatatgcatatttcaaatccaacagagagaaaatggtttcgtgatagagttgaaaaagatgaaaatgcattgaaatttacagtaaatggaaaaaatgcaatcttaaataaattaatacaagctgagggttttgaaaaatttttacacacaaaatatgtgggatcaaaaagatttggtcttgatggtggtgaaagcttgatacctgcgttagagcaaataattaaaattggtggtcagtcaaacataaaagaagttaaaattgggatgtctcacagaggaagactaaatgttttagctaacgttttacaaaaatcatacaaaagaatatttaacgagtttgctggtgaaattaataatacagatgaagatagtgctggcgatgtaaaatatcatttgggagcatcctctgatagagaatttgatgggaatgttgttcatgtaagtctaactgataatccctcacatttagaagcagtcaatccagtagtcttaggtcaaactagagcaaagcaattttttcacaaagatgcaaaaagaaataaggttattccaattttaattcatggagatgctgcttttgctggacaaggtgtagtagctgaatgttttgcaatgtctggtttgccaggtcataatacaggcggaacaattcacataattgtaaataatcaaattgggtttacaactagtccaagatttgcgagatcctctcctcacccttcagatattgccaaaatggttgaggctccaataatacacgttaatggagatgatccagaggctgtagtttatggatcaagaattgcaacagagttcaggcttaaattcaatcgagatgtggttttagatttagtttgttatagaagatttggacataatgagggagatgagccctctttcactcaacctcttatgtacaaaaaaataagatcacatccttctgcggcaaaaatttatggatcaaaacttgtagatgaggatttactttcagaaaatgatttaaataatcaaattaaaaaatttaaaactttattagatgatcaattaa

SEQ ID NO: 217082 - DNA, 1610 bp, Unknown
  Bacterial polypeptide expressing nucleotide sequence isolated from the Sargasso Sea
gatggataagtattcttttttgaattcagctaatacagcttattttgctgaactttatgatcagtaccttaagtcacctgatactattgaacctagttggagagctttttttcaaggatttgatttcggacaagagaatggaacttctcagatagaagttgataatctagttccagaaaatataaaaaaggaatttcaagtagtaaagttaatagacgcctatagaaataggggacatttatttaccaaaacaaatcctgttagagcaagaagatcttatagtcctaatttagatttccaaaattttggattagaagaaaaggatttaaaaacagtttttagtgcaggagaaataatggggataggatcatcaactttaactgaaatcataaatcatcttcagcagatctattgtgattcaattggaattgaatacatgtatattagaaatcctgtcaaggttaactggattcaaaagaaacttaatgtaaatactaatcatccaaaatttacatcagatcaaaaaaaacatattctttcaaaattgaacgaagcagttagttttgaaaattttttacacacaaaatttgttggacagaaacggttttccttagaaggtggggagtcattaattccagcaatagattctataattgagttggctgctgagaaaggagtagaagaatttgttatgggtatggctcacagaggaagattaaatactttaataaatatttttggaaaatctgctaaagatatttttaatgaatttcaaggtaaggattatgatgaagaaatgctttttgatggagatgtaaaataccatatgggatggacatgtaaaagagatacagattcaggaaaaaaagttaacttaaatattgctccaaatccatctcatttagaaacagttggagctattgtacaaggaataactagagctaaacaagaagacgacttttcgggggatttatctaaggtgcttcctattattattcatggagatgcagctattgctggacaaggacttccttatgaaattgttcagatggctggcttaaaaggatatggaacgggaggaacaattcatatagtagttaataatcaaattgggtttacaactaattatcttgatgctagaacaagtacttattgtacagatgttgggaaagttactttatgtcctatttttcatgttaatgcagatgatgtagaagccgttattcatgcagctctttttgcccttgaatataggatggaatttaatcaagatgtttttattgatttattaggatatagaaagtatggccataatgaaggagatgagcctcgtttcacccaacctaaactatataaggctattgccaagcacaaaaatccaaaacaaatatattctgaaattttattaagccaaggagtaattgatcaaaaacatttgtctcagattgaaaaggagtatagacaaatgcttgataaggcttttgatgattcttcaaaagtaaaagagactattattacagattttatgggggatgaatggaaggaatttcaaagagctgatgaaaaaatcatgagtaaggaggttgaaacaaaaatttcaatttctaatt

SEQ ID NO: 217083 - DNA, 631 bp, Unknown
  Bacterial polypeptide expressing nucleotide sequence isolated from the Sargasso Sea
gttgtgtgctaatgataatcttcaagtgatgaactgtactacgccagcaaattattttcatgcacttagaaggcaaattcatcgcgacttcagaaaacctttagttttaatgacaccaaagtcacttttaagaaataaatattgtgtttcagatataaaggattttaataagcaaacatcatttcatcgtattttatgggatcacgcattaaataatgataatgaaaattttataaaattaaaaaatcctgacgaaattaaaaaagttattctttgttctggaaaagtttattttgacttattggttgctagagaaaaaattaaaagagacgatgtgatcttgtttagaatagaacaattatatccttttccagtaaaaagcttagtcaaggaacttaagccttatgcaaacaatgctaaattttattggtgtcaagaagaaccaaaaaatatgggagcatggttttcagtgagagattatattcaatggacattagaaactattaaagctaaaaataataatatttcttatattggaagaaatcctgatgcatctcccgcaactggctatgcaaaaaggcatatggtagaacaagaagagattataaaaaaagtttttgataatgagtaa

SEQ ID NO: 217084 - DNA, 1148 bp, Unknown
  Bacterial polypeptide expressing nucleotide sequence isolated from the Sargasso Sea
aaggattcacgttcaacacgatattcaacagatatagcaaagtttattgaagcaccaatatttcatgtaaatgctgatgatcctgaagcagtaatttatatatctaaattggcttcagattatcgtgaagaatttaaaaaggatattgttattgatttaattggttatcgaagaagtggccataatgaagcagatgatccatcttcaacacaacccgtgatgtataaaaaaattaaacaacatccttccgtattgaaatcatataaagataaattaatacaaaataatgatattacttcagaagaatttgatgaatttaaaaaatcttacagatcatcaattgaaaaagatgaaagcgtcgcccttaacttatcaaaaataaagaatgatgacttatggtttgaatgggatcagttcattgatgctaggtgggatgaaaatactgatacaactgtcaaacaagatcaactaattgatgatgctcgaacaatcgctgatattccaagtggttttgttttgcagaaaaaagtcaaaaatataattaagcaaagaatagatatggctgaaggaaaatgtgaatttaattggggatttgctgagattgcagcatattcgagtcttttgcgtgaaggatacccaattagatttagtggacaagatataaggagaggaacatttgatcacagacatgctgtgatgtttgatcaagaggatgggagaacttactatccactgaataaatttgctgaaaaaggaaatacaaatattggaatttatgactcaatattatcagaggaggcagttctaggatttgagtatgggtattcggcaacatggccaacaggcttagtaatttgggaagctcaatttggtgatttttctaatggagctcaagttgtaatagaccaatttattgctagcgcacaacataagtgggaaagattatcaggtttagtccttttactgccgcatggatatgaaggtatggggcctgagcatagtagtgctcgtatagagagatttcttcaattatgtgctgaacaaaatatacaaatatgtatgcccagtactgcagcccaaatgtttcatctcttaagaaggcaagctattagaaataatagaactccccttattgttattacccccta

SEQ ID NO: 217085 - DNA, 400 bp, Unknown
  Bacterial polypeptide expressing nucleotide sequence isolated from the Sargasso Sea
ttgcttcaggtgagtcaaaaatggggaagagccagtgggcttgtaatgttattacctcatggttatgaaggacaagggccagaccattcttcagcaagactagaaagatttttgcagctatgcgctggagaaaatatgcaagtagtaaattgcacgaccccatcaaattattttcatgccttaagaagacaaatgcatagagattttagaaaaccattgatagtcatgacacccaaatctttgttgaggcataaaaaatgtatttcaaatctaaatgagtttacaaaaaaaaatacatttcatagagtcctagaagatgatgcctattctaaaaatagtggattaattaaattgagaagaaatgatgaagtaaaaaaagtagtgatgtgttctggtaaaa

SEQ ID NO: 217086 - DNA, 1356 bp, Unknown
  Bacterial polypeptide expressing nucleotide sequence isolated from the Sargasso Sea
aatttaatttatttagatggagtaattaataaacaatattcaactataaaagaaatactaggatttctcagaaaaacatattgtgaaaaaattggttacgaatacatgcatatctcaaatccaatagaaagaaaatggtttagagatcgagtggagaaagatgaaaatagccttcaatttacaaacaatggaaaacaagcaatcttaaataaacttattcaagctgatggatttgaaaggtttttgcacacaaaatatgttggaacaaaaagatttggattggatggaggagaaagtcttattcctgctttagaacaaattataaaaataggtggtcaaaattttgttaaagaagttaaaattgggatgtctcaccgtggaaggttaaacgttctagccaacgtattgcaaaagtcatataaaagaatctttaatgaatttgctggagaaataaatagttcttcagaagctgacactgctggggatgtaaaatatcatttgggagcatcatcaaatcgtgaatttgatgggaattctgtacatgtaagtcttacagataacccttcacatttagaagcagtaaatccagttgttttaggacaaacacgtgctaagcaattttttcatggagacaaagaaagaaaaaaagttattccaatattgatacatggagatgctgcttttgcaggtcaaggtatagttgcagagtgttttgcaatgtcaggattgccaggacataatactggaggaacaattcactttattataaataaccaaattggttttacaacaagtccaagatttgcaagatcatctccacatccttcagatgtttctaaaatggttgatgctccaattattcatgttaatggagatgatccagaagctgtagtgtacgcagcaagaattgcaacagaatttagattaaaatttaatagagatgttgttattgatttagtttgttatagaagatttggtcataatgaaggtgatgaaccatcttttactcaacctttaatgtataaaaaaattaaaaaccacccctctactgttaaagtttatggtaatagactagtaaaggagaatacaatctcacaagaaaacttaaacattcaaattaaagattttaaagaacttttagaggatcaatttaaaaatgcgaaaaattataaaccaaaaatagaatggtttgaaggtacttggtctagatatagaccaaaaaaaggaaaggataaaagaggagtcactggatattcaacaaaagatctttcagatatatctaataaggtacattctatcccagaaaaaataaatgcacacaaaacaatattaaaaatttttaaaatgagaaaagat

SEQ ID NO: 217087 - DNA, 1212 bp, Unknown
  Bacterial polypeptide expressing nucleotide sequence isolated from the Sargasso Sea
tggagaaattattttttggatataggggaagaaattgatttagttgttaaagagattaatggacctacatggagcccacaaaagaaaaaaattaatttaaaagacatacaaataaattcaaatgatgaagatcaagatatttcaaaattaaaacaatctaaacatgttgatagtatagatattcaaaaaacaaatagagattcaattagagcagtttctttaattagatcctatagacagagagggcacttaatatcaaaaattgatcctttagaattaagggaaattgaatatttagacgaacttcatcctgagagttatggatttaataaagaggattataaaaagaaaatttatttagatggaattgcaaataaagattattccaatattagagaaatattatcttttcttaaaaaaacttattgtgattcaattggttatgaatatatgcacatttctaatccgtcggaaagaaaatggatcagagatagaattgaaaaagatgaaaatgcactgcagtttacaaaaaatggaaaaaatgcaattttaaataaacttatacaagctgaaggttttgaaaaatttttaaatacaaaatttgtaggaacaaaaagatttggtttagatggtgctgaaagcttaataccagctttagaacaaataatcaaaataggtgggcaatttaaaattaaagaagttaaaattggaatgtctcataggggtagactaaatgttttagcaaatgtgcttcaaaaatcttataaaaaaatctttaatgagtttgcgggcgaaatgagttctcatgtagaagatacagctggtgatgtaaaatatcatttaggagcttcttcagatagagaatttgatggaaattctgttcatgtgagtttaacagataacccttctcacctggaagcagtaaacccagtagtattaggacaggctagagcaaaacaattttttcataatgataaagaaagaaaaaaagttattccaatattaattcatggagatgcagcatttgctggccagggtatagttgcagaatgttttgctatgtcaggtttgcccggacataatactggagggacaattcatataatagtcaataaccaaataggttttactacgagccccagatttgctagatcttcaccgcatccttcagatgttgcaaaaatggtagatgctcccataatacacgctaat

SEQ ID NO: 217088 - DNA, 1011 bp, Unknown
  Bacterial polypeptide expressing nucleotide sequence isolated from the Sargasso Sea
aatgatgaagcaattccagtcgaactcttatctgttcggcggcaatgctccgtacgtagaagaaatgtacgaagcgtatctcgataatccggcgtcagtgcccgagaactggcgcagctatttcgatgcgttgcagaacgttcctgcatcggatggcagcaatgccaacgacgtggcccatggcccgatcgtcgaatcgtttgcacaacgggccaaggcgaatgcctttatcccgcgcacggcaactggcggcgaagacctcgctacctcccgcaagcaagtctatgtgcagtccctcatcggcgcatatcgcttcctcggctcgcaatgggccaatctcgatcccctgaagcgccgcgaacgtcccgctatccccgaacttgaacctgcgttctacgacttcaccgaagccgacatggaccaggagttcagcgccacgaatctgtatttcggattcgagcgtgcttcgttgcgcgagatcgtcaaggctctgcgtgacacgtattgcggcacgatcggtgccgagtacatgtacatcagcgatccggaacagaagcgctggtggaaagagaagctcgagtcgatccgttcgacgccgaatttctccaatgaaaagaaaaagcacattctgaatcgcctgacggccgctgaaggcctcgagcgcttcctgcacaccaagtacgtcggccagaaacgcttctcgctcgaaggcggcgaaagcttcatcgcctcgatggacgaagtcgtgcgtcacggcggcgccaacggcgtgcaggaaatcgtcatcggcatggcccaccgcggccgtctgaacgtgctggtcaatacgctcggcaagatgcccgccgacctgttcgccgaattcgaaggcaagcacgtcgacgacctgccggccggcgacgtgaagtaccacaagggtttctcgtcggacgtctcgaccgaaggcggcccggttcacctgtcgctcgcgttcaacccgtcgcacctcgaaatcgtcaacccggtggtcga

SEQ ID NO: 217089 - DNA, 607 bp, Unknown
  Bacterial polypeptide expressing nucleotide sequence isolated from the Sargasso Sea
aatttacaaattgtaaactgtacaacacctgcaaattattttcatgtcctgagaagacaaatgcacagaggttttagaaaacctttagttattatgactcccaaatcacttttgagaaataaaaaatgtatttcttttctagaagattttacaaaaaaaaatagattccacagaattttagaagatcatgcatatttaaatggtagtaagctgattaaattaaaaaatgataaagaaattaaaaaagtcgtaatgtgttccggtaaaatttattttgatttaattgaagctagggaaaaaatcaataatgataaaacagtatttataagaatagagcaattatacccattccccgttaagcatttaggaaaacagctaaaaagatatccaaaagctaaattcttttggtgtcaggaagagcctatgaacatgggcgcatggaatacaacaaggtattatattgatagaactttagaaatcattcaagcaaaaggcgaaaaagttaaatatatcggcagaaatgctgcggcatcaccagccaccggaaatttgaataaacatcttgcagaacaaaaagaaatattagaaaaggttctaggtaattaaa

SEQ ID NO: 217090 - DNA, 501 bp, Unknown
  Bacterial polypeptide expressing nucleotide sequence isolated from the Sargasso Sea
gacctcttatcgttattactccaaagagtcttttaagattacctgaggcagcaagtgatttatctgaacttacaaatggaagttttaattgcatcattggagatgatcttccaacggaaaaaattaaaagagtagtactttgcagcggaaaggtttattacgatcttaagaaggctagagatgaaaaaggtatttcagatgtagcattacttagacttgaacaactttatcctttcccatattttgaagttgaagaaatgcttaagggttattcacatgttgaggagtttatttgggctcaagaagaaccaagaaatcaaggagcatggtttagtcatcgtcatagattagaaagggttttaaataagctcaatatagagaattcatttaaacctatttcaaggcctcctgctgctgcaccagcagttgggttaatgaaattacatcttcaacaacaacaagaattagttgataatgtacttaaaagagataacaaatgag

SEQ ID NO: 217091 - DNA, 1585 bp, Unknown
  Bacterial polypeptide expressing nucleotide sequence isolated from the Sargasso Sea
gactctattaaagcaatcgcattgataagagcatatagaatcagaggccaccttatagcaaaccttgatcctcttggtttaatgaaaagagaatatctttatgaattacatccaaatgactatggtttcaaaactgaggactttgacagaaaaatctatcttaattcatatatggatgtgggttatgcctcaataaatgaaatcatcacaaaattaagaaaagtatattgctcatcaataggtgctgaatatatgcatataacaaatccaacggagaaagtttggtttagagaaagaatggaaaaagaggaaaatcaattaaactttactgaaaaaggaaaagacgcaatattaaataagattattcaagccgaaggttttgaaaagtttttagcaaaaaaatatgttggcacgaaaagatttggtcttgatggtgcagagtctttaattccagcactagaacaaattattaagcgtggaggccagctaggagtaaaagaaattaagattggaatgtctcatagaggtagattaaatgttttagcaaatgtcctacaaaaatcttataaaagaatttttaatgaatttgcaggtgaatttgcttcttcaagtgaggactctacaggtgatgttaaataccatttaggtgcttcatcagatagaactttcgatggaaactctgtacatgtaagtcttactgacaacccttctcatttagaggcagttaaccctgttgttcttggtcaaacaagagcgaagcaatattttcataaagatacagaaagaaaaaaggtaataccattacttattcacggagatgctgcatttgcaggacaaggagttgttgcggaatgttttgctatgtcaggtttaaaaggtcataacacaggtggaacgattcatattattgtaaataatcaaattggttttactactagcccaaggtttgccagatcaagcccatacccatctgatttaggaaaaattgtagaagctcctattcttcattgtaatggagatgatccagaggcagttgttcattgtgctaaaatcgcaattgagtttagacaaaagtttaataaagatgttgtaattgacatgatttgctacagaaggtttggtcataatgaaggagatgagccttcttttacacaacctttaatgtacaaaaaaataaggtcacatccatctactttaaatatatatgggaaaaaacttatcgataataacagtataactgaagatcaattcaaaaagaaagttaatgatttcaaaaatcttttggatgaacaatttaaaaatgcgaatgattacaaaccaaaactaaattggtttgaaggtacttggtcaagatatcaaccaaagaaaggtaaggataaaagagggcagacaggggttgataccacgaaactaaagaaactctcggcaaaaataaactttttaaaaccagaacttaatattcataaaactatacaaaaagtttttgaaaatagaaataagtgtattcaagatgaaaaaaatattgattgggctaatgcagaaatattagcatttgcaacattactcgaagagggattttccgtga

SEQ ID NO: 217092 - DNA, 1321 bp, Unknown
  Bacterial polypeptide expressing nucleotide sequence isolated from the Sargasso Sea
atggacgatcgaaactctgatcaaagttttctttctggtacaaatgtgactttcattaatgatttgtataaagaatggaagattaatccaaatgcagtaccaaaggaatgggatctttggttcaagagtaatgaagatgaacctataattgacgaaggcccaagttgggccaagaaaaatagtcaagttattggagcaatagatactgttgagagtgttcgagcagtagcaagaggtattgtgggcaaaggtgatttatcagctacagatttaagagcagcaacaactgactcaattcgtgctataatgcttattagagcttttagaattaatggacatcttttagctaagttagaccctcttaatttacaacagggtgatatacacccagaactaaatccaaaaacttatggctttagtgatgatgattgggatagaccaatatttatagataatgttcttggaatggagtcagcaactttaagacaaataatggaaatagtaaaagaaacttattgtgggtccataggaatagagtttatgcatgtgcaagatccagcacaaaaagcctggatacaagaaagaatagaatcgattagaaacgctacagaatttaccaaacgaggtaaaaaagctatttatgaaagattggttggagctgagacatttgagcaatttcttcataaaaaatatgctggaactaaacgatttggtctagacgggtcagagtctgttgttccagcaatcgagcaaatattaaaacgtggtagtcagctaggcatgaaagaagttgtaattgcaatggctcaccgaggaagattaaatcttttatacaatatattaaataaaccctttagagcaattatttctgagtttttgggtaatcaagcaaatccagaagaagcaggtgggtcaggagacgttaagtatcatatgggtgcttctgctgatagagagtttgatggtaataacgtacatttatcgttacaagcaaatccgtctcatttagaagtagtagctcctgttgttattggaagagtccgtgcaaaacaaaatcaacataatgatactaatgacagattatcagtgttgggcattgtgttacatggggacgctgcttttgcaggtcaaggaatagtggctgagacttttgatttttctggacttagggggtacagaacaggtggtactattcacatagttgtaaataatcagattggatttacaactagcccaaattactctcgttctagcccatattgcacagatgtagcaaaaatggttatggctcccattatgcatattaatggtgacgacccag

SEQ ID NO: 217093 - DNA, 409 bp, Unknown
  Bacterial polypeptide expressing nucleotide sequence isolated from the Sargasso Sea
tttgtgggatgatgcggaaagagggttgagtaaaacaaaactattaacggataagaaaattaaacgtgtcgttatgtgttcaggaaaggtttattatgatctactagaagagcgtgataggagaggtattagcgatatatatatactgcgatttgagcagttttatccatttcccgctatttcagccgtgaaagaattggaaaggttcaaaaacgctgaaatggtttggtgccaagaagaacccaaaaatcaaggcggctggtcatttatggaaccaaacctagaatgggtactcagtagaataaatgctgcagccagtcgtccacgttatattggcagagcttctagcgcctcaccggctacaggactagcttcaactcacaaaaatcaacaagaagcgcttagttaa

SEQ ID NO: 217094 - DNA, 1484 bp, Unknown
  Bacterial polypeptide expressing nucleotide sequence isolated from the Sargasso Sea
aatgagttcctcaaataacttagaaaataaaaatgcaacttttttaaataaatctaacagcggatttattgaggaaatgtatgtaaaatttatagagggagatccaaatttacctgaaagttggaggagctattttgaaagtcttaatgaagatctagaagtcatttccaaagaaattcaaggaccaaattggagtcctaaaaaaataaaaattaatagaaataatttaaactataaaaataatgtccctacagaaaatgttaatgcagataaaaaagtttcagattctataagagctataacgctaataagagcttacagaacaagaggtcatttgattgcaaatttagatcctttgggtttaatgaaaagagagtacttacatgatttacatccaaaagatcatggttttactgcagatgatcttaataggaaaattttcttagataactatatggatataggacatgcaacaattaaagaaataacaaataatttaaaaaaaatctattgctcaacaattggtgcagaatttatgcatattacagatccagctgaaaaagtctggttcagagaaaggatggaaaaaaaagaaaatcaattaaattttactagaaatggaaaaatagcaattatgaataaaataatccaagcagaaggatttgaaaaatttttggcaaaaaaatatgttggaactaaaagatttggtctagatggtggcgagtccttaataccatctttagaacaaataattaaacgaggaggtcaattaggtgcaaaagaaattaaaattggaatgcctcatagaggaagattaaatgttttagcaaatgttttacaaaagtcttataaaagaatttttaatgaatttgcaggtgaattttcagctacacatgatgactctacaggtgatgtaaaatatcatttaggagcatcttcagatagagaattcgatggaaattctgttcacgtgagtttgactgataacccatcacatttagaggcagtcaatcccatagtcctcggtcaaactagagcaaaacaattttttcataaggacgaagaaagaaaaaaagtaataccagttctaattcatggagatgctgcgtttgctggacaaggtgtagtagcagaatgttttgctatgtcaggtcttaaaggacataataccggaggaaccattcacataatcgtaaacaaccaaattggatttacaaccagcccaaggtttgcgagatcaagtccatatccttctgatttaggaaaagttgtggagtcaccgattttacactgcaatggagacgatccagagtctgttgttcattgtgcaaaaatagcaatagaatttaggcaaaaatttaataaagatgttgttatagatatgatttgttatagacggtttggccataatgaaggggacgaaccttcattcactcagccattaatgtataaaaaaattagggctcacccaactacactaaata

SEQ ID NO: 217095 - DNA, 622 bp, Unknown
  Bacterial polypeptide expressing nucleotide sequence isolated from the Sargasso Sea
atgtccaaatgataatttgcaagtaatgaactgtacaactccagctaattatttccatgctttaagaagacagatgcacagagattttagaaaacctctaattataatgacacctaagtctttgctacgacataagtattgtgtatctagtcttaaagattttagtaaaaaaaattcatttcatagagttttatgggatcatgctgttgacccgcaagtgagtggttttataaaacttaaaaaatctaaaaaaataagaaaagtaattttatgttcaggaaaaatttactttgatcttttagaagcgagagaaaataagaaagtagatgacgttatattttttagaattgaacaactttatccatttccagctaaaagtcttgtacaagaattgaaaccatatgctaaaaatgctaaattttattggtgccaagaagagccaaaaaatatgggtgcatggttctctgtaagagattatatacaatggacattagatagtattaaggctaataataataaaatttcttatattggaagaagcccagatgcatctccagcaactggatatgtaaaaaggcatatttctcaacaaaaagaaataatagagaaagtttttgagtaa

SEQ ID NO: 217096 - DNA, 860 bp, Unknown
  Bacterial polypeptide expressing nucleotide sequence isolated from the Sargasso Sea
gatcctaaaacgtttagttatatgggaagctcagtttggtgattttgccaataatgcccaaactattattgatcagtttattactacaggagaaagaaaatggttaagaatgtcaggtcttacattgttactacctcatggtcatgaaggtcaaggaccagaacatacaagctcacgtattgaacgatttttacaaatgtgcgctgaagacaatatacaagttgcaaattgtactagtccagcaaattatttccatattttaagaagacaattactccgtaattttagaaaacctttaatacttttgacacctaaatctactttacgtcataaaaagaatgtttctaaaattgaggactttgttaatggttcgtcatttcatcgagtcttaagagatgaaatatctaaggatcaagagaaaaaaatcaatagacttattatttgttcaggaaaaattttttttgaattacaagatagtattgaaaaacttaaaaaagataacatatttattttacgcttagaacaattgtatccctttccttatgatgttttttcaaacgagttaaaaagatttaaaaattgtgaaataatttggtgtcaagaagaaccaaaaaatatgggagcttatggatttgttaaaagaagaattgaaagtgttatgaaacaaattcaaatgaaacaacaaaaactactttatgttggaagaagggcagcagcatcacctgctacaggagtatttgatagacatgtagctaatcagaagaatatcttaaggttagcaattgaggcagatttatcagaaatttcagacatatggatgggggtttctttagttaaatatcaactgccaattgaataaa

SEQ ID NO: 217097 - DNA, 1795 bp, Unknown
  Bacterial polypeptide expressing nucleotide sequence isolated from the Sargasso Sea
caaaaaaacatcatttcttaacaagtctaatagtacctttattgagcaaatgtatttgaagtttatcaataaagattctgacttacctgaaagttggaaaaattattttttggatataagagaagaaatagatttagttgttaaagaaattaatggacctacatggagtcccaaaaagaaaaaaattaatttggaagaaatacaaaaaaatattaataatgaggatcaaaacatttcaaaattaaaacaaactaaatattttgatagtatagatattgaaaaaacaaatagaaattcaatcagagcagtttctttaattagatcatatagacaaagaggacacttaatatcaaaaattgatcctttagaattaagggaaattgaatatttagatgaactccatcctgagagttatggatttaataaagaggattataaaaagaaaatttatttagatggaattacaaataaagattattctaatattagagaaatattatcttttcttaaaaaaacttattgtggttcaattggttatgagtatatgcacatttctaatccgtcagaaagaaaatggatcagagatagggttgaaaaagatgaaaatgcactccaatttacgaaaaatggaaaaaatgcaattttaaataaacttattcaagccgaaggttttgaaaaatttttaaatacaaaatttgttggaacaaaaagatttggtttagatggtgctgaaagtttaataccagctttagaacagataattaaaataggtggccaatacaaaatcaaagaagtaaaaattggaatgtctcatagaggtagacttaatgttttagcaaatgtacttcaaaaatcttataaaagaatctttaatgagtttgcaggtgaaacaagcaacgatggagaagatacagctggtgatgtaaaatatcatttaggtgcttcttctgatagagaatttgatggaaattctgttcatgtaagtttaacagacaacccttcacacttggaagctgtaaatccagtagtattagggcaagctcgggcaaaacagttttttcacaaagataaagctagaaatagagttattccaatattaatccatggagatgctgcttttgctggacaaggtattgttgcagagtgttttgcaatgtcaggtttaccaggtcataatactggtggaacaatccatataattattaataatcaaataggttttaccactagtcccaggtttgcgagatcttctcctcacccctctgatgttgcaaaaatggtagatgcaccaattatacatgctaatggagatgaccctgaagcagtagtttatgctacaagaatagcaacagaatttagattaaaatttaatagagatgttgtaattgatttagtttgttaccgaagatttggacataatgaaggggacgaaccttcatttactcaaccattaatgtataaaaaaattaggtcacatccatcaacaataaatatttatggaaaaaaattaattaatgaaaatataatattaaatgaagacttaaattctaaaattaaaaaatttaaagaacttttagatcaacaatttaaaacagcaaaggattataaacctaaaattgaatggtttgagggaacttggtcaagatataaaccagaaaaaggaaaagataaaagaggagcaactggaatagacttaaatattttatcaaatatatcaaataggattaatacaataccatcagagattaatattcataaaactatcaataaaattttagataatagaaaaaaaaca

SEQ ID NO: 217098 - DNA, 1181 bp, Unknown
  Bacterial polypeptide expressing nucleotide sequence isolated from the Sargasso Sea
agtcgaaaaagtttggtttagaaatagaatggaaaaagaagaaaatcaaattaagtttaccgatactggaaaaaaagcaatactaaacaaaattattcaagccgaaggatttgaaaagttcttagcaaaaaaatatgttggaacaaaaagatttggattggatggagctgagtctctaattcctgcgatggaacaaataattaaaagaggaggtcagcttggagttaaagaaattaaaattggcatgccacataggggcaggctaaatgtcctagcaaatgtattacaaaagtcttataaaagaatttttaatgaatttgcaggagaaatttctagtaatctagaggactcagctggagatgtaaaataccatttaggagcttcatcaaatagagagtttgatggtaactcagttcatgtaagtttgactgataacccttcacatttagaagctgtagatcctgttgttttaggacagacaagagcaaagcaattttttcatagagacacaaaaagaaataaagtaataccaatattaattcacggcgatgctgctttcgcaggacaaggtgtagtagccgagtgctttgcaatgtctggattacctggtcacaataccggaggaacaattcatataattgtaaataatcagattggttttacaacaagccctagatttgcaagatcaagcccttacccttctgacttaggaaaagttgttgacgctccaattttacattgtaacggtgatgatccagagtcagtaactcactgtgcaaaaattgctatcgagtttaggcaaaaatttaataaagatgtagttctagatatgatttgttatagaagatttggccacaatgaaggagacgagccttcattcactcaacctttaatgtacaaaaaaattagacagcaccctactacattaaatgtttatggaaatagattgattaaagaggggaccataaatgtagatgaatttgataaaatgaaaaatgattttaaaaatcttctagaagagcagtataaaactgccaaagactataaacctaaaatagagtggtatgagggaacgtggtcaagatacaaaccagaaaaaggaaaagataaaagaggaaaaagtggtgtagatttgtcgaaaattcagaaaatttctgatcaaattaatactattccatcaa

SEQ ID NO: 217099 - DNA, 562 bp, Unknown
  Bacterial polypeptide expressing nucleotide sequence isolated from the Sargasso Sea
ctttgagacgtcaatacatagagactttagaaaaccactagttattatgacaccaaaatcattattaagaaataaactctgtgtatcaaacctagaagattttggaaaaaaaaattcgttccatagagttttatgggatcatgctatagaccctaaagaagaagggtttataaaactaaaaaaaagtactgaaattaagaaagttattttgtgttctggtaaaatatactttgaccttttgcatgctagagagaagatgaaaattgacgatgtaataatatttagaattgaacaattatacccatttccagtaaaacccttggttaaagagattgcaaaatatgccaaaaaagcaaaattttattggtgccaagaagaaccaaagaatatgggtgcatggcttttagtgcgagattatattcaatggacattaaagtatataagcgctaaaaataaagaaatcatgtatataggtagaaacccttcagcatctccagctactggttatgctaaaagacatatagcgcaacagaaagcaataattgatcaagtatttgaataa

SEQ ID NO: 217100 - DNA, 1253 bp, Unknown
  Bacterial polypeptide expressing nucleotide sequence isolated from the Sargasso Sea
cacgttaagggatatcctcgcttttttagaaaaaacctactgcagttcggtcggggttgaatacaaatttgttcgtaatccggaagtattacaatggttagaagaaaaaatggaaggatgctccaatgctcctgattattctgttgaggagcaactcgaacatcttaagaacatcaatgaagcagtaggtttcgaatcttttcttcacaccaagtttgttggacaaaaacgattttcactggagggttctgaagcaattatacccgcactggacacccttgttgagaagggggcaatgcttggagtggaagaatttattatcggtatggcccatcgtggacgattgaatgtattggcaaatatccttggtaaaccttacgaggatatatttatggagttcgagggtaaaatggttggttccgatgggtttgacggagatgtcaaataccatatgggacattccagtgatcggctggtgagaaacgggaataccgttcatctcagcctgacaccaaatccctctcatcttgaagcggtcaatcctgtggttgcaggaatttcaagaggaaagatcgaccggcgttaccatggagatgtagacaaactcgttccgattctgattcatggagatgcttctattgcaggccaaggcattgtctatgaggtactgcagatgtcgcagttgcctggttatcacataggaggaacggttcatgtggtgctcaataatcaggtggggttcacggcggattattttgaaggacgttctagcacctactgcacggatgtcgcgaagacgacactttccccggtttttcatgtgaacggagatgatcttgatgccgttgcctatgtgacagaactggcgcttgaattccgacagaagtttcatcgtgatgtatttgtggatattgttgcgtatcgtcggcatggtcacaacgaatctgatgagcctcgtttcacccagcctgctctctataaaaaaattgctgaacatcccaatcccctccaagtctactctcaacgtctaattcaggaaggaagggtatctgaatcagagttacagaaattgattgaggattttaaaaagcaactgtctgaaaagctggaaagcactagaaaacaggaaatttctgcttcaacttcatttctggaaggagcctggtcaggaatccgtcaaccaggaatgatcgattttgaatattctcctgaaacgggtgtcgagaaatcgacttttctccggttggctgaaa

SEQ ID NO: 217101 - DNA, 1732 bp, Unknown
  Bacterial polypeptide expressing nucleotide sequence isolated from the Sargasso Sea
aaacaaagataattctagcaagttcaatttccaagtaattgcaaattcaaacaaaaattcaataagtgccgtagccttgataagagcttatcgcttaaggggacatctattatcaaaattagatcctttagaattgatgaagtcagaatatttagacgaattacatcctgagtactatggttttaaaaaagaagattatgacaaagaaatttttctaaacggaataataaataaaaaaagtgcaaatattagagaaatacttaagtttttaaaaaaaacttattgtggtcctataggttatgaatatatgcatatttcaaatccaactgagagaatgtggtttagagatagagttgaaaaagatgaaaatgcactcaagtttacaaaaaatggaaagcaagcgattttaaataaattaatacaagcagagggctttgaaaaatttttaaacacaaaatatgttggcactaaaagatttggtttagatggtggagaaagtctaatacctgctcttgagcaaattataaaaattggaggacaatctaaaataaaagaagttaaaataggaatgtcacacagaggaagactaaatgttttagcaaacgttttacaaaaatcttataaaagaatttttaatgaatttgctggtgaaatggatggatcagaagatggcgctggagatgtaaaataccatttaggagcttcatctgatagagaatttgatggaaatcctgtacacgtaagtttaacagataatccttcacacttagaggcggtcaatcctgttgttcttgggcaaactagagctaaacaatttttccacaaagacaaacaaagaaataaagttataccaatattaattcacggtgatgcagcatttgcaggacaaggaatagtagcagagtgctttgcaatgtctggacttcctggtcataacactggagggacaatccatattattgttaacaaccaaattggatttacaacaagtcctagatttgcgcgatcttctccttatccttctgacgtaggtaaaatggttgatgcaccaatcatccatgttaatggagatgaccctgaggcagtagtttatgcaactagaatagcaactgaatttagattaaaatttaatcgtgatgttgtaattgatttaatatgttacagaagatttggacataatgagggagatgagccatctttcacccaaccacttatgtacaaaaaaattagatctcatccatctacaattaaaatttatggtgaaaagcttgtaaatgaagggcttttttcgaaacaagatttagatcagcaaattgttgattttaaaaatttattagatgatcaatttaaaaatgcgaaagattataaacctaaaattagatggtttgagggaacttggtcgagatataaacccgaaagaggtaaagataaaagaggtgtgactggatcagatttgaaaattttaaataatatttctgacagaatacatgtttttccaactgataaaaatattcacaaaaccataacaaaaatcatggaaaatagaaaaaaaactattaatgaaggttcaggtattgattgggcaacagctgagtccttggcatttggttcattattagttgaaggttatccagtaaggttagtaggtcaggactcaggtagaggcacctttagtcaaagacactcagttttaagaaatcaaattgataattcaaaggtacatacctttaaa

SEQ ID NO: 217102 - DNA, 1498 bp, Unknown
  Bacterial polypeptide expressing nucleotide sequence isolated from the Sargasso Sea
ggttcaattggctatgaatatatgcatatttcaaatccattagaaagaaagtggattagagatagagtagaaaaagatgaaaatgcgcttaaatttacaaaaaatggaaaaaatgcaattttaaataaacttatacaggctgaaggatttgaaaaatttttaaatacaaaatttgttggaacaaaaagatttggattggatggtgcggaaagtttaataccttccttagaacaaataatcaaaataggaggacaatataaaattaaagaagttaaaattggtatgtctcatagaggtagacttaatgttttagctaatgtacttcaaaaatcctacaaaaaaatttttaatgagtttgcaggtgaaatgaacaatgatggagaagatacagctggtgatgtaaaatatcatttaggagcttcttcagatagagaatttgatggaaattctgttcatgtaagcttaacagataatccttcacacttagaagccgtaaatcctgtggtattaggacaagctagagcaaaacagttttttcacaaagacaaagatagaaataaagttattccgatattaattcatggagatgctgcttttgctggacaaggtgttgttgctgaatgttttgcaatgtcaggtttgccaggtcataataccggtgggacaattcatataattatcaataatcaaattggctttactactagtccaaggtttgcaagatcttcaccccatccttcagatgttgcaaaaatggtagacgcaccaattatacatgctaatggagacgatccagaagcagttgtttatgccacaagaatagcaacagaatttagactaaagtttaatagagatgtagttatagatttagtttgttatagaagatttggtcataatgagggagacgagccttcatttactcaaccattaatgtataaaaaaattaggtctcatccatcaacaacaaatatctatggaaaaaaattaataaaggaaaatttaatattagaagatgatttaaatgtgcaaattaaaaaatttaaagatcttttagatcagcagtttaaaactgccaaggattataaaccaaaaatagaatggtttgagggaacctggtcaagatatagaccagaaaaaggaaaagataaaagaggtgcaacaggagtagattcaaatattttattaaatatatcaaataaaattaacgatgtaacacctgattctaatattcataagactattacaaaaattctggaaaatagaaaaataaaagtagaaaaaggatttgatattgactggtcaacagcagaagctcttgcttttggatctttattggaagaaggatatccagttagactggtaggacaagattctggaagaggtacttttagtcaaagacattctgtgctaagaaatcaagttgataattctagatatatacctcttaacaacatttctaaaagtcagaaaaattttgagattgttgatagttttttat

SEQ ID NO: 217103 - DNA, 991 bp, Unknown
  Bacterial polypeptide expressing nucleotide sequence isolated from the Sargasso Sea
cttgcttatggtacactaatgcttgaaggattcaatgttaggatatctggtcaagatgtagaaaggggtacattttctcaccgtcatgcagttttaaagtctgaagattttgaagaagaatacttgcctcttaatagtattgattcaggtgaaaaaggagtgctaaaaatttataactctcctctttcagaatatggtgttctcggttttgactatggatatgcactggctagcccaaatagtttaacaatctgggaagcacagtttggtgatttttctaacggagctcaaatcataattgaccagtatatatcatctgctgaggataaatggaaattacaaaacggtattgtattatacctacctcatggatatgaaggacaaggagcagagcactcttcagctagaatggaaagatatcttcaattgtgtgcaaaggataatatgtatgctgcaaattgtacaaccccagcaaatctttttcatcttctaagaaggcaaatgattacaaacttcaggaaacctttaatattatttacacctaaaagtctccttagacatcctaaggtaatctcagatattgaggaattaacttcatctaggtttatgcctgtaatttcagattctgaaattgatccagataaggctgagtcattagtcttttgttctggaaaattctattttgatttaattgattacagaaaaaagagtaatattaaaaatgttgcaattgtaagaatagagcagctatttccactacctgttaaattgattatttctgaaattaaaaaattctcaaatgcaaaggatgtagtttgggcccaagaagaaccaagaaatatgggagcttggaaccatatccaaacatatcatccaattgctaagaatatgaggccagctacaagaaggttttatggatcgactgcatctggaagttatgttagatttgagagaagacataatcaagttattgagtatgtttttgataaga

SEQ ID NO: 217104 - DNA, 1085 bp, Unknown
  Bacterial polypeptide expressing nucleotide sequence isolated from the Sargasso Sea
tcaaggtacccaggaatgaaaagatttgggattgagggagcagaatcactaatacctctcattgatagccttatccaaaatactggaatttttggtgcgcaacaaatatgttttggaatggctcataggggcaggcttaacttattggttaatgttttagggaagtcgcccaaagatttattcattgagtttgaggaaggttatgagctgacaggagataataccggtgatgtaaaatatcatttaggtgtttcatccaatatattaactcctaatggtgaggtccatgtttctctgaacaataatccatctcacttggaaattgttaatcctgtaatacttggctcggtgagggcaagacaggatcgcttgggggatactgaaagagaaaaagtaataccaatattaatacatggagatgcatctttttcgggtcaaggcgtggtaatggaatcgctgcaaatgtctcaaactagagcatatggggtcggtggagcgattcacgtaattgttaacaatcagatcggtttcaccacttccaacaaagaagatgcaagatcaacgcattattcaactgacgtagctaaaatgattgaggctccaattctgcatgtcaatgctgatgatcctgagatggttgtatttgcagcaaaactcgcttgtgagtacagacatacttttaaaaaggacattgttatagacatggtctgtttcagacgaagaggtcataacgaaaccgatgatccatctcagactcaaccacaaatgtatcaagctgttgcgtcacatcctggaattaaaaagctctatcaagatcgactcattgaggataacgtgataagtcttgatgaatgtaaaaactttgaaaaaaaatatagagaaactattgagcaaggagagtctgttgcacataatcttgctacaaagcctaatgaatcaatgtggtttgattggaatccctacatgaatcaagaatggtgggattttgctgatacctcatttaatcctaaagaattcgctaaacttggctccataatttcatcaattcccgaaggctttgaactccaaaaacctgtaacaaaact

SEQ ID NO: 217105 - DNA, 703 bp, Unknown
  Bacterial polypeptide expressing nucleotide sequence isolated from the Sargasso Sea
aatgcttttgccacatggttacgaaggtcaaggaccagagcattcatcagccagattagaaagatatttacagctctgtggtgaagataatatgcaggtgttgaattgcagcacacctgcaaactattttcatgctttgcgaaggcaacttaaacgagattttcgaaaacctctgataattatgactcctaagagtttacttagacataaaatgtgcgtatctagtctgtcagatatggcagaacaaactgcttttagaagagtcattagagacccaaatataaatcttaaggatagtgaaataaaaagagtagtaatttgttcaggtaaagtattttataatttattagaagaaagagaaaaaagaaaaattaataatattcgaatacttagactagaacaaatttatccttttccttcgaaaacattaaaagaaatgttatcaaaaatcccaaatgctgaagtcgtttggtgtcaggaagagccaaagaacatgggtgcatggttttttgttgatagaagaatagagcaagtactagttgatattaaagctaagttaacaagaccaacttacgcaggtagattagaagccgcttctccagcaacaggctcctttttcagacacaacaaagagcaaaatgatttagtaaatgatgctctaaaattgaccacaaagaaagctagcagacatgcagcagagtag

SEQ ID NO: 217106 - DNA, 562 bp, Unknown
  Bacterial polypeptide expressing nucleotide sequence isolated from the Sargasso Sea
gtgccgagtactcccggccaaatttaccacctattgcgtcgtcaggcagtacgccctctgcgcaagccgttagtggtgatgagtccgaagagtttgctgcgtcacaagaaggcgacgtcctccctggaagatctggcccacggcaccttccattcggtgttggatgatctggcggatctggatagcaaaaaaattaaacgagtggtgatgtgctccggcaaggtttattacgacttgttggaaaaacgtgatagtgatgatctgattgacacggcactggtgcgtatcgagcagctgtatccgttcccggaacagcgcttgcaggaaatccttgaggggtaccctaacctggaacatctggtttggtgtcaggaagagcccaagaatcagggcgcctggtattgctcccagcaccatatgtaccgtgtagcgcagaaagcgggcgtggggcctgtgcattatgctggccgcgatatggcggccgccccagcggcgggttcaatgtcactgcacgtggaacaacagcagcgtctggttcaggacgccttcgagattaagtaac

SEQ ID NO: 217107 - DNA, 924 bp, Unknown
  Bacterial polypeptide expressing nucleotide sequence isolated from the Sargasso Sea
aatggtgggtaaaaaaattactgaagtgccgaataattttaatattcataaaacacttctaaaaattttagaaaacaaaagaaaaatgtttacagatgacaaacccatagattggtcgacagctgaacttttagcttttggtaccttattaaacgagggtttttcagtaagactttctggacaggactcaggacgagggacttttagtcaaagacacgcagtatttagagatcaagatagtcacgatagatttgtgcctctgcacaatatatctaagaaacaaaaaagctttgaagtcattgacagtttattatcagagcttggtgttctaggttttgagtttggatattctctttccgagcctgagaccctagttctttgggaagcacaatttggagatttttcaaatggtgcgcaagtagtaatagatcaatttatctcttctggtgagtctaagtggtcacgagcaagtggtctagtgatgcttcttcctcatggttatgagggtcaaggaccagaacattcatcagcaagattagagagattcttacaattatgtgcacaagaaaatttacaggttgtcaattgtacaactccagctaattattttcatgtccttagaagacaaatgagaagagattttagaaaacctttgatagttatgactcctaaatctttactgagacataaaagatgtatttcttatcttgaagactttacaacaaaaacaagatttcacagaattttggaagatcatgcttacctaaatcaaagcaaacttataaaactcaaaaaaaataataatataaaaaaggttattatgtgttcaggtaaaatatattttgatctgctagaagctagagaaaaaaataaaaatgatgaaatagtcttcataagaattgagcaactttatcctttccctgt

SEQ ID NO: 217108 - DNA, 781 bp, Unknown
  Bacterial polypeptide expressing nucleotide sequence isolated from the Sargasso Sea
tgagccaggtggattaaccatttgggaagcacaatttggtgacttcgttaactgtgcgcaagtggttattgaccagttcttgtcatcaggcgagcaaaagtggggccgtttatgtggtctaacaatgttgcttccacatggctatgaaggtcaaggccctgagcattcaagtgcccgtttagaacgcttcttacaattgtgtgctaaccataacatgcaagtgtgtgttccttctacacctgcacaggtgtatcacatgttacgccgccaagtggttcgcccaatgcgtcgtccattagtggttatgtcacctaaatctttgctacgtcatccattagccgtgtctagtatggaagagcttgctgaaggcactttccaaaatattattggtgaaattgatgcattagatccaagtaaagtagaccgcgtggtgttttgcagtggtaaagtttactttgaattacttgaaaagcgtcgtaaagaaaacatcgataacattgctattattcgtgttgaacagttgtacccgttccctgatgtggaaatgcgtgcagcattagaaacctatcagcatgttaaagactttgtatggtgtcaagaagagccacaaaaccaaggtgcatggtactgcagtcagcatcatttctgggctaatattccagcaggtgcacagttaacttatgccggtcgtgaggcgtcagctgcacccgcatgtggttatccagcattgcacgtacaccagcaagaatcattagtgaatagcgcattaaaactgtcttaa

SEQ ID NO: 217109 - DNA, 950 bp, Unknown
  Bacterial polypeptide expressing nucleotide sequence isolated from the Sargasso Sea
tcaatttaaaaatgcgaaagattataaacctaagattgaatggtttgaaagtacctggtctagatataagccagagagaggtaaggataaaagaggaaaaagtggagttgatttaaataaacttttaaaaatttctgaaaaaataaacaagataccagctaaaatggatgttcacaaaacaatcattagaattttagatgctagaaaacagtcaataaataataaaaaaggaatagactggtcaagtgctgaaagtttagcttttggatctcttttattagagggatatccagtaagattggtaggtcaagattctggcaggggaacttttagtcagagacattcaattttaagaaatcaaaacgataattcgagatatattcctttgaataatatatcagaaaaacagaaaaaatttgaaattgttgatagcttcctttccgaacttgcagttcttggttttgaatatggatatagtttagtagaacctagtactttaacgatatgggaagcacagtttggagattttgctaacggagcacaagtagtaattgaccaatttatttcttcaggtgaaagaaaatggtcaagagcctcggggttggtaatgctacttccacatgcctatgaaggtcaaggaccagaacattcttctgcaagattagaaagatttttacaattatgtgctcaagacaatttacaggtaataaattgtacaactccagcaaactattttcatgctttaagacgtcaaatacatcgagactttagaaaaccactagttattatgacacctaaatctttgttaagaaataaactttgtgtttcaaatttagaggattttggaaaaaaaaattcttttcatagagttctttgggatcatgctatagatccaaatgaaaaagattttataaaacttaaaaaacctgaaaaaataaaaaaagtaattt

SEQ ID NO: 217110 - DNA, 988 bp, Unknown
  Bacterial polypeptide expressing nucleotide sequence isolated from the Sargasso Sea
ccgtgcatcttatgccgaaaatttaatattgggaaatgtaataagtgaaaatgaagtaaatgaccttaacaatggatacagagccgcgttagatactggagagcatgtagtcaagagccttgtcaaagagccttcagtggaactttttgtcgattggagtccgtatttgggacatgactggagtcctctttttaatacctcaattccattaacatcacttcaaggccttgctaaaaagcttgtggaagttcccaaggattttcagcttcaaaggcaggtaaaaaagatatatgacgatcgcctaaaaatggcaaatgaagaaattcctgttgattggggttttgccgagtcattagcttacgcgagtgttcttgctagtggcaatactgtgagaataacaggtcaagatgtcggaagaggcaccttttcccacaggcatgcgatcgtctacgataataaaactggagaagcgcacattccactgcagcattttcaaggcgacaagagcttttctatttatgactctcttttatctgaggccgcagtcctggcatttgaatacggttactccacaacgacgccaaacgcattagtcatctgggaagcccagtttggagattttgcaaattctgcgcaggttgttatcgatcaattcatcgctagcggcgaacacaagtggcagcgtttatgtggactgactctattgctgccacacggttatgaaggtcaaggcccggagcattcatcagcaagactagagagatttcttcaactaagtgctgagcataatatacaggtctgtctgcctacgagttcggcgcaagtttttcatatgttgagaaaacaggttctttgcccgttgcgaaaaccattgattgttatgtcacctaagagtcttcttaggcataaaaagacagtctcgacgctgaaggagatggcggaagggagctttcaagtagtccttgatgacccaaagcaatcagatcca

SEQ ID NO: 217111 - DNA, 934 bp, Unknown
  Bacterial polypeptide expressing nucleotide sequence isolated from the Sargasso Sea
gtttacgctgctagaattgcaactgattttagattaaaatttaatcgggacgtagttatagatttaatttgctatagaagattcggtcataatgaaggagatgaaccttcttttacacaaccgcttatgtacaaaaaaatccgatctcatccatctccagtaaaagtttatggccaaaaattaattaaaaaaggtttaatttcagaaaattatttaaatgactctacaaaaaagtttaaagatttattagatgaacaatttaaaaatgcaaaaaattataagcctaaaattgagtggtttgaagggacttggtcaagatacaaacctgaaagaggaaaagataaaagaggaattacaggatcagatactaaaaaattaaagaatatttcagacagaataaacacaatacctgaagaaatcaatattcacaaaactattaaaaaaattttagacaatagaaaactttcaatttctaatgggaaaggtattgattggtctacggcagaagctttagcctttggatctttgctggaagagggatatcctgtaagactagttggtcaagactctggaagaggaacattcagtcaacgacattccgttttgagaaatcaattggataactcaagatatataccattgaatcatatttcaaaaaatcaaaaaaattttgaagttgttgatagttttttatcagaactggctgtattaggttttgaatatggttatagtttagttgaaccaaacacacttactatttgggaagcacaatttggggactttgcaaatggtgctcaggtagtaattgatcaatttgtggcctctggagaaagaaaatggtctagagcatctggtttggtaatgttattacctcatggatatgaaggtcagggccctgaacactcatcagcaagactggagagattttacagct

SEQ ID NO: 217112 - DNA, 724 bp, Unknown
  Bacterial polypeptide expressing nucleotide sequence isolated from the Sargasso Sea
tgatcaatttatttcatccggtgaaagaaaatggtctagagctagcggattggtattgcttctcccccatggttatgaaggacagggtccagaacattcctcgggaaggctagaaagatttctgcagctttgtgcacaagacaatcttcaagtaatgaattgcacaacgcccgcaaattactttcatgctttaagaagacaaatacacagagattttagaaaaccattagttattatgactcccaaatcattattaaggtacaaatattgcgtttctaatctagaagattttaacaaaaaaaattcttttcatagagttctttgggatcatgcaatggataaaaaagaaaagggttttttaaaacttaagtcaaataaagaaataaaaaaagtaattttgtgttcaggaaaaatttattttgatttattggaggctagagaaaaaattaagaaaaatgatgtaatttttattagaattgagcaactgtacccttttcctgtaaaatctttggttaaagaaatcaagagctatgctcagaatgctaaattctactggtgtcaagaagaacctaaaaatatgggtgcttggttttctgtgcgagattatatacaatggacattggactatattggagctaaaaataataaaattaattatataggaagaaagcccgcagcatctactgctactggatatgctaaaaggcatttttctcaacaaaag

SEQ ID NO: 217113 - DNA, 850 bp, Unknown
  Bacterial polypeptide expressing nucleotide sequence isolated from the Sargasso Sea
gatcaaattaaaagatttaaagatcttttagatgatcaatttaagacagctaaagattataatcctaaaattgaatggttcgaaggagcatggtccagctataaacctaaaaaagggaaagataaaagaggaattactggagcagatgaaaaaatacttaaaaatatttcagataaaataaatgtcgttccatccgaaataagtattcacaaaactataagcaaaattttacaaagtagaaaaaaatctgtcgatgatggtttcaatattgactggtctactgctgaatcattagcttttggctcattattagatgaaggttttccagttcgacttgtaggacaagattctggcagaggaacattcagtcagagacattcagttttaagagaccaaacaaataactctagatatattccattaaataatatttcaaaacatcaaaaaaaatttgaaatagttgacagttttttgtcagaacttgcagttttaggatttgaatatgggtatagtttagtagaaccaaatactcttactctttgggaagctcaatttggtgattttgctaatggtgcgcaagttataattgatcaatttattgcatctggtgaaagaaaatggcaaagagcatcaggtttagtaatgttattacctcatggttatgaaggtcaagggccagaacattcatcagctagacttgaaagatttttacaaatgtgcgcaaatgataatcttcaaattatgaattgtacaactccagcaaattattttcacgctttacgtagacaaatacaccgtgattttagaaaaccacttgtaatcatgacacctaaatctttactaagaaata

SEQ ID NO: 217114 - DNA, 925 bp, Unknown
  Bacterial polypeptide expressing nucleotide sequence isolated from the Sargasso Sea
atgaaatggttcgatggtgtttggtctagatttaaaccagaaataggtcaagacagaagaggagtcactggtgttgatcaaagagaattaatatcaattggaaaaaaaattactgaaattccaaaaaactttcatttacacaaaactttacttagattatttgataataagaggaaaatgtttgaaaaagaatacccaattgattgggctaccgcagaaatattagcttttggaactctcttaaatgagggtttttcagtcagactttccgggcaagactctggaagaggaacttttagtcaaagacattcagtgcttagaaatcaagatagccatgacaggtatgtgcctttaaataatatttcaaaaaaacaaaagagatttgagattatcgatagtcttttatccgaattaggagttttgggatttgaatttggatattctctatcagaacctgagacattagtattatgggaagcacaatttggtgatttttcaaatggagcacaagttgttattgatcaattcattgcatctggagagtccaagtggtcaagagctagtggactggtattattattaccacatggttacgagggccaaggtcccgaacattcatccgcaagaattgaaagatttttacaattatgcgcacaagataatttacaagttgtaaattgcacgacaccagcaaattattttcatgttttgagaagacaaatgcatagaaattttagaaaaccattaatagttatgacaccaaaatcacttcttagaaataaaagatgcgtctcaaatcttaatgattttacaaaaaaaacaacttttcatagaattcttgaggaccattcttatctagagaatagtaaattaattaaattaaaaaaagataaaaaaatagaaaaagtaattatggttcaggcaa

SEQ ID NO: 217115 - DNA, 655 bp, Unknown
  Bacterial polypeptide expressing nucleotide sequence isolated from the Sargasso Sea
gttttacagaaaaaagtcaaaaatatacttaagcaaagaatagatatggctgaaggaaaattagaatttaactggggatttgctgagatcgcagcttattcgagtcttttacgtgagggatacccaattaggtttagtgggcaagatataaggagaggaacatttgatcacagacatgctgtgatgtttgatcaaggggatggaagaacttattatccattaaataaatttgcagaaaaaggaaatacaaatatcggaatttatgactcaatattatcagaggaggcagtcttaggatttgaatatggttattcggcaacatggccaaccggtctagtgatttgggaagctcaatttggtgatttttccaatggagcccaagttgtaatagatcaatttatttcaagcgcacaacataagtgggaaagattatcaggtttagttcttttattgccacatggatatgaaggtatggggcctgagcatagtagcgctcgcatcgagcgatttcttcaattatgtgctgaccaaaatatacaagtatgtatgcctagtacagcggcccaaatgtttcatctcctgagaagacaggctattagaaactatagaacaccacttattgttattactcctaagagtttgttaagaaataaat

SEQ ID NO: 217116 - DNA, 941 bp, Unknown
  Bacterial polypeptide expressing nucleotide sequence isolated from the Sargasso Sea
tgctgccgaacttggagaatatttgcatacccgttatgttggacaaaagcgcttttctcttgaagggggagaaagtgtaattgttgcactggatcatcttttgcaaagagctggcggcaataatactgctgaagtcgtaattggtatggcccacaggggtcgtttaaatgtacttgtaaatactatgggaaagatgccaaaggacttgttttctgaatttgaaggaaagttggatgagcaattgttgcatggggatgtaaaatatcatcaaggtttttcggccgatgtgatgaccccaggaggacctatgcatgtgtctctagcctttaatccctcccatcttgaaattgtaaatcctgtcgtcgaaggttccgtaagagcaaggcagactaggaaaggaatggaaggacataaggttttgccggtattgttgcatggagatgcggcttttgcgggccagggagttgttatggagacgttaaatttatataacactcgtggctatcgaactggtggaacggttcacattgtagtcaataatcagatcggtttcactacttctgatgtccgtgatacgggttccactttatattgtacagatgtagcgaaaatgattgaagctcctgtgtttcatgtgaacggcgatgatcctgaggcagtggcattggtcactgaggttgcgttggattttagaaacaaatttgcaaaagatgtagtaatcgatttggtttgttttaggaaattgggacacaacgagcaagatgaaccaatggtcacacagcctcttatgtacaggcacataaaaaaacatcctggtactcgtaaactatatgctgataaattaacgtctaatggggtttgtgaagatggtattgcggatgaaatgattaagtcataccgcgaagctttagacgaaggtgtcaacaccaacaaaactgtgt

SEQ ID NO: 217117 - DNA, 766 bp, Unknown
  Bacterial polypeptide expressing nucleotide sequence isolated from the Sargasso Sea
tggagctcaagttataattgatcagtttatcgcttctggggaaagaaaatgggcaagagctagtggcttggttatgttattacctcatggttacgaaggacaagggccagaacattcctctgcaagattagaaagatttttacaattatgtgctcaagaaaatattcaagttattaattgcaccactccagcaaattattttcatgctttacgtcgtcaaatgcatagagaatttcgtaaaccactgataattatgacgccaaaatcattattaagaaataaaagatgtgtatcaaacatagaagattttactaaaaaaaattattttcatagagtgctccccgatcatgctgaaataaaaagctatggactcattaaactacaaaaagataaaaaaataaaaaaagtaattttatgttcaggtaaaatttactttgatcttattgaagccagagaaaaaataaaaaatgatagtgtatttatagtgagaattgaacagttatatcctttcccagtaaaaacactagcccaagagttgaagaggtttagaaaaaaagcaaaatttttctggtgtcaagaagaacctcaaaatatgggtgcatggaattctgcacgcaattacattgaatggacgttaattcatattggtgcagatgataaagaagtaaggtatattggaagaaaacccgcagcttcacccgctacaggatatataaaaaggcatattgaccaacaaaaacaaatagtagaaaaggtacttagctga

SEQ ID NO: 217118 - DNA, 693 bp, Unknown
  Bacterial polypeptide expressing nucleotide sequence isolated from the Sargasso Sea
cagagcataaatgggagagattatctggcctagtaatgctattacctcacggttatgaaggtcagggccctgaacacagtagtgcaagattagagagataccttcagttatgtgcacatgacaatattcaagtttgtatccccactactccggctcaaatttatcatctactgagacttcaaacgattaggaaaatgagaagacctcttataataatttcaccaaaaagcttgctaagaaatccccttgcaacatctagtctagatgaattaacaaatggaacttttatgcctgtaatagatgaccaattaaaaaataaagataaaataaaaaaattaattctttgttcaggaaaggttttttatgatctcgttgaaaaaagagaagctttaaatgctgaaaatttagcaataataagaatggaacaattatattcatttccatatgatgaattagagataatcttaaagagttatagtaattgtgataaatttatttggtgccaagaagaacctgcaaatcaaggtgcttggtttagccataggcatagaattcaaagagtgcttgatcgtttctcagaaaaacaaattcaattaattagccgaccatctgcctcagctcctgctgtaggattaaataaattacataaaaaacaacaagaatctcttatagatagagtttttgaagattaag

SEQ ID NO: 217119 - DNA, 703 bp, Unknown
  Bacterial polypeptide expressing nucleotide sequence isolated from the Sargasso Sea
atgcttttaccgcatggatatgaaggtcaagggccagaacattcatctgcaagattagaaaggtttttacaactatgtgctcaagaaaatatacaagtagtaaattgcacaacaccagcaaattactttcatgctttacgtcgtcagatacatagagattttagaaaaccattaattgtaatgactccaaagtctcttttaagaaacaaaagatgtgtttcaagtatagatgatttttccaaaaaaaatacttttcacagagttcttaatgaccatgctgactttaaaaaatataatttagtaaagcttaaagaagataaaaaaataaaaaaggtagtcatgtgttctggaaaaatttactttgaccttgttgaggctagagaaaaatcggaaaacagagaagtattttttataagaatagaacagttgtatccttttccagcaaaaacacttgcacgtgagttaaaaagatttaaaaaaaattcaaaattttactggtgtcaggaagaacctcaaaatatgggagcatggaatactgctagaaattatattcaatggagtttaaattatataaaagcggaaaatagagaggtcaattacataggcagaaaacctgctgcatcgcctgccagtggatatcttaaaaaacaccttgcagagcaaaatgaaatattagaaaaggttgtaggaaaatttaaataat

SEQ ID NO: 217120 - DNA, 900 bp, Unknown
  Bacterial polypeptide expressing nucleotide sequence isolated from the Sargasso Sea
ttctgatagacttataaaagatggattaataccggaaggtgagatagatggtatgaaagctcgttttcaaactttcttaagtaacgagtttgaaaatagtaaatcttacagacctaataaagcggattggcttgacggaaaatggtcaggggttaaaagcaaggaaaagttgtaccaaagagggaaaacgtcaataactaaaagtcaatttgaaaaaattggaaagtctttaacggcagttcccaaaggttttaagatccacaaaactgtttccagaatgctgaaaagtaaagaagaatcaattaagtccggaacaaacattgattgggctacaggagaggcatttgcatttggaagtcttcttttagagggcttcccagtaagactttccggacaagactgtaccaggggcaccttcagtcaaaggcatagtgcttttatagatcaagaaactgaagaaagatattacccccttaataacatttgctcatcccaacatgagttcgaagttatcgactcaatgctgtcagaatatgctgttcttggatatgagtatggatacacgctcgcagaacctaatgcactctgcctctgggaggctcaatttggagattttgcaaatggagctcaaatcatgtttgaccaattcatatccagtggtgaaagaaaatggttaagaatgtctgggctgactgtcctcttaccacacgggtttgagggccaaggcccagagcactcttcagctaggctagaaagatttcttcagatgtcagcagaggataattggataatcgttaactgtacaactcctgcaaattattttcacgtacttagaagacaactccatagaaaattacgaaagccgctgattattatgacgccaaaatccctgttaagaca

SEQ ID NO: 217121 - DNA, 763 bp, Unknown
  Bacterial polypeptide expressing nucleotide sequence isolated from the Sargasso Sea
agcccaaataatgatagaccagttcatatcatcgggggaaaagaaatggctaaaaatgtctggactagtaatgcttctcccacacggatatgaaggccaaggaccagaacattcatctgctagattagaacgatttttacaagcatgtgcggaagataattggattattgcaaattgtacaactccttctaattatttccatatattaaggagacaattatacagaagttttagaaaaccattggttattatgagtccaaaatcccttttaagaaataaacgagccatatcaaatacaaaagaatttataaatggatcttcttttcataggatacttttggacgatgccgaaaaaggaaattcttcaacaaagctggtaaaagatacaaaaattaagagagttgttatatgctcaggtaaaatctattatgatctcttagaagaaagagaggaaagaaatatttctaatatatatttattaaggttagaacaattctatccatttccagctttatcttttatcaaagaattaactagatttaaggatgcagagttcatttggtgccaagaagaacccaaaaatcaaggtggatggtcttttgttgaacctaatttagaatggtcattaaatagagttaatgcaaagtgtaaaagagcaaagtttataggaagagctgccgctgcttcacctgcaactggcttggctacacaacataaagaacaacaagaaaagataattaacgaggctcttactattaattga

SEQ ID NO: 217122 - DNA, 865 bp, Unknown
  Bacterial polypeptide expressing nucleotide sequence isolated from the Sargasso Sea
taagccagaaaaaggtaaagacaaaagaggagtaactggttttgaagagaaaaaactaaaagatttatcgactagaataaatataattcctccagataaaaatattcataaaactatttctaaaatttttaactcaagaaaagatagtatagaaaaaggtattggaattgattggtcttctgcagaaggtctagcctttggatctttactagaggaaggttatccagttagacttgtggggcaagactcaggaagaggtacattcagtcaaagacattctgttttaagaaaccaagttaataactcaaggtatataccgctaaataatatttcaaaaaatcaaaaacaatttgaaatagttgatagttttttatcagaacttgctgttctaggttttgagtacgggtatagcctggttgaaccaaatactctaactatatgggaagctcagtttggtgattttgctaatggggcccaggtagtaatagaccaatttattgcctctggagaaagaaaatggaatagagcttcaggtattgtgatgctattacctcacggttatgaaggacaaggaccagagcattcctctgcaaggttagaaagatttttgcaattatgctcgaatgataatatgcaagtaatgaactgtactactcctgcaaattattttcatgccttgagaagacaaatgcatagagattttagaaagccattaattattatgactcctaaatctttgttaagaaataaatattgcgtttcaaacttagaagattttaataaaaagaatacttttcacagagttttatgggatcatgctatagatccaaaatctaaagggtttattaaatttgaaaaaatctaa

SEQ ID NO: 217123 - DNA, 871 bp, Unknown
  Bacterial polypeptide expressing nucleotide sequence isolated from the Sargasso Sea
gctattatctggtgatgtaaaatatcataatggattttcatctgatatattagttaatgaaaaaagaatgcacttagcccttgcatttaacccttctcacttagaaattgtatctcctgttttagaaggctctgtaagagcaaggcaagaaaatctaaataaagaaaaccccaagaatgatgttcttgcgatacacatgcatggtgattcagcgatatctggccagggtgttgtaatggaaacgctaaacatgtcccaaactaagggttatggaacgggaggatctattcatattgttgtaaataaccaaattgggtttacaacatctcagtccattgatgttcgtagtactttttattgcacagatatagctaaaatgattgaagctcctatttttcatgtaaacgctaatgatccagaggctgttatcactgttgctaaattggctgttgaatatcgaatgaaatttaatagagacgtatttattgacctaattggctttagattgcatggtcataatgaagcagatgaaccttctgcaactcagcctatgatgtatgcaactgttaaaaaaatgaagcctgctagggaaatttatgctcaaaaattaattgaagaaggcttaattactaaagatgactctaataaaatatttaaagattataaggcccttttagagcatggtgatcctgtagttaatttaatacctgcaaacgataagcgacttaaaactaagaaaaaaggtaatgctaattggaaaaagtatctaggtagaaagtgggatgaagagtacccatcaaaaacctctcttacaaagcttaagtctcttgctaaaaaattagaagagctacccgatggttttactatgcaa

SEQ ID NO: 217124 - DNA, 862 bp, Unknown
  Bacterial polypeptide expressing nucleotide sequence isolated from the Sargasso Sea
attggtgtcggaaaaacaaaaaaactttgaagtcatagacagtcttctttctgaattaggtgttcttggttttgaatttggttactctctatctgaacctgagacgcttgtgctctgggaagcacaatttggagattttgttaatggtgcgcaagtcgttattgatcaatttatttcatcgggagagtcaaagtggtcaagagcaagtggacttgtgatgctattaccccatgggtacgaaggccaaggtcctgaacattcttcaggcaggttggaaaggtttttgcaattatgtgcgcaggacaatttacaagtagtaaattgcacaacacccgcaaactattttcatgttctaagaagacaaatgcatagagactttagaaaaccacttataatcatgacacctaagtcactcttaaggcacaaaagatgtttatcaaatctagaagattttacaaaaaagaatacatttcatagaattttagaagatagtgcttattcaaaagcaagcaaacttgtttctctaaaaaaagataacaaaatcaaaaaagttgttatgtgctcaggcaaaatttattatgatcttatagagcaaagagaaaagagaaaaaatgatagcgtagtgttcttaagaattgaacagctatacccttttcctgtaaaacaggttggaaagcaacttaaaagatataaaaatgcaaaatttttctggtgtcaagaagagcctaaaaatatgggtgcatggaatacagcgcgacactatattgatagaactctagatatcattccaagtaaaggagaaaaggtcaaatatgttggacgaaatgctgctgcatcacctgccacagggaatttaaattaa

SEQ ID NO: 217125 - DNA, 831 bp, Unknown
  Bacterial polypeptide expressing nucleotide sequence isolated from the Sargasso Sea
aaaatttttcaattaagaaaagaaactataaaaaaaggtaaaggaatagactggtcttcagcagaagctcttgcatttggttcattgttggaagaaggatacccagttagactagttggacaagacactggtagaggaacttttagtcaaaggcattcagttttgagaaatcaaatagataattcaagatacattcccttaaacaatatatcaattaatcaaaaaaagtttgaaattgttgatagttttttatcagaattggcagttttaggttttgaatatggttatagcttagttgaaccaaatacattaacaatatgggaggcccaatttggtgattttgcaaatggtgcgcaggtaataattgatcaatttatttcttcaggagaaagaaaatggttaagggcatcaggcttagttttgttattacctcatggttatgaaggtcaaggcccagaacattcatctgcaagattagaaagatttttgcaattatgttcaaatgataatatgcaagtcatgaactgcacaacacctgcaaactattttcatgctttaagaagacagatgcatagagattttagaaaacctttagttattatgacaccaaaatccctattaagaaataaattttgtgtctcaaatattagtgatttttctaaatcaaattcatttcatagagttctttgggatcatgcagtagaccctaaaagtaaaggttttataaaattaaaaaaaaataatgatatacaaaaagttatattatgttcaggtaaaatttactttgacttattagcggcaagagaaaaattaaaaagagatgatgttatt

SEQ ID NO: 217126 - DNA, 910 bp, Unknown
  Bacterial polypeptide expressing nucleotide sequence isolated from the Sargasso Sea
cctaaaaaatatatctgaaaaaataaatacaattccagaaagaaaaaacgttcataaaactatattaaaaatattaaatgttagaaaaaaagttgttgatcaaggttttggaattgattgggctactgcagaggcattagcttttggatctttgttagaagaaggttatccagttagattggttggccaagactctggaagaggaacttttagccaaagacattcgattttaagaaatcaaattgataatagtagatatatccctttaaataatatttcaaaaaatcaaaaaaaatttgaaattgttgacagttttttatctgaacttgcagttttaggttttgaatatggatacagtctagttgaaccaaacactttaacactttgggaagctcaatttggagattttgctaacggtgctcaagtgattattgatcaattcatttcttcaggtgaaagaaaatggaaaagagcttctggacttgttatgttacttccacacggatatgaaggtcagggtccagaacattcttcagctagattagaaagatttttacaacaatgtgcaaatgacaatttacaagtaatgaattgtacaacgcctgcaaattactttcatgctttaagaagacaaatacatagagattttagaaaaccattgataattatgactccaaaatctttattaagaaataaatattgtgtttcaaatatagaagactttggtaaagaaaattcttttcatagagttatgtgggatcatgcaatagatccgaaatataaagattttgttaaattgaaaaaaatttctgaaataaaaaaagtaattttatgttcagggaaaatttattttgacttactagcagcaagagaaaaattaaaaaaagacgatataataatgtttagaatg

SEQ ID NO: 217127 - DNA, 916 bp, Unknown
  Bacterial polypeptide expressing nucleotide sequence isolated from the Sargasso Sea
atgttgaaaggaacatggtcaagatataaacctgaaaaaggtaaagataaaaggggcataacaggttttgaagaaaataaattaaaaataatttcagataaaataaatagtattcctgaggaaaaaaatattcataagactatctctaaaatatttaatgctagaaaagaaagtatagaaaaaggtactggaatcgattggtcttcagctgaatctttagcgtttggatctttgctggaagagggatatccagtcagacttgtagggcaagactctggaagaggaacatttagtcaacgacattctgttttaagaaatcaaatagataattctaggtacattcctcttaataatatttctaaaaatcaaaagcaatttgaggtagtagatagttttttatctgaacttgcagttttaggttttgaatatggttatagtttagtagagccaaacactcttactctttgggaagcgcaatttggtgactttgctaatggagcccaagtagtaattgatcaatttattgcatctggtgagagaaaatggaatagagcatctggtatagtaatgttgttacctcacggatatgaaggacaaggaccagaacattcttcagcaagattagaaagatttttacaactatgctcaaacgataatatgcaagtaatgaactgcacaaccccagcaaattattttcatgctttaagaagacaaatgcatagaagttttagaaagccactaatcataatgacaccaaaatcattattaagaaataagtattgtgtttcaaatttagaagattttaacaaaaaaaatactttccatagagtattgtgggatcatgctatagatcctaagtctaaaggatttattaaactaaaagaaagtcctaaaataagaaaagtaattctttgat

SEQ ID NO: 217128 - DNA, 940 bp, Unknown
  Bacterial polypeptide expressing nucleotide sequence isolated from the Sargasso Sea
ttaatctgttacagaagatttggtcataatgagggagatgaaccttcttttactcagcctcttatgtacaaaaaaatacgctctcatccttcgccaattaaagtttacggtcaaaaacttattaatgaaggttcaatttctgtggaatttttaaataaggaaattaagaaatttaaggatttacttgatgatcagtttaaaaatgcaaaagattacaaaccaaaaatagaatggtttgagggaacttggtctagatacaagcctgagaaaggtaaagataaaagaggtctaacaggttcagacacaaaagaattaaaagagatttcaaataaaattaatacaattcctgtagaaataaatgttcataaaactatttcgaaggtaatagataatagaaagtcatctgttttaaatgaaaaaaaaatagattggtcaactgcagaggcgttagcttttgggactttattagaagagggatatccagttagattagtaggacaagactctggtagaggcacatttagccaaagacattcagtgttaagaaaccagatagataattcaagatatatacccttaaataatatttcaaaaaaacaaaaaaattttgagatcgttgatagttttttatctgaattagcagttttaggatttgaatatggatatagtttagttgaacctaatacattaactatatgggaagcacaatttggagattttgctaacggtgctcaagtagttatagatcaatttgttgcatcgggtgagagaaaatggtcaagggcctctgggttagttatgttactaccacatggatacgaaggtcaaggcccagaacattcatctgcaagattagagagatttttacaattatgttcaaatgacaatatgcaagttatgaattgcactacccctgcaaattatttcatgcgctcagaag

SEQ ID NO: 217129 - DNA, 819 bp, Unknown
  Bacterial polypeptide expressing nucleotide sequence isolated from the Sargasso Sea
tttgaagtatataattcctttctttctgaatacggtgttcttggttttgagtacggctatgcttatgcttcgccaaactcccttacaatctgggaagcgcaatttggagattttgcgaacggtgcgcaaatagtaatcgatcagttcgtttcttcttcagaaactaaatggcagcgaatgaatggtgttgtcttgatgcttccccacggtcatgaaggacagggaccggagcatacttctgcacgtattgaacgtttcctgactctttgtgcagataacaatatgcagataatcaattgcactacaccagccaatttatttcacgttttgagacgccagatgactttccctttccgcaaacctctggtgatttttactccaaagagcttattacgacatccaaaatgtgtcagtcctctagacagttttctggaaggtaatcgattcatcgaggttattaaagatgaatattcgcatactcagtccgtacgaaaggtattattatgctgtggtaaaatttactatgacttgctagaacatcagcaaaaaaatcagatcaaagatattgcaattattcgtttggagcagctatacccttttcctgaaaagcaacttcgctctgttttaaatctttattctaataccaagaatttatgctgggtacaagaagaacctgaaaacatgggtgcttggagttttatgcttagaacatttcctcaagaaaataggcttttgctggtagcacgtgatgctgacagctctcctgcagtgggattccctcaagttcatttatcgcaacaagaaaatcttgtacaaaga

SEQ ID NO: 217130 - DNA, 894 bp, Unknown
  Bacterial polypeptide expressing nucleotide sequence isolated from the Sargasso Sea
tactttaaatatatacgggaaaaaactaatcgataataacagtataactgaagatcaatttaaaaagaaagttaatgattttaaaaatcttttggaagaacaatttaaaactgcgaatgattacaaaccaaaactaaattggtttgaaggtacttggtcaagataccaaccaaagaaaggtaaggataaaagagggcaaacaggggttgataccacgaaattaaagaaactctcggcaaaaataaaccttttaaaaccagaacttaatgttcataaaactatacaaaaagtttttgaaaatagaaataagtgtgttcaagaggaaaaaaatattgattgggctaatgcagaaacattagcatttgcaacattactcgaagagggatttcctgtgagattagttggtcaagatagtggtcgtggcacatttagccaaagacactcaattttacgaaatcaaatagataactcaagatacgtgccgttagatcatgtatcttcaaaacagaaaaaatttgaaattgtagatagttttttatctgaactagcagtacttggatttgagtatggatacagcttagtagaaccagaaaccttaactatctgggaggcacaatttggagattttgcaaacggagctcaagtcgtaattgatcaattcattgcatctggagagagaaaatggtttagagcttcgggattagttctattgcttccccatggttatgagggacaaggacctgaacactcttcagcaagacttgaaagatttttgcaactttgcgctcaagaaaatatgcaagtgcttaattgtacaactccagcaaattattttcatgctcttagaagacagattcacagagaattcagaaaagccacttgttataatgaccc

SEQ ID NO: 217131 - DNA, 859 bp, Unknown
  Bacterial polypeptide expressing nucleotide sequence isolated from the Sargasso Sea
actcaatttaaaaattcaaaaatttaaaaatttattagacgatcaatttaaaactgcaaaagactataaaccgaaaatagaatggtttgaaggaacatggtctagatacaaaccagaaaaaggaaaagatagacgaggtgttacaggggctgatattaaaattttaaaggaaatttcaaataaaattaatattgctccacaagaaaaaaatattcataaaacaattattaaaattcttgattcaaggagacaaacagttgaacgaggtattggaattggctgggctacagcagaggctttagcatttggttctctattggaagagggatatccagttagattagttggccaggattcaggaagagggacgtttagtcaaagacattctgttcttagaaatcaaattgataattcaagatatattcctttaaacaatatatcaaaatatcaaaaaaattttgaagttgttgatagttttttatcagaacttgcggtactaggatttgagtatggctatagtttagttgagccaaatactcttactttgtgggaagcgcagtttggagattttgcaaatggtgcccaagtaattattgaccaatttgttgcatctggagaaaggaaatggaatagagcttctggattagtaatgttactacctcatggatatgaaggtcaaggcccagagcattcttctgcaagattggagagatatctacaactatgtgcaaatgataatcttcaaattatgaactgtactactccagctaactattttcatgcattgagaagacaaatgcatagagactttagaaaacctttaattatgatgacgccaaagtccttattaagaaaataa

SEQ ID NO: 217132 - DNA, 953 bp, Unknown
  Bacterial polypeptide expressing nucleotide sequence isolated from the Sargasso Sea
aattgagaatgaaaaaaaatgtgttaaaaaagcgctctcagatgcgcatacggctattcgagctccaaattttgctttaggcccaacgttataccctaaagagtataaaacgattttttcttctccgaaagtttcgcgtagtgaagctattagtagagttgaaactcatgtacctattgaaactctcaaatctttgggagaggctattttagaagttcccaaagattttgctcttaacccgaaagttaagcgtattctggatggtcgaaaacgtatgttaagtggcgcgtcgaaggtggattggtcatttgccgaactcttagcttttgggtctttagctaaagaagatttttcaattcgtttatctgggcaagactgccgacgtggaacttttagtagtcgtcatagtgttatttttgactctcaaacagagcaaccgctcgaacttttaagccgtgtgggtgatgtaaaaataattaatagccctctttctgaacagggctgtttaggttttgagttcgggtattctattgctgatagtaatagtcttgttctttgggaggctcagtttggtgattttgctaacggtgctcaaattattattgaccaatttattgttgcatctgaggctaagtggcaacaaaaaagtggcttggtaatgcttttacctcatggtcatgaaggtatggggcccgaacattccagcggaagaccagagcgttatttacaaatgtgtggtaatttaaatatccaagtgtgtaatgtcacaactcctgctcagttatttcacctattgcgtcgtcaaatgcatcgtgcatttcgcaagcctttaatactcatgacacccaaaagtttattaagacaccctaaagtacagtcgccattgagtgattttagtgatggctattttagtgagctttctgatgatccttatcttcttgatcgtacaaagg

SEQ ID NO: 217133 - DNA, 865 bp, Unknown
  Bacterial polypeptide expressing nucleotide sequence isolated from the Sargasso Sea
aaatggtttgatggagtttggtctagatttaagcccggtttaggaaaagacaaaagaggaaaaagcggtgttgataaaaatattttaaataaagtaggacaaagagtattcaaaattcctaataatttcaacgcacataaaactcttaagagagtttttgagttgaaaaataaaatgttccaaattggcaaagttgactggtcctctgctgagactttggcaatcggaactcttctaatagagggattttcagtaagattatctggtcaagactctggaagaggaacttttagtcaaaggcatgctgttctaagaaatcaagataatcatgatcgttttatacctttaaataatattgaagataatcaaaaaaaattcgaagtaatagatagtttgttatcagaacttgctgtgctcggatttgaatatggttactcattatcagaaccagaaacattagttttatgggaagcacaatttggagatttcgcaaacggcgcacaagtaattatagatcaatttattacatcttcagagtcaaaatgggggagagcaagtggtctagtaatgttattacctcatggttacgaaggtcaaggacccgagcactcttcagcaagattggaaagatttttgcaactatgtgcaggagaaaatattcaagttgttaattgtacaacaccatcgaattactttcatgttttaagaagacaaatgcatagagagtttagaaaaccattaataattatgactccaaaatctttattaagacataaacgttgtatatccaatatatctgagtttatttcaaaaagctcatttcatagagttttggaagacgatgcgtatcttaaaaacagcaaac

SEQ ID NO: 217134 - DNA, 875 bp, Unknown
  Bacterial polypeptide expressing nucleotide sequence isolated from the Sargasso Sea
ttgcttttgcacacttttaaacgagggattttcagttagattatcaggccaagactcaggtagaggtacttttagtcaacgtcactcagttttaagaaatcaagacaatcatgataggtatattcccttaaataatatttctaaaaatcaaaaaagatttgaaattattgatagtcttttgtcagaattagccgtcttaggatttgagtttggatactcattgtctgaaccagaaactcttgtgttatgggaggcacaatttggagatttcgcaaacggcggccaggtaattattgatcagtttattacctcaagtgagcataaatggggaaggtcaagtggattggtaatgttattgccacatggatatgaaggtcaaggacctgaacattcctcagcaagaatggaaagatttttacagctttgtgctggggaaaatattcaggttgtaaactgtacaactccggcaaattattttcatgttttaaggcgacaaatgcacagggattttagaaagcctttaattataatgactccaaaatctttgttacgtcacaaaaaatgtgtttctaatatagaagattttaccaaaaaaaattcatttcatagagttcttgaggatcatgcttacttagataatagcggtctaataaaattaaaaaaaaataaaaaaataaaaaaagttgttatgtgctctggtaaaatctattttgatcttcttgaggccagagaaaaaactaaaaatgacgaaatagtttttattagaattgagcaattataccctttccctgtaaaaactctcggtcaggttttaaaaaagtatagtaaagacgtggtatattactggtgtcaagaagaacccaaaaatatgggcg

SEQ ID NO: 217135 - DNA, 838 bp, Unknown
  Bacterial polypeptide expressing nucleotide sequence isolated from the Sargasso Sea
aaaaggaaaagatagaagaggaaaaagtggagtagatttaaacaaaattcagaaaatatctgaaaaaattaactctattcctttaaaaataaatattcataaaacaatatctaaaattttggaatttagacggcagtcaattttaaaaaaaaacggtatagactggtcaacagcagagtccttagcatttggtactcttcttgaagaaggttatccagtaagattagtcggacaggactctggaagaggtacatttagtcaaagacattcagtattaagaaatcaaatagacaattcgaggtacatacctctaaataacatttcagataagcaaaaaaaatttgaaatagttgatagctttttatctgaactagcagtgttaggatttgaatatggttatagcttagtagagccaagcacattaactatttgggaagcgcaatttggagattttgcaaatggagcccaagtaattatagaccagttcattgcgtctggagaaagaaagtggtctagagctagtggccttgtaatgcttttacctcacgggtatgaggggcaaggaccagaacattcatcagcaaggctagaaagatttttacaactgtgtgctcaagataacctacaagtaatgaattgtactacacctgcaaattattttcatgctttgagacgacaaatacatagagattttagaaaaccattgataattatgactccaaagtctttattaagaaataagctttgtgtatccaatttagatgattttggtaaaaaaaattcatttcacagagttctttgggatcatgcacttgatcctaaagaaaaaaattttata

SEQ ID NO: 217136 - DNA, 748 bp, Unknown
  Bacterial polypeptide expressing nucleotide sequence isolated from the Sargasso Sea
tgatcaatttattacttcttcagagtctaaatggggaatagcaagtggtcttgttatgcttttacctcatggatatgaaggtcaagggccagaacactcttcggcaagactagagagatttttacaattatgtgctggtgaaaatatccaagtggtaaactgcaccaccccgtctaattattttcatgttttaagaagacaaatgcatagagagttcagaaaaccattaattattatgacacctaaatctttattgaggcacaaaagatgtatttcaaatatttcagagtttatatcaaaaagttcttttcatagagttttagaggatgatgcttatattaaaaataataatttgatttctttaaagaaagacaacaaaattaaaaaggtagtaatgtgctcaggtaaaatatactatgatttaatagaggaaagagagaagttaaaaagcaataacattgtgtttgttagattagaacaactttacccattccctgctaaaactttagcaagagtattaaaaaagtataaaaaatcaaaatttatatggtgtcaagaggagcccaaaaatatgggagcatggaatacagtcagaaactatattgaaagaactttagaaatgattaattttaaggatattaacattaaatatgtgggcagatcagcctcttcgactactgcgactggaaatgctaacaaacatcttgcacaacaaaaagaaatattagaaaagatatttaaacactaa

SEQ ID NO: 217137 - DNA, 800 bp, Unknown
  Bacterial polypeptide expressing nucleotide sequence isolated from the Sargasso Sea
tactggttatcaaactacgaaacttatagaaatttcagataaaattcattcacttccatctgaattaaatattcataaaactataatgaaaatttttgaatctagaaaacaatctatacttaaaggtgatcagattgactggtctactgcagaggctcttgcttttggctcattattagaagaaggatatccggtaagattagttggacaagattctggaagaggaacttttagccagaggcattcagttctaagaaatcaagttgataattcaagatatatcccactaaataatatttcatcaaaacaaaaaaagtttgaaatagttgatagttttttgtctgaattagctgttttaggttttgaatatggatatagtttagttgagcctaacacgctaaccatttgggaagcgcaatttggtgattttgctaatggagctcaagttattatagatcaatttatttcttcaggagagagaaaatggctaagagcttctggtttagtattattgttacctcacggttttgaaggtcaaggcccagagcattcatctgcaagactagaaagattcttacaattatgttcaaatgataacatgcaagtaatgaattgtactacgcctgcaaattattttcatgctctaagaaggcaaatgcatagagattttagaaaacctttaattatgatgacacctaaatctttactaagaaataaatattgtatttcacaaattgatgattttagtaaaaaaaattcttttcacagagttttatgggatcatgccatagatccaaaaa

SEQ ID NO: 217138 - DNA, 847 bp, Unknown
  Bacterial polypeptide expressing nucleotide sequence isolated from the Sargasso Sea
ccggggcggggaatatgagcgcggcaagaccgccatccccgacgagacgatggccgatgtgggccgcgcgctgacgtccgtgcccgaaggcttcccgacgcacaagaccgtgacccggctgctggacgccaagaaaggcatgttcgacagcggggaaggctttgactgggcaacagcagaggcactggccttcggctcgctcctgaccgagggctacaaggtgcgcctggcaggtcaggacagcacgcgcggcaccttcagccagcgccattcggggctggtgaaccaagacaccgaagaacgctactacccgctgaacaacatccgcgcgggtcaggcgagctatgaggtgatcgactctgcgctgagcgaatacgcggtgctgggtttcgaatacggctattcgctggccgagcccaacgcgctgaccatgtgggaggcgcagttcggcgattttgccaacggcgcgcagatcatgttcgaccagttcgtgtcttccggggagtcgaaatggctgcggatgtccggcctcgtctgcctcctgccgcacggctacgagggtcaggggccggagcactcctccgcccggttggagcgcttcttgcagatgtgcggccaggacaactggatcgtcgccaattgcacgacgccggccaactatttccacatcctgcgccgccagatccaccgcgacttccgcaagccgctgatcctgatgacgcccaaatcgctgctgcgccacaagctggccgtgaacaaggcggaagatttcctggatggctcgtccttccaccgggtgctgtgggatgacgcgcagcacggcaattcggaccatactctggccgcg

SEQ ID NO: 217139 - DNA, 998 bp, Unknown
  Bacterial polypeptide expressing nucleotide sequence isolated from the Sargasso Sea
acagttcgaacagaacgccttcaccaaggaaggcaagctggccatcttcaagaagctggccgaggccgagggcttcgagcgcttcctgcacaagcgcttccccggcaccaagcgtttcggcctggacggcggcgaagccatggtcccggccctggagcaggtgatcaagcgcggcggcgccctgggcgtcgacgagatcgtcttcggcatggcccaccgcggtcgtctgaacacgctcgccgccgtcatgggcaagccgtacaaggccatcttccacgagttccagggcggctcttcggtcccctcggacatcgagggttcgggcgacgtcaaataccacatgggcgcctcgtccgaccgtgagttcgacggccacaaggtccacctgtcgctgacggccaacccctcgcacctggagatcgtcaacccggtggtcctgggcaagtcgcgcgccaagcaggccttcgacatccgcgaggccgaggtcaatctgggcaagccggacgccgaatgggtgctggaccgctcgaaggtcgtgccgctgttgatccacggcgacgccgccttcgccggtcagggcgtggtggccgaatgcttcgccctgatggggctgaagggctaccgcaccggcggcaccctgcacttcgtcatcaacaaccagatcggcttcaccaccagcccgcgcaactcgcgctcgtcgccttatccgtcggatgtggcgctgatggtccaggccccgatcttccacgtcaacggcgacgaccccgaagcggtcgtctttgccgcaaaggtggccaccgaataccgccagaagttccacaaggacgtggtggtggacatgttctgctaccgccgcttcggccacaacgaaggcgacgacccgaccttcacccagccgctgatgtacgccaagatcaagaaccagccctcgacgctggagatctacgccaagcgcctgatcgccgagggcgtcatcaccaggccgaggtggacgccga

SEQ ID NO: 217140 - DNA, 858 bp, Unknown
  Bacterial polypeptide expressing nucleotide sequence isolated from the Sargasso Sea
cgcgcaggttatctttgatcaatttctgtcatccggtgagtccaaatggttgcgactgtgcgggcttgtcatgctcttgccgcatggcatggaaggtcagggcccggagcactcctctgcccggttggagaggttccttcaactctgtgcagaagacaatatgcaggttgtgaacatcaccacgccagcgaacttcttccacgtattgcgccgtcaaatgttgagaaatttccgcaaacccttggtggtaatgtcacctaaatctcttttgaggcacaagttgaacacgtcgacgcttcaggaaatggggccggggacgcatttctggcgagtgctcggtgaggttgacgagttgcgacctaatgatgaaatcaagcgtgtcgttctgtgttcgggcaaggtctattacgacttgttggaattccgtcgtgaaaataagatcgatgaggttgccattgtgcggatcgaacaactgtatccctggccaaggaccgggttggccgaaacgctgagcatgtatcccaatgctgaaatcatctggtgtcaggaagaacccgcaaatatgggggcgtggacatacctcattcaacggcttgaatatattcttatggcaatcgatcagggaaaagccgagcatcggaggcccatctatgtgggtcggccggcatcagcatcgccagcgacagggtccctcggtgttcacaatagggagcaggcgaagctggtgagcgaagctctgatggttcccgcgagcgatctagcgcagccgttccaaagagcaccgggcgacagggcgttacctggatcatcagctgttcccgttaaaaaaaaggccgctaagaagaaagcggctggaaa

SEQ ID NO: 217141 - DNA, 844 bp, Unknown
  Bacterial polypeptide expressing nucleotide sequence isolated from the Sargasso Sea
tttgccacacttttaaaagaaggctatggagtacgtttatcaggccaagatgtgggcagaggcacttttagtcaacgtcacggagttttgtatgatcaggaaaatgaaaatcgttttgttccactacgtcattttactaaagaacaaggattatatgagattgtagatagttttttatctgaatttggtgttcttggttttgaatatggatattctcaagctgatccaaaaactttggttttatgggaagcacaatttggtgattttgctaatggcgctcaaataattattgatcaatttatcacaactggtgaaagaaaatggcttcgtatgtcaggtttaacaattttgttaccacatggtcatgaaggtcaaggccctgaacactcaagctctagaattgaaagatttttaactatgtgtgccgaagataatattcaagttgctaactgcactagtcctgcaaattattttcatattttgcgtcgacaacttttaagagattttcgaaaaccattaattttaatgacaccaaaatctaccttgaggcataaaaaaaatacttcatctatagatgaatttattaatggctcaacctttcaccgcgttcttagtgaccctattcaagaaggtgaacaaaaaaatattaaaagattaattttatgttctggaaaaatatattttgaattacaagattatatagaaaaattaaaaaagacagaaatacatattgtaagaatagaacaactttatccttttccatatgaaactcttactgagtcaataaaaaattttaataattgtgagatgatatggtgtcaagaagaaccaaaaaatatgggag

SEQ ID NO: 217142 - DNA, 850 bp, Unknown
  Bacterial polypeptide expressing nucleotide sequence isolated from the Sargasso Sea
attattagttgaaggttatccagtaaggttagtaggtcaggattctggcagaggcacttttagtcaaagacactcagttttaagaaatcaaattgataattcaaggtacatacctttaaacaatatatctagtaaccaaaaaaattttgaaattgtagatagttttttatctgaacttgcagttttaggatttgaatatggatacagtttagtagaaccgaatacattgacaatttgggaagctcaatttggagattttgcaaatggtgctcaagtaattattgatcaatttatatcatctggtgaaagaaagtggaaaagagcatcaggactggttatgttattaccccatggttatgaaggacaaggtccagagcactcctctgcaagattagagagatttttacaattatgtgcaaatgataatttacaagttatgaattgtactacacctgcaaattattttcatgctttaagaagacagatgcaccgtgattttagaaaacctctaattataatgacgcctaagtcacttttaagaaataaatattgtgtatcaaatttggaagattttagtaaacaaaattctttccatagagtgctatgggatcatgctagagatactaaacaaaaaggttttattaagttaaaagaagataaaaaaattagaaaagtaatattatgctctggaaaaatttattttgatctgctcgcggcaagagagaaactaaaagtcaatgatgtgattttgtatagaattgaacaactatatcctttcccagcaaaaagtttggttaaagagctaaaaccatttgcaaaaaattcaaaattttattggtgccaaagagga

SEQ ID NO: 217143 - DNA, 757 bp, Unknown
  Bacterial polypeptide expressing nucleotide sequence isolated from the Sargasso Sea
aagaaaagtttttgaaaatagatataaaatgttcagtgaaaacagacctatcgactggtctacagctgaaacgttggctttcggaggccttttggatgaaggtttttcagtaagattatctggacaagattcagctagaggaacatttagtcaaagacattctgttttaagaaatcaagacaatcatgaaagatatatacctttaaataatatttcattaaatcaaaaaaaatttgaaataatagacagtttattgtccgagctagctgtccttggatttgaatttggttattctctatctgaacctgagactttagttatatgggaagcacaatttggagattttgctaatggtgctcagataattattgatcaatttatcacatcgagcgagtctaaatggggaagagcgagcggattggtaatgctcttacctcatggatacgaaggtcaaggtccagaacattcatctgctaggttagaaaggtttttacagctttgtgctggagaaaatattcaagttgtaaattgtacaacaccagccaattactttcatgttttacgtagacaaatgcatagagatttcagaaaacctttaatagttatgacgcctaaatctttattacgacacaaaagatgtatttcatttttagaagatttttctaaaaaaaatacttttcatagagtccttgaagatcaagcttacttgaaaaaaagtggtttgattaatttaaaatcagataaaaaaattgaaaag

SEQ ID NO: 217144 - DNA, 847 bp, Unknown
  Bacterial polypeptide expressing nucleotide sequence isolated from the Sargasso Sea
attgggagaaaaaatgactttaataccagaaggttttaatgcgcatccaactttaaaaaaaatttttgaaaacaagagaaaaatgtttcaaactggaaaaggatttgattggtcaacagcagaacacctagcttttgcaactttattggatgaaggttacccagttagactttctggacaagactctgctagagggacttttagtcagcgccattcggtgttgaaagaccaacttaatggaacaaaatatatacccttaaataatatttcaaaaaatcaaaaacgatttgaagtgatagacagtttgctatctgaaatggctgttcttggattcgaatatggttatgctctttcggagccaagtacacttgtaatttgggaagcacaatttggagactttgctaatggagctcaagtcatcatagatcagtttattacttctgcagaaagaaaatgggcgagagccaatggtttagtgatgttattgccccatggatatgaaggacaaggaccagaacattcttctgctagattggagaggtttttacaattatgtgcccaggagaatattcaagttgtaaactgcacaactcctgcgaactactttcatgttttacgaagacaaattcatagagattttagaaaacctttgataatcatgacaccaaaatctttattaagaaacaagatgtgcacctcaaatattgaggactttacaaaaaagaatacttttcatagagttttaaacgatcatgctgactctaaggaaaatgaattaattaatctagcagaggataaaaaaataaaaaaaaatattatttgttcaggaaaaatttattttgatctt

SEQ ID NO: 217145 - DNA, 916 bp, Unknown
  Bacterial polypeptide expressing nucleotide sequence isolated from the Sargasso Sea
aaaaataaatttaaaagttttttagaaaaagaatttgagacctcaaaaaattacaagtcagaattaaaatggttcgaaggtgcttggtcacgatttaaacctgggttaggtaaagataaaagaggtatgagtggagttaataaagataaattaataaaggtaggaaagaaaatttctttaattccaccaaatatgaatgctcacaaaactttaaaaaaaatatttaacaatagatatcaaatttttgagaaaaacggtttaattgattggtcaactgctgaaaatcttgcttttggaactttattaaccgaaggtttttcggtcagattatcaggacaggattcaggtagaggtacttttagtcaaaggcatgcagtaattagaaatcaggataatcacgacagatatgttccattaaataatattgaaaagagtcaaaaaaaatttgagattattgacagcctcttatcagaattagcagttttgggttttgaatttggatattctttatcggagccagaaactttagtattatgggaggcacaatttggggattttgcgaatggtgcccaggtcataattgatcaatttatcacatctggtgagtctaaatggggcagagcaagtggtttggtcatgttattaccccatggatatgagggccaaggtcctgaacattcttcagcaagattagaaagatttttacagttatgtgccggtgaaaatatccaagtggtaaattgtacaacaccttctaattattttcatgttcttcgacgacagatgcatagagattttcgaaaacctctaatagttatgacgcctaaatcactactaagacacaaaaagtgtgtttcgaatttggaagagtttactacacaaaattcgtttcatcgagttttgaatgatgatgctt

SEQ ID NO: 217146 - DNA, 802 bp, Unknown
  Bacterial polypeptide expressing nucleotide sequence isolated from the Sargasso Sea
atgggaggcacaatttgtgatttttcgaatggagcccaggtgtttatcgatcaatttattgcgtcaggtgagtcaaaatggtcaagagcaagcggcttagtgatgttgcttcctcatggatacgaaggtcaaggacccgagcattcatcggctaggctcgaaagatttttacagttatgtgcgcaagataatttacaagttgtaaattgtacaaccccagcaaactatttccatgttttaagaagacagatgcatagagattttagaaaaccattaatagtgatgactcctaaatcacttctaagaaacaaaagatgtgtatcaaatcttgatgattttacaaaaaaaaatagttttcatagaattttagtggaccaagcttatttaaatggaactaaactaatcaaactaaaaaaagacaaagaaataaaaaaagcagtaatatgttccggaaaaatttactttgatttaattgaggcgagagaaaaagctaaagatgatagaacagtctttataagaatagaacaactgtatccgtttccagtaaagcatctaggtagagaattaaaaagatataagaatgctgagtttttttggtgccaggaagaaccaatgaatatgggtggctggaacacagctaggtactatatcgatagaactttagaaatcattcgagtaaaaggcgaaaaggttaaatatataggaagaaatgctgcggcatcaccggcaactgggaatcacaacaaacatcttgcagaacaaaaggaaatattagaaaaggtatttagtagaaaaaattaaa

SEQ ID NO: 217147 - DNA, 942 bp, Unknown
  Bacterial polypeptide expressing nucleotide sequence isolated from the Sargasso Sea
catagatatggaaaaaaaatacacattaccaaaaaatttaatattcataaactttataaaaaatttgaaaataagcaaaaaatgttcacacaaaatcaccctattgattggtctacagctgaattacttgcctttgcaacacttttaaatgatggattctctgtaagattatcagggcaagactcaggaagaggaacctttagtcaaagacattcggtcctaagaaatcaggatagtcatgagaggtatatccccttgcaacatgtgtcggataaacaaaaaaactttgaagtaatagacagtcttctttctgaattaggtgttcttggttttgaatttggttactctctatctgaacccgagacgcttgtgctctgggaagcacaatttggagattttgttaacggtgcacaggtcgttattgatcaatttatttcatcgggagagtcaaagtggtcaagagcaagtggacttgtgatgctattaccccatggatacgaaggccaaggtcccgagcattcttcaggtagattagaaaggtttttgcagttatgtgcccaggataatttacaagtagtaaattgtacaacacccgcaaactattttcatgttctaagaagacaaatgcatagagactttagaaaaccacttgtagtcatgacacctaagtcactcttaaggcacaaaagatgtttatcaaatctagaagattttacaaaaaagaatacatttcatagaattttagaagatagtgcttatttaaaaggaagcaaacttgtttctctcaaaaaagatgaaaaaatcaaaaaagttgttatgtgttcaggcaaaatttattatgatcttatagagcaaagagaaaagataaaaaatgatagcgtagtgttcctaagaattgaacagctatacccttttcctgtaaaacaggttggaaagcagctt

SEQ ID NO: 217148 - DNA, 789 bp, Unknown
  Bacterial polypeptide expressing nucleotide sequence isolated from the Sargasso Sea
ttattggcaatttcagaaaagattaatttaattcctgagagctcaaatatacataagacaattaaaaagatttttaatttaagatatcaaacagtaaagcagagaaaaaatatagattggtcaacagctgaagcattagcttttggctcattgttagaagaaggttttccagttagattagttggacaagattcaggaagaggtacttttagtcaaagacattctgtactaagaaaccaaatagataattcacgttatgtgccattaaataatatttcaaaaaaacaaaaaagatatgagatagtagatagtttgctttctgaattagcagttttaggtttcgaatatggttatagtttagtagagccaaatacattaacaatttgggaggcacaatttggagattttgctaatggtgcacaaattgttatagatcagtttattgcttctggtgaaagaaagtggtctagagcctctggtttagtaatgttattaccacatggatatgaaggtcagggaccagaacattcatctagcagactagagaggtttttacagttatgtgctaaagaaaatttacaagtaatgaattgtactactccagctaattattttcatgctttgagacgtcaaatacatagagactttagaaagccattaattatgatgactccaaaatcattactaagaaacaaactttgtgtttccaatttagaagattttggaaaacaaacttcttttcatagagttttatgggatcatgcaacagaaaaaaaaaatggttttata

SEQ ID NO: 217149 - DNA, 736 bp, Unknown
  Bacterial polypeptide expressing nucleotide sequence isolated from the Sargasso Sea
cacaaaactttaaaaaaaatattagaacaaaagcataaaatgtttactgagaatgcccctatagattggtcaacagcagagtccttggcatttgctactttgttaatcgacggattttctgtaagattatctggtcaagattcagctagaggtacttttagccaacgacattctgttctgagaaatcaagaaaatcatgaaagatatattcctttaaataatttgactaaaaaccagaaaaaatttgaagtaatagatagtttattatctgaattggcagttttaggatttgaatttggttactctctctcagaacctgaaacattagtcatatgggaagctcaatttggagattttgccaatggagcacaagtaataatcgatcaatttataacttcaggagagtctaaatggggaagagcaagtggcttagttttattgttaccacacggatatgaaggtcaaggtccagaacattcatcagcaagattagagagatttttacagatgtgcgctggagaaaatatacaggtagttaattgcacaactccggcaaattattttcatgctttaagaagacaaatgcatagagcatttagaaaacctttaatagttatgacacctaaatctttattaagaaacaaaagatgtgtttcatctattgaagattttaccaaaaaaaatagttttcacagagttcttgaggatcatgcatatgtcaataaatccaaaatca

SEQ ID NO: 217150 - DNA, 736 bp, Unknown
  Bacterial polypeptide expressing nucleotide sequence isolated from the Sargasso Sea
atcgggtgaaagaaaatggtcaagagctagtgggcttgtaatgcttttacctcacggttatgaaggtcaaggcccagaacactcgtctggaagattagaaagatttcttcaattatgtgctcaagataacttacaagttatgaattgtactactccggcaaattattttcatgcattaaggcgtcaaattcatagagattttagaaaaccactagttatcatgacacctaaatcattattaagaaataaagtttgtgtatcgaatttagaagattttggaaaaaaaaactcttttcatagagttctttgggaccatgctattgatcctaatgaagatagctttattaaacttaagaaaactacagaaattaggaaagttatcctatgttctggcaaagtgtattttgatcttttagatgctagagaaaaattaaaaataaatgatgttgtaatgtttagaatagaacagctatatccatttccagtcaaacctttagttaaagagttaaaaaaatatgctaaaaatgcaaaattttattggtgtcaagaagagccaaaaaatatgggagcgtggttttcagttagagattatatacaatggacattagattatattggagctaataataataatatttcttatattggaagaaatcctgctgcatcaccagcaactggttatgctaagaggcatttagctcaacaaaaagaaattataaaaaaggtttttgaatag

SEQ ID NO: 217151 - DNA, 976 bp, Unknown
  Bacterial polypeptide expressing nucleotide sequence isolated from the Sargasso Sea
atctaaagttttagaattcagaaaacaatcaataatttataaaaaaggaatagattggtcaactgctgaagcattagcatttggtactctactagaagaggggtttccagtaagacttgttggtcaagactctggaagaggaacatttagccaaagacattctgttttgagaaaccaagtagataactctcgttatatacctttaaataatatttcaaataagcaaaaaaactttgaagttgttgatagttttttatcagaacttgcggttctaggatttgaatatggatatagtttggtcgagccaagtacacttacaatttgggaggctcaatttggagatttcgtaaatggagctcaagtcattatagatcaatttatagcatctggtgagcgaaaatggtctagagctagtggacttgtaatgttattgccccacggatatgagggccaaggtccagaacattcatcaggaagacttgaaagatttctacaattatgcgcacaggataatttacaggtaatgaactgtacgactcctgctaattattttcatgctttgagacgtcagatacatagagactttagaaaaccactggttattatgacaccaaaatcattattaagaaataaactttgtgtttcaaacttagaagatttcagtaaaaaaaattcttttcatcgtgttttatgggatcatgctattgatcctaaagaaaaaagttttataaaactaaaaaaaagtaaaaatattaagaaagttattttgtgctctggtaaaatatactttgatcttttacaagctagagagaagataaaaaaggatgatgtgataattttcagaattgaacaattatacccatttccagtaaaacccttggttaaagagattgcaaaatacgctgaaaatgcaaaattttattggtgtcaagaagaaccaaagaatatgggcgcatggctcttagtgcgagattat

SEQ ID NO: 217152 - DNA, 802 bp, Unknown
  Bacterial polypeptide expressing nucleotide sequence isolated from the Sargasso Sea
ttttagtcaaaggcactcagttttaagaaatcaagataaccatgaaagatatattccacttaacaatatatcaaaaaaacaaaaaagatttgaaattatagacagtcttttatcagaacttggagttttaggattcgaatttggttactccttatcagaaccagaaacattggttttatgggaagcccaattcggtgatttttcaaatggaggccaagttgtaattgatcaatttatttcatctggagagtctaaatggtcaagagcaagtggtttggtaatgcttctaccccatggttatgaaggccaaggtccagaacattcatcagcaaggcttgaaagatttttgcagttatgtgcacaggaaaatttacagattgtaaattgtacgacaccggcaaattattttcatgttttgagaagacaaatgcatagagattttagaaaaccattggtagttatgacaccaaagtcacttttaagaaacaaaagatgcacttcaaacctttcagatttttcaaaaaaaacttcatttcatcgaattctcaaggaccattcttatttagaaggtagcaaattaattaaattaaaaaatgataaagacataaaaaaagtgattatatgttcaggtaaaatttattttgatttagtggaggctagagaaaaagcaaaagaagctaaaacagtttttattaggatagaacagctttatccgtttccagttaaacacttgggtaaagaacttaagagatataagaatgcagagttttattggtgtcaagaagaaccaatgaatatggga

SEQ ID NO: 217153 - DNA, 968 bp, Unknown
  Bacterial polypeptide expressing nucleotide sequence isolated from the Sargasso Sea
ggctgatgatccgtctgccactcagccattaatgtatgaaaaaatttctaaccatccctcggttttaaatcaatatgaaaataatttaatgaaagaggggatattggatgctgaacaatcaaagaaaataaaatcaaattatagaaaatcattagagggtggtgagagtgtcgctaaaaatttagctaaaaaaccaaatgattctttatggtttgattgggaaccctatttgggtgtcaaatggtggccaaaggtcgatacaaaatatagcaagaaagaattaaaaaaattaggtaaagaaattatttcagtgcctaaagaatttaatatgggttctcaagcatcaaaaatatttgcagatcgacatgaaatgaatcaaggaaatattccaataaattgggggtatgcagaggttatggcctatgcaacattattaaaagatggctatccaataagacttaccggtcaagatgtcagaaggggtacattttcacataggcatgcttgtatatttgattctaaaacaggaatggggcatatatcgctttctgaactggcagaaaaaaataagacaagctttgatatatatgattctttgctttcggaagaagcggttttagggtttgaatatggatactctgctacatggccatcaggattaacaatttgggaagcgcagtttggtgattttgctaatggtgctcaagtagtcatcgatcaatttattgtatcagcacaacataaatgggagagattatctggactgattatgcttttacctcatggttatgaggggcaagggcctgagcatagcagcgcgagaatagagaggtttcttcaattatgtgcttcagaaaatattcaagtatgtgtaccaagctcacctaagcaaatttttcatcttcttagaagacaggctataagaaaaatgcgcacacctttaattattatttcacctaaaagccttt

SEQ ID NO: 217154 - DNA, 880 bp, Unknown
  Bacterial polypeptide expressing nucleotide sequence isolated from the Sargasso Sea
aatgtttacggaaggaaaaccaatcgattgggctacggccgagtcattagctttcggaacacttttaaatgaaggtttttcagttagactttctggtcaagattcaggtagaggaacttttagtcaaagacacgctgtgttaagaaatcaaaacagtcacgacaggtacgttccattacatcacatatcaaaaaatcaaaaaaagtttgaggttattgacagtttattgtcagagctaggtgttttgggttttgaatttggttattctttatcggaaccagaaacattagttctttgggaggcacaatttggagattttgcaaatggtgcacaagttgttattgatcaatttattgcatctggagagtctaaatggtcaagagcaagtggccttgtaatgcttttgccgcatggttatgaaggtcaaggcccagaacactcttcagcacggttagagaggtttttacagttgtgtgcgcaggaaaatttacaagttgtaaattgtacaacacccgctaattattttcatctactcagaaggcagatgcgaagagattttagaaaacctttagtagttatgacaccaaaatctttattgagacacaaaagatgtgtttcaaatttagaagattttacaaaaaagaccagatttcatagaatcctagtggatcatgcttatattaaagaaaacaaactaattaagttagaaaaaaataataaaataaaaaaagttgttatgtgttcaggaaaaatttattttgatttgcttgaagcaagagaaaaaactagggatgataaaactgtttttataagaatagaacaattatatccatttcctgtaaaacacttgggtagagaattaaaaaaatatgaaaagcca

SEQ ID NO: 217155 - DNA, 919 bp, Unknown
  Bacterial polypeptide expressing nucleotide sequence isolated from the Sargasso Sea
tttgaagctggaagcagttacaaaccaaaataaagctgactggttagatggacaatggtcagggttgaaagcagctcccgatcgtgaacaaagaagaggagacacatcagttaagctacaaagattaaaggaaattggtttatcaatgacagaacttcctgaaggatatgaattaaataaaaaattagttagaattgttgaaaatagaagaaaatcaataaatgaagaaaaaaacattgattggtcaactgcagaacatttagcttttggcacacttttagatgaaggtcatccagtaagattatcagggcaagatagttgtagaggcaccttttctcaaagacatgctgtgtttgtagatcaaaataatgaaaacagatatgtacctcttaacaatttaaaagaaaaccaacctcaatttgaagttattgactcacctttgtcagaagcttcagtgttaggttttgaatatggatattctctgacagaacctgcagcattagtcatgtgggaagcacaatttggtgactttgcaaatggtgcccaagtaatagttgatcagtttatatctagtggagaagctaaatggctaagaatgtcaggtttggttatgttgctacctcatggttatgagggtcaaggtcctgagcactcttcagctagattagagagatatttgcagctttgtggtgaagataatatgcaagttttaaactgtagtacaccagcaaattattttcatgctcttagaagacagttaaaaagagactttagaaaaccattaattataatgacacctaaaagtctacttagacataaattgtgcgtttctaatttatcagatatggcagaaaatacatcatttcacaggatcatattagacccaaacaaaaccctaaaagataaaaatattaatcgt

SEQ ID NO: 217156 - DNA, 851 bp, Unknown
  Bacterial polypeptide expressing nucleotide sequence isolated from the Sargasso Sea
tgttcttggttttgagtttggttactctctatctgaaccagagactcttgtgctttgggaagcacaatttggcgattttgttaatggtgcacaagttgttatcgaccaatttatttcatcaggagagtctaaatggtcaagagcaagtggacttgtgatgcttttacctcacggatatgaaggtcaaggtcctgaacattcctcaggcagattggaaagatttttacaattatgtgcacaagaaaatttgcaagtagtaaattgtacaacaccggcgaactattttcatgttttaaggagacagatgcatcgagattttagaaaaccgcttatagtcatgacacctaaatcacttttaaggcacaaaaagtgtatatcaaaccttgaagattttacaaaaaaaaattcatttcacagaattttagaggacagcgcatatttaaaaggaagtaaacttatttctttaaaaaatgataaaaaaattaaaaaagttgtaatgtgttcaggcaaaatttattttgacctgatagagcaaagagaaaaggtaaaaaacgatagcattgtgttattaagaattgagcaactttacccttttcctgttaaacaggttggaaagcagcttaaaagatacaaaaatgctaaatttttttggtgtcaagaggagccaaaaaatatgggcgcctggaatactgcgcgacactatattgatagaactttagatatcattcaagtaaaaggcgaaaaggtcaagtatgtaggacgaaatgctgccgcatcacctgctacagggaatttaaataaacaccttgcagaacaaaaagaaatattagaaaaggttatgaacaactaga

SEQ ID NO: 217157 - DNA, 893 bp, Unknown
  Bacterial polypeptide expressing nucleotide sequence isolated from the Sargasso Sea
acaatttctgaacaagaatttaatactcaaataaaagattttaaaagtttattagacgaacagtataatagtgcaaaaaattatcagcctaagctgaaatggttcgagggaacttggtcaagatataaaccagaaaagggcaaagatagacgaggtaatagtggagttaatgcagaaaaattaagaataatctctgaaaaaattaataaaattccagctgaaataaatattcataaaactattaaaaaaattttggaattaagaagaaagtctgtagaaagtggacaaggaattgattggtcttcttcagaagcattagcatttggatctttattagaagaaggatatccagtcagattagttggtcaagattctggaaggggtacatttagtcaaagacattctgttttgagaaaccaaacagataattctagatatgtgccactaaataatatttcaaaaaaccaaaagaattttgagattgttgatagttttttatctgaattagcagttctcggatttgaatatggttatagtatggttgagccaaatacattaactatatgggaagcacagtttggtgattttgctaatggtgcgcaggtagtcattgatcaatttattgcatctggtgaaagaaaatggtcaagagcaagtggtcttgttttgttacttccacatggatatgagggacaaggtccagaacattcatcagcaagattagaaagattcttacaattaggtgcccaggaaaatattcaagtaatgaattgtaccacgcctgcaaattattttcacgccttaagaagacaaatacatagagactttagaaaaccattaatcataatgacaccaaaatcattattaagaaataaatattgtacttctaattt

SEQ ID NO: 217158 - DNA, 667 bp, Unknown
  Bacterial polypeptide expressing nucleotide sequence isolated from the Sargasso Sea
tgggcgagagcctcggggttagtaatgcttttaccacatggttatgagggtcaaggaccagaacactcttcagcaagattagaaagatttttacaattatgttcaaacgataatatgcaggttatgaattgcactaccccagctaattattttcatgcattaagaagacaaatgcatagagattttagaaaaccattggtaataatgacacctaaatctttattaagacataaacactgtatttcgaacctagaggattttggtaagaaaagctcatttcacagagttttatgggatcatgctatagatcctaaaagtaaaggctttattgaacttaaaaagacaaaaaaaattgaaaaggttgttctttgctcaggaaaaatatattttgatttaatagaggctagagaaaagttaaaaaaagataacgtagtattctatagaatagaacagctttatccttttcctgcaaaagcacttgttaaagagcttaaaccttatgctaagacggcaaagttttattggtgtcaagaagaaccaaaaaatatgggagcttggttttcagttagagattatatccaatggacattagataatataaaggctaataataatcaaatttcttatattggtagaaatcctgatgcttctccagcgactggttaag

SEQ ID NO: 217159 - DNA, 880 bp, Unknown
  Bacterial polypeptide expressing nucleotide sequence isolated from the Sargasso Sea
atggtcgatagtttaatacaaaattgtggaatatttggcgctgaacaaatttgctttggtatggcgcacagaggacgactgaacttattagttaatgttttaggaaaatctccaaaagaattatttacagagtttgaagaaaattttgaactagagggagcaagctcaggagatgtgaaatatcatttaggcttttcatctaatatattaactcccaatggagaagtgcatgtttctctagcaaataatccctctcatcttgagattgttgatccagtggttcttggttcagtgagaggaagacaagatcgtctgaatgataaaaataaagaactcgttgttcctattttaattcacggagatgcttcattttctggtcaaggggttgtaatggaaactctgcagatgtcacagaccagaggctatggagtaggaggcacaattcacgtaatagtaaataatcagataggatttacaacgtccaatgaagaggactcaagatcaactcaatacgctactgatgtagctaaaatggttgaggcccctatccttcatgttaatggagatgatccagaaatggttgtatttgcagctaaactagcatgtgagtatagacataactttaaaaaagatattgttttggatctcttttgctacagaaggagaggtcataatgaagcagatgagccctcatcaactcaaccaatcatgtatcaacagatctctaatcatccatccgttaaaagcttgtatcaagagcagctcattaacgctggagtaaccacacaatctgaatgtgatgaaatagaaaaaaaatatagatctacaatagagaaaggagactctgttgctcataatttagcaactcaacccaacgaat

SEQ ID NO: 217160 - DNA, 784 bp, Unknown
  Bacterial polypeptide expressing nucleotide sequence isolated from the Sargasso Sea
cggtgattttgctaatggtgcacaagttataattgatcaatttatctcctcaggtgaaagaaaatggcaaagagcctcaggtttagtcatgttattacctcatggctatgaaggtcaaggaccagaacattcttctgctagacttgaaagatttctgcaactgtgtgcaaatgataatcttcaagttatgaattgtacaactccagcaaattattttcatgctttacgaagacaaatacatcgcgattttagaaaacctcttgtaatcatgacacctaaatctttgctaagaaataagttttgtgtatcaactattgatgattttagtaagcaaacatcatttcatcgaataatgtgggatcatgcattaagtgatcaatctaaaaattttattaaattaaaaaaatcaagtgaaattaaaaaagttataatctgctcaggcaaagtatactttgatcttttgattgctagagaaaaattaaaaagagatgatgtgttaatgtttcgaattgagcaactttatccttttccagcgaagagtttagtaaaagaactcaaaccttacgctaaaaatgctaatttttattggtgtcaggaagagccaaaaaatatgggtgcatggttttcagtgagagattatatacaatggactttagataccattaaagctaaaaataatgaagtttcttatattggaagaagtcctgatgcatcaccagccactggatatgctaaaagacaccaacttgagcaacaagaaattataaatgaagtattcgattaa

SEQ ID NO: 217161 - DNA, 701 bp, Unknown
  Bacterial polypeptide expressing nucleotide sequence isolated from the Sargasso Sea
atttctgttgaatgtaatcatatatttgattccgaagaaagaagatggtttcaaaggaagtttgaatcaaggttggcagagtatagttttaataaagatgaaaaaattaatatttttgaaagacttatttcagcagagggcctagctaaatatctttctgctaaatatcctggtatgaaacgatttggagttgatggtgctgaagcattggttccattggttgaaagtgttatccaaaattgtggagtgcttggagcaaatcaaatatgttttggtatggctcatagaggaagattgaacttgttagtaaacgtattaggaaaacttccatcagagctattcgcggcatttaatgaagatcatgagctagatggatcaagcacaggagatgtaaaataccatttaggcttttcttctaattttaatactccaggtggcgaagttcatgtttcactttttaataatccatctcatcttgaaattgttgatcctgttgtccttggatcagtgcgcgctagacaagatagaatcaaagatttaaatagatcaaaggtagtacctgttttagttcatggagacgcatcattttctggccaaggtgttgtaatggaatcccttcaaatgtcacaaacaagaggatttaacgttggcggtacaattcatatcatagttaataatcagattggatttaccacaagtaa

SEQ ID NO: 217162 - DNA, 866 bp, Unknown
  Bacterial polypeptide expressing nucleotide sequence isolated from the Sargasso Sea
gttcgaagagccgatagtaaggattttgaggaatcaccgcagacaggtgtgtccagaaaaaaatttattgatctcagtaaacgtttaactgacctacacaaaccgggaagtcccggagagaaattaaagttttttgcaaagattgaaaagatttatgagaaccgcagtaagatggttacagagtataagctgctggattgggcgatggcagaaaatatggcttacgcgactctgctgagtcaaaattgtaatgtacgcttaagcggacaagattcagggcgaggtacatttgcacagcgacatgctatcattacggcagaggacaacacaaaatacgtacccctgaatcatctttctgaagatcaggcaacatttgaagtatataattcctttctttctgaatatggtgtccttggttttgaatacggctatgcctatgcttcaccaaactctcttacaatctgggaagcgcaattcggggattttgctaacggtgcgcagatagttatagatcagttcgtggcttcttcagaaactaaatggcagcgcatgaacggtgttgtattgatgctgccccacggacatgaaggacagggaccggaacatacttctgcgcgtattgaacgtttcctgactctttgtgcggataacaatatgcagataatcaactgcactacgcccgccaacttctttcacgttttgagacgccagatgactttcctttttcgcaaacctctggtgatttttactccaaagagcttgttgcgtcttccaaaatgtataagccctcttgaagaatttctggaaagtactcgattcatggaggttctcaaagatgaatatgctgattctcaatctgtacaaaa

SEQ ID NO: 217163 - DNA, 935 bp, Unknown
  Bacterial polypeptide expressing nucleotide sequence isolated from the Sargasso Sea
cgaactaagttacactttttatgatttagatgaaaatgatctaaataaatcattcaattttaaaagttcaaaggacaacaagaattcttcacttcaagacattattgagtttttagaaaccgtctactgtagtagtgtaggatatgaatttaaacatatttgtgaaaaagaaatcactgattggtttattgaaaaattagaaagagacaagtcaccgaattctcaattatctaacgaagaaaaaatttacatattaaaacggttaggttcagcagagggattggccaagtttttgtcctcaagatatcccggtatgaaaagatttggaattgaaggtgcagaatctttaattccgttggttgattccttaattcaaaattgtggtatttcaggcgcagaacagatttgttttgggatggctcacaggggtagattaaatcttctagtaaatgtattgggtaagccgccaactgagttattttcagaatttgaggaggattttgcactgactggtgataatactggcgatgttaagtatcaccttggcgtatcatccaatattcttacacctaatggagaagtacatgtatctctcaataataatccatctcatcttgagattgttgatccagttattatcggctcagtgagagcaaggcaagatcgtcttggcgatacagatagagaaaaagttgtacctattttaatacatggtgatgcctcattttctggtcaaggagttgttatggaaactctccaaatgtctcaaactagggcatatggagttggcggtactatacacataattgttaataatcagataggcttcacaacatccaataagagtgatgcaagatcaacacactatgcttcagatgtcgcgaaaatgattgaagcacaattattcatgttaatgcagatgatccagaaagtat

SEQ ID NO: 217164 - DNA, 786 bp, Unknown
  Bacterial polypeptide expressing nucleotide sequence isolated from the Sargasso Sea
gaacgcaagggaaagaccgatgtgcccgtcgacctgctacgggaggtggggaccgccatttccaccgtgccggacgaattcaacctcaacagcaagctgcgccggattttcgacaaccgcggcaaggcgatagaggcgggcgaaggcatcgattgggctaccggcgaagcgttggctttcggcaccctactgatggaaggccatcttgtgcgcctgagcgggcaggacgttgcccgcggtacgttttcgcagcgccacgttgtcgtcaccgaccaggaaaacgaaagcgtctatatcccactggaacagattcgcccgggaaatcaggcgaaattcatcgcgcggaactccaccctgtcggaagcggcagttctcggattcgagtacggtctgtcgcttgccgatccggaggttttggtgatgtgggaagcgcagttcggtgattttgccaatggcgcccagttcatctttgatcagttcatatcgtccggcgaatccaaatggcttcgcatgtcaggcttggtcatgctgctgccgcacgggtttgaagggcaggggcccgaacattcctcggcgcgactggaacgctatctgcagctctgcgcggaagacaactggcaagtctgcaacattacgacaccggccaactatttccatgccctgcggcgccagattcatcgagatttccggaaaccgttggtcatcaccacacccaaatcgctgctgcgccacaaacgggcagtctcaaagctggaagatttcggtttaggcacatcgttcaaccgg

SEQ ID NO: 217165 - DNA, 967 bp, Unknown
  Bacterial polypeptide expressing nucleotide sequence isolated from the Sargasso Sea
gaatattggaattgagtgtaaccatattcttgattcagaagaaagaagatggtttcaaaagaaatttgagtcgaaactaactgaatacagtttcaatcctgatgaaaaacttaatatttatgaaagactaaattctgctgaaggtcttgcaaaatatttgtccgcaaagtatccaggaatgaaacgttttggaattgatggcgctgaagcattggtacccttggttgaaagtgttattcaaaactgtggatcaatgggagctacgcaattatgttttggaatggcgcatagaggaagactaaatcttttagttaatgtactaggtaaacttccatcggaactattctctgcttttgatgaagatactgaattagagggtgcttctacaggagatgttaagtatcacttaggcttctcatcaaactttgaaacacctggtggtgaagtgcatgtttcactttttaataatccatctcatctagaaattgttgatcctgtcgttattggctccgtgagagctagacaggatcgaattggagataaagatagatcacaagttgtgccaattcttcttcatggagacgcttctttttctggacaaggagttgttatggaatcacttcaaatgtctcaaacaaggggattcaatgttggaggaacgattcatattattgtaaacaatcaaattggtttcactacaagcaatatcaatgactcaagatcaacagattattcatctgatgtagcaaagattattcaagcccctgtaattcatgtgaacggtgatgatccggagatggttgtaaatgcagcaaaaattgcttgtaagtatagaaacaaatttaaaaaagatatcgttattgatttattttgttacagaagaagaggacataacgaagctgatgatccttcagctactccacccttgatgtataacaaaattttcaaacatccatctgttttaaat

SEQ ID NO: 217166 - DNA, 926 bp, Unknown
  Bacterial polypeptide expressing nucleotide sequence isolated from the Sargasso Sea
tttgagggaacttgggtctagatataagccagaaagaggaaaagacaaaagaggtgtcactggcgctgatgttaaaaaattgttagaaatttcaaataagattaatacgataccagatgaaaaaaatattcataaaacaataaccaaaattttaaataatagaaaaattgctgttaaaaatggtttagctattgactggtcttctgcagaggctttggcttttggatcacttctagaggagggttatcctgtgagattagttggtcaagattcaggaagaggtacttttagtcaaagacattcggttttaagaaatcaattagataattcaagatatattccattgaataatatttctaaaaaacaaaaaaattttgagatagttgatagttttttatctgaattagctgttttaggttttgagtatggatatagtttagtagaaccaaacactttaactatatgggaggctcagtttggagattttgcaaatggtgctcaagtagtgattgatcaatttgtagcatctggtgaaagaaaatgggctagagcatctggattagtgatgctattacctcatggttatgaaggacaaggaccagaacattcatcagcaagattagaaagatttttacaattatgctcaaacgataatatgcaaattatgaattgcactacacctgcaaattattttcatgccttaagaagacaaatgcatcgagattttagaaaaccattagttttaatgactccaaaatctttattgcgccacaaatattgtgtttcaaacatagaggattttagtaaaaaaaattcatttcatagagttttgtgggatcatgccattgatccaaaaagtaaaggatttattaaattaaaaaaacccgaaaaaatcaaaaaagtaattttatgctctggtaagggtt

SEQ ID NO: 217167 - DNA, 700 bp, Unknown
  Bacterial polypeptide expressing nucleotide sequence isolated from the Sargasso Sea
tgttgatagttttttatctgaatttggagttttgggttttgaatacggatattcgcaagcagatccaaaaacattagttctttgggaagctcagtttggagattttgctaatggtgcccaaacaattattgatcaatttataacaacaggtgaaagaaaatggctaagaatgtcaggaattacacttttacttcctcatggtcatgaaggtcagggacctgaacatacaagtgcccgccttgaaagatttttacaaatgtgtgcagaagacaatattcaaataattaattgcactagtccagcaaattatttccatgttttgagaagacaaattcatcgtaatttcagaaagcctttaattattatgacacctaaatctaccttaagacataaaaaaaacacctcaaaaattgaagattttatcaatggatctactttccatagagttttacgtaatgaattatctaaagaagaggagaaaaaaattgatcgactaattatttgttctggcaaaatatattttgaacttcaagatcacattgaaaagttaaataaaaaaaacgtttttgtaattagattagaacaactttatccctttccatatgataatttttctagagaacttgaaagatttacaaatagtgaaattatatggtgtcaagaagaaccaaaaaatatgggagcttggggttttgttaaa

SEQ ID NO: 217168 - DNA, 754 bp, Unknown
  Bacterial polypeptide expressing nucleotide sequence isolated from the Sargasso Sea
cagttaaaatttacagaaaatggaaaaaaggcttttttaaataaactaattcaagccgaaggttttgaaaaatttttagctttaaaatttgttggaacgaaaaggtttggtttagatggagcagagtctttaattcctgctcttgagcaaattattaaaaaaggaggacaattaggtgttaaagaagttaaaattggaatggcccatagaggcagattaaatgttttggctaatttattacaaaaatcttataagaggattttcaacgagtttatgggagagtttttaaactctcattcagatgctacaggtgacgttaaatatcatttaggagcttcatcagatagagagtttgatggaaattcggtccatataagtttgactgacaatccatctcatttagaagctgtaaatccagtagtacttggtcaaacaagagctaagcaattttttcataaagatacacaaagaaataaagtaataccaattttaattcatggtgacgcagcctttgctggacaaggaatagttgctgagtgtttttcaatgtctggtcttcctggtcataatacaggtggaacaattcattttattataaataatcaaattggctttacgacaagtcctagatttgcaaggtcaagtccttacccttcagatttaggaaaagttattgaatctccaatattacattgtaacggagatgatcccgaagccgtaattcattgtgcaaagattgcaattgagtttagac

SEQ ID NO: 217169 - DNA, 770 bp, Unknown
  Bacterial polypeptide expressing nucleotide sequence isolated from the Sargasso Sea
actattcatagaattttctctaatagacataaatctattttagaaaaaaagaatatagattggtcgactgctgaggctttagcttttggttctcttttaaaggagggttttccagtaagattagtaggccaagattcaggaaggggaacatttagtcaaagacattcagtacttagaaatcaaaacgataattctagatacataccactaaacaatatatcaagtaatcaaaaaagctttgaagtagtcgatagtttattatctgaattagcagttcttggttttgagtatggctatagtttagttgagccagaaacattaacaatttgggaagcacaatttggtgactttgcaaatggagctcaggttgttatcgaccaatttatagcttcgggtgaaagaaaatggtctagagcttcaggacttgtattattattacctcacggatatgaaggacaaggtcctgaacattcgtcagcaagattagaacgatttctacagctttgtggacaagaaaatttacaagtaatgaattgtacgacgcccgcaaattattttcatgcgttaagaagacaaatacatagagatttcagaaaaccattagttataatgacgccaaaatcattattaagaaataagtattgtgtttcaaatttagaagattttagtaaagataattcttttcatagaatcttaggagatcatgctaatgaatcaggctataattttataaatctgaagaaaaaagataaaataaaaaaagtgatttt

SEQ ID NO: 217170 - DNA, 775 bp, Unknown
  Bacterial polypeptide expressing nucleotide sequence isolated from the Sargasso Sea
atgtataaaaaaataagatcacacccatcaccagtaaaagtttatggtgaaaaattggttagtgagggatcgatttcaaatgaatatttgattgagtctattaaaaaatttaaggatttattaaatgaacaatttgaaaatgcaaaagattataaacccaaaattgaatggtttgaaggtacatggtcgaggtacaaaccagctagaggtaaagataaaagaggagttactggttttgatatgaaaaaattacaagaaatttcagatgctattaataccattcccaaggatataaatcttcacaaaactatttcaaaaatattagaaaatagaaaattaaatgtaaaaaaaggttttgatatagattggtcaactgctgaggccttagcatttggctctttattagaggaaggatacccagttagactagttggtcaagactcaggtaggggcacatttagccaaagacattctgttctaagaaatcaattagataacacaagatatgtaccattaaataatatttcaaaaaaacaaaaacattttgaggtcgtagacagttttttatctgaattagctgttttaggtttcgagtatggttatagtttggttgaaccaaatacattaactttgtgggaagctcaatttggagattttgcaaatggagctcaagttgttattgatcaatttatagcttctggtgaaagaaaatggtcaagagcatctggtttagttatgttgttacctcatggatatgaaggtcaagggccagaac

SEQ ID NO: 217171 - DNA, 754 bp, Unknown
  Bacterial polypeptide expressing nucleotide sequence isolated from the Sargasso Sea
gtagttattgatcagtttatagcatcaggagagagaaaatggtcaagagcatcaggactcgttatgcttttacctcatggatatgaaggtcaaggaccagaacattcatctgcaaggttagagcgttttttgcaattatgtgcccaagaaaacatccaagttatgaattgcacaacgcctgctaattattttcatgcgttgagaagacaaattcatagggaattcagaaaaccattggttataatgacgcctaaatctttgttaagacataaatattgtatttcaaatttagatgactttaataaatctaattcttttcacagagtgcttgaagatcatgctttgattaaaaattcaaaatttttaaaaattaataaacctaaaaaaattagaaaggttattatttgctcaggtaaaatttattttgatttacttgaggcaagggaaaaaaataaggttgacgatgtaattttcgttagaattgaggaactataccctttccctgtaaaatctttaactaaagctattaaatcatatgtctcaaattcacagtttttctggtgtcaggaggagcctaaaaatatgggtgcttggtcgtccgtgagagattatattcaatggactttagataatttaggagttaaaaagaaaatagaatatattggcagaaaagccgcagcatcgcctgctactggatatgctagtagacatgctaaacaacagaaagaaattttagataaagtatttaaataga

SEQ ID NO: 217172 - DNA, 792 bp, Unknown
  Bacterial polypeptide expressing nucleotide sequence isolated from the Sargasso Sea
tctacacttaatttatattggggaaaaacttacgaaagaaggtttaatcacattagatcagcttaaaaaagataaatcgaagtttaaaaactatttagaggatgaatttttatcatctaaaaattataagtcagagctaaaatggtttgacggtgtttggtctagatttaagccaggcctaggaaaagacaaacggggcaaaagcggtgtcgaaaaaaatattttattaaatgtcggaaaaaaagtatttcatattccttcagactttaatgcacataaaactttgaaaagagtttttgagacaaggagcaaaatgttttttagcggaaaagttgactggtcatcagccgagtctttagctataggtacattattagttgaaggcttttcagtaagactatctggccaagactccggaagaggtacttttagccaaagacacgcagttttaagaaatcaaagtaatcacgatcgttatttaccattaaataatattaaagctggtcaaaagaaattcgaaataatagacagtttactttcagagcttgcagtgcttgggtttgagtacggatactcactatcagagccagaaactctcgtattgtgggaagctcagtttggagattttgctaatggagcgcaagttataattgatcaattcataacttcctctgagtccaaatggggaagagcaagcggtcttgtaatgctattacctcatgggtacgaaggtcaaggtcccgagcactcttcagcaagattagaaagatttttacaattatgcgcaggaga

SEQ ID NO: 217173 - DNA, 804 bp, Unknown
  Bacterial polypeptide expressing nucleotide sequence isolated from the Sargasso Sea
atcaccagtaaaagtatatggtgaaaaattaattaatgaaaaatctatttcaagtgattatttgaatgggtcgatcaaaagatttaaagatttattaaatgagcaatttgaaaatgctaaagactataaaccaaaaattgaatggtttgaaggaacttggtcaagatataagccagagagaggaaaagataaaagagggacaacaggttcagatattaaaaaactacaagaaatatcaaataaaattaacactattcctgaagaaattaatatacataaaacaatttcaaaaatattagaaaaaagaaaattatctgtaaaaaatggagaagggattgattggtcaacagcagaggctttagcatttggatctttgatagaagaaggttacccagtaagattagttggtcaagattcaggaagaggtacatttagccaaagacattcagttttgcgtaatcaattagacaattcaagatatattccacttaataatatttctaaacaacaaaaacattttgaggtagtggatagctttttatctgaattggctgttcttggttttgaatatggttacagcttagttgaaccaaacacattaaccttgtgggaagcacaatttggagattttgcaaatggagctcaagtcgtaattgatcaattcatagcttctggtgagagaaaatggtctagagcatctggtttagttatgttattgccacatggatatgaaggccaaggtccagaacattcttcagcaagattagaaaggtttttacaattgtgttcaaatgacaacatgca

SEQ ID NO: 217174 - DNA, 889 bp, Unknown
  Bacterial polypeptide expressing nucleotide sequence isolated from the Sargasso Sea
gagggagacgagccatcattcactcaacctttaatgtataaaaaaataagatcacacccaaccactcttaatatttacggggataggctaattaaagaaaatttaattagtgagaatgattttaaaactcagattgataattttaaattattattagaagatcaatttaaaactgccaaagattataaacctaaactaaattggtttgagggcacatggtctagatatcaacctaaaaaaggaaaggatagaagaggtgatactggtgttgatctagatattattactcaaatttcagaaaagattaataaacttgagacaaatttaaatgttcataaaactattcatagaattttctctagcagacataaatctattttagaaaaaaagaatatagattggtcgactgctgaggctttagcttttggttctcttttaaaggagggttttccagtaagattagtaggccaagattcaggaagaggaacatttagtcaaagacattcagtacttagaaatcaaaacgataattctagatacataccactaaacaatatatcaagtaatcaaaaaagctttgaagtagtcgatagtttattatctgaattagcagttcttggttttgagtatggctatagtttagttgagccagaaacattaacaatttgggaagcacaatttggtgactttgcaaatggagctcaggttgttatcgatcaatttatagcttcgggtgaaagaaaatggtctagagcttcaggacttgtattattattacctcacggatatgaaggacaaggtcctgaacattcgtcagcaagattagaacgatttctacagctttgtggacaagaaaatttacaagtaatgaattgtacgacgcccgcaa

SEQ ID NO: 217175 - DNA, 997 bp, Unknown
  Bacterial polypeptide expressing nucleotide sequence isolated from the Sargasso Sea
cgtatcagtggacaggattccggaagaggaacgtttgcccaccggcatgcgatagttacaaccgaacaagattctaaatacattcctcttaatcatttatccgacaaacaagctcctttttctgtttataattctctgctttccgaatacggagtgctcggtttcgaatttggatatgcctatgcaaccccgaggagtcttactatttgggaggctcagtttggtgatttcggaaatggagcacagatcatttttgatcagttcattagttctgcagaaaccaaatggcatcggatgaacggactggtggtgcttcttccccatggatatgaaggtcaggggccggaacactcttccgcacgtattgaacgctatttggaactttgtgcggataacaacctgatgatcatcaactgcactctcccggcaaatatgttccacgctttacgcaggcaagtagagcaaccgttcaggaaaccacttattgtttttacacccaaaagtctacttcggcatccgaaatgtgtgagtccattggaggattttcttggagggtcaagattccatgaagttctggatgataccaaagtggagcctggaaaagtgcggaaggtattattctgttcggggaaaatctattatgagctagagtcgttccgggaagaaaaaggtcaggaccatgtggcaatcgtcaggcttgaacaacttcatcccttgcccataaaacaacttgaagcagtgattgaacaatatgccaattgccaaacatggtgttgggttcaggaggaacctgaaaatatgggggcatggtgtttcatgaatcgaaagtttaaattcacccccaagccccttcaactggtttcgcggaaggaatcttcatctcccgcagggggatttgcaaaaattcatcagcagaatcaacagggccttgatcgaaagggccttcagtataggataaacctaatcatttcattttcagatcatggcagttcatgaa

SEQ ID NO: 217176 - DNA, 944 bp, Unknown
  Bacterial polypeptide expressing nucleotide sequence isolated from the Sargasso Sea
acctaaaattagatggtttgagggaacttggtcgagatataaacccgaaagaggcaaagataaaagaggtgtaactggatcagattcgaaaattttaaaagatatttctgacagaatacacgtttttccaactgataaaaatattcacaaaaccataacaaaaattatggaaaatagaaaaaaaactattaatgaaggctcaggtattgattgggcaacagctgagtccttggcatttggttcattattagttgaaggttatccagtaaggttagtaggtcaggattctggcagaggtacctttagtcaaagacactcagttttaagaaatcaaattgataattcaaggtacatacctttaaacaatatatctagtaaccagaaaaattttgaaattgtagatagttttttatctgaacttgcagttttaggatttgaatatggatacagtttagtagaaccaaatacattgactatttgggaagctcaatttggtgattttgcaaatggagctcaagtaattattgatcaatttatatcatctggtgaaagaaagtggaaacgagcatcaggactagttatgctattaccccatggttatgaaggacaaggtccagaacactcttctgcaagattggagagatttttacaattatgtgcaaatgataatttacaagttatgaattgtacaacacctgcaaattattttcatgctttaagaagacagatgcaccgtgattttagaaaacctttaattataatgacacctaagtcacttctaagaaataaatattgtgtatcaaatttagaagattttaataaacaaaattctttccacagggtgctatgggatcatgctaaagatagtaagcaaaaaggttttattaagttaaaaaacgacaaaaaaattagaaaagtaatattatgctctggcaaaatttact

SEQ ID NO: 217177 - DNA, 793 bp, Unknown
  Bacterial polypeptide expressing nucleotide sequence isolated from the Sargasso Sea
tttgggggattttgcaaatggagctcaggttataatagatcaattcattgcgtcagctgaaagaaagtgggcaagagcaaatggtttagtgatgctgctacctcatggctatgaaggacaaggaccagagcattcatcagcaaggttagaaagatttttgcaattatgtgcccaagaaaatattcaagttatgaattgcactactcctgcaaactattttcatgctttacgcagacagatgcgcagggattttagaaaacctttaataattatgacaccaaaatctttgttaagaaataaaaaatgtacttcaaatatagaggattttactaaaaaaaatacatttcatagagttcttaacgatcatgccgatttaaaaaaatacggtttaatcaaacttaatgaagataaaaaaataaaaaaagtagttatatgttcaggaaaaatttattttgatcttttagaggccagagaaaaggcaaaaaacaaagagttgttcattataagaatagagcaactttacccttttccagcaaaaacactcgctcgagagctaaaaagattcaagaaaaattctaaattttattggtgtcaagaggagcctcaaaacatgggagcatggaatacgacaagaaattatattcagtggagcctagattatataaaggcagaaaatagagaggttaaatatattggtagaaaacctgccgcatctcctgctagtggatatctcaaaaaacatcttgcagagcaaaatgaaatattagaaaaggtggtaggaaagtttaattga

SEQ ID NO: 217178 - DNA, 799 bp, Unknown
  Bacterial polypeptide expressing nucleotide sequence isolated from the Sargasso Sea
ttggttcttgttagaagagggttttccagtgaggtttgtaggtcaagattctggaagaggaacttttagtcaaaggcactcagttttacgtaaccaagtagataacactagatatatacctttgaatagtatttcaaaaaatcaaaagaaactcgaaattgtagatagttttttatctgagttggcagttcttgggtttgaatatggttatagtttagtcgagccaaatacattaacaatttgggaagcgcaatttggtgattttgcgaatggagcacaagttattatagatcaatttatatcttcgggtgaaagaaaatggcagagagcatctggcttaataatgttgctgcctcatgggtatgaaggacagggtcccgagcattcatctgcaagattagaaagatttttacagctatgcgctaatgataatcttcaagtgatgaactgtacaacaccagctaattactttcatgctcttagaagacaaattcatcgtgactttagaaaacctttagttttaatgacaccaaaatcccttttaagaaacaaatattgtgtttcaaatattgaggattttaataagcaaacttcatttcaccgtattttatgggatcacgcattaaatgatgagtcaaaaaatttcattaaattaaaaaatcctacagaaataaaaaaagttattatttgttctggaaaagtttactttgacttattagctgctagagaaaaaattaaaagagacgatgtgatattgtttagaatagaacaattatatccttttcctgtaaaaagctta

SEQ ID NO: 217179 - DNA, 889 bp, Unknown
  Bacterial polypeptide expressing nucleotide sequence isolated from the Sargasso Sea
ataaaacatccatctgtattaagtcagtatgaaacagatttaaaagaacatggaatattaacatctgatgaagcaaaaaaaattaaaagtgaatatagaaaatctcttgaaggtggagaaagtgttgcaaaaaatttagcaaaaaatccaaatgatcaactttggtttgattgggagccatatatggacgttaagtggtggcccaaagttgataccaagtttaataaagacaagtttacgaagcttgggaaagctatttgtaaggtaccaaaatcatttaatcttggctcacaagctaaaaaaatctttgatgatagattgagaatgaataatggagaaattcctataaattggggatatgctgaaacaatggcatacgcaactcttctatatgaaggttatccgataagattaaccggccaagatgtcagaagaggcactttttcacatagacacgcttgtgtttttgattctaagaatggaatgggttacatacctctatcggatatagctgaaaaaaataaatctaagtttgatatatatgattcattgctatctgaggaagctgttttggcatttgaatacggttattctgctacttggccaagtggtcttgctatttgggaggctcagtttggagattttgcaaatggagctcaagttgtaattgatcagttcatagtttctgcacaacataaatgggagagattatccggtcttgtaatgcttttgcctcatggatacgaaggtcagggtcctgagcatagtagcgcaagaattgaaagatttttgcaattatgcgcatctgaaaatatacaagtttgtgttccaagttctccaaaacaaatttttcatcttttgagacgacaagcaataagaaaaatgagaa

SEQ ID NO: 217180 - DNA, 881 bp, Unknown
  Bacterial polypeptide expressing nucleotide sequence isolated from the Sargasso Sea
aagacttaattctgctgagggtcttgcaaagtatttatctgcaaaatacccaggtatgaaaagattcggaattgatggagctgaagcattagtccctcttgttgaaagcgttattcaaaattgtggatcaatgggagctaaacaaatttgttttgggatggcgcacaggggaaggttaaaccttctagtaaatgttttgggtaaacttccatcagagttattctctgcttttgatgaagatactgaattggagggagcgtctacaggagatgtaaaatatcacctgggtttttcatctaactttgaaacacctggtggtgaagttcatgtctcactttttaataatccatcccatctagaaattgttgatcctgtcgtaattggctccgtgagagccagacaagatcgaattggagataaagatagatcacaagttgtaccaattcttcttcatggagacgcttctttttctggacaaggagttgttatggaatcacttcaaatgtctcaaacaaggggatttaatgttggaggaacgattcatattattgtaaacaatcaaattggtttcactacaagcaatatcaatgactcaagatcaacagattattcatctgatgtagcaaagattattcaagcccctgtaattcatgtgaacggtgatgatccggaaatggttgtaaatgcagcaaaaattgcttgtaagtatcgaaacaaatttaaaaaagatatcgttattgatttattctgttacagaagaagaggacataatgaagctgatgatccttcagctactcaacccttgatgtataacaaaatctcaaaacatccatctgttttaaatcagtatgaaacaaatttaatagatcatggaatattaa

SEQ ID NO: 217181 - DNA, 883 bp, Unknown
  Bacterial polypeptide expressing nucleotide sequence isolated from the Sargasso Sea
aattccttcgaatttcaatgttcataaaactttaaaaaaaatatttgatttaagattgaatgttataaaggaaggtaaagctattgattggtctactgctgaaagtttagcttttggaacacttctcactgaaggtttttcagtaagattatctggtcaagactctggcaggggaactttcagccaaagacatgctgttttgagaaatcaagataatcatgaaagatatatacctttgaataatatttcacagacgcagaaaaactttgaaattattgatagcttactttcagaattagcagtattgggatttgaatttggatactctctttctgagccggagacattagttttgtgggaagcgcaatttggtgattttgcaaatggagcacaagtaataatagatcagtttatttcttcgggagagtcaaaatggggtagagcaagtggtttggtaatgctgttgcctcatggttatgaagggcagggtcctgaacattcttcagcaagacttgaaagatttttacagttatgtgctggtgaaaacatacaagttgtaaactgcacaacaccttctaattactttcatgttttaagaagacaaatgcatagagaatttaggaagccattaataattatgacacctaaatctcttttaaggcataagaagtgtacttcaaatattttagagtttataaaaaaaagtacgtttcacagagtcttagaggatgatgcgtactcaaatattggaaatctgttagaacttaaaaaaaaagatgatcaaataaataaagtggttatatgctctggtaaaatctattatgatttgatcgaagcaagagaaaaatataaaaataataaagttaccttcgttagaattgag

SEQ ID NO: 217182 - DNA, 829 bp, Unknown
  Bacterial polypeptide expressing nucleotide sequence isolated from the Sargasso Sea
aaaaaaataaggtcacatccaacaaccttaaatatttacaccaaaaagatttcctctgaaggtttgttaaatgaaagtcaaattaataagaaaaaactggattttaaaaaatttctagagacacaatttaatgactcaaaaaactataaatctgagttgaaatggttcgatggagtttggtcaagatttaaaccaggtttaggaaaagataaaagaggggtcagtggagttgataaaaaattgttaattgaaactggtaaaaagatatctgaaattccaaaaaacttcagtatccataaaactttaaaaaaagttttagaacaaaaacaaaaaatgttctccgaaaatgctcctatagactggtctaccgcagagtctcttgcatttgctacattattaatagatggtttttcagtaagattatcaggacaggactcggcaagaggaactttcagccagcgacactctgttttaagaaaccaggaaaatcacgatagatatattcctttaaataatttgggcaagaaacagaaaaagtttgaaataattgatagtttattatctgagctagccgttttaggtttcgagtttggttattccctgtcggaaccagaaactttagtgctatgggaagctcaatttggagattttgctaatggagcacaaataataatagatcaatttataacttcgggagagtccaagtggggaagagcaagtggtttagttttattattacctcacggatacgagggtcaaggaccagaacattcatcagctagattagaaagatttttgcaaatgtgtgctggagaaatatacaagtagt

SEQ ID NO: 217183 - DNA, 943 bp, Unknown
  Bacterial polypeptide expressing nucleotide sequence isolated from the Sargasso Sea
aatgatggattctctgtaagattatcgggacaagactcaggtagaggaacctttagtcaaagacattcagtcctaagaaatcaggataatcatgagagatacattcccttgcaacacgtgtcaaaaaaacagaagaattttgaagtaatagatagtcttctttctgaattgggtgttcttggttttgagtttggttactctctatctgaaccagagacccttgtgctttgggaagcacaatttggcgattttgttaatggtgcacaagttgttatcgaccaatttatttcatcaggagagtctaaatggtcaagagcaagtggacttgtgatgcttttacctcacggatatgaaggtcaaggtcctgaacattcctcaggcagattggaaagatttttacaattatgtgcacaagacaatttgcaagtagtaaattgtacaacaccggcaaactattttcatgttttaaggagacagatgcatcgagattttagaaaaccgcttatagtcatgacacccaagtcacttttaaggcacaaaaagtgtatatctaatcttgaagattttacaaaaaaaaattcatttcatagaattttagaggacagcgcatatttaaaaggaagcaaacttatttccttaaaaaaagataaaaaaattaaaaaagttgtaatgtgttcaggtaaaatttattttgacctgatagagcaaagagaaaaggtaaaaaacgatagcattgtgttattaagaattgagcaactttacccttttcctgttaaacaggtgggaaagcagcttaaaagatacaaaaatgctaaatttttttggtgtcaagaagagccaaaaaatatgggcgcctggaatactgcgcgacactatattgatagaactttagatatcattcaagtaaaaggcgaaaaggtcaagtatgtaggacgaaatgctg

SEQ ID NO: 217184 - DNA, 901 bp, Unknown
  Bacterial polypeptide expressing nucleotide sequence isolated from the Sargasso Sea
gctctatgaaaaccgtcttaaaatggttacagaagataagcagttggattgggcgatggcagaaaatatggcttacgcgactttgcttaatcaaaattgtaagatacgcttgagcgggcaagattcagggagaggtacatttgctcaacgccatgccatcattactgctgaggacaacacaaaatatgttccacttaatcacctttctaaagaccaagctacgtttgaagtatataattcctttctatctgaatatggtgttcttggttttgagtatggctatgcttatgcttcgccaaactctcttacaatctgggaagcgcaatttggtgattttgcgaacggtgcacaaatagttattgaccagttcgttgcttcttcggaaactaaatggcagcgaatgaatggtgttgtcttgttgctcccacatggtcatgaaggacaggggccggaacatacttctgcacgtattgaacgttttctgactctttgtgccgataacaatatgcagataattaattgcactactccagccaatttctttcatgttttgagacgccagatgattttccctttccgaaaacctctggtgatttttactccaaagagtttgttgcggcatccaaaatgtttcagccatctagaagaatttctagaagggacacgattcttagaggttattaaagattataatacggatcctcaatccgtacaaaaggttttattatgctgtggaaaagtttactatgacttactagcgcatcagcaaaaaaatcagatcaaagatattgcaattattcgtttggagcagctatatccttttcctaaaaaacaacttcttactgttctaaagctttattctaatatcaggaatatatgctgggtgcaggaagagccagaa

SEQ ID NO: 217185 - DNA, 814 bp, Unknown
  Bacterial polypeptide expressing nucleotide sequence isolated from the Sargasso Sea
aaaactcgattggtcctcggcagaaagtttagcaatagggacgcttctaactgaaggattttctgtaagattatctggtcaagactcgggtaggggaacttttagtcaaagacatgcaattttgagaaatcaagaaaatcatgaaagatttattccagtaaataatattgaaaaaggtcaaatgaaatttgaagttatagatagtttgctctctgaacttgcagttttaggatttgagtttggctattcattgtctgagccagaaacattggtactttgggaagctcaatttggcgattttgctaacggaggtcaggtaattatagatcaatttatcacatcgtcagagtcaaaatggggaagagcaagcggacttgtaatgttattacctcatggatatgaggggcaaggtcctgaacactcttcagctaggcttgaacggtttcttcaactttgtgctggagaaaatatccaaatagtaaattgcacaactccatcaaattatttccacgttttaaggagacagatgcacagagaatttagaaaacctttaataataatgacaccaaaatctttactaagacacaaacgatgtatttcaaatatctctgagtttacatctaaaagctcttttcatagagttttagaggacgatgcatattttgaggaaaataaacttatttcacttgaaaaagataaaaaaattaaaaaagttgttatgtgttcaggtaaaatttattacgatttaatcgaggctagagagaagtcaaaaaaaaatgatatcgttttcataaggcttgaacaactttacccg

SEQ ID NO: 217186 - DNA, 870 bp, Unknown
  Bacterial polypeptide expressing nucleotide sequence isolated from the Sargasso Sea
aatgtataaaaaaattaagtcacatccatctacacttactttatatggtcaaaaattaagtaacgaaggacttacttcagataaggaattacaaaaaaataaagttaattttaaaaaatggttagaaaccgaatttgaaaaatctaaaaattataaatcagatttaaagtggtttgatggtgtatggtcaagatttaagccaggtttaggaaaagacaaaagaggtgcaagtggtgttaacagcaaattattaaaagctgtggggaaaaaaatttctactataccagcagggttttctgttcacaaaactttaaaaaagatatttgatttaagaaatcaatcaatagaaaaagaaagtggtatagattggtctacggctgaaagtcttgcatttggtacattattagctgaaggtttttcagtaagattatcaggacaagactcatgtagaggaacttttagtcaaagacacgccattcttagaaatcaagaaaatcatcaaagatacataccattgaataatattaaagaaggacaaaagaattttgaagcaatagatagcttactttctgaatttgcagtattaggttttgagtttgggtactcgctctctgaacccgagacacttgttttatgggaagcacaattcggagactttgcaaatggagctcaaataatcatagatcaatttatctcctcaggtgagtcgaaatggggaagagctagcggtttagtaatgctcttaccacatggttatgaaggacaaggaccagagcattcttctgcaaggttagaaagatttctacagttatgtgctggtgaaaatatgcaagttgtcaattgcacaactccagcaaattattttcatgt

SEQ ID NO: 217187 - DNA, 754 bp, Unknown
  Bacterial polypeptide expressing nucleotide sequence isolated from the Sargasso Sea
atagatcaatttattgcatcaggtgaaagaaaatggtctagagcgtctggtttagtaatgcttttaccgcatgggtatgaaggtcaaggacctgagcattcttcagcaagattagaaagatttctgcaattgtgttcaaatgataatatgcaagtaatgaattgtacaacacctgcaaattattttcatgcattaagaagacaaatgcatagagattttagaaaacctctaataattatgaccccgaaatctttattaagacataaacgttgtgtatccaatattgatgatttcagtaaaaagaattcattccaccgtattttatgggatcatgcaattgatccaacaattaaaggttttattaaactaaaaaaagccaaaaaaattaagaaagtaattctatgttcaggtaaaatatatttcgatttacttgaagctagagagaaacttgaaaaggatgatgttgttttttttagaatagaacaactttatcctttccctgtaaaaagtctcgtaaaagaactcagaccatatgcaaaaaatgctaaattttattggtgtcaggaagagcccaaaaatatgggagcttggttttctgtaagagattatatccaatggacattagataatataaaggctaataataatatagtttcttatattggaagaagtccggacgcatcaccagcaacaggatatgctaaaagacatatttctcaacaaaaagaaattataaaggaagttttagaataat

SEQ ID NO: 217188 - DNA, 864 bp, Unknown
  Bacterial polypeptide expressing nucleotide sequence isolated from the Sargasso Sea
ggtgaaaagcttgtacatgaaggttcaatttcaaaagaccatctaaataattcaattaaaagatttaaagatttacttgatgatcaatttaaaaacgccaaaaactataaaccaaaaattgagtggtttgaaggaacatggtctcgatataaaccagaaagaggtaaagataaaagaggtgttactggctttgatataaaaaaattaatagaaatatcaaataaaataaacacaattccatcagatattaatattcataaaaccatatcaaagattatggctaacagaaaaactacagttataaatggaaaagctatagactggtctactgcagaagccttggcttttggatccttgttagaagaaggctatccagtaagattagttggtcaagattctgggagaggcacatttagtcaaagacattcagttttaagaaatcaaatagataattcaagatatgttcctttaaataatatttcaacaaaacaaaaaaaatttgaaatagtcgatagttttttatctgaattagctgttctagggtttgagtacggttatagtttagtggaaccaaacacacttactttatgggaagcacaatttggtgattttgcaaatggcgctcaagtagttattgatcagtttattgcatctggtgaaagaaaatggtcaagagcttcaggtctagttatgcttttaccacatggatacgaaggtcaaggcccagaacattcatctgcaagattggaaagatttttacaattatgttcaaacgataacatgcaggttatgaactgcacaaccccagctaattatttccatgcattgaggagacaaatgcacagagattttagaaagccctta

SEQ ID NO: 217189 - DNA, 796 bp, Unknown
  Bacterial polypeptide expressing nucleotide sequence isolated from the Sargasso Sea
aatgtataaaaaaataaggtctcatccatcaaccttatatatttatgctaaaaaattaatagaccaagggactatcaatgttagcgatttcgaaagtgaaaaaaacgaatttaatatacttttagatgatcaatttaaatcagcaaaaaaccataaaccaaaattagactggtttgagggcacttggtcaagatacagaccacaaaaaggcaaagataaaagaggtaaaacgggtgttaatcttggtatactaaataaaatctctgaaaaaattaatgttctaaatgaaaatttaaatgttcataaaacaattaaaagaattttctctaacagacgtgaagctgtaaataagaaaaataatattgattggtctacagcggagtcactagcatttggaacactattagatgaggggtttccagtaagactagtaggacaagattccggccgaggtacgtttagtcagagacattctgttttgagaaatcaagaaaataactctagatatatacctctaaataatatttcagataaacaaaaaaaatttgagatcgtagacagctttttgtctgaacttgcagtcttaggatttgagtatggatacagtctatcagagccagagacactcacgttatgggaagcacaatttggagattttgcaaatggagcccaagtggtaattgaccagttcattgcatctggggagagaaaatggagacgagcctctggaatagttctattacttcctcatggctacgaaggacaaggaccagaacactcatctgcaagacttgaa

SEQ ID NO: 217190 - DNA, 681 bp, Unknown
  Bacterial polypeptide expressing nucleotide sequence isolated from the Sargasso Sea
acttggagtagatatagaccagaaaggggaaaagacaaaagaggaaaaagttcagtaactgaaaaaaaattaatagaaatttctgaaaaaattaatttgatacccgaaagtgcaaaaatacataaaactataaaaaggatctttgataatagatatcaaacaattaaaaataaaaaaaatattgattggtcaacagctgagtccttggcatttggcacccttttagaggaaggttttccagtaagattagtgggtcaagattccggtagaggcacatttagtcaaagacattcagtattaaggaatcagctagataactcacgttatataccactgaataacatttcaaaaaaacagaagcgatttgaaatagtcgatagtttactttcagaaatggcagttttaggatttgaatatggttatagtttagtagaaccaaatacattaacaatatgggaagcgcaatttggagattttgctaatggagcgcaaattataatagatcaatttatttcttctggagaaagaaaatggtcaagagcatcaggtttagttatgcttctacctcatggttatgaaggtcaagggccagaacattcatcagctagactagaaaggtttttgcaattatgcgcaaaagaaaatctgcagattatgaattgtactacacctgcaaattat

SEQ ID NO: 217191 - DNA, 859 bp, Unknown
  Bacterial polypeptide expressing nucleotide sequence isolated from the Sargasso Sea
tgaaaattccttgaaagatgaagggcttttgtctgaagaaaagataaaaataattaaaaaagaatatagaaaatctcttgaaggtggaaaaagtgttgctaaaaatttagcgaaaaaaccaaatgattccttatggtttgattgggagcccttcatggatgttctatggtggccaaaagtagatacaacatttaataagaaaaaatttaataaactcgctaaagatatatgtaaaattcctaattcttttaatttaggcagccaagcatctaagatttttgaagaaagattaaaaatgaataatggtgaggtagagctaaactggggttttgctgaaaatatggcctacgcaactttattaagtgaaggatatccaataagaattactggccaagatgtaaggagaggaacattttctcataggcacgcatgtttatttgatagtgaaactgggatgggcttcattcctctatcagaaattgctgagaaaaataatacaagattcgatatatatgactcacttttgtctgaagaagcagtattgggttttgaatatggttattctgctacttggccatccggtttggcaatatgggaagctcaattcggagattttgctaatggcgctcaggtagttattgaccaatttatagtttctgctcaacataaatgggaaaggttgtctggattagttatgttattgcctcatggatatgaaggacaaggtcctgaacatagtagtgcaagaatagaaagatttctgcaattatgcgcttcagaaaatattcaagtttgtgtcccaagctctccaaagcaaatatttcatcttttaagaaggcaagctataagaaaaatgaga

SEQ ID NO: 217192 - DNA, 775 bp, Unknown
  Bacterial polypeptide expressing nucleotide sequence isolated from the Sargasso Sea
aagaggaacttttagtcaacgtcattcagtgctgaaagatcaattaaatggaagtaaatacactcctctaaataatatttcaaaaaatcaaaaaagatttgaagtaatagatagtttgctttctgagatggccgttcttggatttgaatatggctatgcattatcagaaccaagcacccttgtaatttgggaagcacaatttggagattttgcaaatggagcccaggtcattatagatcaattcattgcttcagcagagagaaaatgggcgagagctaatggcttagtgatgctgctgccccacggttatgagggacaaggccccgaacactcatcagctcgattagaaagatttttacaattatgtgctcaagaaaatattcaagttatgaattgcacaactcctgcgaactattttcatgccttacgtagacagattcacagagattttagaaaacctttaataattatgacgccaaaatctttattaagaaataaaatgtgcacttctaatattgatgattttactaaaaagaatacttttcatagagttttaaatgatcacgcggactctaagaaaaatgattttattaaacttgtggaagataaaaaaataaagaaagtagctatttgttcaggaaaaatttactttgatcttcttcaagcaagagaaaaaaataaaaataagaatgtatatattataagaatagagcaattatatccatttccagtcaaaacacttgctaaagagttaaaacgatttagaaaaaactct

SEQ ID NO: 217193 - DNA, 942 bp, Unknown
  Bacterial polypeptide expressing nucleotide sequence isolated from the Sargasso Sea
aatgcttttatcaggtaaacttgactggtcgtctgctgaaagtttggcaattggcactcttctaactgagggattctcagtcagattatctgggcaagattctggaaggggaacatttagtcaaagacacgcaattctaagaaatcaagaaaatcatgacaggtatatacctgcaaataatatttctaatgggcaaatgaaatttgaagttattgatagtttattatccgagcttgcagtgctggggtttgaatttggatactctttatcagaacctgaaactttggttttatgggaagcacaattcggtgattttgctaatgggggccaagtaattattgatcaatttattacttcatcagagtcaaagtggggtagagctagtggtctagtaatgttactaccacacggatatgaaggacaaggaccagaacactcttctgcaagattagagagatttctccaattatgtgctggagaaaatattcaagttgtaaattgtaccactccatcaaattactttcacgttctgagaagacaaatgcatagagaatttagaaaacctctaattgtgatgacaccaaaatctcttttaagacataaaagatgtatttctaaaatatcagaatttacctcaaatagttcatttcacagaattttagaggatgacgcatttaccaaaggaaatgaattgatttcattaaaaaaagataaaaaaataaaaaaagtcgtgatgtgctcgggaaaaatttattatgatttagtagatgcaagagagaagagaaaaaaggatgacgtagtatttatacgtcttgagcaattatacccattcccggcgaaaacattagcaaatattttaaaaagattcactaatgcaaagttcttgtggtgcccagaggaaccaaaaacatgggtgcgtggaatactgtcagaaactacatt

SEQ ID NO: 217194 - DNA, 769 bp, Unknown
  Bacterial polypeptide expressing nucleotide sequence isolated from the Sargasso Sea
gtcccaagtaactttaatgcccacaaaactcttaaaagagtttttgaattaaaaaatcaaatgttcattaaaggtcaaattgattggtcttcagctgagtctttagctatcggaactcttttaactgagggtttttcagtaagattatctggccaagactctggtagaggaacatttagtcagagacatgctgttttaagaaatcaagataaccatgatcgttacataccattaaataatattcaaactggacaaaagaaatttgaaataattgatagcctattatcagaacttgccgtacttggatttgaatatggttattcattatcagagccagaaactttggttttatgggaggcacaatttggagattttgcaaatggagcacaggtaattatagatcaatttataacttcttcagaggcaaaatggggtagggctagtggtttagtaatgttattaccacatggttatgaaggccaaggaccagaacactcttctgcaaggttggaaagatttttacaattatgtgcaggagaaaatatccaagttgtaaattgtactacaccttcaaattatttccacgtgttaagaagacaaatgcacagggagttcagaaaaccgctaattgtaatgactccaaaatctttgttgaggcataaaagatgtatttctaaaatttctgagtttgcgtcaaagagttcgtttcatcgagttttggaagatgatgcttacgacagagaaaaaaaacttatttcactcaaaaagg

SEQ ID NO: 217195 - DNA, 859 bp, Unknown
  Bacterial polypeptide expressing nucleotide sequence isolated from the Sargasso Sea
ggtaggaaaaaactataaacctaataaagcagattggttggagggttcatggacaggttttgagtcaaaaggtatagtcaagcctaatattattacagggctacctttaaaaaccttaaaagaatatggagtaaaacttgccaaaattccagagggttttgaagttaatagaaaagtgcaaagagttttgcagaaaagattaaaaacaatttctgatggaaaagatattgattgggcatgcgctgagtctttagcttttgcatctcttctctatgagggcgtaaatgtaagattatcaggacaagattgtggaagaggaactttttcacaaagacatgcaattttagttgatcaaaaaagtgaacaaaaattttccactttaaataatttcttacaaaatggaagtagagtcgaaatagtagacagtcctctttctgaggctgctgttttaggtttcgaatatggttatacattagcagaccccaatactttagttctttgggaggctcagtttggtgattttgcgaatggagcccaattaattattgatcaatttatagtgtctggagagtcaaaatggttgagaatgtcaggagtaacaattcttcttccgcacggatatgaagggcaaggaccagaacattcctcagctagaatagaaagatacttgcagatggctgcagaagataatattcaagttgtaaattgtactactcccgcaaattattttcatgttctcagaagacaaatgttaagaaagtttagaaagccattaattatctttactccaaagtcattacttaggaagaaagaagcagtatcaaaattagatgatatgggcgaaaataaaaagtttaaa

SEQ ID NO: 217196 - DNA, 697 bp, Unknown
  Bacterial polypeptide expressing nucleotide sequence isolated from the Sargasso Sea
gatgttgttacctcatggatatgaaggtcaaggtcctgaacactcttcagcaatattagagagatttttacaattatgttcaaatgataatatgcaaattatgaattgtactacaccagcaaattattttcatgctttgagaagacaaatgcacagagattttagaaaaccactaattataatgacacctaaatctttattacgtcataaattttgtgtttcaaatattgaagattttagtaaaaaaaattcttttcatagagttttgtgggatcatgctattgatccaaagagtaaaggttttataaaattaaaaaaatcaaataaaattaagaaagtaatcttatgctcaggtaaaatttattttgaccttctagaggctagggaaaaacaaaaaaaagatgatgtagttttttatagaattgagcaactatatccatttccagcaaaaagtcttgctaaagaacttaaaccttatgcaaaaaaagctaagttttattggtgtcaggaagaacctaagaatatgggagcttggttttcggtaagggactatatccaatggacattagacaatattaaggctaataataatcaaatttcttatattggaagaagtcctgatgcgtctccagcaactggatatgtgaaaagacatatttctcaacaacaagaaattattaagaaagtttttgaataa

SEQ ID NO: 217197 - DNA, 829 bp, Unknown
  Bacterial polypeptide expressing nucleotide sequence isolated from the Sargasso Sea
tcagataaatcagaatttaaaaaatatctggaagaagaatttgagtcctcaaaaaattataagtcagaactaaaatggtttgatggagtatggtcaagatttaaacctggtttaggaaaagataaaagaggtataagcggtgtagataaagataaaataattcaaattggaaaaaaaatgtctaccttaccgaaaaactttaacgttcataaaactttgaaaagagtattcgagttaaggtcccaaatattttcaaaaacgcataaagttgattggtctacagctgagagtttagcgtttgccacattattaacagagggtttttcagtaaggctttccggacaggattcaggtaggggaacttttagccagagacatgctgttttaagaaatcaagataatcatgatagatacatcccacttaataatataaaaaagggacaaaaaaattttgagattatcgatagtttgttgtctgagctagcggttttaggttttgaatttggctactcactctctgaaccagaaacattagtcttatgggaagctcaattcggtgattttgctaatggagctcaaattataattgatcaatttataacatcgggagaatcaaaatggggaagagcgagtggactggttatgttgttacctcatggttatgaaggtcaaggaccagaacattcatctgcaagacttgaaagatttttacaattatgtgctggtgaaaatatacaagtagtaaattgtacaacaccatcaaattattttcatgttttaaggagacaaatgcaaagagaatttagaaaaccattaatagtaatgaccc

SEQ ID NO: 217198 - DNA, 730 bp, Unknown
  Bacterial polypeptide expressing nucleotide sequence isolated from the Sargasso Sea
agaaagaaaatggtctagagcgtcaggtttagttatgctactgcctcatggatatgaaggtcaaggtccagaacattcatcagctagattagaaagatttttacaattatgttcaaatgacaatatgcaagtaatgaattgcacaacacctgcaaattattttcatgcattaagaagacaaatgcatagagactttagaaagcctttgataataatgacacctaaatctttattacgtcataaattctgtgtgtctgacttggtcgattttagcaaagaaaattcgtttcacagagttttatgggatcatgctattgatcctaaaattaaaggatttataaaattaaaaaaattaaaaaaaataaaaaaagtgattttgtgttcaggcaaaatatattttgacttaattgaagccagagaaaaattaaaaagaaatgatgttgttttttatagaatagagcaactttatccttttccagccaaagcccttgcaaatgaactaaaaccttatgctaaaactgcccaattttattggtgtcaggaagaaccaaaaaatatgggagcttggttttcagttagagattatatccaatggacattagataatattaaggctaataataaaaatgtttcttatattggaagaagtccagatgcatcacctgcaacggggtatgctaaaagacatatttcacaacagaaagaaattataaagaaagtttttgaataa

SEQ ID NO: 217199 - DNA, 861 bp, Unknown
  Bacterial polypeptide expressing nucleotide sequence isolated from the Sargasso Sea
ctcggttttaaatcaatatgaaaataatttaatgaaagaggggatattggatgctgaacaatcaaagaaaataaaatcaaattatagaaaatcattagagggtggtgagagtgtcgctaaaaatttagctaaaaaaccaaatgattctttatggtttgattgggaaccctatttgggtgtcaaatggtggccaaaggtcgatacaaaatatagcaagaaagaattaaaaaaattaggtaaagaaattatttcagtgcctaaagaatttaatatgggttctcaagcatcaaaaatatttgcagatcgacatgaaatgaatcaaggaaatattccaataaattgggggtatgcagaggttatggcctatgcaacattattaaaagatggctatccaataagacttaccggtcaagatgtcagaaggggtacattttcacataggcatgcttgtatatttgattctaaaacaggaatggggcatatatcgctttctgaactggcagaaaaaaataagacaagctttgatatatatgattctttgctttcggaagaagcggttttagggtttgaatatggatactctgctacatggccatcaggattaacaatttgggaagcgcagtttggtgattttgctaatggtgctcaagtagtcatcgatcaatttattgtatcagcacaacataaatgggagagattatctggactgattatgcttttacctcatggttatgaggggcaagggcctgagcatagcagcgcgagaatagagaggtttcttcaattatgtgcttcagaaaatattcaagtatgtgtaccaagctcacctaagcaaatttttcatcttcttagaagacaggc

SEQ ID NO: 217200 - DNA, 934 bp, Unknown
  Bacterial polypeptide expressing nucleotide sequence isolated from the Sargasso Sea
caagattcaaagagaggtactttcagtcatcgacactccgttctctatgatacagaaacacgcgaacgttatacaaaccttctcgatctcagtgaagatcaagcacaattctgcgtacacaattcccttttgtcggaagcagcagtcttaggatttgattttggttactcgctcgattacccccaaatgctgtgtatttgggaagctcaattcggtgactttgtcaacggtgctcaggttattatcgaccagtttatcacaagcagcgaatctaaatggggtcgactcagtggcattgttatgttgctgcctcatggctatgaaggacaaggtccagagcactcctcggcacgtttggagcgcttcctacaatcgtgtgctgataataatattcaggtctgtaacttaacaacacctgctcaattatttcatgttttgagaaggcaaatgaaacgggagtttaaaaagccattggtgataatgacgccaaagagtttattacgacataaagaatgcgtatcaaaagtatctgattttaccgaaggtcattttcataatatgatcgatgatgacagtgtgaataaaaatagaattaaaaaaatcatcctttgctctggtaaaatttattatgatttagaaagtcatagaaaaactcgaggctatgaacatattgctattgttcgagtcgaacaattttatcctttagatcgtgaattattttcatctatactcaaaagctatccagatgaagcagaaatcatatggtgccaagaagaacccaaaaatatgggtggctggacatttattctttcctatattttagagctaactggtaagatgccaaaatatgttggcagaaaatgctcggcaagtcctgcagtaggctccttagcgattcataaatatgaacagtctacattagttagtgaggctt

SEQ ID NO: 217201 - DNA, 823 bp, Unknown
  Bacterial polypeptide expressing nucleotide sequence isolated from the Sargasso Sea
gaaggctatccagtaagattagttggtcaagattctgggagaggcacatttagtcaaagacattcagttttaagaaatcaaatagataattcaagatatgttcctttaaataatatttcaaataaacaaaaaaaatttgaaatagttgatagttttttatctgaattagctgttttggggttcgagtacggttatagtttagtggaaccaaacacacttactttatgggaagcacaatttggtgattttgcaaatggtgcccaagtagttattgatcaatttattgcatctggtgagagaaaatggtcaagagcttcaggtctagtaatgcttttaccacatggatatgaaggtcaaggcccagaacattcatctgcaagattagaaagatttttacaattgtgttctaacgataatatgcaggttatgaactgcacaacaccagctaattattttcatgctttaagaagacaaatgcacagagattttagaaagcccttaataatcatgacaccaaaatctctattaagacataaacattgtatttcacagatagaagattttagtaaaaaaaattcatttcatagaattttatgggatcatgctatggatcctaaaactaaaggttttattgaattaaaaaaaccaaaaaaaattaaaaaagtgattctttgttcgggaaaaatatatttcgatttattggaagcaagagagaaaatgaaaagaaatgatgtagtattttataggattgagcagctttatccttttcctgccaaaacacttgttaaggaacttaagccatatgcaaaaaatgcatattttt

SEQ ID NO: 217202 - DNA, 800 bp, Unknown
  Bacterial polypeptide expressing nucleotide sequence isolated from the Sargasso Sea
ataattagtaaagaagaatttaataatatgaacactgaatttaaaaatcttcttgaagaacaatataaaacagcaaaaaattataaacctaaaattgaatggtatgaaggaacatggtccagatacaaaccagaaaaaggaaaagatagaagaggaaaaagtggagtagatttaaataaaattctgaaaatttcagaaaagattaattctattcctttaaaaataaatattcataaaacaatatctaaaattttggaatctagaagacagtcaattctaaaaaaaaaagatatagattggtcaacagcagagtctttagcgtttgctactcttcttgaagaagggtatccagtaagattagttggacaggactcaggaagaggtacatttagtcaaagacattcggtattaagaaatcaaatagacaattcaagatatatacctctaaataacatttcagataagcaaaaaaaatttgaaatagttgatagttttttatctgaactagcagtgctgggatttgaatatggttatagcttagtcgaaccaagcaccttaactatttgggaggcacaatttggagattttgcaaatggagctcaagtaattatagatcagtttattgcatcgggggaaagaaaatggtctagggccagtggtcttgtaatgcttttacctcatggatatgagggacagggaccagaacattcatcaggaaggctagaaagatttttacaactatgtgctcaagacaacctacaagtaatgaattgcaccacacctgcaaattattttcatgc

SEQ ID NO: 217203 - DNA, 880 bp, Unknown
  Bacterial polypeptide expressing nucleotide sequence isolated from the Sargasso Sea
gatgaagttaatatccataaaacaatttctaaaattttgcatgttaggaaaaattcagttgataaaggttttgatattgactggtctacagcagaagcacttgcttttggatctttacttgaagagggtttcccagtgagactggttggtcaagactctggtagaggaacatttagtcaaagacattcagtcctaagagatcagaatgataattcaagatatattccactaaataatatttcaaataaacaaaaaaaatttgaagttgttgacagttttttgtctgaactcgctgtgctgggttttgagtatggttatagtttagtagagcctaatacactgactttgtgggaagctcagtttggagattttgccaatggtgcacaagttgtaattgatcaatttatttcatcaggtgaaagaaagtggaatagagcctctggtttagtgatgctactaccacatggttatgaaggacaaggaccagaacattcttctgcgagactagaaagatttttacagttgtgctcaaatgataacatgcaagtattaaactgcacaacccctgctaattattttcatgctttaagaagacaaatgcatagagattttagaaagccattgataattatgacaccaaaatctttattaagaaataaattctgtgtttcgaatttaaaagactttaataaaaaaaatacatttcacagagtcttgtgggatcatgcaattgatccaaaatcaagtgggtttattaagcttaaagaaagttcaaagattaaaaaagtaattctatgttcaggaaaagtatattttgatcttttggatgcgagagaaaaacttaaaaaagatgatgttgtgatatttagaattgagcaac

SEQ ID NO: 217204 - DNA, 869 bp, Unknown
  Bacterial polypeptide expressing nucleotide sequence isolated from the Sargasso Sea
attgggaaaaaaaattactgaaataccaaaaaacttcaaaatgcataaaactttgatcaagttatttgaggctaagaaaaaaatatttacaggagaccagccagttgattggtcaacagcagagtcactggcttttgcaactcttgtaaacgaaggattttccgttagactttcaggccaagattctggtagaggaacttttagtcagagacattctgtattaagaaaccaagacaatcatgacagatatgttccgctaaatcatatatcaaaaaaacaaaaaagatttgaaatcatagatagtcttctttctgaactgggagttttaggttttgaatttggttattctttatcagaaccagaaacattagttttatgggaggcacaatttggtgatttttcaaatggagcgcaggttgttatcgatcaatttattgcatcaggagagtcaaaatggtctagagcaagcggtttagtgatgttgcttcctcatggatacgaaggtcaaggacctgagcattcatcagcaagacttgaaaggtttttacagttatgtgcacaagacaatttacaagttgtaaattgtacaaccccagcaaattattttcatgttttaagaagacagatgcatagagattttagaaaaccattaatagtgatgactcctaaatcactcctaagaaacaaaatgtgtgtatcaaatcttgatgattttacaaaaaaaaatagttttcatagaattttagaggaccacgcctatttaaatggaaccaaactaatcaaactaaaaaaagacaaagaaataaaaaaagtagctatatgttcagggaaaatttattttgatttaatcgaggcgagagaaagggcta

SEQ ID NO: 217205 - DNA, 697 bp, Unknown
  Bacterial polypeptide expressing nucleotide sequence isolated from the Sargasso Sea
tgcacaacataaatgggaaagattatcaggtcttgtaatgcttttgcctcatggatacgaaggccagggtcctgagcacagcagcgcaagaattgaaagatttttgcaattatgtgcatctgaaaatatacaagtttgtgtaccaagttctcctaaacaaatttttcatcttttaagacgacaagcaataagaaaaatgagaactccactggttgtaatatcaccaaaaagcctactcagaaatcctatggctgtctctaacttagacgaattaacaaacggaaattttgattgtgtaattgatgatgatataaaaaaaccagaggcggtaaaacgcttaattctttgttcaggtaaggttttttatgatcttattgaaaagaaaaaagaagaacaccgagaagatattgctgttgttagaatagaacaattgtacccatttccttatgatgaccttgaagaaatccttacaaagtatcaaaatgtacaagaatttatatggtgtcaagaagagcctttaaatcaaggtgcgtggtttagccatagacacagaattcaaagagttttagataggctaggtgatggtcttgaggttagtttggtaagcagaccagcagcagcagcacctgcagttggattaatgaagcttcatcttcaacaacaaaaggatttagttaatgaggcaattgataaatga

SEQ ID NO: 217206 - DNA, 647 bp, Unknown
  Bacterial polypeptide expressing nucleotide sequence isolated from the Sargasso Sea
tttctatcattagattcaattgcaaaggaaggaaaaacattagttgatatttatgattcattattatctgaggaagctgttcttggtttcgagtatggttactcggcaacttggccaagtgggcttgttatatgggaagctcagtttggtgattttgcgaatggagctcaggttgtaattgatcaatttatagttagtgctgaacataaatgggaaaggctttctggactagttatgctccttccgcatggatttgaaggaatgggacccgagcacagcagtgcaagattagagagatttttacagctatgtgctgcaaataacatacaagtttgtatgccaagctccccatcccaaattttccaccttcttagaaggcaggcaataaggaaaatgcgaagacctcttatcgttattactccaaagagtcttttaagattacctgaggcagcaagtgatttatctgaacttacaaatggaagttttaattgcatcattggagatgatcttccaacggaaaaaattaaaagagtagtactttgcagcggaaaggtttattacgatcttaagaaggttagagatgaaaaaggcatttcagatgtcgcattacttagacttgaacaactttatcctttcccatatttttg

SEQ ID NO: 217207 - DNA, 906 bp, Unknown
  Bacterial polypeptide expressing nucleotide sequence isolated from the Sargasso Sea
ccgagagcgatcccaagaggcggattatcgtaacgcccttgatgacggacgcgttgtttatcccccagcttatgatgctgacaagtcgcgctttttggttgattggaccccttaccttggcgcaaagtgggcggatcccgccgagacggctatcggccgcgaaagaatcatgcgtcttaatgagcgcctggttaccctcccagaaggatttgagccgcatcgtcgggtcaaacgactgcttgaagaccgaacccgaatggcccaaggggaaatcgcgatggactggggttttgccgaaaccatggcttatgcctctttgattgaggacgggtattctgtccggctatccggccaggactctggacgcggtaccttctcccacaggcatgcggtattaaagaatcaggcgcgtcgccagccctatgttccgcttcgcagcatcagcgacgatccatcaaaattcctggtgattgattctctcctgtcagaagaagccgtcctgggctttgaatatggttatgccaccacggaacccaggacactcgccatctgggaagcgcaattcggggatttcgccaatggcgctcaggtcgttattgaccagttcatcagcagcggagaagccaaatggcagcggttgtgcggcctgacactctttttgccccatgggatggagggtcagggtccggagcattcctccgcccggctcgagcggttcctgcaattgtgcggcgacaacaacatgcaggtctgcgtcccgactacccctgcccagttctttcacctgctgcggcggcaaatgatcagaccgctgcggcggccattggtcgtgatgaccccaaagagcctgctccgccaccgccattccgtctcttctcttaacgatctgacggaggggcattttca

SEQ ID NO: 217208 - DNA, 856 bp, Unknown
  Bacterial polypeptide expressing nucleotide sequence isolated from the Sargasso Sea
cgatgagccttcattcacacaaccactaatgtataaaaaaattaagtcacatcaaactagtttaagtatttatggcaaaaaactaattaacgagaatactattactattgaagaatttgaaaaacaaaaatcagattttaaaaacttgttagatcaacaatttcaaactgcaaaaaactataacccaaagattgagtggtttgagggaacttggtctagatacaaacctcaaaaaggaaaagatattagaggtgtcagcggttttgatacaaaagaattaattaaaatttctgaaaagatacataaaattgatgaaaaatataatattcacaaaacgataacaaaaatatttaacaatagacataaatcagttctagaaggaaaaaatatagactggtctacagctgaagtattagcgtttggttctcttttagcaaaaggtaatccaattagattggttggacaagatactgggagaggtacatttagtcagagacattcagttttaagaaatcaagttgataacaccagatatattcctttgaataatatatcgaagagtcaaagtcagtttgaagtcgttgatagtttattatcagaatttgcagttttaggttttgaatatggttatagtttagtagagccagaaactttagttttatgggaggcacagtttggagatttcgcaaatggagctcaagtaataattgatcaatttatagcctctggtgagagaaaatggtctagagcatcaggtttagttttacttttaccacacggatatgaaggtcaaggtcctgaacattcgtcagccagactagaaagattcttgcaattatgtgctaaagacaattta

SEQ ID NO: 217209 - DNA, 943 bp, Unknown
  Bacterial polypeptide expressing nucleotide sequence isolated from the Sargasso Sea
agtgcaaaagattataaacctaaaatagaatggtttgagggaacatggtcaagatataaacctgaaagaggtaaagataaaaggggcataacaggttttgacaaaaataaattaaaaataatttcagataaaataaatgatattccagatgaaaaaaatattcataagactatttctaagatatttaatgccagaaaagaaagtgtcgaaagaggtactggaatcgattggtcttcagcagaagctcttgcttttggatctttgctagaagagggatatccagttaggcttgtaggacaagactctggaagaggaacattcagtcaacgacattctgttttgagaaatcaaatagataattctaggtacattcctcttaataatatttctaaaaatcaaaagcaatttgaagtagtagatagttttttgtctgaacttgcagttttaggctttgaatatggttatagtctagtagagccaaacacacttactctttgggaagcacaattcggtgactttgctaatggagctcaagtagtaattgatcaatttattgcatctggtgagagaaaatggaatagagcatctggtatagtaatgttgttacctcacggatatgaaggacaaggaccagaacattcttcagcaagattagaaagatttttacaactttgttcaaacgataatatgcaagtaatgaactgcacaactccagcaaattattttcatgctttaagaagacaaatgcataggagtttcagaaagccactaatcataatgacaccgaaatcattattaagaaacaagtattgtgtttcaaatttagaagattttaacaaaaaaaatactttccatagagtgctgtgggatcacgctatagatcctaagtctaaaggatttataaaactaaaagaaagttctaaaataagaaaagtaattcttt

SEQ ID NO: 217210 - DNA, 694 bp, Unknown
  Bacterial polypeptide expressing nucleotide sequence isolated from the Sargasso Sea
gttgttacctcacggatatgaaggtcaaggtccagaacattcatcagcaagattagaaaggtttttacaattgtgttcaaatgataatatgcaagtcatgaattgtacgacacctgctaattatttccatgcacttagaagacagatgcatagagattttagaaaaccattaataataatgacaccaaaatcgctattacgtcataaatattgtgtttctaatttagaggattttagtaaaaaaaatacttttcatagagttttatgggatcatgctatagatccagatacaaaaagttttatcaaattaaaaaaagctaaagaaataacaaaagttattttatgttctggtaaagtttattttgacttattagaagcaagagaaaaattgaaagttgatgatatagttttatatagaattgaacaattatacccctttccagcaaaagctttagtcaaagaattaaaaccttatgctaaaaatgctacatttcattggtgtcaagaggaaccaaaaaatatgggagcttggttttctgttagagattatatccaatggacattagataatattaaggctaaatataattatatttcttatataggaagaagtccagatgcaactcctgctacaggatttgctaaaagacatatttctcaacaacaagaaattattaataaagtatttaattaa

SEQ ID NO: 217211 - DNA, 931 bp, Unknown
  Bacterial polypeptide expressing nucleotide sequence isolated from the Sargasso Sea
gagtggaaaggtttatcgagtgctaaaagaaaagaaatgctaaaaactttttctactaaggttgataagaacgtattagaaaaagttgctaaaaatatttttaagttagataaccctgatctctatttaaaaaaagtggttagattaatgaatgacagaaataacatgtttttcaaacatgataaaattgattgggcaatttctgaattacttgcatatggaacattattggatcaaaattataatattagaatctctggtcaagatgtggagagaggaacattttctcatcgacatgcaatactaaaaacagagaaaactgaaaaagagtttacaccattaaataatatttcaaaagatcaaggctcatttcaaatttataattcgtcgttatcggagtatggagtcatgggctttgagtatggttatgcgctggcatatcctaatactttaacagtttgggaagctcaatttggagattttagtaatggagctcaaattatgattgatcaatacctttcctcagctgaggataagtggaagcttcaaaatggacttgtattaatgcttccccatggatatgaaggtcagggtgctgagcattcatctgcaaggttggaaagatatttacaattatgcgctaaggataatatgtatgtggctaattgtacaacacccgcaaatttattccacatacttagaaggcaattggtaactaagtttagaaagcctttaatactattaactcccaaaagtttactaaggcatccaaaagtaatttcaaaaactagcgatttaattaatggagaatttttacctgtaattgatgacagcgataaacaaaaaaatgtaaaatctttagtcttttgtagtggtaaattttattatgatcttctgtattataaaagactaaataaaatttcaaatgtcg

SEQ ID NO: 217212 - DNA, 750 bp, Unknown
  Bacterial polypeptide expressing nucleotide sequence isolated from the Sargasso Sea
ttatatcgtcaggtgaaagaaaatggcagagagcctctggtttagttatgttattgcctcatggatatgaaggtcagggtcctgaacattcatctgcaagactagaaagatttttacagctgtgtgctaatgataatcttcaagtgatgaattgtacaacgccagctaattactttcatgctcttagaagacagatccatcgtgactttagaaaacctttagttttaatgacaccaaagtcacttttaagaaataaatattgtgtttcgagcattgaggatttcaataagcaaacttcatttcaccggattttatgggaccacgcattaaataaagattctaaaaattttataaaattgaaaaaaactgcagaaattaaaaaagttattctttgttctggaaaagtttattttgacttgttagctgccagagaaaaaataaaaagagatgatgtaattttgtttagaatagaacaattatacccttttcctgtaaaaagcttagtcaaggaacttaatccttatgcaaacaatgccaaattttattggtgccaagaagaaccaaaaaatatgggagcgtggttttcagtgagagattatattcaatggacattagaaactattaaagctaaaaataataatatttcttatattggaagaaatcctgatgcatctcccgcaactggctatgcgaaaaggcatatggtagaacaagaagaaattataaacaaagtttttgataatgagtgaa

SEQ ID NO: 217213 - DNA, 763 bp, Unknown
  Bacterial polypeptide expressing nucleotide sequence isolated from the Sargasso Sea
ttcggtaagactctctggtcaggattcagctagagggacctttagtcaaagacacgcagtattaagacaccaaaatagtcacgataggtatgtaccgttacataatatatcaaagaaacaaaaaagttttgaagttattgatagtttattgtctgagcttggcgttctaggttttgagtttggatattctctttccgagccggagaccctagttctttgggaagcacaatttggagatttttcaaatggtgcgcaagtagttatagatcaatttatctcatctggcgagtctaagtggtcaagagctagtggtcttgtgatgcttcttccacacggttatgaaggtcaaggaccagagcactcttcagcaagattagagaggtttttacaattatgtgcacaagaaaatttacaggttgtcaattgcacaactccagctaattatttccatgtccttagaagacaaatgagaagagattttagaaaacctttaatagttatgactcctaagtctttattgagacacaaaaaatgtatttcttatcttgaagattttacaaaaaaaacaagatttcatagaattttagaagaccacgcttatcttaaaaaaattaaactaataaaacttaaaacaaacaaacaaataaaaaaagttattatgtgctcaggtaaaatatattttgatctattagaggctagagaaaaaagtaaaaatgatgaaatagtttttattagaatagaacaactttatcctttccctgta

SEQ ID NO: 217214 - DNA, 934 bp, Unknown
  Bacterial polypeptide expressing nucleotide sequence isolated from the Sargasso Sea
aaaattaccgagataccgaaaaactttaatgttcacaagactttgttaaaaatttttgaaaccaaaagaaaaatatttatagataacaacccaattgattggtctacagcagaagcacttgcatttggaacgctcttaagcgatgggttctctgtaagactgtcaggtcaagattctggtagaggaactttcagtcaaagacattctgtattgagaaatcaagacaaccatgaaaggtatataccgttacagcatgtttcaaaaagacaaaaaaaatttgaagttatcgacagtctattatcagaattaggagtactaggttttgaatttggttattctctatctgagcctgagacattggtgctttgggaggcgcagtttggagattttgcaaacggtgcacaagttgtaattgatcagtttattgcttctggggaatctaaatggtcaagggcaagcggccttgttatgcttttgccgcatggttatgagggccagggtccagagcattcctctgcgcgactagaaagatttttacagttatgttctcaggaaaatttacaagtagtaaactgtacaacaccagcaaactattttcatgttcttagaagacaaatgcatagagatttcagaaaaccattaatagttatgacacctaaatcattattaaggcacaaaagatgtatttcaaatcttgaagattttacaaaaaaaaattcctttcacagaattttagaggaccatgcctatttaaagggcagtaaattaattgaattaaaacaagacaaaaaaataaaaaaagtggtcatgtgttcgggaaaaatttactttgatttgattgaggctagagaaaaagctggagatgataaagttgtttttataaggatagagcaaatatatccttttccagtcaaacagctcggaaagcaatgaa

SEQ ID NO: 217215 - DNA, 724 bp, Unknown
  Bacterial polypeptide expressing nucleotide sequence isolated from the Sargasso Sea
tgttactggagccgacatagacattcttttaaatatatcaaagaaaattaatattgttccatccgaatttaatattcataaaacaataggaaaaattttagaaactagacaaaacaaagtagatcaaggccatggtattgattgggcgacagcagaagcgctagcttttggtacattattggaagaaggttatccagttagattggtgggacaagattctggaagaggaacatttagtcaaagacattctgtgctgagaaaccaagtagataattctagatatattcctcttaatagaatttcgaaaaatcagaaaaattttgaagttgtggatagttttttgtctgaattagcagtactaggttttgaatatggttatagtttagttgaaccaaatacacttactatatgggaagctcagtttggagattttgcaaatggcgctcaagtaattattgatcagtttatagcatctggagaaagaaaatggaaaagagcatcaggattagtaatgttgttaccccatggttatgaaggacaaggacccgaacattcttcagcaagactagaaagatttttacaattatgtgcaaatgataatatgcaagttatgaattgtacaacgccagctaattattttcatgcactacgtagacaattacatcgtgattttagaaaacctttgataatgatgactccaaaatctttattaagaaataaatat

SEQ ID NO: 217216 - DNA, 705 bp, Unknown
  Bacterial polypeptide expressing nucleotide sequence isolated from the Sargasso Sea
aatccaataaattgggggtatgcagaggttatggcctatgcaacgttactaaaagatggctatccaataagacttacgggtcaagatgtcagaaggggtacattttcacataggcatgcttgtatatttgattctcaaactggaatggggcatatatcgctttctgaacttgcagaaaaaaataagacaagctttgatatatatgattctttgctttcagaggaagcggttttaggatttgaatatggatactctgctacatggccatcaggattaacaatttgggaagcgcaattcggtgattttgctaatggtgctcaagtagtcattgatcaatttatcgtatcagcacaacataaatgggagagattatcaggactaattatgcttttacctcatggttatgaggggcaaggacctgagcacagtagtgcgagaatagaaaggtttcttcaattatgtgcttcagaaaatattcaagtatgtgtgccaagctcacctaaacaaatttttcatcttctcagaagacaggctataagaaaaatgcgtacacctttaattgttatttcacctaaaagtcttttaagaaaccctcaggcagtttctacgcttgatgatttaagcgatggaagttttgagtgtgtaatcgatgatgaattagataataaaaatgatgtaaaaaagataattatgtgctctggaaaa

SEQ ID NO: 217217 - DNA, 829 bp, Unknown
  Bacterial polypeptide expressing nucleotide sequence isolated from the Sargasso Sea
aaagatttacttaatgaacaatacaaaagtgcaaaagattataaacctaaaatagaatggtttgagggaacatggtcaagatacaaacctgaaagaggtaaagataaaaggggtataacaggttatgacgaaaataaattaaaaattatttcagacaaaataaatgttattcctgaagaaaaaaatattcacaaaactatctctaaaatatttaatgctaaaaaagaaagcatcgaaaaaggtactggaatcgattggtcttcagcagaatctttagcatttggatctttgctagaagagggatatccagttaggcttgtaggacaagattctggaagaggaacatttagtcaacgacattctgtgttgagaaatcaaatagataattctagatacattcctcttaataatatttctaaaaatcaaaaacaatttgaagtagtagatagttttttatctgaattagctgtattggggtttgaatatggttatagtttggttgaaccaaataccttaactctttgggaagcacaattcggtgactttgctaatggagctcaagtagtaattgatcaatttattgcatctggtgagagaaaatggaatagagcatctggtatagtgatgctgttgcctcatggatatgaaggacaaggaccagaacattcatcagcaaggctagaaagatttttacaactatgctcaaacgataatatgcaagtaatgaactgcacaactccagcaaattattttcatgctttaagaagacaaatgcataggagtttcagaaagccattaatcataatgacaccaaaatcattattaagaa

SEQ ID NO: 217218 - DNA, 831 bp, Unknown
  Bacterial polypeptide expressing nucleotide sequence isolated from the Sargasso Sea
gatatgctctttctgaacccaccacattagtagtttgggaagctcaattcggagattttgttaatggagcccaagtaataatagatcagtttattgcatctggagaaagaaaatggtcgcgagctagtggtttggttatgttattgccccatggatatgaagggcaagggcccgagcattcttcggcaagattagaaagatttttgcaactttgtgctcaagaaaatattcaagttatgaattgtactaccccagcaaattacttccatgccttaagaagacaaatgcacagggagtttcgcaaacctttaataattatgactccaaaatccttattaagaaataaaagatgtgtttcaaatattgaagattttaccaaaaaaaattcattccatagagttcttcccgatcaatcagagattaaagaatacgatctcattgaattaaaaaaagataaaaaaataaaaaaggtagtaatatgttcaggaaaaatttactttgatcttttggaagctagagaaaaattaaaaaatgatagtgtatatcttgtgagaattgagcagttatatccatttcctgtaaaatcattagctgtccagctaaaaaggtttaggaaaaatgctaattttttttggtgccaagaggaacctcaaaatatgggcgcatggaacactacacgcaattatattgaatgggtattaaaccatatagactcagaaaatagggaagtaagatacattggaagaaaaccagctgcgtctccagctaccggatatataaaaaggcatattgaccaacagaagcaaatagtagaaaaggtacttaactagt

SEQ ID NO: 217219 - DNA, 946 bp, Unknown
  Bacterial polypeptide expressing nucleotide sequence isolated from the Sargasso Sea
aatgaaaaaagattttaaaaatcttcttgatgaacagtttaaaacagcaaaaaattataaacccaaactagattggtatgaaggagtttggagtagatttaaacccgaaaaaggtaaagataaaaggggaattaccggtgtttcatcagaaaaaataaaaaaaattggtgaaaaaattactaaaattcctgaaaattttgtagttcactcaactataaaaaaaatctttgaaaataaaaaaaaaatgctccatacgggtaaaggatttgattgggcaacagcagaacaactagcttttgcaacacttttagacgaagggtttccagttagactggctggccaagattctgggagaggtactttttctcaaagacattcagttttaagagatcaaactaataataaatattacactcctttaaacaatatatctcaaacgcaaaaacgttttgaggttattgatagcttgctttctgaatttgctgtattaggttttgaacacgggtatgcactttcagaaccaacatcacttgttgtctgggaagcacaatttggtgattttgcaaatggcgctcaagtaataattgatcaattcgttgcttctggagaaagaaaatggtctagagccagcggcttagttatgttgttgccccatggttatgagggacaaggacctgaacattcttcagctagattagaaagatttttacaattatgtgctcaagaaaatatccaagttatgaattgtactacaccagcaaattactttcatgctctaagaagacaaatgcatagagaatttcgaaaacccttaataattatgactccaaaatcgttattaagaaataaaagatgtgtatcaaatattgaagattttaccaaaaaaaattattttcatagagtgttgcctgaccatgcccaatttaaaaaatatggactttattga

SEQ ID NO: 217220 - DNA, 966 bp, Unknown
  Bacterial polypeptide expressing nucleotide sequence isolated from the Sargasso Sea
taatatttatgaaagacttaattctgctgagggtcttgcaaagtatttatctgcaaaatacccaggtatgaaaagattcggaattgatggagctgaagcattagtccctcttgttgaaagcgttattcaaaattgtggatcaatgggagctaaacaaatttgttttgggatggcgcacaggggaaggttaaaccttctagtaaatgttttgggtaaacttccatcagagttattctctgcttttgatgaagatactgaattggagggagcgtctacaggagatgtaaaatatcacctgggtttttcatctaactttgaaacacctggtggtgaagttcatgtctcactttttaataatccatcccatctagaaattgttgatcctgtcgtaattggctccgtgagagccagacaagatcgaattggagataaagatagatcacaagttgtaccaattcttcttcatggagacgcttctttttctggacaaggagttgttatggaatcacttcaaatgtctcaaacaaggggatttaatgttggaggaacgattcatattattgtaaacaatcaaattggtttcactacaagcaatatcaatgactcaagatcaacagattattcatctgatgtagcaaagattattcaagcccctgtaattcatgtgaacggtgatgatccggaaatggttgtaaatgcagcaaaaattgcttgtaagtatcgaaacaaatttaaaaaagatatcgttattgatttattctgttacagaagaagaggacataatgaagctgatgatccttcagctactcaacccttgatgtataacaaaatctcaaaacatccatctgttttaaatcagtatgaaacaaatttaatagatcatggaatattaacatctgatgagtcaaaaaaaattaaaaatgaatatagaaaatctcttgaaggtggagaaagtgttgcaaaaaa

SEQ ID NO: 217221 - DNA, 815 bp, Unknown
  Bacterial polypeptide expressing nucleotide sequence isolated from the Sargasso Sea
acaaggttatgggattgattgggctacagctgagtcattagctttcggatctttattagaagaaggatatccagtaagattagtgggtcaagattctggaagaggtacttttagccaaagacattctgtattaagaaatcaattagataactctagatatattccactcaacaatatttcacaaaatcagaaaaattatgagatcgtagatagctttttatcggaactagcagtgttaggttttgaatatggatatagtttagttgctccaaatactttaaccatatgggaagcacagtttggagattttgcaaatggtgcccaggtaattattgatcagtttatatcatctggtgaaagaaaatggaaaagagcatcaggattagtaatgttattgccccatggttatgaaggccaaggacctgaacattcttcagcaagattagaaagatttttacaattatgtgcaaatgataatttacaagttatgaactgcactacgccggcaaattattttcatgcacttcgtagacaattattgcgtgattttagaaaacctttgattatgatgacaccaaaatctttattaagaaataagtactgcaagtctaatctaagagattttagtaaagaaaattcatttcatagagtaatgtgggatcattccatggatcctaaaaataaaggattcataaaacttaaaaaaaattcggaaataaaaaaagtaattttgtgttcaggaaaattgtattttgatttattagaagctagagaaaaaattaaaaaagatgatataattattttcagaaattgaa

SEQ ID NO: 217222 - DNA, 803 bp, Unknown
  Bacterial polypeptide expressing nucleotide sequence isolated from the Sargasso Sea
gctcgaagatgggtgtatcgaggaagaacgactgaaagatatgacagatcgttatcgtagtcgaattgagaggggaaaaggtgtcgcacttagtttggttcatgaacctaactcagaattatttgtagattggcggccatatttgggtcacgactgggacgagccaggcgatacccgttttgacaagaaagaatttcaaacagttgcagacaagctgggtgatattccgaacgggttcgtactccatcggcaggttgaaaaaatagtggatgatcgccatcgcatggcggctggcgccaagccctccaactggggcatgggagaggtcatggcttatgctacgttgctgagtgagggccatgcggttcgcctgactggacaagatgtcggggtgggaaccttttcacatagacacgccatttttcataatcaaaaggatggttcccgagttattcccttaaagtcgataaatgagcaagcgcgatttgatgtctttgattctctattgtctgaagaagcggttttagcctttgaatatggatattcagcgactgcgccgaattctcttgtgatctgggaggctcaatttggagactttgcgaatggtgctcaggtagtcgttgatcagttcattagctctggagaaactaagtgggctaggttgagtggactgacacttctcttgccgcacggttacgaaggccaaggccctgagcattcatctgctcgactagagcgatacttacagatgtgtgctgaacataatatgcaaatctgtattccgtccacgcctgctcaagtct

SEQ ID NO: 217223 - DNA, 1003 bp, Unknown
  Bacterial polypeptide expressing nucleotide sequence isolated from the Sargasso Sea
tgacgaaccttcatttacccagccattgatgtataaaaaaattaaatcgcatccaagtgtttataagatatatggaagcaagctagtaaacgaaaattcaattacgcaagatcttttagatcaaaatgtaaaaggctttaaagatttattggatgaacaatataaaagtgcaaaagattataaacctaaaatagaatggtttgagggctcatggtctagatacaaacctgccaaaggcaaagataaaagaggtgtgagtggtttcgatgaatataaactcaaagaaatctcaaataaaattaataccatacctcctgaaattaatattcataaaacaatttctaaaattttaaatattagaaaaaattcagtagataaaggttttgatatcgattggtctacagcagaggcgctagcttttggctctttacttgaagagggttacccggtaaggctcgttggtcaggactctggtagaggaacattcagtcaaagacattcagttctaagagatcagattgacaattctaggtatattccattaaacaacatttcaaacaaccaaaaaaaatttgaagtcgtagatagttttctatctgaacttgctgtcttaggatttgaatatggctacagcttggtggaaccaaatacgttaactttgtgggaggctcaatttggagattttgctaacggtgcacaagttgtaattgatcaatttattgcatcgggcgagagaaaatggaatagagcttctggtttagtgatgttattaccccatgcttatgaaggacaagggccagaacactcttctgcaagattagaaagatttttgcaactttgctcaaatgataacatgcaagtattaaattgcactactcctgctaactattttcatgctttacgaagacaaatgcatagagattttagaaagccattaataattatgacaccaaaatctttattgagaaatagattttgtgtttcaaatttaaaaagattttaa

SEQ ID NO: 217224 - DNA, 955 bp, Unknown
  Bacterial polypeptide expressing nucleotide sequence isolated from the Sargasso Sea
agtttgttacagacgatttggacataatgagggagatgagccatcattcactcaaccattgatgtataaaaaaattagatcacatcaatcaacagcaaatatatatggatctaaacttattaatgaaaatttaatatctaaggaaggtttaaacgaccaaataaaaaattttaaagatcttttagatgaacaatttaagacagctaaagattatagtcctaaaattgaatggtttgagggagcatggtctagctataaacctaaaaaagggaaagacaaaagaggagttactggagcagataaaaaaacacttaaaaatatttcagataaaataaatgttgttccatctgaaataagtattcacaaaactattagcaaaatattgcaaattagaaaaaaatctgttgatgatggtgtaaatattgactggtctactgctgagtctttagcatttggttcattattagatgagggttttccagttcgatttgtaggacaagattctggaagaggaacattcagtcagagacattcagttttaagagaccaaactaataactctagatatattccattaaataatatttcaaaacatcaaaaaaaatttgaaattgttgatagttttttgtcggaacttgcggttttgggatttgaatatggatatagtttagtagagccaaatactcttactctttgggaagctcaatttggtgattttgccaatggtgcgcaagttataatcgatcaatttatctcctctggtgaaagaaaatggcaaagagcttcaggtttggtaatgttattacctcatggctatgaaggtcagggaccagaacattcttctgctagacttgaaagatttttacaattgtgcgcaaatgataatctccaagttatgaattgcacaactccagcaaattattttcacgctttacgtagacaaatacaccgtgga

SEQ ID NO: 217225 - DNA, 770 bp, Unknown
  Bacterial polypeptide expressing nucleotide sequence isolated from the Sargasso Sea
gcatgctgaaatgctttctctagcttcattagtaaaaaataatatttcaattagattttctggacaagactctcaaagaggcacttttagtcaaagaaatgcaataatctgggacagagaaggcaaaggtaatataaacctattagataaatttacagataaaaatatctatgctgatgtaattaattctccgctctccgaaatagcagccttagcttttgaatttggttatagcattatagaaaataaatctttagttatatgggaggctcaatttggagattttgtgaataacgcccaatccgttattgatgaatttattgtcagttcacaacctaaatggggacttgattcaaacttagttttattacttcctcatggctatgaaggaatgggtccaaaccattcaagcggatggattgaaagatttcttgagtctgcggataacaataatattgcaattgctaattgcaccacctcagcgcaatattttcatcttctaagagcccatacacaaatgcaaaaacaatctaatccgctaataatttttaccccaaaaagtttacttagacacccaatttcttctagttctgttaaagaacttacttcatcaaaatttaaaaatgtaattaaaaatagaaatgtaaaaaatgcaaataaaataatcattggttcaggaaaaattattgttgatattatgaatgatcctgactataaacaattgtctcccaaggcagaattactaagtatagaaatgctatacccatttc

SEQ ID NO: 217226 - DNA, 910 bp, Unknown
  Bacterial polypeptide expressing nucleotide sequence isolated from the Sargasso Sea
gaattgcaacagacttttagattaaagttcaatagagatgttgtcattgacttaatttgttatagaagattcggacataatgaaggtgatgaaccatcgtttactcagcctttaatgtataaaaaaataagatctcacccatcaacaattaaagtttatggaaaaaaattggtaaatgaaggatcaattacaaatgactatttaaacagctctattaaaaaatttaaagatctattagatgaccaatttaaaaatgcaaaaaactacaaaccaaagatagagtggttcgagggaacttggtcaaggtatagaccagagctaggaaaagacaaaagaggagttacaggctctaataccaaaaaattgaaaaatatttctgataagataaatacaattccagcagaaataaatattcataaaactattagaaaaattatagataatcgtaaacttacggtatctaaaggcaaaggtatagactggtctactgctgagtcattagcttttggatcattactagatgagggttacccagtaagacttgtgggtcaagactcaggaagaggaacatttagtcaaagacattcagttttaagaaatcaaatagataattcaagatatatccctctaaataatatttctaataaacaaaaaaattttgaaatagtagatagttttttatcagaattagctgttctaggatttgaatatggatatagtttggttgaaccaaatactctaactatttgggaggctcaatttggtgattttgctaatggtgcgcaggtagttattgatcaatttatagcttctggagaacgaaaatggtctagagcctcaggtttagtgatgttgctaccgcatggatacgagggtcaaggacctgaacattcatcagcaaggttagaaa

SEQ ID NO: 217227 - DNA, 795 bp, Unknown
  Bacterial polypeptide expressing nucleotide sequence isolated from the Sargasso Sea
cacaatttggagattttgcaaatggtgcacaggttgttattgatcaatttattgcatcaggagagtctaaatggtcaagagcaagtggtcttgtaatgcttttaccacatggttacgagggtcagggcccagaacattcctcggcaagattagaaagatttttacagctatgtgcgcaggaaaatttacaagttgtaaattgcacaacacctgccaactattttcatgcacttagaagacaaatgcgtagagatttcagaaaacctttagtagttatgacacctaaatctttgttaagacataaaaaatgcgtctcatatttagatgactttacaaaaaaaacaagattccatagaattttggaggaccatgcttatcttgtaggaagcaagcttattaaattaaaaaaagataaaaaaatcaaaaaggttgttatgtgttcaggaaaaatttattttgatttaattgaagccagggaaaaaaataaagacgactcaactgtctttataagaatagaacagttgtatccatttcctgtaaaacatctggggagagaattaaagaaatatgagaatgcaaagtttttttggtgccaagaggaaccaatgaatatgggtgcatggaatactgtaaaatactatatcgaccgaacgctagaaatcattcgagtaaaaggcgaaaaagttaattttataggcagaaatgctgcggcatcaccagctactggaaacctcaacaaacatcttgcagaacaaaaaaaaatattagaaaaggttgtaggtaagtttaattaaa

SEQ ID NO: 217228 - DNA, 884 bp, Unknown
  Bacterial polypeptide expressing nucleotide sequence isolated from the Sargasso Sea
aataataattgaaacgggtaagaaaatatctgaaatcccaaataattttagcattcataaaactttaaaaaaaatattagagcaaaaacaaaaaatgttcactgagaatgccccaatagactggtcgacagcagagtctttagctttcgccacactattaatggacgggttttcggttaggttatcagggcaagactctgctagaggaacatttagtcaaagacattctgttctaagaaatcaagaaagtcatgaaagatatataccgctcaataacttaggaaaaaaacaaaaaaaattcgaaataatagatagtttgttatctgaattagcagttttaggatttgaattcggatattctctttctgaaccagaaacactagtcttgtgggaagctcagtttggagattttgctaatggtgcacaagtaataatagaccaatttataacgtcgagtgagtccaaatggggaagagctagtggtttagttttattattgccacacgggtacgaaggccaaggaccagaacattcatcagctagacttgaaagatttttacagatgtgtgctggtgaaaacatacaagttgtaaattgtacaactccagcaaactattttcatgctttgaggagacaaatgcacagagaatttagaaaacctttaatagtaatgacacccaagtcattattgagaaacaaaagatgtatttcatcgatagaagatttcacaaaaaaaaatagttttcatagagttctggaagatcatgcctatatcaaaggttcaaaaacaatagaacttaagaaagataaaaaaattgagaaggcagtaatgtgttctggtaaaatttactttgatttattagacgcgagagaaaagtcaaaaa

SEQ ID NO: 217229 - DNA, 790 bp, Unknown
  Bacterial polypeptide expressing nucleotide sequence isolated from the Sargasso Sea
gaagacgataggatctcatgatagcataagtaaaatttatgcatctaaacttataaatgaaggaattttaaccgatcaagaagctaaggatgaagttaataatcataatatatttcttgaaaaagaatttcaagcgggaacaaactataagcctaataaagccgactggttagagggccaatggtcaagtttaagagcagctcatggagatgatcgcagaggagagacatctgtatccaaagacgatttaaaattaattggaaatgcaatcactataattcctgaaaatcttcaagttaataaaaaattaataagaatagtagaggctagaaaaaaagctatacaaactggagagggtatagattggtctactgctgaacatcttgcttttggctctttattattagagggacatcccgtcagattatcaggacaggatagttgtagaggaactttttctcaaagacactctgtgttcattgatcaaatgtccgaagaaaggtatacacctttaaataatataacaccaggtcaacaaaactttgaggttattgattcacctttgtcggaagcctcggttttaggttttgagtatggttattccctaacggaaccaacagccttggttatgtgggaagcccaatttggagattttgccaatggtgcacaggttattgttgatcaatttatttcaagtggtgaagctaaatggttaagaatgtcagggcctcgtatgctacttccccatggctatgaaggtcaaggtccagaacattcatctgccagatag

SEQ ID NO: 217230 - DNA, 833 bp, Unknown
  Bacterial polypeptide expressing nucleotide sequence isolated from the Sargasso Sea
ttgttatcgaagatttggtcataatgaaggagacgaaccttcattcacgcagccaatgatgtataaaaaaatcagacaacacccaacaacccttaatgtttatggtgaaaaacttataaaagaaggaacaattacaactgaagaatttaataaaaataaaaaagaatttaaaaatcttcttaacgagcaattaaaaactgctaaagaatataagccaaaaatcgagtggttcgaaggagtttggtcaagatttaaaccacaaaaaggtaaagatcaaagaggagttacaggtgtaactatagacataattaataaaattggaaaaagaattacttatattcctaaagattttaatgttcatccaaccataaaaaaaatttttgaaaataaaaagaaaatgttcgaaactggaaaaggatttgactgggctactgcagaacaattagcgtttgcaactttattagaagagggtacccccgtaagactttcaggacaagattctggcagaggaactttcagtcaaaggcattccgtgctacgcgaccaaaaagataacaactactatactccattgaataatatttcaaataaacaaaaaaaaatagaagtgatcgatagtttgctttcagagtacgctgtattaggttttgagcatggatatgctctttctgaaccaacaacattagtagtatgggaagctcaatttggagattttgcaaatggcgcacaagttataatagatcaatttataactactagtgaaagaaaatggtcaagagcgagtggcttgacaatgctattaccgcatggttatgaaggacaaggcccagagc

SEQ ID NO: 217231 - DNA, 808 bp, Unknown
  Bacterial polypeptide expressing nucleotide sequence isolated from the Sargasso Sea
gcagaaataaatgttcataaaacaattacaaaaattatggatttaagaaaacagtctatagtatcaaaaaaaggcattgattggtcgacagctgaatctttagcatttggtacacttcttgaagaaggttttccagttagattagtaggacaagacacaggacgaggaacgtttagtcaaagacattctgtattacgtaaccagatagataattcaagatatatcccattaaataatatcaaaaaaaatcaaaaaaaatttgaagttgttgatagttttttatctgaacttgcagtgttaggatttgagtatggctatagtttagtagagcctagcactttaactatttgggaagcgcagtttggagattttgcaaatggtgcacaagtaattattgaccaatttatttcttctggagaaagaaaatggtcaagggccagtggtttagttatgcttttaccacatggttatgaaggtcaaggtccagaacattcttctggcagattagagagattccttcaaatgtgtgctcaagataatttacaagttattaattgtactacaccagcaaattattttcatgcattgagacgccaaattcacagagatttcagaaaaccattgattattatgactcctaagtctttgttgagaaataaactttgtgtttcaaatttagaagattttagtaaaaaaaattcttttcatagagttctttgggatcatgctattgatccaaaagaaagtaaatttataaaacttgaaaaaaacagtaaaattaacaaagtgatattttgctcaggcaaaa

SEQ ID NO: 217232 - DNA, 848 bp, Unknown
  Bacterial polypeptide expressing nucleotide sequence isolated from the Sargasso Sea
aaaagattataaacctaaaatagaatggtttgagggaacatggtcaagatataaacctgaaagaggtaaagataaaaggggcataacaggttttgacgaaaataaattaaaaataatttcagataaaataaatgatattccggatgaaaaaaatattcataagactatttctaaaatatttaatgccagaaaagaaagtgtcgaaagaggtactggtatcgattggtcttcagcagaagctcttgcttttggatctttgctagaagagggatatccggttaggcttgtaggacaagactctggaagaggaacattcagtcaacgacattctgttttgagaaatcaaatagataattctaggtacattccccttaataatatttctaaaaatcaaaaacaatttgaagtagtagatagttttttgtctgaacttgcagttttaggctttgaatatggttatagtttagtagagccaaacacacttactctttgggaagcacaattcggtgactttgctaatggagctcaagtagtaattgatcaatttattgcatctggtgagagaaaatggaatagagcatctggtatagtaatgttgttacctcacggatatgaaggacaaggaccagaacattcttcagcaagattagaaagatttttacaactttgctcaaacgataatatgcaagtaatgaactgcacaactccagcaaattattttcatgctttaagaagacaaatgcataggagtttcagaaagccactaatcataatgacaccaaaatcattattaagaaacaagtattgtgtttcaaatttagaagattttaataaaaaaaatactttcc

SEQ ID NO: 217233 - DNA, 1231 bp, Unknown
  Bacterial polypeptide expressing nucleotide sequence isolated from the Sargasso Sea
tccctcccatttagaggctgttaacccagttgttttaggacagacaagagctaaacaatttttccataaagaccgtcaaagaaataaagttatacctattcttattcatggggatgcagcttttgcaggtcaaggagttgtagctgaatgttttgcaatgtctggattaccaggacacaacactggaggaacaattcatattattgttaataatcagataggatttactactagtccaagatttgcaaggtcttcaccttatccatctgatgttgcgaaaatggtagaagcaccaattctccatgttaatggagatgatccagaagcagttgtttatgcgaccagaatagcatcagaatttcgaataaaatttaatagagatgtagtagtagacttaatctgttatagaagatttggacataacgagggagatgagccttcatttacccaacctttaatgtataaaaaaattagatctcatccaagtgtttacaaaatttatggtaataaattagtaaacgaaaaatctataactcaagaattactaaatcaaaatgttaaatcatttaaagatttgcttgacgaacaatataaaagtgcaaaaaattataaacctaaaatagaatggttcgagggatcatggtcaagatataagcctgaaagaggtaaagataaaaggggcgtaacaggttatgacgaaaataaattaaaaataatttcagacaaaataaatgttattccagaggaaaaaaatattcacaagactatctctaaaatatttaacgccagaaaagaaagtatcaaaaaaggcactggaattgactggtcttcagcagaggctctagcgtttggatctttgttggaagagggatatccagttagacttgtagggcaagactctggaagagggacattcagtcaacgacattctgtgttgagaaatcaaatagataactctaggtacattcctcttaataatatttcagataatcaaaatcaatttgaagtagtagatagttttttatctgaacttgcagttttgggctttgaatatggctatagtctagtagagcctaatacccttactctgtgggaagcacaatttggtgactttgcaaatggtgctcaagtagtaattgaccaatttattgcatccggtgagagaaaatggaatagagcatctggtatagtaatgttattacctcatggatatgaaggacagggaccagag

SEQ ID NO: 217234 - DNA, 847 bp, Unknown
  Bacterial polypeptide expressing nucleotide sequence isolated from the Sargasso Sea
catgggattcgaatatggatttgcaacagctgaacccaatgcattggtaatgtgggaagcgcaatttggtgattttgcaaatggcgcccaagtagtaattgaccaatttataagttctggtgaatccaaatggttaaggatgaacggattagtattacttttacctcatggttttgaaggtcaaggccctgagcattcttctgctagattagagagatacttgcagctatgtgctgaggacaatatgcaagtcataaattgcacaacaccagctaattacttccatgcattgagaagacagttaaatagagactttagaaaaccacttattgtaatgacaccaaagtctttgttaagacataaggaatgtgtttcaaacttgtcggagatggcagaaaacacaagctttcatagagtcttatatgagaatgacttgaaaattgatgaaaaaagcatagaaagagtagtaatttgttcaggaaaagttttttatgatttaaaagaagagaaaaagttaaataaaatcaataatgttaagatactgagattagagcaactatatccatttcccaaaaaagctctaacagaaattttatctttaactccaaaagttgatcttgtatggtgtcaggaagaaccaaagaatatgggaagttggttttttgtcaaagaacatttagaagaaattgcttgtgatctatcacttccaaaaacagatattttatatgcaggaagagcagaagcagcctctccagctactggttctgcaagtagacataaaacagagcaaaaaaacctgattgagaaagctttaataaaagataggaattttgtcgcagcagaataa

SEQ ID NO: 217235 - DNA, 958 bp, Unknown
  Bacterial polypeptide expressing nucleotide sequence isolated from the Sargasso Sea
tcttagacattttcaagaaaagcaaggatattttgaaattgtagatagttttttatcggaacttggtgtgctaggttttgagtatggttattcacaagctgatccaaaaacattagtaatatgggaggctcaatttggagattttgcaaatggagcacaggttatgattgatcaattcattacaagtggtgaaagaaaatggttacgtatgtctggaataacacttttgttacctcatggtcatgaaggccaaggtcctgagcacacaagtgcaagaattgaaagatttttgcaaatgtgtgcggaagataatattcaagttgttaattgtaccagtccagcaaattacttccatgtattgcgtcgtcaattacatcgtaattttagaaaaccacttgttgtactaactccaaagtctacactacgtcataaaaaaaatgtatcacctgtttctcattttataaatggctccagttttcatcgtattttaactgaaaaattatctatagaagaaaaaaaatcaaaaaaaagattaataatttgtacaggtaaaatttattttgaattaatagaacaaattgaaaaacttaaattggaagcaatatcaataattagattagaacaaatttatccgtttccatacgagaatttcaaagaagaattacaaaattttcaaaatgctgaaataatatggtgccaggaagagccaaaaaacatgggtgcttggggctttgtaagaagtcgtataaaaaatgttatgaatgatgcagcaataaaacaaagtgaaatatattatgttggaaggagcccttctgctcctccagctacaggaatatcagatagacatcaaataaatcaaaaaagcatattaagactagctttagaagctaatataaaggaaattagtgaagcatgggctggagtatcacaaataaggggcaaactcccaattgaataa

SEQ ID NO: 217236 - DNA, 2281 bp, Unknown
  Bacterial polypeptide expressing nucleotide sequence isolated from the Sargasso Sea
atgcagcggatgctgcgtagttcacatttgggtggacaaaatgctgcctacatagaagccctctatgaggaatacttggcagatccgagcaacgttcctgaggtgtggcgcagctactttgatacgttgcccaccgtcgaaagcgccattggtcctgacactccgcgctctcaagtagttcagcattttgagcgcttgggccgtaatcggctcaaggcacggccagaaaaagtggcgacggaaatctccagcgtccacgaaactcagcaaatgcgggtgcaagaccttgtctctgcctaccgtcaccgtggtcacaaacgcgccaacattgacccgctgggtatgatggaacgcccccacatgcccgtgctcgacttgtcgtaccacagtctgtcacccgcaaacctagatgaaacctaccagaccggtacattccactacggcgatggtgccgccaagctgcgcgagctcattgatgcgctggaaagcacctactgcggctccataggcgctgaatacatgcacattgtggatgctcgtgagcaactgtgggtgcagcagcgactcgagagcgcgcgaggcaagccacaatttgatgcagacctaaagcagcgcattctggagcggctgatcgcagccgaaggcctagagaagtatctgcatcgtcgctacccgggtaccaaaaggttcggcctagaaggcggtgaaagcctcatacccatgctgcatgagctgtttcagcgcttaggcactcacggtattcgcgagtctgtgatcgccatggcacaccgaggccgactgaacgttttggtcaatgtgctgggcaaaaaccccggcgatttgtttgatgagttcgatggccgcgtgctcagcgaaagtggttctggcgacgtgaagtatcaccagggattctcatccaacatgatgacgccgggtggcgaaatgcacttggcgttgtcgtttaacccgtcgcaccttgagatcgtcgcaccagtagctgaaggatcagtgcgcgcccgacaggatcgtcgcaaagactacgctggggacatggtggcgcccatcatcattcacggtgacgccgcctttgctggccagggcgtggtcatggaaacgttccagatgtcacaaacccgcggttttaaaaccggtggcagcgtgcacattatcgtcaacaatcagattggttttaccacgcacaagcaaatcgatgcgcgctctaccgagtactgcacagaagtggccaagatgatccaagcgcccatcttccatgtaaacggcgatgaccccgaagccgtgatttttgcgacccaacttgccgcagactatcgcatcgagttccgcaaggacgtggtgatcgaccttgtgtgttatcgccgacgcggccacaacgaggccgaagaacccgcgaaaacacagccgctgatgtatcagaagatacgcacgcaaaataccgtctgcgcgcgctacggcgaaaaaatggtgcaagaaggctcggtacaggcagagaccgtcgagtccatgactgagcaatatcgctcacgcttggaaggtggcgagagtgtggccttggaaatggtgcacgaaccccattcggagctatttgtggattggaccccctatattgggtcaagcctagatgctcctgcagacaccagtttcgataatgcggcattccaagaactttctgcgcgtatggaagctgttccagacggctttgtgctgcatcgtcaggtgacaaaaattcttgaagaccggcatcgtatggcggctggagcgatgctcgtgaactggggcatggcagaggtcatggcctatgccacattggttcagcaaggctttccggtgcgactcaccggccaagacgttggcgtcggcacgttctcgcatcgtcacgccgctctgcacaatcaaaaggacggctcacggctgatcccgctcaacttgctgcgcgaagacatcaccttcgatctgtacgattccttgctgtctgaagaggcggtgctagcctttgagtacggttatgcaaccacagcacccaataccctggtggtgtgggaagcgcagtttggcgatttcgctaacggcgcccaggtagtgatcgatcagttcattagctctggcgagactaagtgggcgcggctgtgcggactcaccatgctattacctcacggttttgaaggggcaggccccgagcattcttcggctcgactcgagcgttttttgcagctgtgcgcagagcgcaacatgcaaatttgtgtgccatcgacgccagcgcagg

SEQ ID NO: 217237 - DNA, 2851 bp, Unknown
  Bacterial polypeptide expressing nucleotide sequence isolated from the Sargasso Sea
atgagatcttataattcatttctcacaactaataatgcccctcaagtaatagcgatatatagagattatataaaagacccaagtcttgttgataagagctggcatgaattctttaaagctctcgctcctgaggaaatctctattctagctgactatcaaaaaataaattggtcagagacctcaagagacattgattttaatcagatttcccttgatcaggcaattactgactctcttcgacttgttatgatgataagagcttacagggagatagggcaccttatagctgatcttgaccctttaggtttaatggcaaagaacaatccatcaggtttagatcccgagtattacggttttcaaaaaaaagattatgatcgaaaaatttttctatttggatatttaggatttcagaaagctactgtacgtgaagtttttgaaaaacttcaaagcatctattctggcacattggcaattgaatacaaacatattcagtccgctgaagaatacaaatggctgaaggatagaatagaagaaaaaaaagacatgcaattaacctccaaaggtaaaaggacaatcttggagagattaataacagcagaatattttgaaaagtttctagatacaaagtacagaggtaccaaaagatttggacttgaaggagctgagtctacaataccagcgcttgaacagattttaaaaagatcctcagaatacggcgtagaagacttttccttcgcatgcgcccacagaggaagactaaatatactagctaacatagtaaaaaaacctcatgttcaaatttttggagagtttatccatggaggcgagaatgccctcagtgatcagggctctggtgatgtcaaatatcatttaggtgcaagctctgatagaagttttggaggtaagattattcatgtgagtatggcagctaatccctctcacttagaagcggtaaatccagttgtagccggcaaaataagagctaaacaaacaatcattcaagacaaaaataatacgaaagtttcaggtctactaattcatggagacgcagcaattgcaggacaaggtattgttgctgaaacctttactatgtcacaattaaatggctacagaattggtggactaattcactttattattaataatcaaattggatttacaactagtcctcaatatagccgatctgcgccttactcttcagagataggaaaaattgttcaatccccaatatttcatgtaaatggagatgacccagaggctgttgttttagcctcaagagctgcaacagaatttagaaacacattcaaaaaagatacacttgtcgatatgttttgttacagaaaacatggacataacgagggtgacgagccctctttcactcaaccattgatgtatcaaactataaaaaagaaaaaaacagttgctagtatttatgcagataaacttataagccaagaagtagtaaatacaaaacaggtagacttcatcaaagacagaatatggtctgatctcgagaagaaatttgaaaaagcaaaaaactataaattaaaaacaaaatcttggatgggtggacaatggagtggattaagtcttgcaccaaaagatccacttagaagaggtagaacagctgagtcagaaaaatccttaaaggaaattggcacaaaaatttcacaaatacctaaaggatttaatcttcatccgaaattagaaaaatttaataaatctcgattaacttcaataaaatcaggaaagaatattgactggtcttttgctgaggctttagcatttggagcattgttaaaggaaggatatagagtgagacttgcaggtcaagattctggaaggggaactttcagtcagagacactcagttttttatgatcaaaaatcagaagagagatatattccactcaatcacattgctaaaaatcaaaaacagtttgaagtaattgatagttttctctctgaattaggtgtcctaggttttgaatatgggtactcattagcagacccaaatactttggttttatgggaggcccaatttggagattttgccaacggtgcccaaattattattgaccagtttattgcttcaagtgagagaaaatggatgcaaatgagtggattagtcatgttattacctcatggtcatgagggtatgggtcctgaacactccagtgcaagaatagaaagatttcttcaaatggcagcagaagataacgttcaaattgtaaactgcaccactcctgcgagctactttcatgctttgagaaggcaaatacatagaaattttagaaaaccactaatagtatttacccctaaatccacactgcgccacccaaataatgtatcatctattagtgaatttactggacgctcatcttttcatcgccttattgaagatgaaatcaaaaacccaaaaaggataattttctgctctggaaaaatattttatgaattagatgattttagaacaaagaataatattaaagatgtaaaaatagttcgtattgagcaaatttatccatttccatttgatgccataggagatgttatattaaaacataaagaaagtgagattttatgggttcaagaggagccaaaaaatatgggagcatggagttttgttaaaagtcgtattagacatgttttagtaaaaaataatttaaccaaaaaagttcattatgttggaagacgctctgcagcagcccctgctacaggcatatcaaaaagacatagtactaatcagcaactaataaaagaattagctcttaaatcatcactaaaacgtgttataaaagaaagaagaggtgtcagttttatgaaatttaaaaatttaccgaaagagtaat

SEQ ID NO: 217238 - DNA, 2758 bp, Unknown
  Bacterial polypeptide expressing nucleotide sequence isolated from the Sargasso Sea
tatggataagttctcttttctcaattcagctcatacgagtcattttgcagaaatgtatgatcaatatttgcaatctccggatagtttagagccaagttggaaagctttttttcaagggtttgattttggaatggagacatcaagtgtcacatttgaagaaaagaaatttcaagttcctgagaatataaagaaggagtttcaagttgttaatttaattgatgcatatagaaaaagaggtcatctatttacaattacaaatccagttagagaaagaagaaaatattctccaactcttgctatagaaaattttggtcttaatgaaacagacttggaattagtttttagtgcaggagaaattgtaggcctaggaccagataaattaaaaaatataattaaacacctaaatgatatctattgttcatcaataggtgtagaatatatgtatataagagatcctaacagagttaaatggatacaaaacagattaaatattaatgcaaatcatccaaatttttcaaaaactcagaaactaagtattcttaacaaactaagtcaagcatatctgtttgagaattttttacagaagaaatatgttgggcaaaaaagattttctttagaagggggggaatcattgattccagcaattgactttttgatccaattagcagctgataaaggagtatcagaagttgttatgggaatgtcacacaggggtaggcttaatacattagctaacattttcgaaaagtcgacaaacgaaatatttgcagagtttgaagggaaagattatgaggaagatatttttgatggagatgtaaaataccacttaggttggacttccgaaagaatcagtgataaaggaaataagataaatttaaatttagctccaaacccttcacatttagagtcagtatttcctattgttcaaggaatctcaagagctaaaattgaaaatgatcttgataatgatccgaatagtttaatccctataattgttcatggtgatgcagctatagctgctcaaggggtagtttatgaggtggtgcaaatgtctaaacttaaaggttactcgacaggaggtacaatccatattatagtgaataatcagattggatttacaactaattatcttgatgggagatccagtacatactgttcagatattggaaaagttactttatctcctgtgcttcatgttaattctgatgatgttgaagcagttgtccatgcaatctcatttgcacttgattatagaatggaatatggtatggatatattcattgacctactaggttataggaaatatggccataatgaaggggatgaacctagatttactcaacctagattatataaactcatttcttctcatccaaatgcaagagctatttattcaaatgagctaattagtaaaggaatcattagtgaagaatatacagatggaattgaaaaagaatatttagaatccttagagagtgagctaattgaaacaaaaaagaaaagtaaaactaaaattactccattcatgcagaaggtttgggaagactataaaagagttgatgaaaaaatcatgagtaaggattttaagactaattattctaaaaagagacttcttgaagttgcaaaatctgtcactgatctcccagaaaattccggctttttaaaaaaaatatataagctttttgaaaacagaaaaaaaatgcttttcgatgagaataaagttgactgggcaatttcagaactcttagcatatgccacaattttgtctgatggttttaatgttagaatttctggtcaagacgttgagagaggtacattttctcatagacatgcagtgttaaaatcagaagattttgaagaggaatatttacccttaaattctatagacactaaaaataaagggaagtttaaaatatttaattcacttttatcagaatatggtgttctaggatttgattatggttatgctctagctagtccaaaatcattaacaatatgggaagcacaatttggggatttctcaaatggagctcaaatagtcatcgatcaatatatttcatctgcagaggataaatggaaacttcaaaatgggatagtattatatttacctcatggatatgaaggccaaggagcagagcattcatctgcaagaattgaaaggtaccttcagttatgcgctaaggataatatgtatgcagctaactgcacaacaccttcaaatttatttcacattttaagaaggcaaatggttactaattttagaaaaccacttatattattcactccaaaaagtttacttaggcatcctgaagttgtttctgatatagatgacttaattactggtaaatttgaaacagttatatcagataatgacgttaatccaaaagatgtttcttctatagtattttgttcaggaaaattttattatgatttgctaaaatttagaagagaaaaaaagatcaaaaatgttgcccttattcgattagaacaactttttcctttaccaattcaagaaatcgatttagaattaaataagttttcaaaagcaactgattttgtatgggctcaagaagagccaagaaatatgggtgtttggagtcattttttaatgcattatcctcatgctaataaatttagacctgctactcgtaggccctatggttcaactgcatcaggaagccatgctaggtttgaaagaagacataatcaggttattgaatatgtttttgataaacaaaaagataacttcagaaaataa

SEQ ID NO: 217239 - DNA, 1711 bp, Unknown
  Bacterial polypeptide expressing nucleotide sequence isolated from the Sargasso Sea
tgaatttgagggaaaagattatgaagagaaaatctttgacggagatgtaaaataccaccttggatggactagtcaaagggtaactgataacaataaacaaataaatctgaatattgccccgaatccatcgcacctagaaactgttggctctgttgttcaaggaatctcaagatcaaaactcgacaagtacttcaataatgattctgacaaggtgctaccaattattgtacacggtgatgcagcaattgcagggcaaggattggtttatgaattagttcaaatggccaggttggaaggatatgaaacaggtggtacaattcatattgttgtaaataatcaaattggttttacgactaattacttagacggcaggtcaagcacctattgtactgatgttggaaaagttactctttcacccgttcttcatgttaacgcagatgatgttgaggcggttgttcatgctgtgttattcgcattagactttagacttgagtttaaaagagatgtatttattgacctattaggatatagaaaatacggacataatgaaggggatgaaccaagatttactcagcctaagttatataagctgatttcaaaacacccaaatcctaaaaatatttatgcttctaaactgatagctgagtcattaatgtctgaagaagaagttaaaaatattgaattagaatataggtctaaacttgaaaatcaattagaggattcaaaaaagagtgagaaaacaagaataactgatttcatgagtgatgaatggactgattatgaaagagttaataatctacagatgaattggggagacataatggttaagccggttgacaccacttatccaagacttaaacttgataaaatagcagaggtgatctctaacttaccctcagataaaaaatttatcaataaaataaaaaaacttgtgaataatagacaagtaatgtacgataatgacatgcttgattggtcaatggcagagcatttagcatatggcagtttacttgaggagggttacagcgtaaggatttcaggtcaagatgttgaaagaggaaccttttctcacagacatgcaatagtcaaggttgaggaaagtgaagaagagatttcacttttaaataatataaacgataaacagggtaagtttacaatttataactccctattgtctgaatatggagttcttggttttgaatatggatatgcaatggcagacccaaagtctttaacaatatgggaagcccaatttggtgattttagtaatggagctcaaattattattgatcaatacctattctccggtgaggctaaatggaaaacccaaaacggcttagttttatttttgcctcatggttatgaaggtcaaggggcagagcactcctctgcccgaatggaaaggtatttacagctttgtgcaaaggataatgtctttgtagcaaattgtacaacaccagcaaatatgtttcatattttgagaagacaattaaaagcaaattatagaaaaccactcattatttttacacctaaaagtttgttaagacacccaaaggttcactcaactgttaatgaatttgtcaacggagaatttaacttattaattgatgatgatatagttgactctgaaaatgtaaaaagcttggtttttgttacaggtaaattctattatgatattttagaagaaaagggaaacacttggaagaaatga

SEQ ID NO: 217240 - DNA, 1487 bp, Unknown
  Bacterial polypeptide expressing nucleotide sequence isolated from the Sargasso Sea
tacagacatgaatttaaaaaaagatattattttagattttgtttgctatagacgcagaggtcataatgaaactgatgagccatttgctactcagcctttaatgtataaggaaattacctccaaagattctgttacagatttatatttcaaaaaattattaagcaatggaatagttgaagaagataaatataaagaattcaagaaaaattacagatcacatatggaaaaaggtgaaactgtatcagaatcacttgctacagatcctgatgaatcaatccattttgattggactccatatattgaaccagacatgaccaaatcttacccaacagcagtttctaatgaatctttaaaagaaacaatgaaaaccgttcttgcatttgataaagattttttaatgcagaaacaagttggaaagctgtatgaggaaagaaatcacatgctttctggagaccttcccttaaattggggatttgctgaaatggctgcatacgcaacattattaaaagatggtttccctgtgagagttactgggcaagatagcagaagagggactttttcccatagacatttagtagttaaagatcagaatactggagagggttttgtaccattatcaaaactaaataaaggaaataagaaattcgaaatttttgactcattgttgtctgaggaagctgttttgggttttgaatatggttatgcatctacctggcctgagggattagttatttgggaggcacaatttggagattttgttaatgttgctcaggtaataatagatcaatttattgttagtgcagagactaagtggaataggctatctggcttaactttatttctacctcatggatatgaaggccaaggcccagaacacagtagttgtaggcttgaaagatttttacaactttgcgcacatgataatattcaaatatgtattccaactttacctgcacaaatttttcatttacttagaaaacaggcaattaatccatccagaaagcccctggtagttttaactcctaaaagcctattaagaaatcctcaagcaacttcaaagatcgaggatttaagcaacggtacttttagaaatataatcattaacaagagtaagaatttaccaaaaagagtagttttttgctctggtaaagtgttctttgatttacaagatgaaatcaataaattgaaggtcaaaaatattgagctggttaggttggagcaattatatccatttccagaaagcgaacttaaaagttatacaagagatttaaaatgtaaagatttcctctgggttcaagaagagccaaaaaatatgggggcttggtttatgataagacacagacttgaggaaatcctaaatgaaacaaaaaaaggatttaaactcaatgttgtagcacgaaattcatcagcagccccagcaggaggatatcaaaaatatcactttaaacgtcaaaaagagatagttactaaagctttagagttataga

SEQ ID NO: 217241 - DNA, 1423 bp, Unknown
  Bacterial polypeptide expressing nucleotide sequence isolated from the Sargasso Sea
actactagtccaagatttgcgaggtcttcaccttatccatctgatgtgcaaaaaatggtagaggctccaattctccatgttaatggtgatgatccagaagcagttgtttatgcaactagaatagcaactgaatttcgattaaaatttaatagagacgttgtagtagatttaatttgttatagaagatttggacataatgagggagatgagccttcatttactcaacctttaatgtataaaaaaattagatctcatcccagtgtttacaaaatttatggaaataaattagtaaacgagaaatctataactgaaggattattaaatcaaaatgttaaatcatttaaagatttactcgacgaacaatacaaaagtgcaaaagattataaacctaaaatagaatggtttgagggaacatggtcaagatataaacctgaaagaggtaaagataagaggggtataacaggttttgatgaaaataaattaaaaataatttcaggtaaaataaatggtattcctgaggaaaaaaatattcacaagactatctctaaaatatttaatgccagaaaagaaagtatcgaaaaaggtactggaatcgattggtcttcagctgaatctttagcttttggatctttgctagaagagggatatccagttaggcttgtaggacaagactctggaagaggaacattcagtcaacgacattctgttttaagaaatcaaatagataattctaggtacattcctcttaataatatttctaaaaatcaaaagcaatttgaagtagtagatagttttttatctgaacttgcggttttaggttttgaatatggttatagtctagtagagccaaacacacttactctttgggaagcacaattcggtgactttgctaatggagctcaagtagtaattgatcaatttattgcatctggtgagagaaaatggaatagagcatctggtatagtaatgttgttacctcacggatatgaaggacaaggaccagaacattcttcagcaaggttagaaagatttttacaactatgctcaaacgataatatgcaagtaatgaactgtacaactccagcaaattattttcatgctttaagaagacaaatgcataggagtttcagaaagccactaatcataatgacaccaaaatcattattaagaaataagtattgtgtttcaaatttagaagattttaacaaaaaaaatactttccatagagtattgtgggatcatgctattgatcctaagtctaaaggatttattaaactaaaagaaagttctaaaattagaaaagtaatactttgttctggaaaagtatattttgatttgttagacgccagagaaaagctcaaaagagatgatgtagtgatgtatagaattgaacaattatatccatttccagcaaaagctttgg

SEQ ID NO: 217242 - DNA, 705 bp, Unknown
  Bacterial polypeptide expressing nucleotide sequence isolated from the Sargasso Sea
ccggattggttttattattaccacatggatatgaaggccaaggccccgaacattcatccgcaagattagaaagatttttgcaattatgtgcaaaagataacttacaagtcatgaatgtgaccacacccgcaaattactttcatgctttaagaagacaaataacacgagattttagaaagccgctggtgataatgactcctaaatctcttttgagacataagcattgtgtttctaatttggaagatttcagcaaaaaaaattcttttcatagaattttatgggaccatgctcgcgataaaaaatatggttttataaaacttaaaagcgccaaagaaataaataaagtaattatatgttcaggaaaagtttatttcgatttacttgaagaaagagaaaaaaataaaagaaatgatgttttattgctaagagtagagcagttatatccatttcccgcaagatcattagctaaagagttaaaaccctatattaaaaatgcgaagttttattggtgtcaggaagaacctaaaaatatgggcgcatggtcttttgtaagagattatattgattggactttagaatatataaaagctaaaaataataaaatttcttatattggtagagaatttgcttcaacaccagcaacaggttatgctaaaagacatttggctcaacaaaaagaaattatagacgaggtgtttagataaa

SEQ ID NO: 217243 - DNA, 865 bp, Unknown
  Bacterial polypeptide expressing nucleotide sequence isolated from the Sargasso Sea
agaatttataattcattattatctgaatatggtgtactaggttatgattatggttattcaatggctagtcctaatgcactcacaatatgggaggcacagtttggagatttttcaaatggagcgcaaataatcattgaccaatacattacttctgcagaagataagtggaaattacaaaatggaatagttttattattacctcatggatatgaaggacaaggtgccgaacactcttcagcaagagttgagagatatttacaaatgtgtgcaaaagataatatgtttgtagtaaactgtacaacaccagcaaatttatttcatgtattgagaagacaattaaaagccaaatacagaaaacctctaattatcttttcacctaaaagtttgcttcgacatccagatgcagtctcaaaaattagtgattttactaattcaagttttaaaacaataattgatgattttgaagttgatataaacaatattaaaactgtagtattttgctctggaaaattttattatgatctcttaaaagagagaaaaataaagaaaagagaacatgatgttgctttaattagggttgaacaattattcccattgcctgaaaaagaaattaaaaacataatgataaaatacaaatcttcggatgattttgtatgggctcaagaggaaccaagaaatatgggggcttggagtcatttattattacatttacctgaagcaactaaaatgagagttgcaagtagaagaatgtatggtgctccagcagctggaagctccaccagatttaataaacgtcatcaagaagtaatagagtatgtttttgatagttcaaaggataatcaaaaaagaaaaaacaaaaattaaa

SEQ ID NO: 217244 - DNA, 1063 bp, Unknown
  Bacterial polypeptide expressing nucleotide sequence isolated from the Sargasso Sea
aatgcacgaaggtgtaatgaaggcgtggttagagtcttctcatttaggcggtggcaacatggcctatgtagatgaactctatgaatcctacttagctgaatcgaccagcgtcagtgatgaatggcgtgagttttttgccagtctgccaaaaattgacggcgtagaactcgaatcccgtcacagcgacattcgccagcaattcgctgaacttgccaaaaacaaacaccgtgaagtcattaaggtgaatgcaggtggttcagatcagcgtcaggtgaaagttctgcaattaatcaatgccttccgtttccgtggtcatcagcaggctaatctcgatccgctgaacctgtggaagcaacctcgcgtgcgtgatctggagttatcctttcacgacctgactcaggcagattttgataccgaatttaatgtcggctcttttgctggtggcgaaaccagtatgaagttaggcgacttgtataaagcactggaatccacctactgtggttctatcggtgctgagtatatgcatattgtttcgacggacgaaaaacgttggatccaacaacgtttagaaggccaacaggcttcacgtgcgctcggaaaagaagaaaaaaccaaactgttgcaaggcttagtggccgcagacggtctggaaaaatacctggcttctaaattcccgggcgccaagcgctttggtttagagggcggtgacgctatggtgccaatgctcaaagccatgatccatcgtgcaggcgagcagggcgcaaaagactgtattatcggtatggcgcaccgtggtcgtttaaatacgctgatcaacgtgctgggtaaaaacccgagcaaattgttcgacgaatttgctggtaaatacgaagtcgttggcgctggcgacgtgaaataccatatgggtttctcgtcagacttcgaaaccaaaggtggcaatgttcacctggcgctagcctttaacccgtcacacttagaaatagttaacccagtggttatgggctctgtacgtgcccgtttagaccgccgtggcagcactgacggtactttagcactgcctatc

SEQ ID NO: 217245 - DNA, 1387 bp, Unknown
  Bacterial polypeptide expressing nucleotide sequence isolated from the Sargasso Sea
ctgctggtaatgttcttggggaaatctccaaaagaactatttaacgaatttgaagaagattatgaattagagggcgctagcactggagatgtaaaatatcatcttggttcttcaaccaacatcttaactcctaatggagaggtgcacgtatcactagcaaataatccgtctcatcttgaaattgtcgatccagttgttctcggttcagttagaggaagacaagatagaattaaagatgagaataaagaattagttattcccattttaattcatggagatgcatctttttcggggcaaggggttgtaatggaaactcttcaaatgtctcaaactagaggttacggagttggaggtactgtccacgtcatagtcaataatcaaattggttttaccacttcaaatgaggaagattcacgatcaacgcaatatgcaactgatgttgcaaaaatgattgaagctccggttcttcatgtaaacggagatgatccagaaatggtagtttttgcagcaaaattagcatgtgaatatagatacaactttaaaaaagatattgttatagatatgttttgctatagacgaaggggccacaatgaagctgacgagccgtcttcaactcagcctatcatgtatcaaaaaattgctaagcaaatttctgtgaaaagtgcatatcaggaaaaactcatttcatcaggaattatcagtcaatctgagtgtgatgagttagaaaaaaattataggtcagcaatagaaaagggagattctgttgttcacaatcttgctacaaaaccaaatgagtcaatgtggtttgattggactccatatatggatcaaaaaggagatgttaaaattaagtcttcatttagtaagaaaagatttaaagatcttgctgatcaagtatttacgcctccaaaagatttcattttgcaaaagcaggtagataaaattttttctgacagacgccaaatggcagagggaaaaattcctgttaattggggctttgcagagaatatggcatatgcaaccttgctcgatcaaggctatccaataagattttctgggcaagatataagacgaggaacattttcgcatcgtcatgcagttgtgttaaatcaacaggatggaagaggctgcatacctttagtcgatattgcaaaaaatgctgatacaacatttgatgtatatgactcgcttttatctgaagaagctgttcttggctttgaatatggttattctgcaacgagtccaaaaggactggtaatgtgggaggctcaatttggtgacttcgttaatggagcacaagttgttattgatcaatttattgtttctgctgaacataaatgggaaagactctctggattagttatgttgcttccgccatggttatgaa

SEQ ID NO: 217246 - DNA, 2245 bp, Unknown
  Bacterial polypeptide expressing nucleotide sequence isolated from the Sargasso Sea
atgtcttcatcaaaaaatctcgacttcaaaaaaacttcatttttaaataaatctaatagtgcatttatagaagaaatgtatttaaagtttgtgaataaagacgttgatcttccagaaagttgggcaaattattttgagggaattggtgaagaattaaatgttatagcaaatgaaattaatggtccatcatggggaccaactaaaaaaaaaatcaatattgatgaattgcaaaaaaaaatagaagaacaggacaagagcaattttgataatgtaaaattcgatacttcagaaaaatttaattttcaattacttgctgactcaaataaagactcaattagcgctgtagctttaattagagcttataggctaagaggacatttattagcagatcttgatccattagaaatgagagagtctgaatatttagacgaactccatccagatttttatggttttaaaaaagaaaattacgacaagaagatttttcttaatggagtaattaaccgtaagtatgcaaatataagagaaatacttaaatttatgaaaaagacctattgtggaaaaataggttatgagtttatgcatatttcaaatccagatgaaagaatgtggtttagagatagaatagagcaagataaaaatgcacttcaatttactaaaaatggaaaagaggcaattttaaataaactagtacaggccgaaggatttgaaaaatttttagctacaaagtatgtaggtacaaaaagatttggtttggatggtggagaaagtttgatacctgctcttgaacaaattataaaaataggtggtcagaataatataaaagaggttaaaataggaatgtctcacagaggtagacttaatgttttagcaaacgttttacaaaagtcttacaagaaaatttttaatgaatttgcaggtgaatttagttcagacgctgaagacagtgctggagatgtgaaatatcaccttggggcatcttcagatagagagtttgatggaaattctgttcatgtaagtttgacggacaatccttctcacttagaagctgttaatccagttgtcttggggcagacaagagctaaacaattttttcacaaagaccgagagagaaataaagttatacctatcctcattcatggagatgcagcatttgcaggtcaaggtgttgtagccgaatgttttgcaatgtctggtttacctggacataatactggaggaactattcatattattgttaataatcagataggatttaccaccagtccaagatttgcaaggtcatcaccttatccatctgatgttgcaaaaatggtagaggcaccaattcttcatgttaatggagatgatccagaagcagttgtttacgcgactagaatagcaactgaatttagactaaaatttaacagagacgtcgtagtagatttaatctgctatagaaggtttggacataatgaaggagatgagccttcattcactcaacctttgatgtataaaaaaattagatcacacccaagtgtttataaaatttatggaaataaacttgtaagtgaaaattctataacacaggaattattaaaccaaaatgtcaaatcatttaaagatttgcttgatgagcaatataagagtgcaaaggattataaacctaagatagaatggtttgaaggaacatggtctagatataaacctgaaagaggaaaagataaaagaggcataacaggttatgaggaagataaattaaaatttatatcaaaaaaaataaatactattcctgaagaaaaaaatattcataaaactatcactaaaatatttaatactagaaaagaaaatattgagaaaggaactagaattgattggtcctcagcggaggctttagcatttggatctttgcttgacgaaggatatccagttagacttgtaggacaagactctggtagaggaacattcagtcaaaggcattctgtcctaagaaatcaaacaaataattcaagatatgttcctttaaataatatttcagatagtcaaaaacaatttgaaatagtagatagttttttgtctgaacttgcagttttgggatttgaatatggttacagtcttgtagagccaaacactcttactctttgggaggctcaattcggtgactttgcaaatggtgctcaagtagtgattgatcaatttattgcttcaggtgaaagaaaatggaatagagcatctggaatagtaatgttattaccaccatgggtat

SEQ ID NO: 217247 - DNA, 763 bp, Unknown
  Bacterial polypeptide expressing nucleotide sequence isolated from the Sargasso Sea
gctcaagtgattattgatcaatttattacctcttcagagtcaaaatggggcagagcaagtggacttgtgatgctactaccgcatgggtacgagggtcaaggacctgagcattcatcagcaagattagaaagatttctgcaattatgtgctggagaaaatattcaagtagttaactgtaccacaccttcaaattattttcatgttctcagaagacaaatgcatagggagtttagaaaaccattaataataatgacaccaaaatctttattaagatataagagatgtgtatctgatatatctgaatttattacaaaaagttcatttcatagagttttgcaagacgatgcttattttaaaaacaacaatttaatctctcttaaaaaagataataaaataaaaaaagttgtgatgtgttccggaaagatttattatgatttacttgaggagagagagaaaactaagacagacgatgttatctttataagacttgagcagctttatccattcccagctaaaactctagctaaagttctcaagaattataaaaaggcacaatttatatggtgccaagaagaaccaaaaaatatgggtgcatggaatactgtaagaaactatatagaaagaaccctcgaaatgatcaatttcaaagatattaacttgaaatatgtgggtagatcagcatcctctactactgcgactggaaatgctaataaacaccttgcacaacaaaaagaaatattagaaaagatacttaaacattaat

SEQ ID NO: 217248 - DNA, 1171 bp, Unknown
  Bacterial polypeptide expressing nucleotide sequence isolated from the Sargasso Sea
ttaattaatcaaagatcaatttcaaatgattatttaaataattcgattaagaagtttaaagatttattaaatgaacaatttaaaaatgcaaaagattataaacccaaaattgagtggtttgagggtacatggtctagatacaaacctgaaagaggtaaagataagagaggtgttacaggttttgatactaagaaattaaaagagatttcaataaaaatcaataccattcctcaagaaatgaatattcataaaactattttaaaaatttttgataatagaaaattaactgtttctaaagaaaaagaaattgattggtctactgcagagtcgttagcttttggttcattattagaagaaggttatccagtaagattagttggccaagattctggaaggggaacttttagccaaagacattctgttttgaggaatcaattagataattcaagatttataccccttaataatatatctaaaaaacaaaaaaattttgaagtagtagatagttttttatcagagttagctgttctaggatttgaatatggttatagtttagtagagccaaatactcttactatatgggaagcacaatttggtgattttgctaatggtgctcaagtagtaatcgatcaattcatagcgtctggtgagaggaaatggtcgagggcttcgggcttagtaatgttattaccacatggatatgagggtcaaggtcctgagcattcatctgcaagattagaaagatttttacaactttgttcaaatgataatatgcaaattatgaactgcacaactcctgccaattattttcatgcattaagaagacaaatgcatagagattttagaaaaccattagtgataatgactccaaaatctttattgagacataaatattgtatttctaatttagaggattttaacaaaaaaaactcttttcatagagttttgtgggatcatgctattgatccaaaaattaaaggctttataaaattacaaaaacctgaaaaaataaaaaaagttattttatgttcaggaaaaatatattttgacttacttaaatctagagaagaacaaaaaagagatgatatagttttctttagaatagaacagctttacccttttccagctaaaagtcttgtaaaagaacttaaaccttatgctaaaaaagcta

SEQ ID NO: 217249 - DNA, 1855 bp, Unknown
  Bacterial polypeptide expressing nucleotide sequence isolated from the Sargasso Sea
tatgaaggagctttggggcagctcgcatatttcagcaggacatgcagcctacttagaaagtctttatgaaacctttataaataatccagatgatctatcaaaagaatggttagatttttttactaatctacctaagcatccaaattcaaatggggaaatatctcataaagatattattaatgagtttaaaagtttatctagaagcaagtctgttcaaaaaatatctatagatgaaagacaaggaaaagttattaggcttatcaagtcttatagaaatagaggtcaccttcaagcaactttagatcctctagggatgatggagcataagactgttgaagatcttagtattgaatttcatggtttggcacaagatgatctagatgaagagttttatacagatacctttactgataaagacaaattaactcttagagagattgttgatcaattaaaagctagttattgtggcaacattgctgttgagtgcaatcatatttttgattcaaaggaaagaagatggttccaaagaaaatttgaatcaagattaaaggaatatagttttaacaaagaagaaaaaattaatatatatgaaaggttaaattcagcagaaggattggcaaaatatttatctgctaaatatcctggaatgaagagatttggaattgatggagctgaatcgctagtcccattggttgaaagtgtaattcaaaactgtggatccttaggtgcaaaccaaatttgttttggcatggcgcacagaggtagattaaatttattagtaaatgttttaggaaaacttccatccgaactattttcagcttttgatgaagaggataaattagacggtgtaaatactggtgatgttaaatatcacttgggtttctcctcaaactttaatactcctggtggagaggtacatgtgtctttgtttaataatccatcacatttggagatagtcgatcctgttgttcttggttctgtaagagctagacaagatagaattaaagatgaagatagatcaaaggttgtgccagttttacttcatggtgatgcttctttttctggtcaaggtgtcgtaatggaatcgcttcaaatgtctcaaacaagaggatttggagttggtggaacaatccatattattgttaataatcaaataggttttacgacaagcaatatagatgactccagatcaacggattactcatcagatgttgctaaaataattcaggctccagttatacacgtcaatggagatgaccctgagatggttcttaatgcatctaaaatagcatgcaaatatcgtaataaattcaaaaaagatattgtaattgatcttttttgttacagaagaaggggacacaatgaagctgatgatccttcagcgacacaacctttaatgtatcaaaaaatttcaaaacatccatcagttttaactcaatatgaaagttatttgaaggatgtggagataatatctgacgaagaatccaaaaagattaaaaaaaattatagaaattctttagaaggtggaaaaagtgttgcaaaaaatctagcagataaaccaaatgattctatgtggtttgattgggagccatatctggacaccaaatggtggccaaaagttaaaacgaattttaatagagataaatttaaagagattggaaattctatcaatatagttccaaaaacatttaaattaggtacacaagcctcaaagatttttgaagacagaacagcaatgagtaatgaagatattttaataaattggggatatgcagaaatcatggcttatggaacgcttctaagtgaaggatatccaattagaatttctggacaagacgtaagaagaggaactttt

SEQ ID NO: 217250 - DNA, 1373 bp, Unknown
  Bacterial polypeptide expressing nucleotide sequence isolated from the Sargasso Sea
taatgaaaattcaattacccaaaatcttttagatcaaaatgttaaaagatttaaagatttattggacgaacaatataaaagtgcaaaagattataaacctaaaatagaatggtttgagggctcatggtctagatataaaccatccaaaggtaaagataaaagaggtgtgactggttttgatgaagacaaacttaaagaaatatcagatagaattaataccatacctgctgaaattaatattcataaaactatttctaaaattttgaatattagaaaaaattcagtagataaaggttttgatatggattggtctacagcagaagcgctagcttttggctctttacttgaagagggttacccagttaggctcgttggtcaagactctggtagaggaacatttagtcaaagacattcagttttaagagatcagattgataattcaaggtatattccattaaacaatatttcaagtaaacaaaaaaaatttgaagtcgttgatagttttttatctgaacttgctgttttgggatttgaatatggatatagtttagttgaacccaatacattaactttgtgggaagcccaatttggcgattttgctaacggtgcacaagttgtaattgatcaatttatagcatcaggagaaagaaagtggaatagagcttctggattagtaatgttattaccccatgcctatgaaggacaagggccagaacattcttctgcaagattagaaagatttttacaactatgctcaaatgacaatatgcaagtattaaactgtactacccccgctaattattttcatgctttacgaagacaaatgcatagagattttagaaagccattaataattatgacaccaaaatctttattaagaaataagttctgcgtttcaaatttaaaagattttaataaagaaaatacttttcatagaatattatgggatcatgcaattgatccaaatgtagatggttttattgagctgaaagatagttcaaagataaaaaaagtaattttatgttctggaaaaatatattttgatcttttggatgctagagaaaaactaaaaaaagatgatgttataatttttagaattgaacaattatatccttttcctgcaaaagctcttgtaaatgagttaaaaccatacgcaaaaaatgcaaagtttttctggtgccaagaggagcctaaaaatatgggtgcctggttttcagttagagattatatccaatggacattagatagtttaaaggctaataataacaaaatttcttatataggaagaagcccagatgcaagtccagcaaccggatatgccaaaaggcacaattctcaacaacaagaaataataaataaggtttttgaataaa

SEQ ID NO: 217251 - DNA, 697 bp, Unknown
  Bacterial polypeptide expressing nucleotide sequence isolated from the Sargasso Sea
tctgcacaacataaaatgggagagactatctggattagtaatgctgttacctcatggatatgagggacaaggtcctgaacatagtagcgctagaatagagagatttttgcaattgtgtgcatcagaaaatattcaggtttgcgttccaagttcaccaaagcaaatatttcatctattaagacgacaagcaattagaaaaatgagaacacctttaatagtcatttcaccaaaaagtcttctaagaaatcctgaagcagtttcaagtatcaaagaattaacagatggtcaatttgaatgtgtaattgatgatgaaattaaagatactaaaaaagtttcaaaaataataatgtgttctggaaaggtgttttatgatttacttaaaaaaagaaatgataaaaagtttaaaaatattgcgataataagaatagaacaattgtatccttttccttatgatgaccttgaagaaatcttaacaaagtatcaaaatgtaaaagaatttatttggtgccaagaagaacctttaaatcaaggagcttggtttagtcataggcataggattcaaagagttttagataggcttggtgagggaaatgaagtgagtttagttagcagaccagcagcagctgcccccgcggtaggattaatgaaacttcatcttcagcagcaagaagatttaattaatgaggcaattttttaa

SEQ ID NO: 217252 - DNA, 1216 bp, Unknown
  Bacterial polypeptide expressing nucleotide sequence isolated from the Sargasso Sea
atgaaggagctttgggggagctcacatgtctcggcaggacatgcagcctatcttgaaagtctctatgaaactttcataaacaatcctgaaaatttatcaaaagagtggcttgatttttttacaaatcttccaaagaactcaaactctaatggagaaatatctcatcaagaaataatcaaagaatttagaaacttttcaagaagcaaggtagaggtatccgacaatagcaaaaaaacaatagatgaaagacagggtaaggttattaggcttattcaatcatatagaaatagagggcatttaaaagcaaatcttgatcctcttggcatgatggagagaagagttatagaagatcttagtattgagtttcatggactatcgcatgatgatttagatgaagagttttatactgatacctttacagattcaaacaaattatctttgagagagattttaaaaaggctggaagaagtttactgtggaaatattggaattgagtgtaaccatattcttgattcagaagaaagaagatggtttcaaaagaaatttgagtcgaaactaactgaatacagtttcaatcctgatgaaaaacttaatatttatgaaagactaaactctgctgaaggtcttgcaaaatatttgtctgcaaaatatccaggaatgaaacgttttggaattgatggtgctgaagcattggtacccttggttgaaagcgttattcaaaactgtggatcaatgggagctacgcaattatgttttggaatggcgcataggggaagactaaatcttttagttaatgtactaggtaaacttccatcggaactattctctgcttttgatgaagatactgaattagagggtgcttctacaggagatgttaagtatcacttaggcttctcatcaaactttgaaacacctggtggtgaagtacatgtttcactttttaataatccatctcatctagaaattgttgatcctgtcgttattggctccgtgagagctagacaggatcgaattggagataaagatagatcacaagttgtgccaattcttcttcatggagacgcttctttttctggacaaggagttgttatggaatcacttcaaatgtctcaaacaaggggattcaatgttgggggaacgattcatattattgtaaacaatcaaattggtttcactacaagcaatatcaatgactcaagatcaacagattattcat

SEQ ID NO: 217253 - DNA, 1823 bp, Unknown
  Bacterial polypeptide expressing nucleotide sequence isolated from the Sargasso Sea
caggaacggaaaaatagtgcacttaagccttacacccaacccttctcacctagaggctgtaaatccggtggtggagggaatttctcgggcaaagattgatcaatatcacgaaggaaatgcaaaaaaacttgttccgattctaattcatggtgaccattccatggcaggacagggcattgtatatgaagttttgcagatgtcaaaacttcccggctacggaactggagggacagtacacctcgtaattaacaatcaggtaggattcactgctgattttatcgaagggcgttcaagtacctattgcactgatgtaggaaaaacaactctttcaccagtttttcatgttaacgctgatgatattgaagccgtagtttatgtcacaaaactcgcactagagttccgtcaggaatttcatagagatgtgtttgtggacattttaggatatcgacgtcaagggcacaatgaatcggatgaacctagatttactcagcctgatttatatagaagaatcgccaagcatcctaatgtcagggaagtttacagtagtaaacttgtagaatcagggagcctcaagaaagaagaaatactgcaaatagaatctgaattcaaacagtttctcaatgatcgacttgaagaggcaaaacagcaggaaactgcttctgttacgtcatttcttgaaggagtttggtctggtgttcgaaggtcagagagcaaggattttgaggaatcaccccaaacaggtgtggctatcaaaaaatttattgatctcagtaaacgctcaactgacttgcacaaaccgggaagtcccggagaaaaattaaagttttttgcaaagatcgaaaagctctatgaaaaccgtcttaagatggttacagaaaataaatcgctggattgggctatggcagaaaatatggcttatgcgactctgctgagtcagaattgtaatgtgcgtttaagtggacaggattcagggagaggtacattttcacagcgacatgccatcattacagcagaggacaacactaaatacgttcctctaaaccatatttctgaagatcaggcaacttttgaagtatataattcctttctttctgaatacggtgttctaggttttgagtacggctatgcttatgcttcgccaaactccctaacaatatgggaagcgcaatttggagattttgcgaacggtgcgcaaatagtaatcgatcagttcgtttcttcttcagaaactaaatggcagcgaatgaatggtgttgtcttgatgcttccccacggtcatgaaggacagggaccggagcatacttctgcacgtattgaacgtttcctgactctttgtgcagataacaatatgcagataatcaattgcactacaccagccaatttatttcacgttttgagacgccagatgactttccctttccgcaaacctctggttatttttactccaaagagcttattacgacatccaaaatgtatcagtcctttagatagttttctggaaggcacacgattcatcgaggttattaaagatgaatattcgcacagtcagtccgtacgaaaggtattattatgttgtggtaaaatttactatgacttgctagaacatcagcaaaaaaataagatcaaagatattgcaattattcgtttggagcagctatacccttttcctgaaaagcaacttcgctctgctttaaatctttattctaatgccaagaatatatgctgggtacaagaggaacctgaaaacatgggtgcttggagttttatgctaagaacattccttcaagaaaagaggcttttgctggtagcacgtgaagctgaca

SEQ ID NO: 217254 - DNA, 1201 bp, Unknown
  Bacterial polypeptide expressing nucleotide sequence isolated from the Sargasso Sea
ccagggcataatactggtggaacaattcatataattgtaaataaccaaattggatttacaactagtccaagatttgcaagatcttcacctcacccatcagatattgctaaaatggttgaagcgccaataattcacgttaacggtgatgatccagaggctgtagtttatggatcaagaattgcaacagagttcaggcttaaatttaatcgagatgtggttttagatttagtttgttatagaagatttggtcataatgagggagatgagccatcttttactcaacctctcatgtacaaaaaaataaggtcacatccttccacggcaaaaatttatggatcaaaacttatagatgaggatttactctcagaaaatgatttaaataatcaaattaataaatttaaaactttgttagatgatcaatttaaaactgcaaaagattataaaccaaaaatagaatggtttgaaggtgcttggtcgagttataagcctaaaaaaggaaaagataaaaagggaattacaggtgcagatcctgatttgttaagaaatatctcagataaaataaatataattcctaacgaaactactgttcacaagactattagtaaaatatttcaaaacagaaaaaaaacaattgatcaaggttttaatattgattggtcatcagcagaagcacttgcttttggttcattgttggaagagggtttcccagtaaggtttgtaggtcaagattctggaagaggaacttttagtcaaagacactcagttttacgtaatcaattagataatactagatatatacctctaaatagtatttcaaaaaatcaaaagaaattcgaaattgtagatagttttttatcggagttagcagttcttggttttgagtatggttatagtttagttgagcccaatacattaacaatctgggaagcgcaatttggtgattttgctaatggagcacaagttataatagatcaatttatatcttcaggtgaaagaaaatggcagcgagcctctggtttagtattgttattacctcatggatatgaaggtcagggtcccgagcattcatctgcaagattagaaagatttttacagttgtgtgctaatgataatcttcaagtgatgaattgcacaacgccagctaattactttcatgctcttagaagacaaattcatcgtgactttagaaaacctttagttt

SEQ ID NO: 217255 - DNA, 1150 bp, Unknown
  Bacterial polypeptide expressing nucleotide sequence isolated from the Sargasso Sea
gtaactaaaatatatgcagataagctaattaaagaaaaaaagattactggagaacaggcaaaaagagtttacgataataggaaccaatttttagaagaagaatttcaagctggaagtaattatttacctaataaggctgattggcttgaaggcaagtggactggtctaaagaaagcacctgggttagaagaaagacgtggaattacaggcgttactcttgacaagataaaaaaaattggagagatcctgacttccattccaagagattttgaaattcataagaaattacaaagagtactagataatagaaaaaaagcactcaaagacggaactaatatagactggtcaactgctgaacaacttgctttcggtacactattattagaaggaaatcctgttcgtttgtcaggacaagattgtggtcgaggtacatttagccaacgtcatgctgtatttattgaccaaaatactgaagaaagatacataccattatcaaatattaatgaaaatcaaggctcttttgaagttattgactcgccattatctgaagctggagttttgggttttgaatatggctttagtcaagcagagccgaatgcacttgttatgtgggaagcacaatttggtgattttgctaatggtgctcaagtaatagttgatcagtttatatcatcaggagaagctaaatggttaaggatgagcggtttagttatgttattacctcatggttatgaggggcaaggtccagaacactcctcagcaagattagagagatatttacggctttgtgctgaagataatttacaagttgtaaattgctcaactcctgcaaattatttccatgttttaagaaggcaattatgtagagactttagaaagccactaataataatgactccaaaatctttattaagaaataaactctgtgtatcaaatcttaatgatatgcttgaggaaaaatctttccatcgtgtaatggatgataaaaataaaagcataaaggataaagatattaaaagactggtaatttgctcaggaaaagtgttctatgatctatttgaagcaagagaaaaaaataaacttttcaatattaaaattctcagacttgaacaaatttatccatttccaataaaatcattacaagaattca

SEQ ID NO: 217256 - DNA, 2158 bp, Unknown
  Bacterial polypeptide expressing nucleotide sequence isolated from the Sargasso Sea
tttgaataaatcaaatagtgcttttatagaggaaatgtatctaaaatttgtaaataacgatccagatttacctaacggctggagagaatattttagtgatattggagaagagtttgaggttgtagtaaatgaaataaatggcccatcttggagtccttctaaaaaagtttcaataaatagaaatcaaattcaatctaatgaagataaaaaaataaatccaatagattctataagatcaaatgctgactcaattaaagctgtggcgatgattagatcatatagacaacgaggtcatttaatagcaaaattagatcctcttgaactacttaaatctgattatttagaggaacttcatccagagtcttatggatttaaaaaagaagattatcacaaaaaaatatttttagatggtgtaactaataaacaacattctacaattaaagagatacttgaatttttaagggaaaaatattgtgatacaatcgggtatgagtacatgcacatctctaatcctacggagagaaaatggtttagggatagagtagaaatagctgatgattttcaatttactaagaacggtaaagaagcaatactgaacaaattaattcaagctgaaggttttgaaaaatatttacatactaagtatgtagggactaaaagatttggacttgatggtggtgaaagtttaattcctgcccttgaacaaattattaaaattggcggtcaatctaaaataaaggaagttaagattggaatgtctcacagaggcagactaaatgtattagcaaacgttctacaaaaatcttataaaagaatatttaacgagtttgctggtgaaataaactcaacatcagaggatggagctggcgatgttaagtatcatttgggcgcatcatctaatagagaatttgatggaaattcagttcatgtaagtttaactgataatccttcccatttagaggcagtcaatccggttgttcttggccaaactagagcaaaacaatttttccaccaagacaaagaaagaaaaaaagtaataccaatattaatacacggtgatgcagcttttgctggacaaggagtagttgcagaatgttttgcaatgtcaggccttccaggacataatactggtggtacaattcatattattgttaataatcaaataggctttactacaagccctagatttgcaagatcatcaccttatccctcggatattgcaaaaatggttgatgcaccaattatccatgttaatggagatgatccagaagcagttgtttatgcagcaagaatagctacagattttagattaaaattcaacagagatgttgtaatagacttaatttgttatcgaagatttggccataacgaaggtgatgagccatcatttactcagccattaatgtataaaaaaattcgatcacatccttcacctgtaaaagtttatggtgaaaagcttgtaaacgaaggttcaatttcaaaagactatctaaacaattcaattaaaaaatttaaagatttacttgatgatcaatttaaaaatgccaaaaactataaaccaaaaatcgagtggtttgaaggaacatggtctcgatataaaccagaaagaggtaaagataaaagaggtgttactggctttgatataaaaaaattaatagaaatatcaaataaaataaactcaatcccatcagatattaatattcataaaactatatcaaagattatgggtaaccgaaaaactacagttataaatggaaaagctatagactggtctactgcagaggctttggcttttggatccttgttagaagaaggctatccggtaagattagttggtcaagattctgggagaggcacatttagtcaaagacattcagttttaagaaatcaaatagataactcaagatatgttcctttaaataatatttcaaataaacaaaaaaaatttgaaatagttgatagttttttatctgaattagctgttttggggttcgagtacggttatagtttagtggaaccaaacacacttactttatgggaagcacaatttggtgattttgcaaatggtgcccaagtagttattgatcaattcattgcatctggtgagagaaaatggtcaagagcttcaggtctagttatgcttttaccacatggatat

SEQ ID NO: 217257 - DNA, 1478 bp, Unknown
  Bacterial polypeptide expressing nucleotide sequence isolated from the Sargasso Sea
aatgccttacaaaaaaatattatcaaaattccaaggttctttaaatgacccaaatgaggtacttggttcgggtgatgtaaaatatcatttaggtgtttctgctgatcgtgagtttgaaaacaagaaaattcatttatcgctaacttctaacccttcccatttagaagcagttaacccagttgtggcaggaaaagtaagagctaaacaaactttatccaaagataaaacaacagataaagttataggtttattaatccatggagatgcagcaatagctggacaaggtgtagtagctgaaacatttgctatgtcacaattaagagggtttaaaacaggcggtaccattcattttgtaattaataatcagataggttttactacaatgcctcaatatggacgatcagcaccttattgtactgagattgcaaaaatggttcaggcaccaatatttcatgttaatggtgatgacccagaagcagtagttcatgtttgtagacttgcaacagaatttagaaacaaatttaaagtcgatgttgtcgtagatatgttttgttacagaagatcaggacataacgaagctgatgaaccttcttttactcagccacttatgtataaggctatcaaaaaacaaatcacaacaagaaaaaaatatgaaaaaaaattaattgagaataatactctttcagaagaagaatctaaagacatggtagattcttttaaaagttttttagataaagaatttgaatcaactaaaaattataagccaaataaagtagattggttagagggaacttggacaggtttatctacagcaacatttgatgcgagaaggggaaaaacttctgtaaaagaaaaaacactaattaatatagcaaaaaaaattcatgaaataccgtcagattttaatgctcatagaagaataaaaaaaatttatggagaccgattaacaagtgtcatcaacggaaaaggtattgattgggcaacctctgaaagtttagctttaggaacacttttagatgagggatatggtgttcgaatatctggacaagatgttggaaggggaacatttagtcatagacatggtgtactatacgatcaagaaaacgaaaatcgttttgttccattaagacactttcaaaacaagcaaggttactttgaaatcatagatagttttttatctgagtttggtgttcttggttttgaatatggatattcacaagttgatcctaagacgcttgttatatgggaagcgcagtttggtgattttgcaaatggtgcacaaattatgattgatcaattcattagttctggagaaagaaaatggttgagaatgtctgggttaacgatgcttcttccccacggacatgaaggccaaggtcctgagcatacaagtggaagattagagaggtttttacagatgtgtgcagaagataatatgcaaattgttaattgtacaagtcctgctaattattttcatg

SEQ ID NO: 217258 - DNA, 1315 bp, Unknown
  Bacterial polypeptide expressing nucleotide sequence isolated from the Sargasso Sea
tttacaacagatcccgcttttttcccgctcttctccctattcaactgatgtagctaaaatggttatggctccaatttttcatgtcaatgcagacgatcctgaagcagtaattcacgctacaagaatagcaactgagtttcgacaggagttcggcgtggacgtgattgtcgatataataggatatagacggttcgggcataatgaaggcgatgaacctatgtttacgcaaccgaagatgtataaaaaaataaaaacacatccaacaacgcgacagatctatgctgaccaattggagcaagaaggcatcattttaaaaggggggggtgatcaactagttgctgaggaaaacgaacgattgaaggaggagtttgacgccgggatcagttataagccaaacaaagcagatacccttgatggaatttggtctggtataaaactggcccaaggtgggccaagaagaggtgaaacgggggttgacctagagatccttcgtaaaattggtgaatcgctgtgtaaaatcccggatgaattcaatatcaactcaaagttaaggcgaattttattacaaaaggaaacgatgttgggcttaggtgagggcgtagactgggctacagccgaggcgctagcatttggaagtcttcttgtccaagggaatagcgttcggctaagtgggcaggacagcggacggggaacattttcccagcgccactctgtctggacagatcaagttagtgaagagcgttacaccccattaaacaacttgcgagaaaatcaaaaaacctttgaaataatcgacagtccattatcagaagcagcggttctgggttttgaatacgggttcagtcaggctgaacccaaagcgctaattctttgggaagctcaatttggagatttcgcaaatggggctcaggttattgttgatcagtttattagttctggagaagataaatggttgcgtatgtcaggattggtaatgctgttgcctcatggttatgaagggcagggaccggatcattcttccgcgcgattagaacgctacttacagttatgcggtgacgacaatctccaagtggtgaactgtactacaccggctaactacttccacgttttgcgacggcaattacaacgtgatttcagaaagcccttgatcgtaatgacaccaaaatcacttttgagacacaaactctgcgtttccgcactgtctgctatgggccccgggactacttttcatagagtaatgcatgacgtaaagcctctttgcgcggataaatcagtaaagcgggtgataatatgttcaggaaagatttactatgat

SEQ ID NO: 217259 - DNA, 2218 bp, Unknown
  Bacterial polypeptide expressing nucleotide sequence isolated from the Sargasso Sea
catatacttttgaaaattttcttcaaaaaaaatatggttggacaaaaaagattttcgcttgaaggtggagaatctttaattccagcgatagattttctaattaatatagctgcagataaaggagttgaggatgttgttattggaatgtctcatagaggaagactaaatacattggtgaatattcttggcaaatctagtaaggatatctttggtgaatttgacggtaaagactacgaagaggatatttttgatggagatgttaagtatcatttaggttggacatctgaaaggttaaccaagtctggaaataaaattaccatgaatttagccccaaacccatctcaccttgagtcagttgatccagttgttcagggaatagctagagctaaattggaaaatgatctaaataataagacaaataaaattttacccattttagttcatggtgatgcagcaattgctggacagggagtagtttatgaagtaattcaaatgtctaggctaaaaggttatagtactggcgggactattcatttagttgtaaataatcaagttggatttactacaaattatttagatgcaaggtccagcacttattgttcagatgttggtaaagtaaccctttctccagttcttcatgtaaactctgatgatgttgaggctgttattcatgcagttacttttgcttttgaatttagaaatcagtttaatagagatgtttttattgacctacttggttacagaaaatatggacacaatgaaggagatgaaccaagatttactcagccaaagctatataagtttatttcttcacatccaaatcctagagatatatatgcagagaaattaatagaacagggattaataaataaggattatatctctaaaattgaatctgattattttgaatctttagaagaggaactagatgactcaaagaaaaaggataaaacaaaaattactccttttatgcaaaaagtctgggaaggatttaaacgtgtagacgaaaataaaatgcttaaagaatatgatactaattctaatgaagaagctattttaatcgtaggtagatctatcacaaaacttcccaataaacaatttttaagaaaagtaattaagctatttaattctagagaaaaaatgctttttgaatcaaaaaaagttgattgggcattagctgaacaacttgcttatggtacactaatgctcgaaggattcaatgttagaatatctggtcaagatgtagaaaggggtacattctctcaccgccatgcagttttaaagtctgaagattctgaagaggaatacttgcctcttaatagtattgattctaataaaaaaggagtattaaaaatttacaactctcttctttcagaatatggtgtcctgggttttgactatggatatgcattagcaagccccaacagtctaacaatttgggaagctcaatttggtgatttttctaatggagctcaaataataattgaccagtacatatcatctgctgaggataaatggaaactacaaaacggtattgtattatacctacctcatggatatgaaggacaaggagcagagcactcttctgctagaatggaaagatatcttcaattgtgtgcaaaggataatatgtatgctgcaaattgtacaaccccagcaaatctttttcaccttctaagaagacaaatgattactaactttaggaaaccattaatactatttacacctaaaagtctcttaagacatcctaaggttatctcagatattgaagaattaacttcatctaagtttatgcctgtaatttctgattctgaaatagatccagataaggctgagtcattagtcttttgttctggaaaattctattttgatttaactgaatacagagaaaagaataaaattaaaaatgttgcaattgtaaggatagaacagctctttccactgcctgttaaattgattatttctgaaattaaaaaattctcaaatgcaaaggatatagtttgggcccaagaagaaccaagaaatatgggagcttggaaccatatccaaacatatcatttaattgctaagaatatgaggccagctacaagaagattttatggatcaactgcctctggaagttatgttagatttgagagaaggcataatcaagttattgagtatgtttttgataagtctaaaaataattttaagaaatatcatatctccaacatttagt

SEQ ID NO: 217260 - DNA, 1084 bp, Unknown
  Bacterial polypeptide expressing nucleotide sequence isolated from the Sargasso Sea
gtagtagttgatttagtttgttatagaagatttggtcacaacgaaggagacgaaccatcttttactcaacccttaatgtataaaaaaattagatctcatccatctgccgtaaaagtctatggaaacaaattaattaatgaaaaaattatttcatctgaggatttaagtaatcacgttaaaaaatttaaagatcttcttgatgatcaatacaaaaatgcaaaaaattataagcctaaaattgaatggtttgaaggaacttggtcaagatataagccgagacgaggacaagataaaagaggagatacgggttattcaactataaaacttttggaaatctctgataaaatacattcactttcacctgaattaaatatccataagaccatagtaaaaatttttgagtctagaaaaaattctatgcttaacggtaatggaattgactggtctacagcagaagctcttgcatttggatcattattagaagagggatatccagtaagacttgttggtcaagattctggaagaggaacttttagtcagaggcattcagtattaagaaatcaagttgataattcaagatatattccattaaacaatatttctaagaagcaaaaaaaatttgaaatagttgatagttttttatctgaactagctgttttaggttttgaatatggctatagcctggtagagcctaacacactaactatttgggaagcccaatttggtgattttgccaatggtgcacaggtcataattgaccaatttatttcttcaggagaaagaaaatggttaagagcttcaggtttggtattattgttaccccatggttttgaaggtcaaggtccggaacattcttctgcgagattagagagatttttacaattgtgttcaaatgataatatgcaagttatgaattgtactacgccagcaaattatttccatgctttaagaaggcaaatgcatagggattttagaaaacctttaattatgatgacaccaaaatctttactaagaaataaatattgtgtttcaaatattgaagattttagtaagcaaaattcttttcatagggttttatgggatc

SEQ ID NO: 217261 - DNA, 1038 bp, Unknown
  Bacterial polypeptide expressing nucleotide sequence isolated from the Sargasso Sea
aaacatgatgaagaatgggatcatttgaaaaaatctaaatctgaacaatttttagaatctccagatacttcattggacctagtaaaaataaataagattgcaaagtcattaacaagtcttccgtctggattcaagcctttaaaacaaattgcaaaattaattaatgatagaaaagaaaattttttcaataaaaaaatggtcaattggtcagatgctgaacttttagcttatggttcattattaatagacaaaaagataattagaatttccggacaagatgtgataagagggacattttcacatagacatgcttatttcttcgattcctatacaaataaaccatattgtcctttaaataatatttcaaaaaatcagaatgaattatttatttataattctttattatctgaatttgctgtattaggctttgaatatggatatgcaatggctacacctaatgcattagtcatatgggaagcacaatttggtgattttgttaatggtgctcaagtaataattgatcaatatatttcttcagctgaaactaaatgggataaaatgaatggattagttgtccttttacctcatggatatgaaggtcagggcccggaacattctagtgcaaggcctgaaagaatcttgagtttatgttcggatgataatataattgtttcaaatttaactacacctgctaatttttttcatctattaagaagacaattatcttggaattttagaaagccttgtttcgttttatctcctaaaagtttattaaggcatccagatcttcattctcctataagtgattttactaaatccaagtttcaagaagtaatagatgatgaattgattaaaaaaacaaaagtgaaaaaactaattttatgtactggaaaggtttattatgatttaaagcaatatagaattcagaaaaatatagttaatattgctattgttagaatagaacaaatttacccttttcctattaatcagattactaaaattattaaaaagtataaatgtgataagatttgttgggtt

SEQ ID NO: 217262 - DNA, 988 bp, Unknown
  Bacterial polypeptide expressing nucleotide sequence isolated from the Sargasso Sea
ctcgggccgcggtacgttcacgcaccgtcacgcggtgctgcacgatcagaaccgcgagcgctggaacgacggcacgtatgtgccgctgcagaacatcgccgaaggtcaggcgaagttcacggtgatcgactcggtgctgtcggaagaggcggtgctgggcttcgaatacggttactcgaccgctgaaccgaatacgttcgtcgcgtgggaagcgcagttcggcgacttcgtgaacggcgcgcaagtcgtgatcgaccagttcatctcgtcgggcgaagtgaagtggggccgcgtgtcgggtctcacgatgctgctgccgcacggctacgaaggccagggtccggagcactcgtcggcacgtatcgaacgtttcctgcaactgtgcgcggaccacaacatgcaagtggttcagccgaccacgccggcgcagattttccacctgttgcgccgtcagatgatccgcctgttcaggaagccgctgatcgtcgctacgccgaagtcgctgctgcgccacaaggaagccgtgtcggatctgtcggaactggcgaagggctcgttccagccggtgctcggcgaaatcgacgaagctatcgacgcgaagaaggtcaagcgcgtcgtggtgtgctcgggtcgcgtgtactacgacctgctggcgcatcgtcgcgaatcgaagtcgaacgacgtcgcgatcatccgtatcgaacagctctatccgttcgcgcataagcagttcgaagcggaaatgaagaagtacgacaacgcgaccgaagtggtgtgggtgcaggacgagccgcagaatcaaggcccgtggttctacatcgagcaccatctgaaggaaggcatgaaggacgggcagaagctggcatacagcggccgtccggcttcggcctcgccggcagtcggctactacgcgaagcactacgagcagcagaaggcgctggtcgaaggcgctttcggccgcctcaagagcgcgtcgatcgctaaataa

SEQ ID NO: 217263 - DNA, 1288 bp, Unknown
  Bacterial polypeptide expressing nucleotide sequence isolated from the Sargasso Sea
atgaaaaagacaatgtcagattatatgagtgattctcatacatctggcggacacctctcatatttagaggatctatatgagagttatttacaagatcccaattctatttcagaggagtggaaaacttacttcaatgacttaccctttcaaaatggatccaaaaaagatagttctcatcttgatgtaatcaaacactttcaaaatactccgagaagatcagcaacaaaattcaaagcttcttcacaaaataaaaatccactcgaagcaaaggttcaaactttaataaaagcttacagagactatggacatactgctgcagatttagatcctcttggaattgctgaaaaagttatccattcagatttacataaaacagaaggcttatttaatggagatgaactttcaagcacgattaattgtaatttcccaattggaagtaatgctgaatacgaagtaaataatttaatagatgaactaaaagaaacttattgtaaaaatattggtattgaatttcagcatatatcaaacaaaagagaaagaagttggattattgaaaagtttgaaaactcaaatcataaagtctcagatgtagaaagaaaaaaagagatactaaaaagattaatttctgcaagaggcttggctcaatttctttcttctaaatatccaggtatgaaaagatttggtattgatggatgtgaatcgcttattccacttgtagatacgctcattaagacgacgtcaaaaaatggtgctgagcaaatttgttttggaatggctcatagaggcaggctaaatttattggttaatgttttaggaaaagtttcaaaagagctttttgaagcttttgaagaagattttgatcttaaagggacaagtactggagatgtaaaatatcatttgggatactcttcaaatatcagaactgatcacggagatgtgcacgtatccttaacgaataatccttcacatttggaaattgtaaatccggttgttgtcggatcagttagagctcgtcaagataggttaggagacacatttagaaatagggttgttccaattcttattcatggtgatgcagcattttctggccaaggagttgtgatggagacgctacaaatgtcacaaaccagagcatatggagtaggaggcactatccatgtagttattaataatcaaataggatttacaacaagtcacacaagagacgctaggtcaacaagatactcaaccgatattagtaaatttatcgaggctccaatcattcacgtaaatgccgatgatcctgaag

SEQ ID NO: 217264 - DNA, 1490 bp, Unknown
  Bacterial polypeptide expressing nucleotide sequence isolated from the Sargasso Sea
gatgaaaaagacaatgtcagattatatgagtgactctcatacatctggcggacacctctcatatttagaggatttatatgagagttatttacaagatcccgattcaatttcagaggagtggaaagctttcttcaatgacttaccttttcaaaatgggtcaaagaaagatagctctcatcttaaagtaattaaacactttcaaaatgcaccaagaagatcagcatcaaaagtcaaagctacttcacagaataaaaatccactcgaagctaaggttcaaactttaataaaagcttatagagactttggacatactgctgcagatttagatcctcttggaattgctgaaaaagttattcattcagatttacataaaacagaaggtttatttagtgtagatgagctttcaaacagagttaattgcaattttccaattggaagcaacgctgaatatgaagtaaataatttgataaacgatctaaaaaaaacatattgtaaaaatataggtattgaatttcagcacatatcaaataaaagagaaagaagttggattattgaaaagtttgaaaactcagatcataaaatctcagatgtagaaagaaaaaaagagattctcaaaagattaatttctgcaagaggcttagcccaatttctttcttctaaatacccaggtatgaaaagatttggaattgatggatgtgaatcgcttattccacttgttgatacactcattaagacaacctcaaaaaatggtgctgagcaaatttgttttggaatggctcacaggggaagactaaatttattggttaatgttttaggaaaagtttcaaaagagctttttgaagctttcgaagaagattttgatcttaaaggatcaagtacgggagatgtaaaatatcatttgggatactcttcaaatatcagaactgatcatggggatgttcacgtatccttaacaaataatccttcacatttagaaattgtaaatccagttgttgttggttctgtgagagctcgtcaggatagattgggagatacatttagaaatagggtcattcctattcttattcatggtgatgcagcattctctggccaaggcgttgtgatggaaactttacaaatgtcacaaaccagagcatatggagtagggggcacaattcatgtcgttgtaaataatcaaatagggttcacaacaagtcatataagagatgctagatcaacaagatactccactgatataagtaaatttattgaggctccaataattcatgtaaatgctgatgaccctgaagcagttgtttatgtttcagaattggcatgcgaatacagagagaacttcaagaaagatattgttattgatttagtttgttatagaaggagcggtcataacgaagctgatgacccttcatcaactcaacctttaatgtataaagcaataaaaagtcataaaactgtcttagatatatatgaaaaacttttaactgctaattcaa

SEQ ID NO: 217265 - DNA, 789 bp, Unknown
  Bacterial polypeptide expressing nucleotide sequence isolated from the Sargasso Sea
aagaaatgaaaaaaaatgctttatcaatcgttaagacacctacagatttctcacttcagaaaaaagtacaaaagatttttgatgaaagagtaaaaatgtcgcagggagatataaagctaaactggggatttgctgaaatgatggcatactcaagccttcttaaggaaggttatcccataagattcactggtcaggatgtaagaaggggcacatttgatcatcgtcatgctgttgtctttgatcaggaaaatggagaaggatttatatcattagatccaattgcaaaggaaggaaaaacattagttgatatttatgattcattattatctgaggaagctgttctgggtttcgagtatggttactcggcaacttggccaagtggacttgttatatgggaagctcagtttggtgattttgcgaatggagctcaggttgtaatcgatcaatttatagttagtgctgaacataaatgggaaaggctttctggactagttatgctccttccgcatggatttgagggaatggggcctgagcacagcagtgcaagattagagagatttttacaactatgtgctgcaaataatatacaagtttgtatgccaagttccccatcccaaattttccatcttctcagaaggcaagcaattaggaaaatgcgaagacctcttatcgttattactccaaagagtcttttgagattacctgaggcagcaagtgatttatctgaacttacaaatggaagctttaattgcatcatcggaggacgatcttccaaaggaaaaaattaaa

SEQ ID NO: 217266 - DNA, 1254 bp, Unknown
  Bacterial polypeptide expressing nucleotide sequence isolated from the Sargasso Sea
acctatcaaaaataaagaatgatgacttatggtttgaatgggatcagttcattgatgctaggtgggatgaaaatactgatacaactgtcaaacaagatcaactaattgatgatgctcgaacaatcgctgatattccaagtggttttgttttacagaaaaaagtcaaaaatataattaagcaaagaatagatatggctgaaggaaaatgtgaatttaattggggatttgctgagattgcagcatattcaagtcttttgcgtgagggatacccaattagatttagtggacaagatataaggagaggaacatttgatcacagacatgctgtgatgtttgatcaagaggatgggaaaacttactatccattgaataaatttgctgaaaaaggaaatacaaatattggaatttatgactcaatattatcagaggaggcagttttaggatttgagtatgggtattcggcaacatggccaacaggcctagtgatttgggaagctcaatttggtgatttttctaatggagctcaagttgtaattgaccaatttattgctagcgcacaacataagtgggaaagattatcaggtttagtccttttattgccccacggatatgaaggtatggggcctgagcatagtagtgctcgtatagagagatttcttcaattatgtgctgaacaaaatatacaaatatgtatgcctagtacggcagcccaaatgtttcatcttctaagaaggcaagctattagaaataatagaactccccttatcgttattacccctaaaagtttgttaagaaataaatatgcatcttcaactattgataaacttacattaggaaaatttgaaaatatttttgatgatgaatcaaacttaacaaaaaaactaagaaaggtaattctttgtagtggaaaaatatatcacgatcttaaaaaacaaaaagatgaaaataatcaaagtgatatagcaattatccggttagaacaattatacccatttccttatgaagaaactgaaaaaatattaagtaaatataaaaatgcttcagaatttatttggtgccaagaggagccaagaaatcaaggagcatggtatggtcaaagacatagattaaatagagtcctaaaaaatattggtttaaagaaagaatttagattgatgagtaggccaccatcatctgctccagctgtaggacaaatgaaaatacatatcgaacaacaaaaaaaattaatcgatttaactctaggtaaggattaaa

SEQ ID NO: 217267 - DNA, 1138 bp, Unknown
  Bacterial polypeptide expressing nucleotide sequence isolated from the Sargasso Sea
aaatttaaagatcttttagatgaacaatttaagacagctaaagattataatcctaaaattgaatggtttgagggagcatggtctagctataaacctaaaaaaggcaaagacaaaagaggagttactggagcagatgaaaaaacacttaaaaatatttcagacaaaataaatgttgttccatctgaaataagtattcacaaaactattagcaaaatattgcaaagtagaaaaaaatctatcgatgatggtttaaatattgactggtccactgctgagtcattagcttttggttcattattagatgagggttttccagttcgatttgtaggacaagactctgggagaggaacattcagtcagagacattcagttttaagagaccaaacgaataactctagatatattccattaaataatatttcaaaacatcaaaaaaaatttgaaattgttgatagttttttatcagaacttgcggttttaggatttgaatatggatatagtttagtagaaccaaatactcttactctttgggaagctcaatttggcgattttgctaacggtgcgcaagttataattgatcaatttatttcttctggtgaaagaaaatggcaaagagcttcaggtttagttatgttattaccccatggttatgaaggtcaagggccagaacattcatcagctagacttgaaagatttttacaattgtgtgcaaatgataatctacaagttatgaattgtacaactccagcaaattattttcacgctttacgtagacaaatacatcgtgattttagaaaaccacttataatcatgacacctaaatctttgttaagaaataagttttgtgtatcaaccattgatgattttagtaagcaaacatcatttcaccgaataatgtgggatcatgctttaagcgatcaatctaaaaattttattaaattaaaaaaatcaagtgaaataaaaaaagttataatttgttcaggaaaagtatactttgatcttttaaatgctcgagaaaagttaaaaagagacgatgtggtaatgtttagaatagagcaactttatccttttccagcaaaaagtttgataaaagaacttaaaccatatgctaaaaatgctaatttttattggtgtcaag

SEQ ID NO: 217268 - DNA, 907 bp, Unknown
  Bacterial polypeptide expressing nucleotide sequence isolated from the Sargasso Sea
ttggtgcagagacattttgaaaaatttctacataaaaaatatactggaactaaaaggtttggtctagatggagcagagtctgttgtccctgctctagagcaaattctaaaaagaggaagtcaattaggtttaaaagaagtggttattggtatggcgcatagaggaaggctaaatgttctatacaatattcttaataaaccatttagggcaataatttctgagttttctgggaaccagtcaaacccagaagaggctggtggctctggtgatgtgaaatatcatatgggagcttcagcagatagagagtttgatggagaaaaagttcatctatctttgcaagctaatccttctcatttagaagttgttgcacctgttgttgtgggaagagttagagctaaacaatatcaacataatgatactgatgaacgattatctgttctaggaattgttttgcatggtgatgctgcatttgcaggacaaggtattgtcgcggagacttttgatttttcagatttgaaaggttataaaacaggtggaacaattcacgttattgttaataatcagataggctttacaacaagtcctaattattcaaggtcaagtccatattgtacagatgttgctaaaatggtcatggctccaatattccatgtaaatggagatgatcctgaatcagttgttcatgttgcaagaattgcaacagagtttagacaaaaatttagatgtgacgtggttttagacgttatttgttatagaagatttggacataatgagggagatgaacctgcattcactcaaccattaatgtatcaagagattgcccaacacaaaagtataagtaatatttatgcaaaaaaactaatatcagaaggtgttatttcagaaaatgacgctgaaaagggagttt

SEQ ID NO: 217269 - DNA, 1783 bp, Unknown
  Bacterial polypeptide expressing nucleotide sequence isolated from the Sargasso Sea
tatatcgggaaccaaaagatttgggttagacggtggagaagctgtaatacctgcaatggagcaaatcattaagagaggcggtaatcttggcgtaaaagaaataattattggcatgcctcatagaggacgtttatcaattctagcaaatgtaatggggaaaccatacagagcaatttttaatgaatttcagggaggtagttacaagccagaggaagttgaaggatctggtgatgtaaaatatcaccttggagcatcatctgacagagaatttgatggaaacaaaattcacttgtctttaacagctaatcctagtcacttagaagctgtaaaccctgtagttttaggaaaagtaagagcaaaacaaaatcagcttaacgatagcaatagagttcaagttttacctgttttactgcatggtgatgctgcatttgctggacaaggtatcatttcagaatgttttggactatcaggattaaaaggacataaaactggtggtaccatacacataattgttaataatcaaattgggtttacaactgcaccacataattcaagatcttctccatatccaactgacatagcattaatggtagaggctccaatttttcatgtaaatggtgacgatccagaagctgtagttcatgcagcaaaagtagcgacagaatttcgacaaaagtttcataaagatgttgttatagacgtattttgttacagaagatttggacataatgaaggtgatgaaccgatgttcacacaaccaaagatgtatgcaaaaataaaaaaacataaaactactctacagcagtactcagagaaacttattatggaaggcttagtcccagaaggtgaaatagaagacttaaaaataaattttcaaaaatttctttctgaagaatttgaaaattcaaaaagttataaacctaataaagctgattggttagatggtaaatggtctggactaggacaatatacaaaagaggctgtagtaaaagatggccaataccaaaggggcaaaacatctatttcaattcaaaaatttaatgaaattgggaaagcgttaactaaaattccaagtgaaattaatgctcacaaaacagttaaaagaatgcttgataataagcaaaagcaactaacttcaggtaaaaatattgactgggctacagctgaagctctagccttcggatcactattgatggaaggttatcctgttcgattatctggtcaagactgtacaaggggtacttttagccatagacatagtgctgtcattgatcaattaacagaagagagatactatcctttaaataacatttcaaaaaatcaaaaacactatgaagttatagactcaatgctatctgaatatgctgttttaggctatgagtatggttattccctagcagaaccaaattcattaacaatttgggaagcccaatttggtgatttttccaatggagcacaaataatgattgatcaattcatatcatctggtgaaaaaaaatggttgagaatgtcaggattggtaatgcttctccctcatggttatgaggggcagggtcctgaacactcatcagcacggttagaaagatttttacaagcatgtgctgaagataactggataatagctaattgcacaacaccatcaaattatttccatattttaagaaggcaattgtataggagctttagaaagcccttagttataatgagtccaaaatctttgcttagaaataaacgcgctgtatctagtaaagaaggattttgtaaacggttctacttttcatag

SEQ ID NO: 217270 - DNA, 1267 bp, Unknown
  Bacterial polypeptide expressing nucleotide sequence isolated from the Sargasso Sea
tctgaattattttcagctttttgatgaagaggaaaaattagacggagcaaatactggtgatgttaaatatcacttaggtttctcctcaaattttattactcctggtggagaggtgcatgtatctttgtttaataatccatcacatttggagatagttgatcctgttgtacttggttctgtaagagctagacaggatagaattaaagatgaagacagatcgcaggttgtgccagttttacttcatggcgatgcttctttttctggtcaaggtgttgtaatggaatcgctacaaatgtctcaaacaagaggctttggagttggtggaacaattcacattattgttaataatcaaattggctttacaacaagcaatatagatgactcaagatcaaccgattactcatcagacgttgctaaaataattcaggctccagttatacatgtcaatggagatgatcctgagatggttcttaatgcatctaaaatagcatgcaaatatcgtaataaatttaaaaaagatattgttattgatcttttttgttatagaagaaggggacacaacgaagctgatgatccttcagcgacacaacctttaatgtatcaaaaaatttcagaacatccatcagttttaactcaatatgaaagttatttgaaggatgaagaaataatatctgatgaaaaagccaaaaagattaaaaaaaattatagaaattcgttagaaggcggaaaaagcgttgcaaaaaatttagcagataagccaaatgattccatgtggtttgattgggatccatatctggatatcaaatggtggccaaaagttcaaacgaattttaataaagataaacttaaagagattggaaattccatcaacattgttccaaaaacatttaatttaggtacacaagcctcaaagatttttgaagacagaataaaaatgaacaatgaggatattttgctaaattggggatatgcagaaaccatggcttatggaacgcttctaagtgaaggatatccaattagaattactggacaagatgtaagaagaggaactttttctcatagacatgcgtgtgtttttgatacaaaaacaggtatggggtttattcccttgtcagaaatcgccaaaacttatagcacaagatttgatatatacgattcattattatctgaagaagcagttttagggtttgaatatggatattctgcaacatggccatctggtttgacaatttgggaggctcagtttggagattttgctaatggagct

SEQ ID NO: 217271 - DNA, 2369 bp, Unknown
  Bacterial polypeptide expressing nucleotide sequence isolated from the Sargasso Sea
aatggcatcatcaaaaaactcagaatatcaaaaaacatcttttttatctaaaagtaacagtgcttttatagagcaaatgtatctaaaatttattaatagagaatctgatttgccagaaagctggaaaaagtattttttagaaatcggtgaagaatttgagattattgcaaaggaaataaatggaccttcttggaatccaattaaaaaaaaaattaatttagatatgatacaggaaagtttcgaaaaagaaaaaaatagtttaaaaactacagttaataaagaagagctttctgaagagaatagaagatcaataagagcagtatcacttataagatcttatagacaaagaggtcatttaattgcaaatcttgaccctttagaattaagggaaatcgagtatttagatgaattacatcctgaaagttatggatttaataaagaagactataataaaaaaatttacttagatggaatagcaaatagaaattattcaactataaaagatattttatcttttttaagaaaaacttattgtggaaagatcggctatgagtatatgcatatctccaatccaacagaaagaaaatggttcagggatagagttgaaaaagatgaaaatgctttacaatttacaaaaaatggaaaggaagcaattttaaataaaattattcaagcagatggatttgaaaaatttttacacacaaaatatgttgggacaaaaagatttggtctagatggagcagaaagcttaattcccgcgttagagcaagtaattaaaattggtggccaaaataatgtgaaagaggtcaaaattggaatgtctcacagaggtagactaaatgttttggcaaatgttttacaaaaatcatacaaaagaatattcaacgaatttgctggagaaatagacccttcatcaaaagatgatagtgctggtgatgtaaaatatcatttaggagcatcatcggatagagtgtttgataataattcggtacatgtaagtcttacagacaatccatctcatttagaagctgtaaatcctgttgttttaggtcaaacaagagcaaagcaattttttcataatgataaagagagaaaaaaagtaattcctatattaattcatggcgatgcttcatttgcaggtcaaggaattgttgcagagtgttttgcaatgtcaggtttacctggccataatactggcggtacaattcattttataattaacaatcaaataggctttacaacaagcccaagatttgctcgttcgtcccctcatccttccgatgtagcaaaaatggtggactcaccaattatacatgctaatggtgatgatccagaatctgtcgtatatgcagccagaatagctgcggagtttagacttaaatttaatagagacgtagtggttgatttagtatgttacagaagatttggtcataatgaaggagacgaaccttcattcactcaacctttaatgtacaaaaaaattaaatctcattcatcaacagtaaaaatatatggtgataaattaataaatgaaaaaactatttcacctgaagatttaaataatcatattaaaaaatttaaagaccttttaagtgatcaatacaaaaatgcaaaaaattataagcctaaaattgaatggtttgagggaacatggtcaagatataagccaagaagaggacaagataaaaggggcgatacaggttattcaacagcaaaacttttggaaatctcagataaaatacactcattttcacctgaacttaatattcacaaaaccatagtaaaaatttttgaggccagaaaaaattctatgaaaaatggtaaagaaattgactggtctactgctgaagccctagcgtttggctcattattagaagaaggatatccagtaagacttgttggacaagattcgggaagaggaacttttagccagaggcattcagttctaagaaatcaaattgataattcaagatatattccactaaataatatttcatcaaaacaaaaaaaatttgagatagttgatagctttttatctgaattagctgttttaggttttgaatatgggtatagtttagtagagcctaacacgttaactatttgggaagctcaatttggcgactttgcaaatggtgcccaggttataattgatcaatttatttcatctggagaaagaaaatggttgagagcttctggtttagtattgttattgccgcacggttttgaaggtcaaggtccagaacattcatctgcaagattagaaagatttttacagttatgttcaaatgataatatgcaagttatgaattgtactactcctgcaaattatttccacgctttaagaagacaaatgcacagagattttagaa

SEQ ID NO: 217272 - DNA, 1609 bp, Unknown
  Bacterial polypeptide expressing nucleotide sequence isolated from the Sargasso Sea
acatattgttctgatgttggtaaggtaacattatctccagtcctacatgttaattcagatgatgttgaagcagttattcatgcagtaacctttgcacttgaatataggaataggtttaagcgggatgtgtttattgatcttttaggatatagaaaatatggccataatgaaggagatgagccaagatttactcaacctaaattatacaaatttatttcaggtcatccaaatccgagagatatatatgcttctaaactaatgggtcagggaataataaatgatgatcatgtttctaaaattgaatcaaaatatttttcaaatcttgaagatgaacttacagactctaagaaaaaagaaaaaacaaaaatcacacccttcatgcaagaggtctggggaggatttaagagagttgatgaaaataaaatgcttgaagattatttgacaagctcgtcaaaggaggatatacttaatgtagcaaagtcaataacttccctacctaataaatcatttttaagaaaaatcataaagctatttgactcaagagaaaaattaatatttgaaaatggaaaagttgattgggcaatggcagagctacttgcatatggaacattattaacagaaggttttaatgtaagagtttcaggacaagatgtagaaagaggcacattttctcatagacatgcagttttaaaatcagaggattcagaggaagagtatctaccattaaataatattgattcaaaaaataaagggttatttagtatatataattctcctctatctgaatatggtgttttgggatttgattatggttatgcacttgctagcccaaactgtttgacaatatgggaagctcaatttggagatttttcaaatggggctcagattataattgatcagtacatttcttcagctgaagataaatggaagttgcaaaatggaatagttttatatctaccccatggctatgaaggacaaggagctgaacactcttctgctagaatggaacgctatcttcaattatgtgcaaaggataatatgtatgcggcaaattgtactactccatctaatcttttccacctactgagaaggcaaatgttgacaaaatttagaaagcctctaattttattcactccaaaaagtcttcttcgccaccccaaggttatttctaatgttgatgatttaactaagtctaaatttattccagtaattactgattctgaaattgatccagctaaggcagattcacttgtattctgcagtggaaaattttactttgatttaattgaatatagggagaagaataacataaaaaatgttgcaattgtaagaatagagcagttgttccctcttccagttaaattaataatttctgaaattaaaaaattctcaaaggcagaggatattgtttgggctcaggaagagccaaggaacatgggtgcttggaatcatattcaaacttatcatccaattgctaaaaatatgagacctgcaactagaagattttatgggtcaacagcttctggtagcctcactagatttgagagaagacataatcaagtaattgaatatgtatttgataagacaaaaaacaattttagaaagtaag

SEQ ID NO: 217273 - DNA, 865 bp, Unknown
  Bacterial polypeptide expressing nucleotide sequence isolated from the Sargasso Sea
tttgaaagatcaaggctcatttcaaatttataattcgtctttgtccgagtatggagtcatgggctttgaatatggttatgcactagcttatcctaatactttaacagttggggaagctcaatttggagattttagtaatggagctcaaattatgattgatcaatacctttcctcagctgaggataagtggaagcttcaaaatggactagtattaatgcttccccatggatatgaaggtcagggtgctgaacattcatctgcaaggttggaaagatatttacaattatgcgccaaggataatatgtatgtggctaattgcacaactccagcaaatttgttccacatacttagaaggcaattggttacaaagtttagaaagcctctagtattattaactcccaaaagtttactaaggcatccaaaagtaatttcaaaaactagtgatttaattaatggaaaatttttacctgtaattgatgatagagataaacaaaaaaatgtaaaatctttagtcttttgtagcggtaaattttattatgacctgctacattataaaagacaaaacaaaatttcacatgtagcgattgtaagaatagaacagttgttccctttaccaaagaaagagattgaaagtattattgagagctattcatttgatgagatagtatgggctcaagaagagccaagaaatatgggtgcttggggacatttattaatgcatttagataaagcaaaagaattcagggttgcttcaagaagattttatggagctccagcttctggaagtaaagctagatttgataaaagacacaatgaagtcattgaatatgtatttgataaatcaaaaaacaattttaaaaaataa

SEQ ID NO: 217274 - DNA, 1348 bp, Unknown
  Bacterial polypeptide expressing nucleotide sequence isolated from the Sargasso Sea
ggcggaactattcatatcatagttaataatcagattggttttactactgcacctagatttgcaagatcgtcaccgtatccctctgacttagcaaaaatggttcaggcgccaattttccatgttaatggagatgaaccagaagccgtcgttcattgtgcaaaaattgcaactgaatttaggcaaaaatttaatagagatgttgttattgatatggtttgttatagacgatttggtcacaacgaaggtgacgaaccatcatttacccaacctttaatgtataaaaaaattagatctcatccaactactctgcaaatttatgcaaagaaacttttaaacgaaggtttaatttctaatacatatcttgatttgaaaaagaaagagtttagaaattttttagataaggaattttctggggccaaggactataaaattaaaatgaaatggtttgatggagtttggtctagattcaaaccagaaataggtcaggacagacggggagttacaggcgtagaaaagcaagaattaatatctataggaaaaaaaattactgatatacctaaagactttagtgttcacaaaactttgttaaaaatatttgaaaataaaagaaaaatgtttacagaaaatcatccaattgactggtcaacagcagagacactggcatttggaacgctcttaaacgatgggttctcagtaagactatcaggtcaagattccggcagaggaactttcagtcagagacattctgtattaagaaaccaagacaatcatgacaggtatgtgcccttacatcatatatcaaaaagacaaaaaaaatttgaagtcatcgatagtcttttgtcagaattgggtgtcctaggttttgaatttggctattccctatccgaacctgaaacactagtactttgggaagctcaatttggagattttgcaaatggtgcacaagttgtaattgatcagtttattgcctctggtgagtccaagtggtcaagagcaagtggtcttgtaatgcttttaccacatggttatgaaggccaaggtccagaacactcttcggcaagactagaaagatttttacaactatgttctcaggaaaatttacaagtagtaaactgtacaacaccagcaaattattttcatgttcttagaagacagatgcatagagactttagaaaacccttggtagttatgactcctaaatcattattgagacacaaaagatgtgtctcaaatcttggagacttcactaagaaaaattcctttcacagaattttggaggaccatgcatatttaaatggcagtaaattaattgaattaaaaaaggacaaaaaaataaaaaaagtggtga

SEQ ID NO: 217275 - DNA, 1553 bp, Unknown
  Bacterial polypeptide expressing nucleotide sequence isolated from the Sargasso Sea
agaaaaagtttggtttagaaatagaatggagaaagaggaaaatcggattaatttcacaaatactggaaaaaaagcaatattaaataaaattattcaggctgaaggatttgaaaagtttttagcaaaaaaatatgtaggtacaaaaagatttggattagatggagctgaatctttaattccagcgatggagcaaattattaagagaggaggtcaattaggggttaaagaaattaaaatcggtatgccacataggggaagattaaatgtattagctaatgtattacaaaaatcttataaaagaatatttaatgaatttgctggtgaaatttctaccagctcagaagattcagctggtgacgtaaaataccatttgggagcatcgtcaaatagagtgtttgatagtaattcagttcatgtaagtttaacagataatccttcacacttagaggctgtggatccagttgtgcttggacaaacaagagcaaaacaattttttcatcaagatttaaatagaaaaaaagtaattcctatattaattcatggtgatgcagcttttgcaggacaaggtgtagtagcagaatgttttgcaatgtcagggttacctggtcataatactggaggaactatacatattattgtaaataaccagattggttttactacaagcccaaggtttgcaagatcaagcccatatccttccgatttaggaaaagttgttgatgctccaattttgcactgtaatggtgatgaccccgaagccgttacacactgtgcaaaagttgccattgagtttagacaaaagtttaacaaagatgttgttatagatatgatttgttataggagatttggtcacaatgaaggggatgaaccttcattcactcaacctcttatgtacaaaaaaattagaaaccaccccactacattaaatgtttatggaaacagattaattcaagaaggaactataaattctgatgagtttaataaaatgaaaaatgatttcaaaaatcttcttgaggaacaatataaaacagcaaaggactataaacctaaaatagaatggtatgagggaacttggtcaagatacaaacctgaaaaaggcaaagataaaagaggtaaaagcggtgtagatttatctaaaattgaaaaaatttcagataaaattaacagtattccatcagcagtgaaagttcacaaaactatttctaaaattttagaacagagaaaacaatcagttataagtaaaaaaaaaatagactggtcaacagctgaggctctagcatttggtacgttgcttgaggaaggttttcctgtaagacttgttggccaagactctggaagaggtacatttagtcaaagacattctgttttaagaaatcaagacgataatacacgttatattcctttaaataatatttcaaaaaatcaaaaaaaatttgaggtagttgatagctttttgtcagaattagctgttttaggatttgaatatggttacagtttagttgaaccaagcactttaagtatttgggaggcacaattcggtgattttgcaaatg

SEQ ID NO: 217276 - DNA, 2119 bp, Unknown
  Bacterial polypeptide expressing nucleotide sequence isolated from the Sargasso Sea
atgcatatgtctgatccagtcgagcggtcatggattagagagagaattgaagggagagaaaaagggattaaatttaccgaaaatggtaaaaaagcaatacttaataaacttatagaggcagagggttttgaaaaatttttacatgtaaagtttgttggtacaaaaaggtttggccttgatggagcggagtctcttattcctgcattagaacaaattataaagagaggaggccatctaggcgttaaagaagtaaaaattggaatgcctcacagaggaagactcaatgtccttgcaaacatgatgcaaaaatcttttaaactaatatttaaagaattttttggagaaaaaattgactctaaaaaagattttgagggagatgtgaaatatcacttaggagcatctgcaaatagagaatttgatggaaacttagttcacataagtcttacagataatccttcacacctagaggcagtaaatccaatagttttgggtcaggtaagagcaaaacaatattttcataaagataaagagagaagaaaagttattccagtccttatacatggagatgctgcatttgcaggtcagggtgttgttgcagagtgttttgcaatgtcaggactacccggccataatacaggcggcacaattcatataattgtaaacaatcaaattggttttaccacagccccaaggtttgctagatcctcaccgtatccttcagaccttgcaaaaatggtagaagctccgatacttcatgttaacggtgacgatcccgaagcagtagttcattgcgcaaagattgctacagaattcagacaaaaatttaaaagtgatgttgttattgatatggtttgctacagacgttttggacataatgaaggtgatgaaccatctttcacacagccacttatgtacaaaaaaatacgaagccatcctactacgctagaaatttatggtaaaaaattaattagccaaggtttaatttcacaaaaggattttgatgaagggaaaaataagcttaaagattttttaaactccgaatttaaaaatgcaaaaagttataaacagaaaatgacatggtttgatggagtttggtccagatttaagcctgaaataggaaaagataaaagaggaaaaactggtgtagagaaaaaaaacctaattgaagtaggtaaaaaaattacagaggtaccaaataattttaatattcacaaaacacttttaaaaattttggaaaataaaagaaaaatgtttactgaagacaaacctatagattggtcaacagctgaacttctagcatttggtactctactaaatgaaggtttttcagtaagactttctggacaagactcaggtcgagggacctttagtcaaagacacgcagtattaagaaatcaagatagtcacgataggtatgtgcctttacataatatatctaagaaacaaaaaagttttgaggtaattgatagtttattgtcagagcttggtgttctaggttttgagtttggatattctctttctgagcctgaaaccctagtcctttgggaagcacaatttggagatttctcaaatggagcgcaagtagtcatagatcaatttatttcgtctggtgagtctaagtggtcacgagcaagtggcctggtaatgcttcttcctcatggttacgaaggacaaggacccgaacactcttcagcaagattagagagatttttacaattgtgtgcacaagaaaatttacaggttgtcaattgcacaactccagctaattattttcatgtacttagaagacaaatgagaagagattttagaaagccattaatagttatgactcccaaatctttattgagacataaaagatgtatttcttatcttgaagacttcacaaaaaagacaagatttcacagaattttagaagaccatgcttaccttgaaaatagtaaacttataaaactaaaaacaaataaaaaaataaaaaaagttgttatgtgttcaggtaaaatatattttgatcttttagaggctagggaaaaaagtaaaaatgatgaaatagtctttataagagtagagcaactatatcctttccctgtaaaacatttaggaagggagcttcaaaagtaca

SEQ ID NO: 217277 - DNA, 1638 bp, Unknown
  Bacterial polypeptide expressing nucleotide sequence isolated from the Sargasso Sea
ttacacaaaacagaaggcttatttaatggagatgaactttcaagcaagattaattgtaatttcccaattggaagtaatgctgaatacaaagtaaataatttgatagatgagctaaaagaaacttattgtaaaaatattggtattgaatttcagcatatatcaaacaaaagagaaagaagctggattattgaaaagtttgaaaactcagatcataaaatctcagataaggtaagaaaaaaagagatactaaaaagattaatttctgcaagagggttagcccagttcctctcttctaaatatccaggtatgaaaagatttggtattgatggatgtgaatcgcttattccacttgtagataccctcattaagacgacgtcaaaaaatggtgctgaacaaatttgttttggaatggcccatagaggcaggctaaatttattggttaatgttttaggaaaagtttcaaaagagctttttgaagcttttgaagaagattttgatcttaaaggatcaagtacaggagatgtaaaatatcatttgggatactcttcaaatatcagaactgatcatggagatgtgcacgtatccttaacgaataatccatcacatttagaaattgtaaacccggttgttgtcggttctgttagagctcgtcaagataggttgggagatacatttaggaatagggttgttccaattcttattcatggtgatgcagcattttctggccaaggagttgtgatggagacgctacaaatgtcacaaaccagagcatatggagtaggaggcactatccatgtagttgtaaataatcaaataggatttacaacaagccacataagggatgctagatcaactagatactcaacagatattagtaaatttatcgaggctccaatcatacatgtaaatgctgatgatcctgaagcagttgtctatgtctcagaattggcatgtgagtatagagaaaacttcaagaaagatattgttattgacttagtatgttacagaaggagtggccacaatgaggctgatgatccttcatcaactcaacccttgatgtataaggcaataaaaagtcataaaaccgttttagatatgtatgaaaaacttttaactgctgattcaataatatccgatgaagaaataaaagattttaaaaaatcatatagaaagcaaattgaaaatggtgaatctgtaactcctaacttagcaccaagatcaaatgatgatcagtggtttgattgggaaccattcatgaatagaaaatggtatgaggaagtaactacttctgttcctcaaaaagaaatcgaagaaaatgctttatcaatcgtaaagactcctgcagatttttcacttcagaaaaaagtaaaaaagatttttgatgaaagagtaaaaatgtcgcagggagatataaagctaaactggggatttgctgaaatgatggcatattcaagccttcttaaggaaggttatcccataagattcactggtcaggatgtaagaaggggcacatttgatcatcgtcatgctgttatctttgatcaggaaaatggagaaggatttctatcattagattcaattgcaaaggaaggaaaaacattagttgatatttatgattcattattatctgaggaagct

SEQ ID NO: 217278 - DNA, 2047 bp, Unknown
  Bacterial polypeptide expressing nucleotide sequence isolated from the Sargasso Sea
atgaaagagctttgggggagctcgcatatttcagcaggacatgccgcctatctcgaaggcctttatgaaaccttcctcaataatcctgaagaactctcaaaggaatggtttgatttttttaccaatcttccaaagctgccaaattcaaacggagagatttctcaccaaaagattattaatgaatttaggaacttttcaagaaatagtgatgtattaaagaaatccgtagacgaaagacagggcaaggtaataagactaatacaatcatatcgaaatagaggtcaccttaaagcaaagttagatcctttaggtatgatggagagaaggctagtagaagatttaaatatagaatttcatggcttatctcatgaggatcttaatgaagagttttatacagatacctttaataccgaagcagaaaaacttcctctaagagatattatccaaaagttggaggatatttattgcggcgtaattggtattgaatgcaatcacattatggattcttcagaaagacgctggtttcaaaataaatttgaatcaaaattaaagggatatagtttcaatgaaaaggaaaaattaaatatatacgaaagattaaattctgctgaaggtttagctaagtatctttcggcaaaataccctgggatgaagcgttttggaattgacggtgctgagtcattagttccattagttgaaactgtaatacaagattgtggatcattaggtgcatctcaaatatgttttggcatggctcacagaggcaggctaaatttattagtaaacgttttaggtaagctaccatccgatttatttacagcatttagtgaagattttgaattagatggagcaagcaccggagatgttaaatatcacttaggattttcttctaactttgacaccccagggggcgaggtccatgtgtcattatttaacaatccctctcatctagagatagttgacccagttgtaataggatctgtaagagctagacaagatagaattaatgataaagatcgatcaaaggtgataccagtattacttcatggtgatgcagcattttctggccaaggtgtagtaatggagtcacttcaaatgtctcaaactagaggttttaatgttggaggaacaattcatattatagtcaacaatcaaataggatttacaacaagcaatgtaaatgattcaagatctacagactattcttctgatgttgcaaaaataattcaagctcctgtcattcatgtgaacggtgatgatccagagatggtagttaatgctgcaaaaattgcatgtaaatatagaaataaatttaagaaagatatagtgatagatttattctgctatagaagaagaggtcataatgaggctgatgatccgtctgcaactcagccattaatgtatgaaaaaatttctaaccatccctccgttttaaatcaatatgaaaataacttaatgaaagaggggatattggatgctgaagaatcaaagaaaataaaatcaaattatagaaaatcattagagggtggtgagagtgtcgctaaaaatttagctaaaaaaccaaatgattctttatggtttgattgggaaccctatttgggtgtcaaatggtggccaaaggtcgatacaaaatatagcaagaaagaattaaaaaaattaggtaaagaaattatttcagtgcctaaagaatttaatatgggttctcaagcatcaaaaatatttgcagatcgacatgaaatgaatcaaggaaatgttccaataaattgggggtatgcagaggttatggcctatgcaacgttactaaaagatggctatccaataagacttacgggtcaagatgtcagaaggggtacattttcacataggcatgcatgtatatttgattctcaaactggaatggggcatatatcgctttctgaacttgcagaaaaaaataagacaagctttgatatatacgattctttgctttcagaggaagcggttttagggtttgaatatggatactctgctacttggccatcaggattaacaatttgggaagcgcaat

SEQ ID NO: 217279 - DNA, 1234 bp, Unknown
  Bacterial polypeptide expressing nucleotide sequence isolated from the Sargasso Sea
caaacaagagctaaacaatattttcataaagataaagatagaaaaaaagtaataccaattttaattcatggtgatgctgctttcgcaggtcaaggagttgtagcagaatgttttgctatgtcaggattaccgggccacaatacaggaggaactattcatatcatagttaataatcaaattggttttactactagcccaagatttgcaagatcatctccttatccttcagatatagctaaaatggttgaagctccaataattcatgttaatggtgatgatcctgaagcagttgtctatgcagcaagaatagcaacagattttagattaaaatttaatagagacgtagttatagacttaatttgttacagaagatttggtcataatgaaggagacgaaccttcatttactcaacccttgatgtacaaaaaaattagatctcatccatctccagttaaagtatatggagaaagattaattaatgataatacaatttctaaagattttttaaatgagtctataaaaaaattcaaaaatttactaaatgaacaatttaaaactgcaaaagattataaaccaaaaatagaatggtttgaaggaacttggtctagatataaacctgagagaggaaaagataaaagaggtgtaacgggagcagacacaaaaaaattattagaaatttctaataaagttaatacgatacccgaagaaataaatattcacaaaactatttcaaagatcttagaaaatagaaaactcaatgtaaaaaatggatcaggaattgattggtctacggcagaatcattagcttttggttcacttttagaggaaggatacccagtaagattggttggccaagattctggaagaggaacttttagtcaaagacattcagttttaagaaatcaattagataattcaagatacatacctttaaataatatctcaaaaaaacaaaaaaactttgaagtagtagacagttttttgtcagagttggctgtgttaggatttgaatatggatatagtttagttgaaccgaataccttaactttatgggaagctcaatttggagattttgctaatggtgctcaggttgttatcgatcaatttatagcttcaggtgaaagaaaatggtctcgagcctccggtttagtaatgttgttgcctcacggatatgaaggtcaaggacccgaacattcgtcagcaagattagaaagatttttgcaattatgttcaa

SEQ ID NO: 217280 - DNA, 2902 bp, Unknown
  Bacterial polypeptide expressing nucleotide sequence isolated from the Sargasso Sea
aatgaacgacagttttcttaatagtgcaaatgcgccttacgtggcagagctgttttttaaattcaaagaagatccaaattcaattgataaaagttggagcaatttttttgaaacttttcatgaagatgatttggcaattttatctgattttggtggaccagaatggaaaaaaagaacatcaaatgtaatagataatgtttcttttgataaagttatacgatcaataggtaacatcgatgaaaataattttaaaagttctacaattgattcaataagagcgctgcgattaataagagcttttagaatcaatggacatttaattgctaatttagatccactaaatcttcatataaaaaattatcatcctgagctagattacagatcatatggatttactgataaagatttagacaaagaaatatttattgatggaagtttaggtttagaaaaaacatctttaaaaaatattattcaaattgttaaggatacttattcatcttcaattggtatagaatttttacatattcaatctccagaacaaaaacaatggattcaagaacgtattgaagaggtacaaaataaaacaaactttactaatcaaggaaaaaaagcaatctttaaaagattagctgaatctgaattatttgaacaatatttagataaaaaattcttaggcacaaaaagatatggtgtagagggtggagaatccatgatacctggaatagagcagatagttaaacaatcttgtttagctgacgtggaaaatattttttttggaacagcgcatagaggaagattaacattacttgctacagttttgggaatgccctatcgaggtattttgtcaaaatttcaaggtaatcttaatgatcctaatgaagtattaggttctggtgatgtaaagtaccatttaggtgtttcaagtgatagagaatttaatggaaaaaaaatccatttatcactaacacctaatccctctcatctggaggctgttgacccagtattagttggcaaagttagagccaaacaaactttacttaaagataaattaaacaataaagtttttggtatattaattcatggggatgcagcaatggctggacaaggaattgtagctgaaacatttgctatgtctcaactaagaggttttaggactggaggcacagtgcattttgtaattaataatcaaataggttttactactaccccacactatggcagatctgccccttattgtactgaaattgctaaaatggttcaggctcctatatttcatgttaatggtgatgaccctgaagctgttgttcatgtatgtagattagcagcagaatatagaaatctttttaaagaagatgttgttgttgatatgttttgctatcgacgttcagggcataatgaagctgatgaaccatcttttactcaaccgcttatgtataaagcaatagataatcatccaacaacattaaagatttatgaaaaaaaattaattgaagaaaatattattagtgaagaagaatcaaaaaaaatacaaactgattttagaaaatttctcgatgaagagtttgaatctgcaaaatcttataaaccaaataaagctgactggttggatggtacttggaaaggatttaaaacagcatctcttgatgcaagaaaaggaaaaacttcttttattgaaaaaaatttaattgagattggaaagcaaattcatcatatccctgatgattttaatgctcataaaaaaattagaaaaatttatcaagaaagaaaacaatctataatagatggaaaaaatattgattgggcaactgcagagtcattagcttttgccacacttttaaaagaaggctatggagtacgtttatcaggtcaagatgtgggcagaggcacttttagtcaacgtcacggagttttgtatgatcaagaaaatgaaaatcgttttgttccattacgtcattttacaaaagaacagggattatatgaaattgttgatagttttttatctgaatttggtgttcttggttttgaatatggatattctcaagctgatccaaaaactttggttttatgggaagcacaatttggtgattttgccaatggcgctcaaataattattgatcaatttatcacaacaggtgagagaaagtggcttcgtatgtcaggtttgacaattttattaccacatggtcatgaaggacaaggccctgaacactcaagctctagaattgaaagatttttaactatgtgtgccgaagataatattcaagttgctaactgcactagtcctgcaaattattttcatattttgcgtcgacaacttttaagagattttcgaaaaccattaattttaatgacaccaaaatctaccttgaggcataaaaaaaatacttcatctatagatgaatttattaatggctcaacctttcaccgagttctaagcgaccctattcaagaaggtgaacaaaaaaatattaaaagattaattttatgttctggaaaaatatattttgaattacaagattatatagaaaaattaaaaaagacggggatacacattgtgagaatagaacagctgtatccttttccatatgaaactcttactgagtcaataaaaaattttaataattgtgagatgatatggtgtcaagaagaaccaaaaaatatgggagcatgggtttttgttaaaaatcgtattgagaatgttttgaaaactattaatgctaagcaattagacttacattttattggaagaagagctgcggcatctcctgctacaggtgtatttgatcgacatcttgctaatcagcaaaatatactgagattagctacagaagctgatttagaagaaattaaaaaagaaaataaaggagtttctttagtaaaatataaactgccaattgaataa

SEQ ID NO: 217281 - DNA, 2278 bp, Unknown
  Bacterial polypeptide expressing nucleotide sequence isolated from the Sargasso Sea
tgttctcaaagattttggaggaccagaatggaaagaacgtccatcaagtataatagataaaaattatataaccaaggtcataaaatcaaatgcgaattataattctgaggaatttagaatttcaactttagattcaattagagcattaagattaattagagcttttagaattaatggacatttaattgcagatcttgatcctttaggaatatctgaaagagagtatcctcaagaattagattataaaagctatggtttcattgaatcagatttagaaaaagaaatattcattgatggaagtttgggtttagaaaaaggtaaattaaaaaatattattaaaatattaaaagaaacttattctgcttcaattggtgttgaatttttacacatacaacaagctgatcaaaaacaatgggtccaagaaagaattgaagaagtaagaaataaaacaaattttacaaatgagggaaaaaaagcaatctataaaagattagttgaatcagaactatttgagcagtttttagataaaaagtttttaggtacaaagagatacggtatcgaaggtggtgaagcgatgatacctgggatagagcaaattgttaaacaggcatgtttgtctggaattgaagatattattattggaacagctcatcgagggagactaacacttctatcaagtgttttggaaatgccttacaaaaaaatattatcaaaattccaaggatctttaaacgatccaaatgaggtactaggttcgggtgatgtaaaatatcatttaggagtttctgctgatcgtgaatttgaaaaaaagaaaattcatttatcgctcacttctaacccatcacatttagaagcagttaacccagttgtggcaggaaaagtaagagctaaacaaactttagctaaagataaaacaacagataaagttataggtttattaattcatggagatgcagcaatagctggacaaggagttgtggccgaaacatttgctatgtcacaattaagagggtttaaaacaggtggtaccattcactttgtaattaacaatcagataggttttacaactatgccacaatatggacgatcagcaccttattgtactgaaattgcaaaaatggttcaggcaccaatatttcatgttaatggcgatgacccagaagcagtagttcatgtttgtagacttgcaacggaatttagaaataaatttaaagtcgatgttgttgtagatatgttttgctacagaagatcaggacataacgaagctgatgaaccttcttttactcagccactaatgtataaggctatcaaaaaacaaattactacaagaaaaaaatatgaaaaaaaattaattgagaataatactctttcagaagaagaatctagagacattgtagattcttttaaaaattttttagataaagaatttgaatcaactaaaaattataaaccaaataaagtagattggttagagggaacttggacaggtttatctactgcaacatttgatgcaagaagaggaaaaacatctgtaaaagaaaaaacattaattaacgttgctaaaaaaattcatgaaatacctgcagattttaatgctcatagaagaataaaaaaaatttatggggatcgattaacaagtgtcatcaacggaaaaggtattgattgggcaacctctgaaagtttagctttagcaacacttcttgatgagggatacggtgttcgaatatctggacaagatgttggaagaggaacatttagtcatagacatggtgttctatacgatcaagaaaacgaaaatcgttttgttccattaagacactttcaaaacaagcaaggttactttgaaattatagatagttttttatctgagtttggtgttcttggttttgaatatggatattcacaagttgatcctaagacacttgttatatgggaagcgcagtttggtgattttgcaaatggcgcacaaattatgattgatcaattcattagttctggagaaagaaaatggttgagaatgtctggtttaacgatccttcttccccacggacatgagggccaaggtcctgagcatacaagtggaagattagaaagatttttacagatgtgtgcggaagataatatgcaaattgttaattgcacaagccctgctaattattttcatgttttaagaaggcaactacatagaaactttaggaaacctctaattatatttacaccaaaatctacacttagacataaatctaatgtttctaatattaaggattatattaatgaa

SEQ ID NO: 217282 - DNA, 1980 bp, Unknown
  Bacterial polypeptide expressing nucleotide sequence isolated from the Sargasso Sea
caaacttcaattgatcaagcaatcactgactctatgagactagtgatgatgatcagagcctacagagaaattggtcaccttattgcagacttagaccccttaggtttaatgattaagaatagtccatcaggcctagaccctgagtattatggttttcaagaaaaggattatgatcgtaaaatttttttatttggttatttgggttttcagaaggccactgtaagagaagtttttgaaaaacttcagagtatatattctggaactttagcaatcgaatataaacacattcaatctgctgaggaatacaaatggttaaaagatagaattgaagaaaaaaaagatatgcttttaacccctaagggtaaaagaacgatattggagagattaattaacgctgaatattttgaaaaatttttagatacgaagtatagaggtacaaagagatttggacttgaaggagctgagtcaacaataccagcacttgaacagatcttaaaaagatcatcagaatatggcgttgaagatttttcttttgcgtgtgcacatagaggaagactgaacattttggcaaatattgtaaaaaaaccccatgttcaaatttttagtgagtttattcacggaggagaaaatgctcttagcgatcaaggatcgggagatgttaagtaccatctaggtgcaagctctgatagaagttttggaggaaatataattcatgtgagtatggcagcaaacccctcacatttagaggcagtaaatccagtagttgctggaaaaataagggctaaacagactattattcaagataaaaataattcaaaagtttcaggactattaattcacggtgacgcagcaatagcagggcaaggtattgttgctgaaactttcacaatgtctcaattaaatggatacagaattggtggaataattcattttattattaacaatcaaattggatttacgacaagccctcagtatagtagatcagctccttactcatcagaaataggaaaagttgttcaatcccctatttttcatgttaacggagatgatccagaggcagtagttttagcatcaagagctgcaacagaatttagaaatacatttaaaaaagatacacttgtagatatgttttgttacagaaaacatggacataacgagggtgatgaaccttcatttactcaaccattaatgtatcaaaccattaaaaagaaaaaaactgttgccagcatctatgccgacaaacttataaatcaagaaatagttaatacaaaacaggtagattttatcaaagatcgaatatggtcggatcttgaaaaaaaatttgaaaaagcgaaaaattataagctaaaaactaaactctggatgggtggacagtggagtggattaagtcgtgctccaaaagatcctctgagaagaggaagaacagcagagtcagaaaagtctttgaaagacattggtttaaaaatttctcagactccaaaagaattcaaccttcatccaaaattagaaaagtttaataaatctcgattgaactcaatcaattcaggaaagggcattgactggtcttttgctgaagctttggcatttggcgctctattaaaagagggctacagagttcgacttgcaggacaggactcaggaagaggaacctttagccaaagacactctgttttttatgatcaaaaaacagaagagcgctatatacctcttaatcatatatctaaaaaacaaaaagaatttgaggtgattgatagttttttatcagaattaggagtcttaggttttgaatatggatacacattagctgatccaaacactctcgttttatgggaggcacaattcggagattttgctaatggagctcaaattataattgatcaatttatcacctctagtgagaggaaatggatgcaaatgagcggattagttttacttttaccgcacggtcatgagggcatgggcccggaacattcaagtgca

SEQ ID NO: 217283 - DNA, 719 bp, Unknown
  Bacterial polypeptide expressing nucleotide sequence isolated from the Sargasso Sea
agtcatagatcatttatcgtatcagcacaacataaatggggagagattatcaggactaattatgcttttacctcatggttatgaggggcaagggcctgagcatagtagcgcgagaatagaaaggtttcttcaattatgtgcttcagaaaatattcaagtttgtgtgccaagctcacctaaacaaatttttcatcttctcagaagacaggctataagaaaaatgcgcacacctttaattgttatttcacctaaaagtcttttaagaaaccctcaggcagtttctacgcttgatgatttaagtgatggaagttttgagtgtgtaatcgatgatgaattagataatataaatgatgtaaaaaagataattatgtgctctggaaaagttttttatgaattgattgagaaaagaaacaaagaaaaacgtcatgacatagcaattattagaatagaacaattgtacccttttccttacgacgaccttgaagaaattcttttaaggtatcaaaatgtacatgaatatatctggtgtcaagaagagcctttaaatcaaggagcatggtttagccatagacacagaatacaaagggttttagataggcttggtaataataatgaagttaagctcgtaagcagaccaccagccgcagcacctgcagttggtttgatgaaacttcatttaaaacaacaagagacattaattaatgaggcaattgtttaat

SEQ ID NO: 217284 - DNA, 1191 bp, Unknown
  Bacterial polypeptide expressing nucleotide sequence isolated from the Sargasso Sea
atcttcaccacatccttctgatattgctaaaatggttgaagcgccaattattcatgttaatggagataacccggaagcagtagtttatggggcaagaattgcaacagaatttagattaaaatttaatagagacgtggtaattgatttagtttgttatagaagatttggacataatgaaggagacgagccttcatttactcagccattgatgtataaaaaaataagatctcatccatcaacaataaaaatttatggagagaaactggttaatgaaggaatcatatctaacaatgaattagaagatcagattaataaattaaaaaatctgctagacgatcaatttaaaaacgctaaagattataatccaaaaattgaatggtttgagggtagctggtctagatataaacccgaaaaaggaaaagataaaagaggtgttacaggagctaatataaatattctttcaaatatttctgataaaataaatacaattccagaagaaataaatattcataaaacaataagaaaaatattagaaaatagaaaacaaagagttcaccaaggttatgatattgattggtcaactgctgaagccttggcttttggttctttactagaagaaggttatccagttagacttgtgggacaagattctggtagaggaacttttagtcaaagacattcaattttgagaaatcaaatagataattcaagatatattccacttaatagtatatctaaaaatcaaaaaagttttgaaattgttgatagttttctttcagagtttgctgttttaggatttgaatatggatacagtttagttgaaccaaatactcttacgttatgggaagcacaatttggagattttgcaaatggtgcacaggtgattattgatcaatttatatcatcaggagaaagaaagtggaaaagagcttcaggattggtaatgttattgccacatgggtatgaaggtcaaggaccagaacattcttcagcaagattagaaagatatttacaattatgtgcaaatgataatttacaaataatgaattgtacaactccagcaaattactttcatgctcttagaagacaaatgcatagagattttagaaaaccattaataattatgactcctaaatctttgttaagaaataaatattgcgtttcaaatttagaagattttagtaaagaaaa

SEQ ID NO: 217285 - DNA, 1585 bp, Unknown
  Bacterial polypeptide expressing nucleotide sequence isolated from the Sargasso Sea
cgaggcagactaacacttttatccagtgttttagaaatgccttacaaaaaaatattatcaaagttccaaggctctttaaacgatccaaatgaagtactaggttcgggtgatgtaaaatatcatttaggcgtttctgctgatcgtgaatttgaaaaaaagaaaattcatttatcactcacttctaacccatcacatttagaggcagtaaatccagttgtcgttggtaaagtaagagctaaacaaactatatctaaagataaaacaacagataaagttattggtttattaatacacggagatgctgcaatagctggacaaggagtagtagctgaaacatttgctatgtctcaattaagaggttttaaaacaggtggtactattcattttgtaattaacaatcagataggttttacgactatgcctcaatatggacgatcagcaccttattgtactgaaattgcaaaaatggttcaggcaccaatatttcacgttaatggcgatgatccagaagcagtagttcatgtgtgtagacttgcaacagaatttagaaataaatttaaagttgatgttgttgtagatatgttttgttacagaagatctgggcataacgaagccgacgaaccttcttttactcagccactaatgtataaggctatcaaaaaacaaattactacaaggaaaaaatatgaaaaaaaattaattgagaataatactctttctgaagaagaatatgaagaaattgtagattcttttaaaaattttttagataaagaatttgaatcaactaaaaattataagccaaataaagtagattggttagagggaacttggactggtttatctacagcaacatttgatgcaagaaggggaaaaacttctgtaaaagaaaaaacattaatgaatgtagcaaaaaaaattcatgaaataccagcaaatttcaatgctcatagaagaataaaaaaaatttatcgagacagattaacaagtgtaatcaaaggaaagggtatcgattgggcaacttctgaaagtttagctttagcaacacttttagatgagggatacggtgttcgaatatctggacaagatgtaggaagaggaacatttagtcatagacatggtgtactatacgatcaagaaaacgaaaatcgttttgttccattaagacactttcaaaacaagcaaggttactttgaaattatagatagttttttatctgagtttggtgttcttggttttgaatatggatattcacaagttgatcctaagacacttgttatatgggaagcacagtttggtgattttgcaaatggtgcacaaattatgattgatcaatttattagttctggagaaagaaaatggttgagaatgtctggcttaacaatgcttcttccccatggacatgagggccaaggtcctgagcatacaagtggaagattagaaagatttttacagatgtgtgcagaagataatatgcaaattgttaattgcacaagtccagcaaattattttcatgttttaagaagacaactacatagaaactttaggaaacctctaattatatttacaccaaaattctacacttaga

SEQ ID NO: 217286 - DNA, 2255 bp, Unknown
  Bacterial polypeptide expressing nucleotide sequence isolated from the Sargasso Sea
tcttgaatttgaaaaaacttcattcttaaataagtctaatagtgcatttattgaacaaatgtatcttaaattcataaataaagaccctgatttacctaagagttgggcaaattattttgagggcataggagaagagacaaaagttattgcatctgaattaaatggaccttcttggggaccttctaaattaaaaatagatattgatgaattacaaaaaaaaatagagatagatgaaaataataaagttaacaataaaaaattagatacatcagaaaaatttaatttccaattacttgcagactctaacaaagattctatcagtgctgttgcactaatacgtgcttataggttgagaggacatttattagcaaatctggatccactagaaatgagaaagtcggagtatcttgatgaattacatcctgaattttatggttttaaaaaacagaattatgataagaaaattttcctaaatggtgtcataaataaaaaatatgccaacataaaagaaatactaaaatttttaaaaaagacatattgtggaaacattggctatgagtttatgcatgtttcaaacccagtcgagagaaaatggtttagagacagagtagagcaagatcaaaatgccttaaatttcactcaaaatggtaaagaggcaatactaaataaacttgtacaggcagaaggttttgaaaaatttttagcaactaaatatgttggtacaaaaagatttgggcttgatggaggtgaaagtttaataccagctcttgaacaaataattaaaattggtggacaaaatcaaattaaagaagttaaaattggaatgtctcacagaggaaggcttaatgtattagctaatgttttacaaaaggattataaaagaatatttaatgaatttgctggggaaattgtttcagattcagaagaaagtgcaggagacgtaaaatatcatcttggggcatcctcagacagagtgttcgatggaaattctgttcatgtaggtttaacagataatccgtctcacttagaggctgtcaatccagtagtcctaggacaaacaagagcgaaacaattttttcataatgacaaacaaagaaataaagttattcctattcttattcacggagatgcagcctttgctggtcagggtgtcgtagcagaatgttttgctatgtctggacttccaggtcataatactgggggcactattcatatcatagttaataatcagattggtttcactacaagtccaagatttgcgaggtcatcaccttatccatcagatgttgcaaaaatggttgaggctccaattcttcatgtgaacggagatgacccagaagctgttgtttatgcgactagaattgctacagagtttaggcttaagtttaatagagatgttgtggttgacctaatttgttatagaaggtttggacacaacgaaggagatgaaccttcattcactcagccattgatgtataagaaaattagatcacatccaagtgtttataagatctatggaagcaaacttgtaaatgaaaattcaattacccaaaatcttttagatcaaaatgtaaaaacatttaaagatttattagatgagcaatacaaaagtgcaaaagattataaacctaaaatagaatggtttgagggttcatggtctagatacaaacctagaaaaggcaaagataaaagaggtgtgaccggatttgatgaaatcaagttaaaagaaatttcagatagaattaatactatacctgctgaaattaatattcataaaactatttccaaaattttaaatgttaggaaaaattcagtagataaaggtcttgatattgattggtctgcagcagaagcgctagcttttggttctttactagaagagggttttccggtgaggcttgttggacaggattctggtagaggaacatttagtcaaagacattcagtcctaagagatcagaatgataattcaagatatattccgttaaataatatttcaagtaaacaaaaaaattttgaagttgttgatagttttttgtcagaacttgctgttctgggttttgaatatgggtatagtttagtagagcctaatacactaactttgtgggaagctcagtttggagattttgcaaatggtgcacaagttgtaattgatcaatttattgcatcaggtgaaagaaagtggaacagagcatcaggtttagtgatgttattacacatggctatgaaggtcaaggaccagaacattctttctg

SEQ ID NO: 217287 - DNA, 994 bp, Unknown
  Bacterial polypeptide expressing nucleotide sequence isolated from the Sargasso Sea
ggcttttgctaccttattggaagaataccgcccggttcgtatcagtggacaggattttggaagaggaacttttgcccaccggcatgcgatagttacaaccgaagaagattctaaatacgttcctctaaatcatttatccgataaacaagctcctttttctgtttataattctctgctttctgaatacggagtgctcggtttcgaatttggatatgcgtatgcaaccccgaggagtcttactatttgggaggctcagtttggtgatttcggaaatggagcacagatcatttttgaccagttcattagttctgcagaaaccaaatggcaccggatgaacggactggtggtacttctcccccatggatatgaaggtcagggacctgaacactcatccgcacgtattgaacgctacttggaactttgtgcggacaacaacctgatgatcatcaactgcactctcccggtaaatatgttccatgctttacgcaggcaggtagagcagccgttcaggaaaccacttattgtttttacacccaaaagtctacttcggcatccgaaatgtgtgagtccattggaggattttctcggagggtcaagattccgtgaagtcctggataataccaaagtggagcctgagaaagtgcggaaggtattattctgttctgggaaaatctattatgagctggagtcgttccgggaagaaaaaggtcaggaccatgtggcaatcgtcaggcttgaacaacttcatcccttgcccgtaaaacaacttgaagcagtgatcgagcaatatcccaattgccaaacttggtgttgggttcaggaggaacctgaaaatatgggggcatggtgtttcatgaatcgaaagtttaaattcatccccaagccccttcaactggtttcgcggaaggaatcttcatctcccgcagggggatttgcaaaaattcatcagcagaatcaacaggccttgatcgaaagggccttcagcataggataa

SEQ ID NO: 217288 - DNA, 787 bp, Unknown
  Bacterial polypeptide expressing nucleotide sequence isolated from the Sargasso Sea
atttggtgattttgcaaatggtgctcaaataattattgatcaatttattgcatcaggagaaagaaaatggtctagagcaagtggtcttgtaatgcttttaccacatggatatgaaggccagggaccagaacattcatcagcaagattagaaagatttcttcaactatgtgcacaagataacttacaagttatgaactgcacaactcctgcaaattattttcatgccttaagacgtcaaattcatagagattttagaaaaccattagttattatgactccaaaatctttattgagaaataagttgtgtacttcaaaattagatgacttcggcaaaaaaaattcattccatagagtcctatgggatcatgcaatcgatcctaatgagactgattttataaagttgaaaaaaagtgaaaaaattaaaaaagttatactttgctccggcaaagtctactttgatctattagaggcaagagaaaaaaataaaaaagatgatattgtaatatttagaatagagcagctatatccttttccggtgaaaccattagttaaagaaattgctagatacgctaaaaatgcaaaattttattggtgtcaagaagagcctaaaaacatgggcgcatggcttttagtgcgagattatattcaatggacattaaatcatataggagctaaacataatcaaatcatgtatattggtagaaatcctgcagcatctccagctactggatatgcaaaaaggcatataaagcaacaaagagaaataatagaaaaggtctttgaatag

SEQ ID NO: 217289 - DNA, 934 bp, Unknown
  Bacterial polypeptide expressing nucleotide sequence isolated from the Sargasso Sea
tatttatgctaggaaggaaagtattgagaaaggcattggaattgattggtcttcagcagaggctctagcgtttggatctttgttggaagaaggatatccagttagacttgtaggacaagattctggaagaggaacatttagtcaacgacattctgtattgagaaatcaaatagataattcaaggtacattcctcttaataatatttctaataatcaaaagcaattcgaagtagttgatagttttttatctgaacttgcagttttgggatttgaatacggttacagtctagtagagccaaatacccttaccctttgggaagcacaattcggtgactttgcaaatggtgctcaagtagtaattgatcaatttattgcatcaggagagagaaaatggaatagagcatctggtatagtaatgttgttacctcatggatatgaaggacaaggaccagagcattcgtctgcaagattagaaagatttttacaattatgctcaaacgataatatgcaagtgatgaattgcacaactccagcaaattattttcatgctttgagaaggcaaatgcatagaagttttaggaagccactaattataatgacaccaaaatcgttattaagaaacaaatactgtgtttcaaatttagaggattttaataaaaacaatacttttcatagagtattgtgggatcatgctattgatcctaagtctaaagggtttattaaacttaaagaaagctcaaaaattaaaaaggtaattctttgttctggaaaagtatattttgatttattagatgctagagaaaagcttaaaagagatgacgttgtaatgtttagaattgaacaattgtatcctttccctgcaaaagctttggttaatgaattaaaaccatatgttaaaaatgctcaatttttctggtgccaagaggaaccaaaa

SEQ ID NO: 217290 - DNA, 962 bp, Unknown
  Bacterial polypeptide expressing nucleotide sequence isolated from the Sargasso Sea
ttttgttttaagaaatcaaatcgataattcgagatatatccctttaaataatatttctaaaaaacaaaaaaattttgaaatagtagatagttttttgtcagaattagctgttctaggatttgaatatggatatagtttggtggaacctaatactcttactatctgggaggcccaatttggagattttgctaatggtgcgcaagtagttatcgatcaattcatagcttcaggtgaacgaaaatggtcgagagcctctggtttagtaatgttgttaccacatggatatgagggtcaaggacctgagcattcatcagcgaggttagaaaggtttttacaattatgttcgaatgacaatatgcaagtcatgaattgcacaactcctgcaaattatttccatgctttgagaagacaaatgcatagagattttagaaaaccattaattattatgacaccaaaatctttattacgtcataaacattgcgtttctaatttagatgattttagtaaaaaaaattcttttcatcgagttttatgggatcatgccattgatccgaaagtaaaagggtttatcaaattaaaaaaaccaaaagatattgaaaaagtgattctttgttctggaaaagtctactttgacttacttgaagcgagagaaaaaataaaaaaagacaacgtagtgttatatagaatagagcaactttacccttttcctgcaaaagcacttgctaatgagctcaaaccatatgctaaaaaagcaaaattttattggtgtcaagaagagcccaaaaatatgggtgcttggttttcagtcagagattatatccaatggacattagataatataaaggctaagaatagtatgatttcttatattggaagaagtccagatgcatcacctgcaacaggatatgccaagagacatgtttctcaacaacaagaaattataaagaaagtttttgaataaa

SEQ ID NO: 217291 - DNA, 803 bp, Unknown
  Bacterial polypeptide expressing nucleotide sequence isolated from the Sargasso Sea
aatttgggaagcgcaatttggagattttgcgaatggagcgcaaataataattgaccaatttatatcctctggtgagagaaaatggtctagagcaagtggattagtactgttgttaccccacggatacgagggtcaaggaccagagcactcatctgcaagattagaaagatttttacaattgtgtgctcaagataatttacaagttatgaattgcactactccagctaattattttcatgctttaaggagacaaatacatagggattttagaaaacctttggtgataatgactccaaaatcattattaagaaataaattatgtgtctcaaaacttgaagattttagtaaaaatcattcttttcatagagttttatgggatcatgcaatagacccaaatgaaaaaggctttgttaagctcaaaagtagtgaaaaaataagaaaggtaatcttatgttctggaaaaatttattttgatctactagaagctagacagaaagctaaaattgatgatgtaatcctttttaggattgagcagctttatccatttccagttaagcctcttgtgaaggaatttaaaaagtatgctaaaaatgcaaagttttattggtgccaagaagaaccaaaaaacatgggtgcatggttttcggtgagagattatatacagtggactttaaattacattagagctaagaatagcaaaattaaatatgttggtagaaatccagctgcgtcaccagctactggttatgcaaaaaggcatataaaccaacaaaaaaaaataattgaagaggtttttaaatagt

SEQ ID NO: 217292 - DNA, 838 bp, Unknown
  Bacterial polypeptide expressing nucleotide sequence isolated from the Sargasso Sea
atatggttatagtttagttgaaccaagtactttaacaatatgggaggctcaatttggggattttgctaacggcgcacaagtaattattgatcagttcattgcctcaggtgaaagaaaatggtctagggccagtggtctagtaatgcttctacctcatggctatgaaggtcaaggacccgagcattcttcagcaagattagaaagattccttcaattatgtgcactagaaaacttgcaagtgattaattgcactacacctgcaaactattttcatgctttaagacgtcaaatccatagagattttaggaaaccactaattataatgacacctaagtcactactaagaaataaactttgtgtttctaatttagaagactttagtaaggaaaattcttttcatagagttctctgggatcatgcagttgataccacagaaaatggatttattaagcttaagaaatctaagcatatcgaaaaagtaattctttgttctggtaaaatatacttcgatttgttagttgctcgtgaaaaattaaaaaatgataaagtaattatttttagaatagagcagctgtatccttttccggtaaagtcactagctaaggaaattaagaaatttgctaaaaatgcggaatttttctggtgtcaggaggaacctaaaaacatgggggcatggttttctgtgcgagattatattcaatggacattaaagcatattggagctaagaataaagaaattaactatattggaagagatccggctgcatctccagctactggttatgcaaaaagacatctttctcaacagaaaaaaattatagaaacggtttttaaataa

SEQ ID NO: 217293 - DNA, 875 bp, Unknown
  Bacterial polypeptide expressing nucleotide sequence isolated from the Sargasso Sea
ggaaggggtacatttagtcaaagacattctgttttgagaaaccaaacagataattctagatatgtgccactaaataatatttcaaaaaaccaaaagaattttgagattgttgatagttttttatctgaattagcagttctcggatttgaatatggttatagtatggttgagccaaatacattaactatatgggaagcacagtttggtgattttgctaatggtgcgcaggtagtcattgatcaatttattgcatctggtgaaagaaaatggtcaagagcaagtggtcttgttttgttacttccacatggatatgagggacaaggtccagaacattcatcagcaagattagaaagattcttacaattaggtgcccaggaaaatattcaagtaatgaattgtaccacgcctgcaaattattttcacgccttaagaagacaaatacatagagactttagaaaaccattaatcataatgacaccaaaatcattattaagaaataaatattgtacttctaatttggaagattttggaaaggaaaatttttttcatagaattttaaacgatcacgctttcgagaagagaaataattttataaaacttaaagataataatttaattaaaaaagtaatattatgttcaggtaaaatctattttgatttacttgaagcaagagaaaaaaataaaaaagacgatattgtgttttatagaattgagcaattatatccatttccagttaaaaatcttgttagtgaattaaaaaaatattctaaaaatgcaaaatttttctggtgccaggaagagccaaaaaatatgggagcttggtttgcagtgagagattatatccaatggacattgggttatattaaagccaaaaa

SEQ ID NO: 217294 - DNA, 841 bp, Unknown
  Bacterial polypeptide expressing nucleotide sequence isolated from the Sargasso Sea
tttgagtatggttatagtttagttgagccagaaacattaacaatttgggaagcacaatttggtgactttgcaaatggagcacaggttgttatcgatcaatttatagcttcgggtgaaagaaaatggtctagagcttcaggacttgtattattattacctcacggatatgaaggacaaggtcctgaacattcgtcagcaagattagaacgatttctacagctttgtggacaagaaaatttacaagtaatgaattgtacaacgcccgcaaattattttcatgcgctaagaagacaaatacatagagattttagaaaaccattagttataatgacgccaaaatcattattaagaaataagtattgtgtttcaaatttagatgattttagtaaagataattcttttcatagaattttaggagatcatgctaatgagtcaggttataattttataaatttaaagaaaaaagataaaataaaaaaagtgattttgtgttcggggaaaatatattttgatttacttgaagcgagagagaaattcaaaaaggatgatgttacattaataagaatcgaacaactttacccttttccagcaaaatctttagctaacgagctaaaaccatataaacaaatcgctaaattttattggtgccaagaggaaccaaaaaatatgggggcgtggttttcagtgagagattatatacaatggacattggactatataggagctaataataatcaaatttcttatattggaagaaatcctgcggcatccccagcaactggatatgcaaaaaggcatctttctcaacaagaagaaattattaaagaggtatttaaataga

SEQ ID NO: 217295 - DNA, 880 bp, Unknown
  Bacterial polypeptide expressing nucleotide sequence isolated from the Sargasso Sea
gaaggttatccagttagacttgttggccaagattctggaagaggaacatttagtcaaaggcattctattttgcgaaaccaattagacaactcaagatatatacctctcaataatatttcaaaaaatcaaaaaaattttgaaattgttgatagttttctttcagaattagctgtattgggttttgaatatggatatagtttggttgaaccaaatacacttacaatttgggaggcacaatttggagattttgcaaatggtgcacagataattattgatcagtttattgcctcaggagaaagaaaatggaaaagagcctcaggtctagtcttgttattgccacacggttatgaaggtcaaggacccgagcattcttccgcaagactagaaaggtttttacaattatgtgcaaacgataatttacaagtaataaactgtacaactcctgccaattattttcatgcacttagaagacaaatgcatagagattttagaaaaccaatgataattatgacaccgaaatctttattaagaaataattattgtgtatcaaatatagaagattttagtaaagaaaactcttttcatagagttatgtgggatcatgctattgacccaaaatctaaaggatttattaaattaaaaaaaagttcagaaattaaaaaggtaattttgtgttctggaaaagtttattttgatttattggcagcaagagaaaaattaaaaaaagatgatgttgtcttgtttagaattgaacaactttatccttttccagcaaagagccttgtaaaagagatgaaaccttatgcagaaaatgctaaattttattggtgccaggaggaacctaaaaatatgggtgcatggttttcagttagagattata

SEQ ID NO: 217296 - DNA, 916 bp, Unknown
  Bacterial polypeptide expressing nucleotide sequence isolated from the Sargasso Sea
tatccagtcagacttgtaggacaagattctggtagagggacattcagtcaaagacattctgttttaagaaatcaactagataactctaggtatgttcctcttaataatatttctgataatcaacagcattttgaagtagtagatagttttttatctgaacttgcagttttaggttttgaatacggttacagtcttgtggaaccaaacacccttactctttgggaggctcaatttggtgattttgcaaatggagctcaagttgtaatagatcaatttattgcatctggagagagaaaatggaatagagcatctggtatagtaatgttgttaccacatggatacgaagggcaaggaccagaacattcatcagcaagactagaaagatttttacaactatgctcaaacgataatatgcaagtaatgaactgcacaactccagcaaattattttcatgctttaagaagacaaatgcatagaaattttagaaagccactaatcattatgacgccaaaatcattattaaggaataagtattgtgtttcaaatttagaggattttaacaaaaaaaatactttccatagagtactgtgggatcatgctatcgatcctaaatctaaaggatttattaaactaaaagaaagttctaaaattagaaaagtaattctttgttctggaaaagtatattttgatttgctagatgctagagagaaactcaaaagagatgatgtagtgatgtatagaattgaacaattgtatccatttccagcaaaagctttggttaaagagttaaagccatatgctaaaaatgctgaatttttctggtgtcaagaagaaccaaaaaatatgggtgcttggttttcagttagagattatatccaatggacattagacactttaaaggctaataataataaaa

SEQ ID NO: 217297 - DNA, 838 bp, Unknown
  Bacterial polypeptide expressing nucleotide sequence isolated from the Sargasso Sea
atatggatacagtttagtagaaccgaatacattgactatttgggaagctcaatttggtgattttgcaaatggcgctcaagtaatcattgatcaatttatatcatctggtgaaagaaagtggaaacgagcatcaggactagttatgttattacctcacggttatgaaggacaaggtccagaacactcctctgcaaggttagagagattcttacaattatgtgcaaatgataatttacaagttatgaactgtacgactcccgcaaattattttcatgctttaagaagacaaatgcaccgtgattttagaaaacctctaattataatgacacctaagtcacttttaagaaataaatattgtgtatcaaatttagaagattttagtaaacaaaattcttttcatagagtgctatgggatcatgctagagatactaagcaaaaaggttttattaagttaaaagaagataaaaaaattagaaaagtaatattatgctctggaaaaatttattttgatcttctcgcagcaagagagaaactaaaaattaatgatgtgattttgtatagaattgaacaactatatcctttccctgcaaaaagtttggttaaagagctaaaaccatttgcaaaaaatgcaaaattttattggtgccaagaggagcctaaaaatatgggtgcttggtttgctgttagagattatatacaatggacattagagactattaaggctaaaaacaatgtaatttcttacattggaagaagtccagatgctacgcctgccacaggttatgcaaggagacataattctgaacaacaagaaattataaataaagtatttgaataa

SEQ ID NO: 217298 - DNA, 902 bp, Unknown
  Bacterial polypeptide expressing nucleotide sequence isolated from the Sargasso Sea
atggcatatgcaactcttctttctgaaggatatccagtaagaatttccggacaagatgttagaagaggtactttttctcatagacacgcttgtgtttttgatacaaatactggaaaaggttttattccactttctaaagttgcaaaaaaatataataccagatttgacatatatgatactttgctgtctgaagaggcagttctagcatttgaatacggatactctgcaacgtggccgtcaggtctaacgatatgggaggcgcagtttggggattttgccaatggagctcaggttgtaatagaccagtttattgtatctgctcaacataaatgggaaagattatctggtttagtaatgctattaccgcatggctatgaaggacaaggaccagaacatagtagtgcaagaatagaaagattcttgcaattatgtgcatcagaaaatatacaagtatgcattccaagctctccatcacagatgtttcatttgcttcgaaggcagaccataagaaaaatgagaacacctctgattgttataaccccaaaaagtcttttaagaaatcctaaggcagtttcatctatagaaggattatgtaatggaagttttaggactgttattgatgataaaattattgataaagacaatgtcaataatatagtgctttgctctggaaaagtttattatgaacttgagcaaagaaaaaaagaaacgaaaatagaaaacatggcaataataagaattgagcagttatatccatttccctatgatgatttagaagagttattagtatcatataaaaatgttaataaagttaaatggtgccaggaagagccatccaatcaaggtgcttggtttagtcataggcatagattacaaagagttcttgataggcttaaaaataa

SEQ ID NO: 217299 - DNA, 994 bp, Unknown
  Bacterial polypeptide expressing nucleotide sequence isolated from the Sargasso Sea
gctagacaccaatcaataaaacagcaaaaaaatatagattggtctacagcagaatcacttgcgtttgcgtcacttttagaagagggttttcctgttagattagttggtcaagattcaggtagaggtacatttagtcaaagacattcagtactaagagatcaaaaaaataattctcgttatatacctcttaacaatatttctaaaaatcaaaaaagatttgaaatagtggatagtttactttctgaattagcagttttgggttttgaatatggatatagtttagtggaaccagacacattaacaatttgggaggcacaatttggagattttgcaaacggtgcgcaagttgtaattgatcaattcattgcttctggagaaagaaaatggtcaagagcatcaggattagttatgctattaccacatggttatgaaggtcaaggaccagaacattcttcaggaagattagaaagatttttacagttatgtgctaaggaaaatttacaagttataaattgtactactcctgcaaattattttcatgctttaagacgtcaaatacacagagattttagaaaaccactagtggttatgactccaaaatctttattaagaaataaattgtgtgtttcaaaactagaagattttagtcaagaaaattctttccacagagttctttgggatcatgctattgacccaaaagaaaaaaattttataaaacttaaagaaagtaagaaaataaaaaaagtaattttatgttcaggaaaagtctattttgatctattagaagcaagagaaaaattgaaaaaaaatgatgtaattgtttttcgtatagagcagctatatccttttccagtaaaatcactaattaaagaaattaaaccatttgcaaaaaatgctaaattttattggtgtcaagaagagccaaaaaatatgggggcgtggttttcagttagagattatatacaatggacattagactatataaacgctaata

SEQ ID NO: 217300 - DNA, 912 bp, Unknown
  Bacterial polypeptide expressing nucleotide sequence isolated from the Sargasso Sea
aaaaacacaaaaaaaaatttgagattgttgatagttttctttcagagttagcagttcttggttttgaatatggatacagtttagttgagccaaatacattaacaatttgggaagcacaatttggtgattttgcgaatggagcacaagtcataatcgatcaatttatatcttcgggtgaaagaaaatggcaaagagcttctggattagtaatgttattgcctcatggatatgaaggccaagggcctgagcattcatctgcaagattagagagatttttgcagttgtgtgctaatgataatcttcaagtgatgaactgtactacaccagcaaattattttcatgcacttagaaggcaaattcatctcgacttcagaaagcctttagttttaatgacaccaaagtcacttttaagaaataaatattgtgtttcagatatacaggattttaataagcaaacatcatttcatcgtattttatgggatcacgcattaaataatgataacgaaaattttataaaattaaaaaatcctgacgaaattgaaaaagtaattctttgttctggaaaagtttacttcgatttattagctgcaagagaaaaaattaaaagagatgatgtaattttatttaggattgaacagttatatcctttccctgtaaaaagcttagtcaaagaactaaagccttatgcaaacaacgctaaattttattggtgccaagaagaaccaaaaaatatgggagcatggttttcagtgagagattatattcaatggacattagaaacaattaaagctaaaaataataatatttcttatattggaaggaatcctgacgcatctcccgcaactggctatgcaaaaaggcatatggtagaacaagaagaaattataaaaaaagtttttgataatgagtgaa

SEQ ID NO: 217301 - DNA, 826 bp, Unknown
  Bacterial polypeptide expressing nucleotide sequence isolated from the Sargasso Sea
ttgtcaggacaagactctggaagagggactttcagtcaaaggcatgcagttttaagaaatcaagataatcatgaaagatatgttcctttaaacaatatttcaaaaaatcaaaaaaattttgaaataatagatagtttactatctgaattagcagttttaggatttgagtttggatattctttatccgaacctgaaacattagttttgtgggaggctcagttcggtgattttgctaacggtgctcaaattattattgatcaattcatatcctcaggagagtcaaaatggggaagagctagtgggttagtaatgttattgccacatggctatgaaggacaagggccagaacactcttctgcaagattggagagatttttacagttatgtgctggagaaaatattcaagtagttaactgcactactccgtcaaactactttcatgttttaagacgtcagatgcatagagaatttagaaagccattaattcttatgacacctaaatccttattacgacataagaaatgtatttcaaatataaatgaatttacaaaaaaaagtacctttcatagagttttagaagatgatgcttatttaaaagtgaataatttactagagcttaaaaaaagagacgataaaattaaaaaagttgtaatgtgttcaggtaaaatttattatgatttaatagaagcaagagaaaaatttaaaaatgacgaggtgacatttgtcagaatagagcaactctacccttttccagtcaaaaccttagctaatatattaaaaagatacacaaaagctaaatttttctggtgtcaggaagaacctaaaa

SEQ ID NO: 217302 - DNA, 939 bp, Unknown
  Bacterial polypeptide expressing nucleotide sequence isolated from the Sargasso Sea
tgcatttggttcgcttttagaagaaggatatccagtcagattagttggacaagattctggaagaggaacttttagtcaaagacattctgtacttagaaaccaaattgataattcaagatatataccgcttaataacatttcaggtaatcaaaaaaaatttgaagttgtagatagttttttatcagagttagctgttttgggttttgaatatggatacagtctagttgaaccaaatactcttactctatgggaagcacaatttggtgattttgcaaatggggctcaagttattattgatcagtttatagcctctggtgagaggaaatggtctcgagcttctggtttagtaatgctcttaccacatggatatgaagggcaaggaccagaacattcatcagcaaggttggagagatttttacagctttgttcaaatgacaatatgcaagtaatgaattgtactacgcctgcaaattattttcatgcacttagaagacaaatgcacagagaatttagaaaacctttggtaataatgactcctaaatcattgttgagaaataaattttgtacttctaatatagatgattttagtaaaaataattctttccatagagtattgtgggatcatgcaattgacccaaaaagcaatggatttattaaattaaaaaaagatagtgaaattaagaaagttattctttgttctggaaaagtatattttgatttattagttgctagagaaaagctaaaaagagatgatgttattttgtttagaatagaacagctatatccatttccagttaaaagtcttgttaaagaaatcaaaccttttgcaaaaaatgctaagttttattggtgtcaagaggagccaaaaaatatgggagcatggttttcggtgagagattatatacaatggacattagataatattaaagctaaaaatag

SEQ ID NO: 217303 - DNA, 880 bp, Unknown
  Bacterial polypeptide expressing nucleotide sequence isolated from the Sargasso Sea
tcaagaaatcaaaaaaagtttgaaattgttgatagttttttatcagaactagctgttttgggttttgaatatggttatagcttagttgaaccaaatacattgacaatatgggaagctcaatttggagactttgcaaatggggcgcaggtaataattgatcaatttatttcttcaggagaaagaaaatggttaagagcatcaggtttggttttattattgcctcatggttatgaaggtcaaggcccagaacattcatccgcaagattagaaagatttttacaattatgttcaaatgacaacatgcaagtaatgaactgcactactccagcaaattattttcatgctttaagaaggcagatgcatagagattttagaaaacctttagttattatgacaccaaaatcattattaagaaataaattttgtgtttcaaatattggtgatttttctaaatcaaattcatttcacagaattctttgggaccatgctatagatcccaaaagtaaaggttttataaaattaaaaaaaaataatgaaataaaaaaagtaatattatgttcaggaaaaatttactttgacttattagcagcaagagaaaagctaaaaagagatgatgtaattttattcagaattgaacaactttatccatttccagcaaaaagcctagtaaaggaaatcaaaccttttgcaaaaaaagctaaattttactggtgtcaagaagaaccaaaaaatatgggagcttggttctcggtgagagattatatacaatggacattagattatataaaagctaataatagagaaatttcttatattgggagaagtcccgatgcaacgcctgcaactggttacgcaaaaagacatttggcccaacaaaaag

SEQ ID NO: 217304 - DNA, 918 bp, Unknown
  Bacterial polypeptide expressing nucleotide sequence isolated from the Sargasso Sea
gctgaatctatagcacttgctagtcttgttgatgagggtaatggagtaaggttagttggtcaagatactgtcagaggtacttttagtcatagacacgctggtataaatgatcaggttacaggtgaacgttattatccgataaaaaatatttctacaaatcagggtaaagcagaagtaatagacagtttattatcagaaatgggagtgctaggattcgagtatggatactcattaacagacccggatactttagtactatgggaagcccagtttggagattttgcaaatggtgcgcaggtaatatttgatcaatttataagctctggagaaaaaaaatggaccagagcaagtgggctcgtgatgttactccctcatggttatgaaggccaaggtccagaacattcctcagcaagaattgaaagatatttacaggcatgtgcccaagaaaatatacaagttgtaaattgtacaactccagcaaattactttcacgcactaagaagacaaattcatagaccttttagaaaacctttggtcatatttacaccaaaatctttacttaggaataaaaaatgtgtttcagagctagaggattttacgaaggagaattcattccatagggttttatctgataaagcagaatctccaaagtacgatatgatatcactagctgatgataactcaattgatagagtcatattgtgttctggaaagatatattatgatttgattgatcaacgagaaaaacagaaagctgataaagtacagattgtgcgaattgagcaattatatccgtttccagcaaaaacgttagcaaaacatttaaatagatttacaaatgtaaagaaaattatttggtgccaagaagaaccacaaaatatgggttgttggaatcatgttgaaaggtacataaatcgt

SEQ ID NO: 217305 - DNA, 905 bp, Unknown
  Bacterial polypeptide expressing nucleotide sequence isolated from the Sargasso Sea
aaatcaaaaaagatttgaaataatagatagtttactctcagaaatggctgttctaggtttcgagtatggttatgctctatcagagccaacgactcttgtgatttgggaagcacagtttggagattttgcaaacggggctcaggttattatagaccaatttattgcatccgctgaaagaaaatgggcaagagctaatggtcttgtaatgttattaccgcatggctacgaaggacagggaccagagcattcatcagctagattagaaagatttttacaactatgtgctcaggagaatattcaagttgtgaattgtacaactccagcaaattatttccatgctttgcgtagacaaatccacagagattttagaaaacccttgatcattatgactccaaaatctctactaagaaataaaatgtgcacttctaacattgaggattttactaaaaagaatacctttcatagagttctcattgaccatgcagactcacaaaaaaataatttaatcaaacttgcagaagataaaaaaataaaaaaagtagtaatctgttctggaaaaatttattttgacctcctccaagcaagagaaaaaaacaaaaataaaaatatatttattattagaatagaacaattatatccatttcctgtaaaaacacttgctaatgtattaaaaagatttagaaaaaaaactgaatttttttggtgtcaagaagaacctcaaaatatgggtgcgtggaatactgttagaaactatattcaatggagtttaaattatataaaagcggatgataaagaaattaaatatattggaagaaagccagccgcttcaccagctagtggatatctaaaaaaacatcttgcagagcaaaatgaaatattagaaaaggtagtaggaaagctttaat

SEQ ID NO: 217306 - DNA, 781 bp, Unknown
  Bacterial polypeptide expressing nucleotide sequence isolated from the Sargasso Sea
cttaaaactacatattgtggttctatcggtgcagagtatatgcacatcacatctacagaagaaaagcgttggttacaacaacgtttagaatctgttcaatctaggcctaaattcgaaaaagaagaaaagctacgtatcctcaaggggttaactgcagctgatggtcttgaaaaatatttgggtgctaagttccctggtgcaaaacggttctcactagaaggtggggatgcattagtacctatgcttaaagagctaattcaccgagctggtgaaagtggccaacaagaagccgtaattggtatggctcaccgcggacgcttgaacgttttagtgaacgttttaggtaaaaatccatcagagctttttgatgaattcgccggcaagcataaagatacattaagttctggtgatgttaagtaccacatgggttattcatcggactttgccactaaaggtggcaacgttcatatggcacttgcttttaatccttctcaccttgagatagttaaccctgtagttatgggttctgtacgcgctcgtttagatcgtttaggtgacactacgggaataaaagcattaccgatcacaattcatggtgattctgctgtaacaggtcaaggtgtagtacaagaaacgtttaacttgtctcaaactaatgcgtttagttgtggtggcagtattcgaattgttgttaataaccaagttggttttactacttctaaacaagacgatgttcgttctacagattactgtactgatatcgccaaaatggttcagtcac

SEQ ID NO: 217307 - DNA, 925 bp, Unknown
  Bacterial polypeptide expressing nucleotide sequence isolated from the Sargasso Sea
acttgaagaaggatatccagtaaggttagttggtcaagacactggaagaggaacattcagccaaagacattcagttttgcgaaatcaattagataattcaagatatattccacttaatcatatttcaaaaaatcaaaagaatgcagaaatagtagatagttttttatctgagttagctgttttaggttttgaatatggatacagtttagtagaaccaaacacacttactatttgggaggcacaatttggagactttgctaatggcgcacaagttataattgatcaatttatttcttcaggagaaagaaaatggaaaagagcatctggaattgtaatgttattaccccatggttatgaaggtcagggcccagaacattcttctgcacgattagaaagatttttacaactatgttctaatgataatatgcaagtaatgaattgtacaactcctgcaaactattttcatgctttacgaagacaaatgcatcgtgattttagaaaacctttaataataatgactccaaaatctttattaagaaataaatattgtgtttcaaatttagatgattttagtaaagataattcatttcatagaataatgtgggatcactctatggatcctaaatctaaaggttttataaagttaaaaaaaagttctgaaataaaaaaagtaatattatgttcgggtaaagtttattttgatttattagatgcaagggaaaaacttaagaaaaatgatattatattctttagaattgaacagctatatccatttccagcaaaaagccttttaaaagagcttaaaccatatgcaaaaaatgcaaaattttattggtgtcaagaagaacctaaaaatatgggcgcttggttttcagtaagagattatatacaatggacattagatactattaaagctacaaataat

SEQ ID NO: 217308 - DNA, 895 bp, Unknown
  Bacterial polypeptide expressing nucleotide sequence isolated from the Sargasso Sea
gggcatatatcgctttccgaactagcagaaaaaaataagacaagctttgatatatatgattctttgctttcggaagaagcggttttaggatttgaatatggatactctgctacctggccatcaggattaacaatttgggaagcgcaatttggtgattttgctaatggcgctcaagtagtaattgatcaatttatcgtatcagcacaacataaatgggagagattatcaggattaattatgcttttacctcatggttatgaggggcaaggacctgagcacagcagcgcgagaatagagagatttcttcaattatgtgcttcagaaaatattcaagtatgtgtaccaagctcacctaaacaaatttttcatcttcttagaaggcaggctataagaaaaatgcgtacacctttaattgttatttctcctaaaagccttttaagaaatcctcaggcagtttctacacttgatgacttaagcgatggcaattttgagtgtgtaatcgatgatgaattagataataaaaatgatgtaaaaaagataattatgtgctctggaaaagttttttatgagttaattgagaaaagaaacaaagaaaaacgttatgaaatagcaattattagaatagaacaattgtacccttttccttacgatgaccttgaagaaattcttttaaggtatcaaaatgtacatgaatatatctggtgtcaggaagagcctttaaatcaaggagcatggtttagccacaggcacagaatacaaagggttttagataggcttggtaataataatgaggttaagctcgtaagcagaccaccagcagcagcgcctgcagttggattgatgaaacttcatttaaagcaacaaaagacattaattaatgaggcaattgtttaat

SEQ ID NO: 217309 - DNA, 801 bp, Unknown
  Bacterial polypeptide expressing nucleotide sequence isolated from the Sargasso Sea
actgataactcaaggttcattccacttaacaatatttccggaaaaacaaaaaaattttgaaattgttgatagctttttatctgaacttgcagttctaggttttgagtatggatatagtttggttgaaccaaataccctaacgatttgggaagctcaatttggagattttgccaatggagctcaagttattattgaccaatttatttcttctggtgaaagaaaatggtcgagagcatctggtttggttttattgttaccacatggttatgagggtcaaggtcccgaacactcttcagctagattggagagatttttacaattatgttcaaatgacaatatgcaagtaatgaattgtactacaccagcaaattatttccatgctttaagaagacaaatgcatagagattttagaaagccattaattatgatgactccaaaatctcttctaagaaataaattttgtgtttctaatattgaagactttagtaaaaaaaattcatttcatagagtattatgggatcatgcgattgatccagaaaccaaaggttttattaaattaaaagaaaaaaatgaaattaaaaaagtaatattatgttctggaaaaatttattttgacttaattgcagctagagaaaaaattaaaaagaatgatgtaattattttcagaatcgaacaactttatccttttcctgcaaaaagtctggtaaaagaaatgagaccttttgcaaaaaaagccaaattttattggtgtcaagaagaacctaaaaatatgggtgcatggttttctgtgagagatatatt

SEQ ID NO: 217310 - DNA, 750 bp, Unknown
  Bacterial polypeptide expressing nucleotide sequence isolated from the Sargasso Sea
tgagtatggatatagtttagtagagccaagtactttaactatttgggaagcacagtttggagattttgcaaatggtgcacaagtaattattgatcaatttatttcctctggtgaaagaaaatggtcaagagctagcggcttagttatgcttttgccacatggttatgaaggtcaaggcccagaacattcttctggtagattagagagatttcttcaaatgtgtgctcaagataatttgcaagttattaattgtacaacgccagcaaattatttccacgcattaagacgacaaattcatagagattttagaaaaccattagttgttatgacccctaagtccttgctaagaaataaactttgtgtttcaaatttagaggattttagtaaaaaaaattcttttcatagagttctatgggatcatgctattgatccaaaagaaagtaaatttataaaacttgaaaaaaatagtaaaattagcaaagtgatattgtgttcaggtaaaatctattttgacttattagaagcaagagaaaaaattaaaagaaaagatattatatttttaagaatcgaacaattgtacccttttccagtaaaatcactcgtaaaggaaataaaaaaatatgcaaaaaatgcaaaattttattggtgccaagaagaaccaaaaaatatgggtgcctggttttccgtgagagattatattcaatggacattagattatattggagctaaatataataatatttcttatat

SEQ ID NO: 217311 - DNA, 931 bp, Unknown
  Bacterial polypeptide expressing nucleotide sequence isolated from the Sargasso Sea
aaaaaaacaattgatcaaggttttaatattgattggtcatcagcagaagcacttgcttttggtttattgttggaagagggtttcccagtaaggtttgtaggtcaagactctggaagaggaacttttagtcaaaggcactcagttttacgtaatcaattagataatactagatatatacctttaaatagtatttcaaaaaatcaaaagaaattcgaaattgtagatagtttcttatcggagttagcagttcttggttttgagtatggttatagtttagttgagcccaatacattaacaatctgggaagcgcaatttggtgattttgctaatggagcacaagttataatagatcaatttatatcttcaggtgaaagaaaatggcagagagcctctggtttagtaatgttattacctcatggatatgaaggccagggtcccgagcattcatctgcaagattagaaagatttttacagttatgcgctaatgataatcttcaagtgatgaattgtacaacgccagctaattactttcatgctcttagaagacagattcatcgtgactttagaaaacctttagttttaatgacaccaaagtcacttttaagaaacaaatattgtgtttcaagtattgaggactttaataagcaaacttcatttcaccgaattttatgggaccacgcactaaataaagattctaaaaattttataaaattgaaaaaacctgcagaaattaaaaaagttattctttgttccggaaaagtttatttcgatttattagctgctagagaaaaaattaaaagagacgatgtaatcttatttagaatagaacaattatacccttttcccgtaaaaagcttagtcaaagaacttaagccttacgcaaataataccaaattttattggtgccaagaagaaccaaaaaatatgggag

SEQ ID NO: 217312 - DNA, 809 bp, Unknown
  Bacterial polypeptide expressing nucleotide sequence isolated from the Sargasso Sea
aactctagttttatgggaagctcagtttggtgattttgctaatggtgcccaggttgtaattgaccaatttatttcttctggtgagtctaagtggtcaagagctagtggacttgtaatgcttttacctcacggttatgagggccaaggaccagaacattcttccgcaagacttgagagatttttgcaattatgctctcaagataatttacaagtggtaaattgcacaacacctgcaaactatttccatgctctaagacgacagatgcacagaaattttagaaaacctttgatagttatgacaccaaaatctttattaagacacaaaagatgtacctctagcattgatgattttacaaagcaaaattcttttcacagaattttagaggatcacgcatatcttaaagacagcaaattagttgaattaaaaaatgataaaaaaattaaaaaagtagttatttgttctggtaaaatttattttgatttagtcgaggcacgagaaaaagctaaagatgataatgtagttttgataagggtagagcaattatatccatttccggttaaacaattagggaaacaattaaaaagatatgagaacgcaaaattttattggtgccaagaagaacctatgaatatgggagcatggaacactgctagacattatatagatagaactctggatatcattcaagcaaaaggcgaaaaagtgagatatgtaggaagaaatgctgcggcatctccagctactggaaatctaaataaacatcttgcagaacaaaaagaaatattagaaaaggttataaacaaataaa

SEQ ID NO: 217313 - DNA, 856 bp, Unknown
  Bacterial polypeptide expressing nucleotide sequence isolated from the Sargasso Sea
aaatcaaaaaaactttgagatagtagatagtttactatctgaattagcagtcttaggtttcgaatatgggtatagtttagttgaacctgaaactttgacaatatgggaagcgcaatttggtgactttgcaaatggagctcaagtaataattgatcagtttatttcatcaggtgaaagaaaatggtctcgtgcatctgggctagttttacttttaccgcatgggtatgaggggcaaggcccagaacattcatctgctaggttagaaagatttttacaactctgtggtcaagaaaacctccaagttttgaattgtacaacccctgcaaattattttcatgctttaaggagacaaatacacagagattttagaaaaccacttgttataatgactcctaaatcattactgagacataaggtttgtgtttctaatttagaagattttagtaaaaaaaactcttttcatagaattttagaagaccacgcatttgacaaaaaaaatggttttttagaattaaaaaagtcgaaaaaaataagaaaagtaataatatgttcaggaaaaatatattttgatctattagaagccagagagaaattaaagggaaatgatattgttttattaagaattgagcagctctaccctttcccagctaaatcattagtaaaatctattaaaccatatgcaaaaaatgctcaatttatatggtgtcaggaagaaccaaaaaatatgggtgcatggtcacatgtgagggattatatacaatggacattagactttataaaagctaataataaaaaggtttcttatattggaagagcgcctgcagcttcaccggctaccggttatgccaaaagacat

SEQ ID NO: 217314 - DNA, 836 bp, Unknown
  Bacterial polypeptide expressing nucleotide sequence isolated from the Sargasso Sea
tggttatagcttagttgaaccaaatacattacaaatatgggaagctcaatttggtgactttgcaaatggagcacaggtaataattgatcaatttatttcttctggagaaagaaaatggttgagagcatcgggtttagttttgttattgccccacggttatgagggtcaaggaccagagcattcatctgcaagattagaaagatttttacaattatgttcaaatgataacttgcaagtaatgaattgtactacacccgcaaactattttcatgccttaagaagacagatgcatagagattttagaaaacctttagttattatgacaccaaaatctttattaagaaataaattttgtgtttcaaatattagtgatttttctaagtcaaattcatttcatagagtgctttgggatcatgcagtagatccaaaaagcaaaggttttataaaattaaaaaaaaataatgaaataaaaaaagttatattatgttcaggaaaaatttactttgacttattaatagcaagagaaaaattaaaaagagatgatgtcattttattcagaattgaacaactttatccgtttccagctaaaagcttagtaaaggaaattaaaccttttgcgaaaaatgctaaattttactggtgtcaagaagaaccaaagaatatgggcgcatggttctcggtgagagattatatacaatggacattagattatattaaagctaataatagggaaatttcttatattgggagaagtcctgatgcaacacctgcaacaggttatgcaaaaagacatttagcccaacaaaaagaaataattgataaagtttttaactaaa

SEQ ID NO: 217315 - DNA, 885 bp, Unknown
  Bacterial polypeptide expressing nucleotide sequence isolated from the Sargasso Sea
cggggtgttgggtttcgagtacggatattcgttggcggagccacattcccttgtcgtgtgggaagcgcagttcggcgacttcgcaaacggcgcgcaggtgatcatcgatcagttcatctcgtcgggtgagtcgaaatggctgcggatgagcggcctcgtaatgctcctgccccacggttacgagggccagggtccggagcacagttcggctaaactggagcgctatctgcagctttgcgccgaagacaacatgcaggtcgttaacctaacgacgccggcgaattattaccatgcgctgcggcggcagatgcggcgtgagttccgtaaaccgctcatcgtgatgacgccgaaatcattgcttcgtcacaagcgctgcgtttcgtctttgggcgaaatggagatgggaacaacattccatcgcgtgttgtgggacgcccgacactggacaaaggaactcgccaaggattcggatatccgtcgcgtcatcctgtgctcgggaaaggtctattacgacctcgccgaagagcgcgacaagcgtggccttaaagaggcttttattatgcgagtcgaacagctctatccgttcccaatgaaagcgttgaccgaggatctcagtcggttcaaacaggctgagttcatctggtgtcaggaagaaccccgcaatatgggtgcctggtcctttgcgcgcgagcgcgtcgaagaagtgctggagagtattggtgctgccagtccccggatttcctacgtaggtcgtccggaagcagcctctccggcaagtggatcgctccgtcgtcatgttgtggagcaggaggaactcgtggataaagcactgacactgccgccaaagcgggctccccataaggctaacgcgcgcaagtcggtgac

SEQ ID NO: 217316 - DNA, 934 bp, Unknown
  Bacterial polypeptide expressing nucleotide sequence isolated from the Sargasso Sea
ggacaagatacaggcagaggtacattcagtcaaagacattcagttttaagaaatcaaattgataacagccgatatattcctcttaacaatatttcaaaaacacaaaaacaatttgaaatagttgatagtttgctatcagaatttgcagttttaggttttgagtatggttatagtttagtagaaccagaaacattagtgttatgggaagcacaatttggtgattttgcgaatggtgcacaggtaattatcgatcaatttatagcatctggagaaaggaaatgggctagagcttcaggattagttttacttctgccgcatggatatgaaggtcaagggccagaacattcgtctgcaaggttagaaagatttttacagttgtgtgcaaaagataatttacaagttatgaatgtaactacacccgcaaattattttcatgctttaagaagacagatcactcgagattttagaaagccattagttataatgacaccaaaatctcttttgagaaacaaacattgtgtttcaaatttagaagatttcagtaaaaagaattcttttcatagaatactttgggaccactcactagatacaaagagtaattttattaaacttaagagtccaaaagatataaataaagttatcatatgttcaggaaaggtctattttgatttacttgaagaaagggaaaaaaatgaaagaaatgatattttattacttagaatagaacaattatatccttttcccgcaagatcattagctaaagaattaaaaccttatattaaaaatgctaagttttattggtgtcaagaagaaccaaagaatatgggtgcatggttttttgttagagattatattgattggactttagaatatataaaagctaaaaataataaaatttcttatattggtagagaattgcttcaacaccagcaac

SEQ ID NO: 217317 - DNA, 853 bp, Unknown
  Bacterial polypeptide expressing nucleotide sequence isolated from the Sargasso Sea
ggatatccagttagacttgtaggacaagactctggaagagggacattcagtcaaagacattctgtgttgagaaatcaaacagataattctaggtacattccacttaataatatttctaataatcaaaagcaatttgaagtagtagatagctttttgtcagaattagctgttttgggatttgaatatggttatagtcttgtagaaccaaatacacttactctttgggaggcacaatttggtgattttgcaaatggtgctcaagtagtaattgatcaattcattgcttcaggagaaagaaaatggaacagagcttctggtttagtaatgttgttgccacatggctatgaaggacagggaccagagcattcatctgcaaggctagagagatttttacaattatgttctaatgataatatgcaagtaatgaattgcacaactccggcaaattattttcatgctttaagaaggcagatgcatagaagttttaggaagccactaattataatgacaccaaagtcacttttaagaaataaatattgtgtttcaaatttagaggattttaataaaaaaaattctttccatagggtactgtgggatcatgctattgatcctaagtctaatggattcattaaacttaaagaaagttctaaaattaaaaaagtaattctatgttctggaaaagtgtattttgatttattagatgccagagaaaaacttaaaagagatgatgttgtgatttttagaattgaacaattgtatccgtttcctgcaaagactttagttaatgagttaaaaccatatgctgaaaatgctgaatttttttggtgccaagaagaaccaaagaatatgggag

SEQ ID NO: 217318 - DNA, 854 bp, Unknown
  Bacterial polypeptide expressing nucleotide sequence isolated from the Sargasso Sea
tttaggatttgaatatggatatagtttagtagaaccaaatactcttactctatgggaagctcaatttggtgattttgccaacggtgcgcaagttataatcgatcaatttatctcttctggtgaaagaaaatggcaaagagcctcaggtttggtaatgctactacctcatggctatgaaggtcagggaccagagcattcctctgctagacttgaaagatttttacaattgtgtgcaaatgataatctccaagttatgaattgtacaactccagcaaattattttcatgctttgcgtagacaaatacaccgtgattttagaaaaccccttgtaatcatgacgcctaaatctttgttaagaaacaaattttgtgtgtcaaacattgatgattttagtaagcaaacatcatttcatcgaataatgtgggatcatgcattaagcgatcaatctaaaaattttattaaattaaaaaaatccagtgaaattaaaaaagttataatttgctcgggaaaagtatatttcgatcttttaaatgctagagaaaagttaaaaagagatgatgtcgtaatgtttagaatagagcaactttatccttttccagcaaagagtttggtaaaagaacttaaaccatatgctaaaaatgctaatttttattggtgtcaggaagagccaaaaaatatgggtgcatggttttcagtgagggattatatacaatggacattggataccattaaagctaaaaataatgtagtttcttatattggaagaagtcctgatgcgtcaccagccactggatatgctaaaaggcatcaaattgagcaacaagaaattataaatgaagtatttgatcaatgag

SEQ ID NO: 217319 - DNA, 920 bp, Unknown
  Bacterial polypeptide expressing nucleotide sequence isolated from the Sargasso Sea
tctggaagaggtacattttcacaaagacattctgtacttagagatcaaataactaacaaatattatacgcctttaaataatatttcaaaaaaacaaaaacgtttcgaagttattgatagtctactttccgaatttgcagttttaggttttgagcatggttatgctctctctgaaccaactacactagtagtttgggaagcacaattcggagactttgctaatggagctcaagtaataatagatcagttcattgcttctggtgaaagaaaatgggccagagctagcggtttagtaatgttattaccacatggttatgaaggacagggacctgaacattcttcagctagactggaaagatttttgcaattgtgtgctcaagaaaatattcaggttgtaaactgcacaactcccgcaaattattttcacgcattaagaagacaaatgcacagagaatttcgtaagcctttaataatcatgacacctaaatcattactaagaaataaaagatgtgtatccaatattgaagattttactaaaaaaaattcatttcatagagtgttgcctgaccatgcagaaattaaaagttatgggcttatcgatcttaaaaaagacaaaaaaataaaaaaagtagttttatgttcaggtaaaatttattttgatcttttagaatctagagaaaaaataaaaaatgatgaggttttttttattaggattgaacaactatatccttttcctgttaagaccctagctgtagaacttaaaagatttagaaaaaatgcaaaattttattggtgccaagaagaacctcaaaatatgggtgcttggaattctgctcgtaattatattgaatggacgcttaaacatataggagcagaggatacagaagtaagatatataggaagaaaaccagctgcttctcc

SEQ ID NO: 217320 - DNA, 844 bp, Unknown
  Bacterial polypeptide expressing nucleotide sequence isolated from the Sargasso Sea
aggttttgagtacggttacagtttagtggagcctaatacacttactatttgggaagctcaatttggagattttgcaaacggagctcaagtagtaatagatcagtttgttgcatctggagagagaaaatggtctagagcttctggtctagtgatgttattaccacacgggtatgaaggtcaaggccctgaacattcatctgcaagattggaaagatttttacaactatgttctaatgacaacatgcaagtaatgaattgtactactcctgctaattattttcatgctttaagaaggcaaatgcatagagattttcgaaaacctttaatattaatgacgccaaaatctttactaagacacaaacattgtatttcaaatttagaggattttagtaagcataattcatttcatagagttttgtgggatcatgctattgatcctaaaatcaaaggttttataaaattaaaaaaagcaaaaaaaataaaaaaagtaattttgtgctccggtaaaatatattttgatttacttgaggaaagagaaaaaattaaaagagatgatgtggttttttatagaatagaacaactttatccttttcctgcaaaaagtcttgtaaaagaacttaagccttacgcaaaaaatgctaaattttattggtgtcaggaagaacctaaaaatatgggagcatggttttcggtaagagattatatccaatggacattagataatattaaggctaataataaagatattttttatattggaagaagcccagatgcatctcctgctacaggatatgccaaaaggcatatttctcaacaaaaagaaataataaataaggtttttgaa

SEQ ID NO: 217321 - DNA, 868 bp, Unknown
  Bacterial polypeptide expressing nucleotide sequence isolated from the Sargasso Sea
tttgtcagaattggcagtcttaggttttgaatatggatatagccttgttgctcctaatactttaactatatgggaagcacagtttggagattttgctaatggagcacaggtaattattgatcagtttatatcttctggtgaaagaaaatggaaaagagcatctggattagttatgttactaccacatggttacgaaggacaaggacccgaacattcatcagcaagattagaaagatttctacaattatgtgcgaatgataatttgcaagtcatgaattgtacaacaccagctaattattttcatgcacttcgtaggcaggtattgcgtgattttagaaaacctctgataatgatgacgccaaaatcattattaagaaataagtattgcaaatctaatattagtgatttcagtaaaaataattcatttcatagagttatgtgggatcattctatggatcctaaaaacaaaggatttataaaacttaaaaaaaattcggaaattaaaaaagtaattttgtgttcaggaaaagtatattttgatttattagaagccagagaaaaaattaagaataatgatgtaattcttttcagaatcgaacaactttatccttttccagcaaaaagccttgtaaaagaactaaaaccattcgcaaaaaatgctaattttttttggtgccaggaagagccaaaaaatatgggtgcatggttactagttagagattatatccaatggactttacaaactattaaggctaaaaatattgaaatttcttatataggaaggaatcctgatgcatcacctgcaactggttatgcaaaaagacacctttcagaacaacaagaaattataaataaagtatttgaataa

SEQ ID NO: 217322 - DNA, 2658 bp, Unknown
  Bacterial polypeptide expressing nucleotide sequence isolated from the Sargasso Sea
aatgagttcatcaaaaaatctagattacgaaaaaacatcattcttacataaagcaaatacttcatttattgaagaaatgtatgtaaaatttattgagggagatacaactattcctcaaagttggaaaagctatttcgaaggtcttggggaggatctgaaggatgttattaaagagatagaaggtcctaattggaaaccaaataaaatcaagattaatcttaatcagcaaaatttaaaggaaaatcaaaaagtaaatcaaataaatatcaaagactcaattaaagcaatagctctaataagagcatatagaataaatggacatttgatagctaatttagatcctttagggatgatggaaagaaaatacatgcatgaattacatcctgaagattatggttttaataaggacgattttaatagaaaaatttatttagataattacttagatagagattttgcatcactaaaagaaataattaaatttttaaaagataaatattgttccagtataggtgttgagtacatgcatatgacagagagagaagaaaaaatttggtttagagaaagaatggaaaaagaagaaaacaaaatcagttttacaaataatggtaaaaaggcaatattaaataaattaattcaggccgagggatttgaaaaatatttagcattaaaatttgtaggtacaaagaggtttggtcttgatggtgctgagtctttaattcctgcactagagcaaatcattaaaagaggtgggcaattaggagttaaggagattaaaattggaatgcctcatagaggtagattaaatgtgttagctaatcttctccaaaaatcttacaaaaaaatatttaatgaatttactggagagttttctgaaactcacgatgactcaaccggtgatgttaaatatcatttaggagcttcttcagatagaacatttgacgatattccagttcatattagtttaacagataacccgtcacatctagaggcagtagatcctgttgttttaggtcaaaccagagcaaaacaattttatcataatgatacaaaacgaaataaagtaataccaatattaatccatggtgatgcagcttttgctggccaaggagttgtagcagaatgttttgcgatgtctggtttaaaaggacataatactggtggaactattcatataattgtaaataatcaaattggttttactacaagcccaaggtttgccagatcaagtccttatccgtctgatctaggaaaagttgtagaatcaccaatcctacattgtaatggtgatgatcctgaggcagtagttcattgtgcaaaaattgctatagaatttagacaaaaatttaacaaagatgttgtgatagatatgatctgttacagaaggtttggtcataacgaaggagatgaaccttcatttactcaaccactaatgtatgaaaaaattaaatctcatccatctacattaaaagtttatggaaaaaaacttatagatgaaaaaataatttctgaacaagaatttaatactcaaataaaagattttaaaagtttattagacgaacagtataatagtgcaaaaaattatcagcctaagctgaaatggttcgagggaacttggtcaagatataaacctgaaaagggtaaagatagacgaggcaatagtggagttaatgcagaaaaattaagaataatctctgaaaaaattaataaaattccagctgaaataaatattcataaaactattaaaaaaattttggaattaagaagaaagtttgtagaaagtggacaaggaattgattggtcttctgcagaagcattagcatttggatctttattagaagaaggatatccagtcagattagttggtcaagattctggaaggggtacatttagtcaaagacattctgttttgagaaaccaaatagataattctagatatgtgccactaaataatatttcaaaaaaccaaaagaattttgagattgttgatagttttttatctgaattggcagttttaggatttgaatatggttatagtatggttgagccaaatacattaactatatgggaagcacagtttggcgattttgctaatggtgcgcaggtagtcattgatcaatttattgcatctggtgaaagaaaatggtcaagagcaagtggtcttgttttgttacttccacatggatatgagggacaaggtccagaacattcatcagcaagattagaaagatttttacaattaggtgcccaggaaaatattcaagtaatgaattgtaccacgcctgcaaattattttcacgccttaagaagacaaatacatagagactttagaaaaccattaattataatgacaccaaaatcgttattaagaaataaatattgtacttctaatttggaagattttggaaaggaaaatttttttcatagaattttaaacgatcacgctttcgagaagagaaataattttataaaacttaaagataataatttaattaaaaaagtaatattatgctcaggtaaaatctattttgatttgcttgaagcaagagaaaaaaataaaaaagatgatattgtgttttatagaattgaacaattatatccatttccaaataaaaatcttgttagtgaattaaaaaaatattctaaaaatgctaaatt

SEQ ID NO: 217323 - DNA, 1778 bp, Unknown
  Bacterial polypeptide expressing nucleotide sequence isolated from the Sargasso Sea
agacaggatcgaattggagataaagatagatcacaagttgtgccaattcttcttcatggagacgcttctttttctggacaaggagttgttatggaatcacttcaaatgtctcaaacaaggggattcaatgttgggggaacgattcatattattgtaaacaatcaaattggtttcactacaagcaatatcaatgactcaagatcaacagattattcatctgatgtagcaaagattattcaagcccctgtaattcatgtgaacggtgatgatccggagatggttgtaaatgcagcaaaaattgcttgtaagtatagaaacaaatttaaaaaagatatcgttattgatttattttgttacagaagaagaggacataacgaagctgatgatccttcagctactcaacccttgatgtataacaaaatttcaaaacatccatctgttttaaatcagtatgaaacaaatttaatagataatggaatattaacatctgatgaagcaaaaaaaattaaaagtgaatatagaaaatctcttgaaggtggagaaagtgttgcaaaaaatttagcaaaaaatccaaatgatcaactttggtttgattgggagccttatatggatgttaagtggtggcccaaagttgataccaaatttaataaagacaagtttacgaagcttggcaaagctgtttgtaaggtaccaaaatcatttaatcttggctcacaagctaaaaaaatctttgatgatagattgagaatgaataatggagaaattcctataaattggggatatgctgaaacaatggcatatgcaactctcctagatgaaggttatccgataagattaaccggccaagatgtcagaagaggaactttttcacatagacacgcttgtgtttttgattccaataatggaatgggttacatacctttatcggatatagctgaaaaaaataaatctaagtttgatatatatgactcattgctatcggaggaagctgtattggcatttgaatatggttattctgctacttggccaagtggtcttactatttgggaggctcagtttggagattttgcaaatggagctcaagttgtaattgatcaattcatagtttctgcacaacataaatgggaaagattatccggtcttgtaatgcttttgcctcatggatacgaaggtcaaggtcctgagcatagcagcgcaagaattgaaagatttttgcaattatgcgcatctgaaaatatacaagtttgtgttccaagttctccaaaacaaatttttcatcttttgagacgacaagcaataagaaaaatgagaactccactagttgtaatatcaccaaaaagcctactcagaaatcctatggctgtttctaacttagacgaattaacaaacggaagttttgattgtgtaattgatgatgatataaaaaaacctgaggcggtaaaacgcttaattctttgttcaggtaaagttttttatgatcttattgaaaagaaaaaagaagaaaaccgcgaagatattgctgttataagaatagaacaattgtatccatttccttatgatgaccttgaagaaatccttacaaagtatcaaaatgtacaagaatttatatggtgccaagaggagcctttaaatcaaggcgcgtggtttagccatagacacagaattcaaagagttttagataggctaggtgatggtcttgaggttagtttggtaagcagaccagcagcagcagcacctgcagttggattaatgaagcttcatcttcaacaacaaaagga

SEQ ID NO: 217324 - DNA, 1564 bp, Unknown
  Bacterial polypeptide expressing nucleotide sequence isolated from the Sargasso Sea
gttgttttattgcgcccaagtagctacagaattcaggcaaaaatttaagagagatgttgtaatagatattttttgttacagaagatttggtcataatgagggcgatgaaccttcattcacgcagccgattatgtataaaaaaattaaacaacaaccttcaactttaaaattatattcatctcaattgataaacgaaaatattttaactgttgaacagtataaaactcaaatagaaaattataataaatatttggatcaggagtttcaaagttctaaaaattatatatcaaatgaacaagattggtttacaggagtttggtctaaatttacaacagaagttggttctgacagaagaggagtaacaggagttgacgagaatataattagaagtttaggccataaattatctgaaataccaaaagactttaatcctcatcatactattaaaagaatttttgataacaaaaaacaaatgatcaaaacaggcgagaatattgattgggcaacagctgaaagtttagcgtttgctacgttacttaatgaaggatatcctgtaagattagttggacaagattctgtcagaggtacatttagtcagaggcatgctggaattacagaccaactaaatggagaaaaatattttcctttaaaaaatttaaccgatagtcaagctcaagcggaaataatagatagtttactgtctgaaatgggtgtcttaggatttgagtatggatactcgctttctgaacctgatagtttagttctctgggaggcacaatttggagattttgcaaatggtgcccaagtcatatttgatcaattcataagttcaggagaaaaaaaatggtctcgcgcaagtgggctggtggtacttttacctcatggatatgaaggtcaggggccagaacactcatctggtagaatcgaaagatttttgcaattatgtgctcaagaaaatttacaaatagttaattgtacaacaccagcaaactattttcacgtgttaagaagacagattcatagaacttttagaaagcctttaatagtttttacacccaaatcattattacggtctaaaaagagtttttcaaagattgaggattttagcaaagaaagctcttttcatagagtgttaccagatcacgctgagttgccaaaaaataattatattaaactagcagaggataaagatatcaagaggatagttttttgtagtggtaaaatttactatgacttacttgaagaaagagaaaaattaatggagaatagagttcaattaataaggattgaacaactttacccttttccagcaaaaacacttgctaatcatgtcaaaagatttgaaaatgtagaaaaatatttttggtgtcaagaagagccccaaaatatgggaccttggaacactgtagaaaggtacttgcactggacattagattttgcaggtaaaaaaaataataaaatctattatgctggtagaaatccttcagcttcaacagcgacaggttatctaaaaaaacaccttgctcaacagaaagaaatcattacaaaagctctaactatttaa

SEQ ID NO: 217325 - DNA, 2890 bp, Unknown
  Bacterial polypeptide expressing nucleotide sequence isolated from the Sargasso Sea
aatgtcttcatctgataataatattacttttaaaaaaacctcgtttttgtcgggaataaactctgagttcataaatcagttttattcagactatttaaatgacccaaactctcttccaaacagctggattaagttttttgatggacttagtgaggatgaaaaacttattttagacgatttaaatggacctagttggtcacctgaaaaaaaaattcaaaaatcaaaatcttatttaatcgataatgaaaaaaataaagaagttaacgaagatttgaatttaagttcagtaaaagaagcttctaaggattcagttcgagcaattatgcttattagggcatatagaattcgtggacatttaattgcaaacttagatccgttatcaattcaaaaaaaagaggaacatcctgaactaaaaccagaaacttacggatttaataagaaagattataaaagaaaaatatttttagatggcgttttaggacttcagtatgcagatttgaatcaaatattagatattttaaaaagaacatattgttctgcaattggttatgaatttatgcatatgggtgatccagaagagaaagcttggataagaaacagaattgaaggaccggaaaaggatattgtatttactcaaaatgggaaaaaagcaatattaaataaaataattcaagcagagggatttgaaaaatacttacacgtcaaatttgtgggcactaaaagatttggtctagatggaggggagtcattaatccctgcattagaacaaattattaaaagaggtggaaatcttggagccaaagaaataaaaattggtatgcctcacagaggaagacttaacgtacttgcaaatgttatgggaaaacccttcagagcaatatttagtgaattctttggtaagtcagttaatgcaagtaaagattttgaaggagatgtaaaatatcatctaggagcttcttcgaacagagagtttgatggaaattctgttcacataagtttaacagataatccttcacatttagaggcagttaatccagttgtattaggtcaagtaagagcaaaacaattttttcataaagataaagatagaaaaaaagttatcccggttttgatgcatggagatgcagcatttgctggacaaggaatagtggcagagtgttttgcaatgtcaggcttacccggacataatattggtggaacaatacatataattgtaaacaatcagataggatttaccacagcacctcgttttgctcgttcttctccttacccttcagatgtagctaaaattgctcaagcaccaatttttcatgttaatggagatgatccagaagccgttgttcattgtgctaagattgctacagagtacagacaaaaatttaatcgtgatgttgtgattgatatggtttgttacagacgttttggacacaatgaaggcgatgagccttcatttactcaaccgattatgtatagaaagatcaaatctcatcctactacacttactttatatggaaaaaggctttcggctgaaggtctaacttcttatgaaaaactacaaaaagagaaagttgaatttaaacagtatttagaaaaagaatttgatatttcaaaaagttataagtcagaattaaagtggtttgatggtgcttggtcgagatttaaaccaggtcttgggaaagacaaaaggggtgtaagtggtgttgaaagaggcaaattagaaaaaatagggaaaaagatttttactatccctacaaattttaacgctcataaaacacttaaaagagtatttgagttaagaaaggaaatgttgaatgcaggaaaacttgattggtcctcagctgaaagtttagcaataggaacattattaacggagggtttttcagtaagattatctggacaggactctggtagaggaacatttagccagagacatgcaattttaagaaatcaagaaaatcatgacagatacatacctgtaaataatattgaaaaaggtcaaatgaaatttgaagtaatagatagtttgttatccgagcttgcagttttaggatttgaatttggatactcattatctgaaccagaaacactagttttatgggaagctcaatttggggattttgcaaatggtggtcaagttataatagaccaatttattacatcttcagagtctaaatggggaagagctagtggtctggttttattacttccacatggttacgagggacaaggacctgagcattcatccgcaagattagaacgatttttacaactttgtgctggtgaaaacatacaagttgttaattgcacaaccccttctaattattttcacgtcttaagaagacaaatgcacagagagttcagaaaaccattgataataatgacaccgaaatctttattgagacataaaagatgtatttcaagcatttcagaattcacatcaagaagttcatttcacagagttttagaggacgatgcctataaaaaagaaaacaaacttattactcttaaaaaagatagtaaaatcaaaaaagtagtaatgtgttcaggaaaaatttactatgatttagtggaggcaagagaaaaaaataaaaaagacaaagtaatttttgtacgattagagcaactatatccttttccagcaaaaactttagccaatgttttaaaaagatataaaaatgcagagtttctttggtgtcaagaagaacctaaaaatatgggtgcatggaatactgtaagaaattatattgaaagaaccctagaaataataaatattaaagatatcaacgttaaatatgtaggaagaaaggcttcttcttccactgcgactggaaatgctaataaacatcttgcacaacaaaaagaaatattggaaaagatacttaaagattaa

SEQ ID NO: 217326 - DNA, 2101 bp, Unknown
  Bacterial polypeptide expressing nucleotide sequence isolated from the Sargasso Sea
tattaaagaagttaaaataggtatgtctcatagaggtagacttaatgttttggcaaatgttttgcaaaaatcttacaaaaaaatttttaatgaatttactggtgagtttacttctgacactgaggatagtgctggagatgttaaatatcatctgggagcatcatcagatagggaatttgatggaaactcagttcatgttagtttaacagataatccttcccaccttgaggctgttaacccagttgttttgggacagacaagggctaaacaattttttcataaagaccgagagagaaacaaagttattcctattctcattcatggggatgctgcttttgcaggtcaaggtgtggtagcagaatgttttgcaatgtctggactaccaggacacaacactggaggaacgattcatattattgttaataatcagataggatttactactagtccgagatttgctaggtcttcaccttatccatctgatgttgcaaaaatggtagaggctccaattcttcatgtgaatggagatgatccagaagcagttgtttatgcaaccagaatagcaacagaatttcgactaaaatttaatagagacgtagtagtagatttaatttgttatagaagatttggacataatgagggagatgagccttcatttactcaacctttaatgtataaaaaaattagatctcaccccagtgtttataaaatttatggaaataaattggtaaacgaaaaatctataactcaagaattattaaatcaaaatgttaaatcatttaaagatttacttgatgaacaatataaaagtgcaaaagactataaacctaaaatagaatggtttgagggaacatggtcgagatataagcctgaaaaaggtaaagataaaaggggcataacaggttttgacgaaaataaattaaaaataatttcagataaaataaatggtattcctgaggaaaaaaatattcacaagactatatctaaaatatttaatgccagaaaagaaagtatcaaaaaaggtactggaatcgattggtcttcagctgaatctttagcgtttggatctttgctggaagagggatatccagttagacttgtaggacaagactctggaagaggaacatttagtcaacgacattctgtactgagaaatcaaatagataattctaggtatattcctcttaataatatttctaaaaatcaaaagcaatttgaagtagtagatagttttttatctgaacttgcggttttaggttttgaatatggttatagtttagtagagccaaacacacttactatttgggaagcacaattcggtgactttgctaatggagctcaagtagtaattgatcaatttattgcatctggtgagagaaaatggaatagagcatctggtatagtaatgttattgcctcatggatatgaaggacaaggaccagaacattcatcagcaaggctagaaagatttttacaactatgctcaaacgataatatgcaagtaatgaactgcacaactccagcaaattattttcatgctttaagaagacaaatgcatagaagtttcagaaagcccctcattataatgacaccaaaatcactgttaagaaataaatattgtatttcaaacttagaagattttaacaaaaaaaatagtttccatagagtgttgtgggatcatgctatcgatcctaagtctaaaggatttattaaactaaaagaaagttctaaaattaaaaaagtaattctttgttctggaaaagtatattttgatttattagatgccagggaaaagcttaaaagagatgatgttgtaatgtatcgaattgaacaattatatccatttccagcaaaagcgttagttaatgaattgaaaccatatgctaaaaatgctgaattcttttggtgtcaagaagaaccaaaaaatatgggtgcttggttttcagtaagagattatatccaatggacattagataatataaaggctaataataataatgtttcttacataggaagaagtccggacgcgacaccagcaactggttatgcgaaaaggcatatttttcaacaacaagaaattattaaaaaagtgtttgaataa

SEQ ID NO: 217327 - DNA, 2712 bp, Unknown
  Bacterial polypeptide expressing nucleotide sequence isolated from the Sargasso Sea
gatgtcatcatcaaaaaatctcgaatacaaaaaaacttcctttcttaataagtcaaatagcacctttatagaacaaatgtatttaaaatttattaataaggattctgatttacctgaaagctggaaaaattattttttagatattggagatgaactagatttaattgcaaaagaaattaatggaccatcatggagtccacaaaaaaaaagaattgatttagatgaaattcaaaaaactattgataataaagaaacaaacataccaaaagaaagccaacaaaatggtattgataaaatagacattaaaaaaagtaatagagattcaattagagcagtttctttaataagatcttatagacaaagaggtcacctaatatcaaaagtagatcctctagaattaagagaaatagaatatttagatgaactccacccagaaagttatggtttcaataaagaagattataaaaataaaatttatttagatggtattacaaataaagattattcaaatattaaagagatattatcttttcttaaaaaaacttattgtggttcaattggctatgagtatatgcatatttcgaatccatcagaaagaaaatggattagagacagagttgaaaaagatgaaaatgcacttcagttcacaaaaaatggaaaaaatgcaattttgaataaacttatacaggccgaaggttttgaaaaatttttaaatacaaaatttgttggaacaaaaagatttgggttagatggtgctgaaagtttaataccagctttagagcaaataattaaaataggtgggcaatttaaaattaaagaggttaaaattgggatgtctcatagaggaagattaaatgttttggctaatgtgcttcaaaaatcctataaaaaaatatttaatgagtttgcaggtgaaatgaatgatgatggagaagacacagctggcgatgtaaaatatcatttaggagcatcctcagatagggaatttgatggaaattctgttcatgtaagtttaacagataatccttctcacttagaagcagtcaatccagttgttttaggacaggctagagcaaaacagttttttcataaagataaagagagaaacaaagttattccaattttaattcatggagatgctgctttcgctggccaaggtattgtcgcagaatgttttgcgatgtctggtttgccaggtcataatacaggtggaacaattcatataattattaacaatcaaattggctttactactagtcctaggtttgcaagatcctctccacatccttcagatgttgcaaaaatggtagatgcaccaattatacatgctaatggggacgacccagaagctgtagtttatgcaacaagaatagctacagaatttagacttaagtttaatagagatgtagtgattgatttagtttgttatagaaggtttggtcataatgaaggagatgagccatcctttacccaacctttgatgtataaaaaaattagatcacatccttcaacaacaaatatatatggaaaaaaattaataaatgaaaatataattatagaagaagatttaaacttaaaaattaaaaaatttaaagatcttttagatcaacaatttaaaactgcaaaagattataaaccaaaaatcgaatggttcgagggaacttggtcaagatataagccagaaaaaggaaaagataaaagaggagcaaccggagtagaatcgaatatattattaaatatatctaataaaataaatgaagtaccatctgactcaaacattcataaaacaattaaaaaaattctagaaacaagaaaaaaaagtatagaacaaggatctggtatagattgggctacagcagaagcccttgcttttggatcattattggaagaaggatatcctgttagattagtaggacaagactctggacgaggtacttttagtcaaagacattccgtgttaagaaatcaaattgataattcaagatatattccacttaacaatatttcaaaaagtcaaaaaaactttgagattgttgatagttttctatcagagctcgcagttctaggatttgaatatggatatagtcttgtagcacccaataccttaactttatgggaagctcaatttggagattttgctaatggtgcccaagtaattattgatcaatttatagcatctggtgagagaaaatggaaaagagcatcaggattagttatgcttttacctcatggttatgaggggcaaggacccgaacattcatctgctagactagagagatttttacaactatgcgcaaatgacaatttgcaaattatgaattgtacaaccccagctaattattttcatgcacttagaaggcaagtactaagagattttagaaaaccattaataatcatgactcctaaatctctgttaagaaacaagtactgtgtatctgaactgaaagattttagtaaagaaaattcttttcacagggtgatgtgggatcattctatggatcctaaaagcaaaggttttattaaattaaaaaataactcagacattaaaaaagtaattttatgttcaggaaaaatatactttgatttattagcagctagagaaaagataaaaaaaaatgatgtgataatttttagaattgaacaattatatcctttccctgcaaaaagtcttgttaaagagttaaaatcatttgcaaaaaacgccaattttta

SEQ ID NO: 217328 - DNA, 2067 bp, Unknown
  Bacterial polypeptide expressing nucleotide sequence isolated from the Sargasso Sea
aataatgaaaataattttaagataacccaagacttagttaagtcaaatgcaaactcaataaaagctgttgccatgattagatcgtataggcaacgagggcatttaattgctaaattagatcctttgggcatgttaaagtctgagtatttagatgaacttcacccagaatcttatggatttaaaaaagaggactataacaaaaaaatttttttagacggtgtaataaataaagagtattcaaatataaatgaaatattggcttttttaagagaaaaatattgtggttcgcttggttatgaatacatgcatatctctaatcctacagaaagaaaatggtttagagatagagttgaaaaaaatgatgactttaaatttactcaaaatgggaaggaagcaattctaaataaattaatacaagcagagggttttgaaaagtttttacatactaaatatgtgggaacaaaaagatttggtcttgatggaggcgaaagcttgatacccgcacttgaacaaataattaagattgggggacaatcaaatatcaaagaagttaaaattggaatgtcacacagaggtagattgaatgtattagctaatgttttacaaaaatcttataaaagaatatttaatgaatttgcaggtgaaataagctcaaaatcagaggatgatactggagatgtaaaatatcacttaggagcttcttcaaatagagagtttgatggaaattcagttcatgtaagtttaactgataacccttcacatttagaggcagtaaatccagttgttttaggccagacaagggctaagcaattttttcataaagacaaagagagaaaaaaagtaattccaattttaattcatggagacgctgcttttgctggacaaggagttgtagcagagtgttttgcaatgtcaggactaccaggacacaatacaggtggaaccattcatatcataattaataatcaaattggttttaccacaagcccaagatttgctagatcatccccgtatccctcagatattgctaaaatggttgaagctccaattattcatgttaatggtgatgacccagaggctgtggtttatgcagcaagaatcgctactgactttaggttaaaatttaaccgagatgttgttattgatttgatttgttataggagatttggacacaatgagggtgacgaaccatcatttactcaaccattaatgtataaaaaaatacgctctcatccatccgcaataagagtttacggtgaaaaattggttaatgaaaattcaatttctaaagaatttttagacgcttcaattaaaaaattcaaagatttgttggatgagcaatttaaaaatgcaaaaaattataaaccaaaaattgagtggtttgagggaacctggtctagatataaacctgatgaaggaaaagataaaaggggggttacaggttcagatttaaaaaagttgatagagatttcagaaaaaattaattcaattccaaaagagattaatatacacaaaactatatcaaaaattctagatattagaaaaaataacgttttaaaaggagcagaaatcgactggtctacagcagagtccctagcctttggttcacttttagaggagggctatcctgttagattagttggccaagactctggtagaggaacatttagtcaaagacattctgttttaagaaatcaattggataattcaagatatatacctttaaataatatttcagaaagacaaaaaaaatttgaggttgttgacagttttttatctgaactagcagttttaggtttcgagtatggttacagtttagtagagccaaatacacttacaatttgggaggcacaatttggtgactttgcaaatggcgcacaagtagtaattgatcaatttatcgcctctggagaaagaaagtggtcaagagcatctggcttagttatgctactgcctcatggatatgaaggtcaaggacctgaacattcttctgcaagactagaaagatttttacaactgtgttcaaatgataatatgcaggttatgaactgtacaactcctgcaaat

SEQ ID NO: 217329 - DNA, 2135 bp, Unknown
  Bacterial polypeptide expressing nucleotide sequence isolated from the Sargasso Sea
gctagagcaaattataaaagtaggtgggcagtatgcagttaaagagctaaaaataggaatgccacacagaggaagactaaatgttttagctaatcttttgcaaaagtcatataaaagaatttttaatgaatttgctggtgaatatggagatatatcaaaagatagtacaggagatgttaaatatcatttaggagcttcctcagatagagagtttgatggaaactcagtacatataagtttaaccgacaatccatctcacttggaggctgttaatccagttgttttgggacaaacaagagcaaagcagttctttcataaagatttgaaaagaaaaaaagtaattccaattttattacatggtgatgctgcttttgccggacagggaattgttgcagaatgttttgcaatgtcaggtcttccaggacataatactggcggaactattcacataattgttaataaccaaattggatttacgacaagtcctagatttgcaagatcctccccctatccgtctgatgttgcaaaaatggttgaagcgccaatattacatgttaatgcagatgatccagaggcagtagtatattgcgcaagaattgctacagagtttagaattcagtttaatagggacgttgtaattgatttaatttgttacagaagatttggtcacaatgagggtgacgaaccttcgtttacacaacctttaatgtataaaaaaattaagtctcacaaaacaagtttaagtatctacggagaaaaattggtagctgaacaaacaatttctccagaagaatttgagaaacaaaaatctaatttcaaaaatttgctggatcaacaatttcaaactgctaaagattataaaccaaaaatagaatggtttgagggaacttggtcaagatacagacctcaaaaaggaaaagacattagaggtgtcagtggttttgatacaaaagatttaattaaaatttctgaaaagatacataagatagatgaaaaatttaatattcataaaactataacaaagatttttaataatagacataattctgtagcagaagggaaaaacatagattggtctacagctgaagcgctagctttcggatcacttctggcaaaaggtaatccagttagattagttggacaggatactggaaggggcacatttagccaaagacattcgattttgaggagtcaaattgataatagtagatatatccctctaaacaacatctcaaagagtcaaaaacaatttgaaatagtcgatagcttattatcagagtttgcagtcttaggttttgaatatggctacagcttagttgaaccagaaactttagttttatgggaggcgcaatttggagattttgcaaatggtgcacaagtaattatagaccaatttatagcttcaggtgaaagaaaatgggctagagcatctggccttgttttgcttttaccccacggttatgaaggtcaagggcccgaacattcatcagcaagacttgaaagatttttacaactctgcgcaaaagataatttacaagttatgaatataacaacacctgcaaattattttcatgctcttagacgtcaaataactagagattttagaaaacctttagttataatgactccaaaatcccttttaagaaacaaacattgtgtttcaaatttagtagattttagcaaaaaaaacactttccatagaattctttgggatcatgcattagatgaaaagtatggttttattaaacttaaaaaaccaaaaaatattgagaaggtcattatttgttcaggtaaagtttattttgatatattagaggagcgtgaaagattaaaacgaaatgatgttttgttacttaggattgagcagctatatccttttccagcaaaatcgcttgcaaaagaattaaaaccttatgctaaaaatgctaagttttattggtgtcaagaggaaccaaaaaatatgggtgcatggttctttgtgagagattatattgattggacattagaatatattaaagctaaaaaagataaaatttcttatattggtagagaatttgcttctacgccagcgactggttttgcaaaaagacatttaactcaacaaaaagaaattttagaaaaggtttttaaataaa

SEQ ID NO: 217330 - DNA, 929 bp, Unknown
  Bacterial polypeptide expressing nucleotide sequence isolated from the Sargasso Sea
tacgttcctcttaataatattttctgataatcaaaagcattttgaagtagtagatagttttttatctgaacttgcggttttaggttttgaatacggttacagtcttgtggaaccaaacactcttactctttgggaggctcaatttggtgattttgcaaatggagctcaagtagtaattgatcaatttattgcatctggggaaagaaaatggaatagagcatctggtatagtaatgttgttacctcatggatatgagggacaaggaccagaacattcttcagcaagattagagagatttttacaattatgctcaaacgataatatgcaggtaatgaattgcacaaccccagcaaattactttcatgctttgagaagacaaatgcataggagtttcagaaagccactaatcataatgacaccaaaatcattattaagaaataagtattgtgtttcaaatttagaagattttaataaaaaaaatactttccatagagtactgtgggatcatgctatcgatcctaagtccaaaggatttattaaactaaaagagagttataaaattaaaaaagtaattctttgttctggaaaagtatatttcgatttattagatgccagagaaaagctcaaaagagacgatgtggtgatgtatagaattgaacaattgtatccatttccagcaaaagctttggttaaggagttaaaaccatatgctaaaaatgctgaattcttttggtgccaagaagaaccaaaaaatatgggcgcttggttttcagttagagattatatccaatggacattagacactataaaggctaataatagtaaaatttcttatataggaagaagcccagacgcaactcctgcaacaggatatgccaaaaggcataattctcaacaacaagaaataattaacaatgtatttgattaat

SEQ ID NO: 217331 - DNA, 2905 bp, Unknown
  Bacterial polypeptide expressing nucleotide sequence isolated from the Sargasso Sea
atgtcagttaataaagataacaatatttttgaaaaaacatcatttttaggaaacaatagttctgaatttgtagaaacattgtatgcggaataccttaataaccccagcaatttacctatagaatggaaaaaatttttcgagggacttaacgaaaaaagagaaaaaataattaaaaatgccaatggtcccagctggtctcctaaaaaaaaaattaaacctctttcgaaagatactcaaagtgatttttacaaaaaaaataatgatcaatatatttcagttaatagcaaaaatattctagacgcagcaaaggactcagttagagcaaacatgctagtgagggcttataggattagagggcatctgatttctaatttagatcctcttaaacttcaaaagcctgaagaacattcagaattaaaaccagaaacttatggtttctctgaaaaagatgaaaataaaaaaatatttttagatggagttcttggaattcagacagccacattaaaagaaatattaacaattacaaaaaaaacatattgtcagaatatcggctttgagtttatgcatatgtccgaccccgaagagagacaatggattagagatagaattgagggcaaagaaaaagaaataaaatttactgagaatggcaagaaagcaatactaaataaactggtagaggcagaagggtttgaaaaatttctacatgttaaatttgttggtactaaaagatttggattagatggagcagaatctcttatacctgctttagaacagattattaagcgaggtggtcacttaggagtcaaagaagtaaaaattggtatgccacacagagggagattaaatgttcttgctaatatgatgcaaaaaccattcaaagcaatttttaaagaattttttggccagagtataacctcaaagaaagattttgaaggtgatgtaaaatatcatttaggagcttccgcaaatagagagtttgataaaaatctagttcatataagtttgacagataatccatcacatttggaagctgtaaatcctgtagtattagggcaagttagagcaaaacaattttttcacaaagacaaagaaagaaaaaaagttgttccagttttaattcatggagatgcagcatttgcaggacaaggagtagtagctgagtgctttgcaatgtctggattaccaggacataatactggaggaactattcatataattgtaaataaccaaattggtttcacaaccgcaccaagatttgctagatcctccccttatccctctgacttagctaagatggttcaagcaccaatttttcatgtaaacggagatgatccagaagcagtcgttcattgtgcaaaaattgctactgagtttagacaaaaatttaatagagatgtggtaatagacatggtttgttatcggagatttggtcataacgaaggcgacgaaccctctttcactcaaccattgatgtacaaaaagataagacaacacccgacaacattacaaacatatggaaaaaaattgatcaatgaaggtttaatttctcttgatgacattgaaaaaagaaaaaaagaatttaaagattttctaaacacagaattttcagaggcaaaaaactataaagttaaaatgaaatggtttgatggtgtttggtctagatttaaacctgaaataggtcaagatagaagaggtgttaccggagtagataaaaaagatttgatattaattggaaaaaaaattactgaaattccaaaaaactttaatgttcataaaactttgcttaaactttttgaaaataagagaaaaatgtttgaaagcaaccaaccaattgattgggctacctcagaaactcttgcattcggaactcttttaaatgaaggtttttctgttaggctttccggtcaagactctggaagaggaacttttagtcaaagacattcagtattaagaaatcaagataatcacgacagatatattcctctaaatcacatatcaaaaaatcaaaaaagatttgagattatagacagtcttttatctgaacttggagttctaggatttgaattcggttactctttatcagaacctgagacacttgttttatgggaagctcaatttggagatttttcaaatggagctcaagttgttatagaccaatttatttcatctggtgagtcaaagtggtcaagagcaagcggtttagtaatgttacttccacatggttacgaaggccaaggacctgagcattcatcagctagacttgaaagatttttacagttatgtgcacaagataatttacaagttgtaaattgcacaacaccagctaattactttcatgctttaaggagacaaatgcacaggaattttagaaagccattagttgttatgacacctaagtcattgcttagaaacaaaagatgtatttcatatatagaggattttactaagcaaaatagttttcatagaattcttaaggacagcgcatatttagatggcagtaaattgattgaattaaaaaaagataaaaaaattaaaaaagtcgtgatgtgttcaggaaaaatatattacgatttgattgacgctagagagaaagtgaaagatgacaagactgttttaataagaatagaacaattatatccattcccagtcaaacatcttggaaaagaattaaaaaaatataaagatgctaagtttttttggtgccaggaagaaccaatgaatatgggaggatggaatactgccaggtattacatagacagaacgctagaaatcattcgagtaaaaggcgaaaaagttaactatataggaagaaacgctgcggcatcaccagcaacaggaaatctgaacaaacatcttgcagaacaaaaagaaatattagaaaaggtatttgatagaaaaaaataaa

SEQ ID NO: 217332 - DNA, 2050 bp, Unknown
  Bacterial polypeptide expressing nucleotide sequence isolated from the Sargasso Sea
ctaatggttttgcaaaaatcatataaaagaatattcaatgagtttgcaggtgaaattaataatacagaggaagatagcgcaggtgatgtaaaatatcatttaggagcatcctctgacagagaatttgatggaaatgttgttcatgtaagtcttactgataatccttcacatttagaggctgtgaatcctgtggttttgggtcaaactagagcaaagcaattttttcacaaagatgcacaaagaaataaagtaattcctattttaatccatggtgatgctgcttttgctggacaaggagttgttgccgaatgttttgccatgtcaggtttgccaggtcataatacaggaggaacaattcatattattgtaaataaccaaattggatttacaactagtccaagatttgcaagatcttctcctcacccttccgatgttgccaaaatggtcgaagcaccaattatacacgtcaatggggatgatccagaggctgttgtttatggatcaagaattgcaacagagttcagacttaaatttaatcgagatgtggttttagatttagtttgttatagaagatttggacataatgagggagatgagccctcttttactcaaccccttatgtataaaaaaataaaatcacatccttcaacagcaaaaatttatggatcaaaacttatagatgaagacttactttcagaaaaagatttaaataatcaaattaaaaaatttaaaagtttactagatgatcaatttaaaactgctaaagactataaaccaaaaatagaatggtttgaaggagcttggtcgagttataaacctaaaaaaggaaaagacaaaaaaggtattacaggtgcagatcctgatttattaagaaatatttcagataaaataaatataattcctaatgaaattaatgttcataagacaattagtaaaatatttgaaaatagaaaaaaaacaatcgatcaaggctatgatattgattggtcatcagcggaagcacttgcttttggttcattgttagaagagggttttccagtaagatttgtaggtcaagactctggaagaggtacttttagtcaaaggcactcagttttaagaaatcaagtaaataactcaagatatataccattgaatagtatttcaaaaattcaaaagaaatttgaaattgtagatagttttttatcggaattagcagttcttggttttgagtatggttatagtttagtagagcccaatacattaacaatctgggaagctcagtttggtgattttgcaaatggagcacaagttataatagatcaatttatatcttcaggtgaaagaaaatggcagagagcctccggtttggtcatgttattgccgcatgggtatgaaggtcagggtcccgagcattcatctgcaagattggagagatttttacaattgtgtgctaatgataatcttcaagtgatgaactgcacaacaccagcaaattattttcacgctttgagaagacaaattcatcgtgactttagaaagcctttagttttaatgacaccaaaatcacttttaagaaataaatattgtgtttcaaatattgaggattttaataaacaaacttcatttcatcgtattttatgggaccacgcgttaaataaagattctaaaaattttataaaattaaaaaattctgaggaaattaaaaaagttatcctatgttctggaaaagtatattttgatttattggtagctagagaaagaattaaaagagacgatgtaatcttttttagaatagaacaactatatcctttccctgcaaaaagcttggtcaaggaacttaaaccttatgcaaaaaatgctaaattttattggtgtcaagaggaaccaaaaaatatgggtgcttggttttcagttagagattatattcaatggacattagaaactattaaagctaaaaataataaaatttcttatattggaagaaatcctgatgcatcacctgctactggctatgcaaaaaggcattctgttgaacaacaagaaattataaaaaaagtttttgaataat

SEQ ID NO: 217333 - DNA, 2836 bp, Unknown
  Bacterial polypeptide expressing nucleotide sequence isolated from the Sargasso Sea
tatggctgaacattattctgattctcatctttcgggtggacatttatcctatcttgataaactttatgatacctttttgtctaatccggatgttatatcaaaagattggaaagatctctttgtgtctctttctgagactgatgattttaaggacgatattatctattcagaggttgtggatagttttaagaataaggtaagaaagcatcaaaacaataaaaaagaatataaaaaagttagcaatggatactttcaaaaaacattaccattaactattcatggtaaagtcaattattacattgatgcgtatagaagttttgggcatacagctgccaatttagatccgctccaattagctcagaaagatatccacattgacttgatttatgccgaaaaattattggaaggcgtaagcccagaagagcgtgttggaaatgattaccctaaaggttccaaaaataaaatttttttaaaagagttaaaagaatctattagaaaaaagtatagtggtaatttaggcctggaattttcacatatatctgatgaaagagaaagaaactggataattgatagatttgagaataatgattataaaaaaataaattcagatgagaaaatctttattttgaaaagattaatttccgcaagaggtttggcaaaatatctatctgcaaaataccctggtatgaaaagattcggaatagatggatgtgaatctctaatacctctcattgacaccttaattgagcagacatcaaaaaataatgctgaacaaatttgttttggaatggctcatagagggagattaaatttactgataaatgttttaggcaaaaaaccaaaagatttatttgccgaatttgaagaaaattatgatctgaaaggttctaatactggtgatgttaaatatcatttaggattttcatcaaatatacatacatccaatggcgatgttcatgtctctcttatgaataatccatcacatttagaaatagtagatcccgttgtaataggttctgttcgagcaaggcaagatagattaaatgataaagaaagaaataaagttgtgccaatcctaattcatggcgatgcttcatttagtggacagggagttgttatggaaacacttcaaatgtctcaaaccagaggatatggagttggaggcactatccatgtcatcataaataatcaaataggttttacaactcataatccaaaggattcacgttcaacgagatattcgacagatatagcaaagtttattgagtcaccaatatttcatgtaaatgctgatgatcccgaggcagtaatttatatatctaaattggcttcagattatcgtgaagaatttcgaaaggatgttgtcattgatctaatcggttatcgaagaagcggtcataatgaagcagatgatccatcttcaacacaacccgtaatgtataaaaaaattaaacagcatccatccgtattgaagtcatataaagataaattaatacaaaataatgatgttactttggaagaatttgatgaatttaaaaaatcttacagatcatcaattgaaaaagataaaagtgttgcccataacttatcaaaaataaaaaatgatgacttatggtttgaatgggatcaatacattgatgctcagtggaataaaaaaactgatacaacagttaaacaagatcaactaattgatgatgctcgaacaattgctgatattccaagcggttttgttttgcaaaaaaaagttaaaaatataattaagcaaagaatagatatggctgaaggcaaatgtgaatttaattggggatttgcggaaatggcagcatattcgagtcttttacgtgagggatatccaattagatttagcggacaagatataagaagaggaacatttgatcacagacacgctgttatgtttgatcaagaggatgggagaacttactatccattgaataaatttgcagaaaaaggaaatacaaatattggaatctatgactcaatattatcagaagaggcagttttagggtttgagtatgggtattcggcaacatggccaacaggcctagttatttgggaagctcaatttggtgatttttctaatggagcccaagttgtgatagaccaatttattacgagtgcacaacataagtgggaaagattatctggtttagtacttttattacctcatggatatgaaggtatgggccccgagcatagtagtgctcgtatagagagatttcttcaattatgtgctgaacaaaatatacaaatatgtatgcccagtacggcagcccaaatgtttcatctcctaagaaggcaagctattagaaataatagaactccccttatcgttattaccccaaagagtttattaagaaataaatatgcatcttcaaatattgatgaagctatattaggaaaatttgaaaatatttttgatgatgaatcaaatttaacaaaaaaactaagaaaggtaattctttgtagcggaaagatatatcatgatcttaaaaaacaaagagatgaaaataatcaaagtgatatagcaattattcggttagaacaactatacccatttccttatgaagaaactgaaaaaacattaagtaaatataaaaatgcttctgagtttatttggtgccaagaggagccaagaaatcaaggagcatggtatggtcaaagacataggttaaatagggtcctgaaaaatattggtttaaagaaagagtttagattgatgagtagaccgccatcatctgctccagctgtgggacaaatgaaaattcatattgaacaacaaaaaaaattaatcgatttaactctaggtaaggattaa

SEQ ID NO: 217334 - DNA, 2797 bp, Unknown
  Bacterial polypeptide expressing nucleotide sequence isolated from the Sargasso Sea
atgaaagagctttgggggagctcacacatctctgcgggacatgctgcctacttagaaagcctatacgaaatattcattaataatccagaagacttatcaaaagaatggtttgatttttttactaatcttccaagccatccaaaatctaatggagaaatttctcatttagaaataattaaagattttaaaaatatatctagaaataatattacttccgaagtgtctgttgatgaaagacaaggaaaggtaataaggcttatacaatcatacagaaatcgaggtcatcttaaagcaaagctcgaccctttaggaatgatggaacgtcgttttgtagaagatttagatattgaatttcatggtttgtctaatgaagatctcgatcaagtattttataccgatactttagatacaggttcagaaaaatcaactcttagggaaataataaatcgattagaagaaatttattgtggaaatattggcattgaatgcaatcacatcatggaatcacaagaaagaagatggtttcaaagaaaatttgaatcaaaactccaagaatattcatttgacgatgaagaaaaactaaatatttttgagaggttaaattctgctgaaggactagcaaaatacttatctgcaaaatatcctggaatgaaacgttttggcattgatggcgctgaatcgttggtcccactagttgaaagcataatacaaaattgtggatctatgggtgcaaatcaaatttgttttggtatggcgcatagaggtagattaaatcttcttgtaaatgttcttggtaagttgccatcagatttatttgctgcttttgatgaagattccacgcttgaaggtgccagcacaggagatgttaaatatcacttaggtttttcttctaactttgatactaaaggaggagaagttcatgtttcattatttaataatccatctcacttagaaattgtagatcctgttgttataggttcagttcgagctagacaggacagaataaaagacaaggatagatcaaaagttataccagtgctgcttcatggcgatgcttcgttttctggtcaaggtgtcgtaatggaatctcttcaaatgtcacaaacgagaggtttctatgtgggcggaactattcatgtcattgttaataatcaaattggttttacaactagcaatgttaatgactcaagatcaactgattattcatcagacgttgccaagatgattcaagctcctgtcattcatgtaaatggagatgatccagaaatggtagttaatgctacaaaaattgcatgcaaatatagaaacaaatttaaaaaagatattgtaattgacttattttgttacagaagaagagggcataatgaagcagatgatccatctgcaactcaacctttgatgtataaaaaaatatctgaacatccaagcgttcttaaacaatatgaagaaaatttgatttctaaaggaattttatcaaaagagaaagcaaaagatatcaaggtctcatatagaaagtctttagagggtggaaaatcagtagctaagaatttggcaaaaaaaccaaatgatagcttatggtttgattggcagccatttatggatattaaatggtggccaaaagtagatacgacttttgataaaaaagaatttattaaacttggtaaagatatttgtaaagtcccaaaatcttttaatttaggaaatcaagcaagaaagatttttgaagatagattaagcatgacagatgaaaaaacacctattaactggggctatgctgaaagcatggcttatgcaacactattaaaggagggctacccaataagaatttctggtcaagatgttagaagaggaacattttctcatcgacatgcgtgtgtatttgattccagatctggtatgggatttattcctctctctgagatcgcagaacaaagtgataccagatttgatatatatgattctttattatctgaagaagcagttctgggctttgagtatggctattctgctacctggccatctggtttagctatttgggaagctcaatttggtgattttgcaaatggagcacaggttgttatagatcaatttatagtgtctgctcaacataagtgggaaagattatctggtcttgttatgctacttcctcatggttacgaaggacaaggaccagagcatagtagtgcaagaattgaaagatttttacaattatgcgcatcagaaaatattcaagtctgtgttccaagtacaccaaaacaaatttttcatttacttagaagacaggcaattagaaaaatgagaacaccgttggtagtaatctctcctaaaagcttgcttagaaacccagatgcaatttcaaacttaaatgaattagttgatggaaatttttcatgtgttatagatgataatttaaaaaataaaaagaatgtcaaaagacttattatgtgttctggaaaagttttttatgatcttatgaaaaaaagaaataataaaaagataagaaatactgcaataataaggatagaacaattatatccttttccatatgatgaccttgaagaaatactaacaaagtacgaaaatgtaaaggaatatatatggtgtcaggaagaacccttaaaccaaggagcttggtttagccacagacatagaattcaaagagtattagacagatttagtaaaggatatgaagtaagtttaataagtcgaccagcagcagcagctccagcagttggtttaatgaagcttcatcttcagcaacaacaagacttaattaataaggcaatatttgaatgag

SEQ ID NO: 217335 - DNA, 2326 bp, Unknown
  Bacterial polypeptide expressing nucleotide sequence isolated from the Sargasso Sea
tatgaaggagctttgggggagctcacatgtctcggcaggacatgcagcctatcttgaaagtctctatgaaactttcataaacaatcctgaaaatttatcaaaagagtggcttgatttttttacaaatcttccaaagaactcaaactctaatggagaaatatctcatcaagaaataatcaaagaatttagaaacttttcaagaagtaaggtagaggtatccgacaatagcaaaaaaacaatagatgaaagacagggtaaggttatcaggcttattcaatcatatagaaatagagggcatttaaaagcaaatcttgatcctcttggtatgatggagagaaggataatagaggatctaagtattgagtttcatggactatcgcatgatgatttagatgaagagttttatacagatacctttacgaattcaaacaaattaactttaagagatattttacttagattagaagaagtttactgtggaaatattggaattgagtgtaaccatattcttgattcagaagaaagaagatggtttcaaaagaaatttgagtcgaaattaactgaatacagcttcaatcccgatgaaaaactaaatatttatgaaagactaaattctgctgagggtcttgcaaaatacttgtctgcaaaatatccaggaatgaaacgttttggaattgatggcgctgaagcattagtacccttggttgaaagcgttattcaaaactgtggatcaatgggagctacacaattatgttttggaatggctcatagagggagattaaatcttttagttaatgtactaggtaaacttccgtcagaactattctctgcttttgatgaagacactgagctagagggcgcttctacaggagatgttaagtatcacttgggcttctcatcaaactttgaaacacctggcggtgaagtacatgtttcactctttaataatccatctcatctagaaattgtagatcctgttgtaattggctccgtgagagctagacaagatcgaattggagataaagatagatcacaagttgtgccaattcttcttcatggagacgcttctttttctggacaaggagttgttatggaatcacttcaaatgtctcaaacaaggggattcaatgttggaggaacgattcatattattgtaaacaatcaaattggtttcactacaagcaatatcaacgactcaagatcaacagattattcatctgatgtagcaaagattattcaagctcctgtaattcatgtgaacggtgatgatccagagatggttgtgaatgcagcaaaaattgcttgtaagtatagaaacaaatttaaaaaagatatcgttattgatttattttgttacagaagaagaggacataatgaagctgatgatccttcagctactcaacccttgatgtataacaaaatttcaaaacatccatctgttttaagtcagtatgaaacaaatttaatagatcatggaatactaacatctgacgaggcaaaaaaaattaaaagtgaatatagaaaatctcttgaaggtggagaaagcgttgcaaaaaatttagcaaaaaatccaaatgatcaactttggtttgattgggagccatacatggatgttaagtggtggcccaaagttgatactaagtttgataaagacaagtttatgaagcttggtaaagctatttgtaaggtacctaaatcatttaatcttggctcacaagctaaaaaaatatttgatgatagattgaaaatgaataatggagaaattcctataaattggggatatgcagaaacaatggcatacgcaactcttctagatgaaggttatccgataagattaaccggccaagatgtcagaagaggaactttttcacatagacacgcttgtgtttttgattctaagaatggaacgggttacatacctctatcggatatagctgaaaaaaataaatctaagtttgatatatatgattcattattatcagaggaagcagttttagcatttgaatatggttattctgctacttggccaagtggtcttgctatttgggaggctcagtttggagattttgcaaatggagctcaagttgtaattgatcagttcatagtttccgcacaacataaatgggaaagattatcgggtcttgtaatgcttttgcctcatggatacgaaggtcagggtcctgagcatagcagcgcaagaattgaaagatttttgcaattatgtgcatctgagaatatacaagtttgtgttccaagttctccaaaacaaatttttcatcttttgagacgacaagcaataagaaaaatgagaactccactagttgta

SEQ ID NO: 217336 - DNA, 2149 bp, Unknown
  Bacterial polypeptide expressing nucleotide sequence isolated from the Sargasso Sea
tttgatacctgcgttagagcaaataattaaaattggcggtcagtcaaatattaaagaagttaaaattggaatgtctcacagaggtagactaaatgttttagctaacgttttgcaaaaatcttataaaagaatatttaatgaatttgctggtgaattaaataataccgatgaagacagtgctggcgatgtgaaatatcatttgggagcttcatctgatagagaatttgacggaaattctgttcatgtaagtctaacagataatccttcgcatttggaagcagttaatccagtagtattgggtcagactagagccaaacaattttttcataaagatactgagagaaacaaagtaattccgattttaattcatggtgatgctgcttttgcaggacaaggtgttgttgctgaatgttttgcaatgtcgggtttacctggacacaacacaggtggaactattcatataatagttaataatcaaataggatttaccacaagtccaaggtttgcaagatcttcacctcacccatcagatattgcaaaaatggttgatgcgcctatcatccatgttaatggagatgacccagaagctgttgtttatggctcaagaattgcaactgaatttagattaaagtttaatagagatgtagtcatcgacttagtttgttacagacgatttggacataatgagggagatgagccatcattcactcaaccattgatgtataaaaaaattagatcacatcaatcaacagcaaatatatatggatctaagcttattaatgaaaatttaatatctaaagaaggtttaaatgatcaaataaaaaaatttaaagatcttttagatgatcaatttaagacagctaaagattataatcctaaaattgaatggtttgagggagcatggtccagctataaacctaaaaaggggaaagataaaagaggagttactggagcagatgaaaaaatacttaaaaatatttcaaataaaataaatgtcgttccatctgaaataaatattcacaaaactattagcaaaatcttgcaaactagaaaaaaatctgtcgatgatggtttaaatattgactggtctactgctgaatcattagcttttggttcattattagatgaaggttttccagttcgatttgtaggacaggactctgggagaggtacttttagtcagagacattcagttttaagagatcagatggataactctagatatattccgttaaataatatttcaaaaaaccaaaaaaaatttgaaatagtagatagttttttatctgaacttgcagttttaggatttgaatatgggtatagtttagtagaaccaaatactcttactatttgggaagctcaatttggtgattttgccaatggtgcacaagttataattgatcaatttatctcttcaggtgaaagaaaatggcaaagagcttcaggtttagtcatgttattacctcacggctatgaaggtcaaggaccagaacattcatcagctagacttgaaagatttctacaattgtgtgcaaatgataatcttcaagtcatgaattgtacaacaccagcaaattattttcacgctttacgtagacaaatacatcgtgattttagaaaaccacttgtaattatgacacctaaatctttgttaagaaataagttttgcgtatcaaccattaatgattttggtaaacaaacatcatttcacagaataatgtgggatcatgcattaagtgatcaatcaaaaaattttattaaattaaaaaaatctagtgaaattaaaaaagttataatctgttcaggaaaagtatacttcgatcttttaaatgctagagaaaagctaaaaagagatgatgtggtaatgtttagaatagaacaactttatccttttccagttaaaagtttagtaaaagaacttaaaccatacgctaaaaatgctaatttctattggtgtcaagaagagccaaaaaatatgggtgcatggttttcagtgagagattatatacaatggacattggataccattaaagctaaaaataatgaagtttcttatattggaagaagtcctgatgcatcaccagccactggatatgctaaaaggcatcaatttgagcaacaagaaattataaatgaagtatttaattaa

SEQ ID NO: 217337 - DNA, 2812 bp, Unknown
  Bacterial polypeptide expressing nucleotide sequence isolated from the Sargasso Sea
atgcataacggcgtgatgaaggcctggttggagtcatctcacctggctggtgcgaatgcaagctatattgaggatttgtacgaatccttcctggaagaccccgagtccgtagccgaagagtggcgcagcctgtttagctcgctgccccaggtcaatggccatgcgatagaacaacctcactcccgagtccgcgattatttccgtcgcctggccaaggatccctcccgctacagtgcccccgtctccgatccgcaagtggatgccaagcaggtgcgggtattgcagctgatcaacgccttccgcttccgtggccatcaaaacgccaatctggatccgctcggcctctgggcgcgtgaaaccgttgccgaactggatcctgcgtttcacaacctgcagggcgcagacatggaggccaccttcaacgtgggctcctacgccatcggtcgcgagaccatggtgctctccgatctgtatgcctcgctgaagaaaacctactgcggcagcatcggcgccgactacatgcacctcacctccaccgaggagaagcgctggctgcaacagcgtctcgaatccatcgaagggacgggcagctacaccctggaagagaagacccgcttcctcgagagcctgaccgccgccgaagggctggaaaaatacctgggcgccaaattcccgggagccaagcgtttctccctggaagggggcgatgccatggtgcccatgctcaaggagctgatccgtcgcgccggtgagcagggctgcaaagaggccgtcatcggcatggcccaccgcggccgtctcaacgtgctgatcaacgtgctgggcaagcgcgcccaggacttgttcgacgagtttgccggcaagcacggcgaatcctggggcacgggtgacgtgaagtaccacatgggcttctcgtccgacttcgccaccccgggcggcaacgtccacctggcgctcgccttcaacccgtctcacctcgagatcgtcaaccctgtggtcatcggctcggtccgtgcccgcatggaccgccgtggtgacaaggacggctcgaccgtactgcccatcaccatccacggcgactcggccatggccggtcagggcgtggtggccgagaccttcaacatgtcccagacccgtgcctatggcgtgggcgggacggtgcgcatcgtcatcaacaaccaggtgggtttcaccacctcttacatccgtgacctgcgctccaccgaatattgcaccgacatcgccaaggcggtgcaggcccccgtgctgcacgtcaacggtgatgacccggaagctgtggtgctggtgacccagattgcgctggattaccgcaacaccttcaagcgcgacgtggtgatcgagctggtctgctaccgtcgtcacggtcacaacgaggccgacgagccgagtgcgacccagccgctgatgtaccagaaaatcaaacagcacccgaccccgcgcaagatctatgccgaccagctggtggcggaaggcagcatcagtcaggagctggccactaccctggtcaacgaatatcgcgagaccctggatcgcggtgagcgggtgagcaaggagtggcgtccgatggagctgcactccgtcgactggaccccttatctcggtcacgactgggccatggcctatgacagcacagtgccgatggatcatctgaaatccctcggcgagcgcatcagccagtacccggccacccacgtgttgcagcgccaggtcgagaagatctacgaagaccgccgcctgatggctgccggcgagaagctgctggactggggctttgccgagaccctggcctacgccaccctggtggacaagggctcgcgcatccgcttcaccggggaagactccggccgtggcaccttcttccaccgccacgccgtgctgcacagccagaccgatgccagcacctacaccccgctgtgcaacctgcacgacgagcagggcccgttcgaggtgtacgactcggtgctgaccgagaacgcggtactggccttcgaatatggctacgccagcgccgagccggccggcctcaccatctgggaagcccagttcggtgacttcgccaactgtgcccaggtggtggtcgatcagttcctttcctccggcgagcagaagtggggccggatgtgcggcctgaccatgctgctgccgcacggctacgaagggcagggcccggagcactcctccgcccgtctggagcgctatctgcagatgtgcgcccagcacaacatgcaggtgtgcgtaccgtccaccccggcgcaggtgttccacatgctgcgtcgccaggtggtacgcccgatgcgccgtccgctcatcgtgatgacgcccaaatccctgctgcgccacccgctggcggtgagcaagctcgaagagctggccgaaggcaccttccagaacgccatcggcgagatcgatgcgctggatccgaagggcgtcaagcgcgtggtgttctgctccggcaaggtctactacgacctgctcgatgcccgtcgcaaggccgagcagcaagatgtggcgctggtgcgaattgagcagctctaccccttcccggaagaggaagtgcgcgccatcctggccgactacgcccatgtcaccgacttcgtctggtgtcaggaagagccgcagaaccagggcgcctggtactgcacccgtcatcactacgacagcgtgctgccaagccatgcccgtctgcgttatgccggtcgcccggcgtcggcttcaccggccgtcggttacatgtcagtccacgccaagcagcaaaaagccctggtggaagacgcgctgaccctggaataaa

SEQ ID NO: 217338 - DNA, 2920 bp, Unknown
  Bacterial polypeptide expressing nucleotide sequence isolated from the Sargasso Sea
atgtcttcatcgaaaaatcttgaatttgaaaaaacttcattcttaaataagtctaatagtgcatttattgaacaaatgtatcttaaattcataaataaagaccctgatttgcctgagagttgggcaaattattttgagggtataggagaagagataaaagttattgcatctgaaataaatggaccttcttggggaccttcaaaattaaaaatagatattgatgaatttcaaaaaaaaatagagatagatgaaaataataaagttaccaatgaaaaaatagatacatcagaaaaattcaatttccaattacttgcagactctaacaaagattctattagtgctgttgcactaatacgtgcttataggttgagaggacatttattagcaaatctagatccactagaaatgagaaagtcggagtatcttgatgaattgcatcccgaattttatggttttaaaaaacagaattatgataagaaaattttcctaaatggtgttatcaataaaaaatatgccaatataaaagaaatactaaaatttttaaaaaagacatattgtggaaacattggatatgagtttatgcatgtttcaaacccagtcgagagaaaatggtttagagacagagtagagcaagatcaaaatgccttaaattttactaaaaatggtaaagaggcaatactaaataaacttgtacaggcagaaggttttgaaaaatttttagcaactaaatatgttggtacaaaaagatttgggcttgatggaggtgaaagtttaataccagctcttgaacaaataattaaaattggtggacaaaatcaaattaaagaagttaaaattggaatgtctcacagaggaagacttaatgtattagctaatgttttacaaaaggattataaaagaatatttaatgaatttgctggggaaattgtttcagattctgaagaaagtgcaggagacgtaaaatatcatcttggggcatcctcagacagagtgttcgatggaaatactgttcatgtaggtttgacagataatccatctcacttagaggctgtcaatccagtagtcctaggacaaactagagcgaaacaattttttcacaaagataaagaaagaaataaagttataccaattctcattcatggagatgcagcctttgctggtcagggggttgtagctgaatgttttgctatgtctggacttccaggtcataatactgggggcactattcatatcatagttaataatcagattggtttcactacaagtccaagatttgcgaggtcatcaccctatccatcagatgttgcaaaaatggttgaggctccaattcttcatgtgaacggggatgacccagaagctgttgtttatgcgactagaattgctacagagtttaggcttaagtttaatagagatgttgtggttgacctaatttgttatagaagatttggacataacgagggagacgaaccttcattcactcagccattgatgtacaagaaaattagatcacatccaagtgtttataagatctatggaagcaaacttgtcaatgaaaattcaattactcaaaatcttttagatcaaaatgtaaaagcatttaaagatttattagatgagcaatataaaagtgcaaaagattataaacctaaaatagaatggtttgaaggttcatggtctagatacaaacctagaaaaggcaaagataaaagaggtgtgaccggctttgatgaaatcaagttaaaagaaatttcagataaaattaatactatacctgctgaaattaatattcataaaactatttccaaaattttgaatgttaggaaaaattcagtagataaaggtcttgatattgattggtctgcagcagaagcgctagcttttggttctttactagaagagggttttccggtgaggcttgttggacaggattctggtaggggaacatttagtcaaagacattcagtactaagagatcagaatgataattcaagatatattccgttaaataatatttcaagtaaacaaaaaaattttgaagttgttgatagttttttgtcagaacttgctgttctgggttttgaatatgggtatagtttagtagagcctaatacactaactttgtgggaagctcagtttggagattttgcaaatggtgcacaagttgtaattgatcaatttattgcatcaggtgaaagaaagtggaacagagcatcaggtttagtgatgttattaccacatggctatgaaggtcaaggaccagaacattcttctgcgagactagaaagatttttacaattatgctcaaatgataatatgcaagtattaaactgtactacacctgctaattattttcatgctctaagaagacaaatgcatagagactttagaaagccattgataattatgacaccgaaatctctattaagaaataaattctgtgtttcaaatttaaaagacttcaataaagaaaatacatttcacagagtcttgtgggatcatgcaattgatccaaaatcaagtgggtttattaagcttaaagaaagttcaaagattaaaaaagtaattctatgttcaggaaaagtatattttgatcttttggatgcgagagaaaaacttaaaaaagatgatgttgtgatatttagaattgagcaactatatccattcccggcaaaagctctagtaaacgagctaaaaccatatgcaaaaaatgctaatttcttttggtgtcaagaagagcctaaaaatatgggcgcttggttttcagttagagactatatccaatggacattggatagtttaaaggctaataataacaaaatttcttatataggaagaagcccagatgcaagtccagcaacaggatatgctaaaaggcacaattctcaacaacaagaaataattaataaggtttttgaataat

SEQ ID NO: 217339 - DNA, 2294 bp, Unknown
  Bacterial polypeptide expressing nucleotide sequence isolated from the Sargasso Sea
tagtccgtctgtgccttctgcaagtgtttcagacgacaggcaagttaaagttcttcagttaattaacgcgttccgcttccgcgggcaccagcacgctaacttagaccctcttggtctatggaaacaagagcgtgttcgcgaccttgaactatctcaccacagcctttctgaacaagattttgatacagtcttcaatgtagggtcttatgctattggcaaagattctatgccgcttggtgaactgtttaaatcgcttaaccgcacttactgtggctctatcggtgcagaatatatgcacatcactgataccgagcagaagcgttggttacaacaaaaaattgaatctgttcaagcaaaacctgaaatttctcgcgatgagaagttaggcattcttaaaggccttactgcggctgacggaatggaaaagtacttgggttctaaattcccaggtgcaaagcgtttctcgctagaaggtggcgacgcacttattccaatgcttaaaggtttaattaccaaagcaggcactgcgggtaccaaagaagtggttatcggcatggctcaccgtggtcgtttgaatgttctagttaacgtgctgggtaaaaatccttctgtcctgtttgacgaattctcaggtaagcacgacgactcattaggtgcgggtgacgttaagtatcacgcaggcttctcttcagattttgcaacgcctggtggcaacgttcacttagcgctagcgtttaacccgtctcaccttgagattgtaaaccctgtagttatggggtctgtacgtgcacgtcttgcgcgtcgcaatgatgacacgaatacagtactgcctatcactattcacggtgactcggcaattgctggtcagggtgtagtacaagaaaccttcaacatgtcgcaaactcgcggctttgctgtaggtggtacggttcgtattgtggtaaataaccaagttggtttcaccacatcgaagactgaagatacccgttcaacgcaatattgtactgacatcgcgaagatggtacaggcaccgattttccatgtgaactcagacgatccagaagcggttgcctttgttacacagcttgcgcttgaataccgtaataagtttaagaaagacgttgtaattgatttagtttgttaccgtcgccatggtcacaacgaagcggatgagccaaacgccacgcagccgttgatgtaccaaaaaatcaagaagcacccggttccacgtgttctttatgctgaccagttaatagctgaaggtgtgatagaacaacgtgacgcagaccgttatcttgaagaatatcgtgaagcgctcgaccacggcgcgtgcgttgttgaagagtggcgtccaatgacagagcacagcgttgactggtctccatatcttggtcacgactgggatacgccttacgatggttcgctttcagttgagaagctcaaagagctaggtgagtcaatcactactattcctgaagagcacaagcttcagtctcgcgtaaacaagctataccaagaccgtaaagcgatggttgctggcgagaaaatgcttgattggggcatggctgaaaacttggcctatgcaactatcgttgatgccggcgaagatattcgtattaccggtcaggattcaggccgtggtactttcttccaccgtcacgcggtgttacacaatcaaaaagatgcgtcgacatatatgccactacagcatattcgtgaaggacagggcgagatcgaaatttacgactctgtgctttcagaagaagcggttatggcatttgagtatggttatgcgacagcggagcctacgtgtctgactatttgggaagcccagtttggtgacttcgctaacggcgctcaggttgtatttgatcagttcttgagctcaggtgaagcgaagtggggccgtttgtgtggcctaaccgttttacttccacatggttatgaaggccaaggccctgagcatagttctgcgcgtcttgagcgattcttgcaaatgtgtgctgaccacaactggcaagtgtgtgtaccttcaacacccgctcaggtttacaacatgcttagacgccaagtggttcgtccaatgcgtaaaccacttatcgtgatgtcacctaagtcactattacgtcatccaatggctgtatcttcgttagaggaacttgcagaaggcaaattccataacgtaattggcgaaattgatgatatcgatccgaagaatgtgaagcgtgttgttatgtgttcaggcaaagtttactacgatttgttagaccaacgccgtaaaaatgagcaaacag

SEQ ID NO: 217340 - DNA, 2143 bp, Unknown
  Bacterial polypeptide expressing nucleotide sequence isolated from the Sargasso Sea
tatgcacatatccaatccaactgagagaaaatggtttagggatagagtagaaaaagacgaaaatgcattaaaatttactgaaaatggcaaaagtgcaattttaaacaaattaatccaagctgagggatttgagaaatttttgcatactaaatatgttggttctaaaagatttggtttagatggtggtgaaagtttaattccaggcttagaacaaattataaaaattggcggtcaatccaagattaaagaggttaaaattggaatgtctcacagaggaagactaaatgttttagctaacgttttacaaaaatcttataaaagaatatttaatgaatttgcaggtgaattaaataataccgatgaagacagtgcaggcgatgtaaaatatcatttgggagcttcatctgatagagaatttgatggaaattctgttcatgtaagtttaacagacaatccttcacatttggaagcagttaatccagtagtattgggtcagaccagagcaaaacaattttttcataaagatactgagagaaataaagtaattccgattttaattcatggtgatgctgcttttgctggacaaggtgttgttgctgaatgttttgcaatgtcgggtttacctggacacaatacaggtggaactattcatataatagttaataatcaaataggatttaccacaagtccaaggtttgcaagatcttcacctcacccatcagatattgctaaaatggttgatgcgcctatcatccatgttaatggagatgatccagaagctgttgtttacgggtcaagaattgcaactgaatttagattaaagtttaatagagatgtggtcatcgacttagtttgttacagacgatttggacacaatgagggagatgagccatcattcactcaaccattgatgtataaaaaaattagatcacatcaatcaacagcaaatatatatggatataagcttgttaatgaaaacttaatatctaaagaaggtttaaatgataaaataaaaaaatttaaagatcttttagataatcaatttaagacagctaaagattataatcctaaaattgaatggttcgagggagcatggtctagctataaacctaaaaaaggaaaagataaaagaggaattactggagcagatgaaaaaatacttaaaaatatttcagataaaataaatgttgttccacccgaaataagtattcacaaaactattagcaaaatcttgcaaactagaaaaaaatctgtcgacgatggtttaaatattgactggtctactgctgaatcattagcttttggttcattattagatgagggttttccagttcgatttgtaggacaagattctggaagaggaacattcagtcagagacattcagttttaagagaccaaaccaataactctagatatattccattaaataacatttcaaaacatcaaaaaaaatttgaaattgttgatagttttttgtcagaacttgcggttttaggatttgaatatgggtatagtttagtagaaccaaatactcttactatttgggaagctcaatttggtgattttgccaatggtgcgcaagttataatcgatcaatttatctcttctggtgaaagaaaatggcaaagagcttcaggtttggtaatgttattacctcatggctatgaaggtcagggaccagaacattcttctgccagacttgaaagatttttacaattgtgcgcaaatgataatctccaagttatgaattgtacaactccagcaaattattttcatgctttacgtagacaaatacaccgtgattttagaaaaccacttattatcatgacgcctaaatctttgttaagaaacaaattttgtgtatcaaccattgatgattttggtaagcaaacatcgtttcatagaataatgtgggatcatgcattaagcgatcaatctaaaaattttataaaattaaaaaaatctagtgaaataaaaaaagttataatttgttcaggaaaagtatatttcgatcttttaaatgctagagaaaagttaaaaagagatgatgtggtaatgtttagaatagagcaactttatccttttccagcaaagagtttgctaaaagaacttaaaccatacgctaaaaatgctaatttttat

SEQ ID NO: 217341 - DNA, 1054 bp, Unknown
  Bacterial polypeptide expressing nucleotide sequence isolated from the Sargasso Sea
cagagtcgttagctttgggtctttattagaggaaggttatccagttagacttgtaggacaagattctggtaggggtacgtttagccaaagacattcagtattaagaaatcaattagataactcaagatatataccactaaataatatttcaaaaacacaaaaaaaatttgaaatagttgatagttttttatctgagctagcagttttaggatttgaatatgggtatagtttggtagagccaaatacacttactttatgggaagctcaatttggtgattttgctaatggagctcaagtggttattgatcagtttatcgcatcaggtgaaagaaaatggtcaagagcttccggtttagttatgttattaccacatggttatgaaggtcaaggaccagaacattcctcagcacggttagaaagatttttacaattatgttctaatgacaacatgcaaataatgaattgtactaccccagctaattatttccatgcacttagaaggcaaatgcatagagattttagaaaaccattaataattatgaccccaaaatctctattaagacataaacaatgcgtttcgagtcttgatgatttcagcaagaaaaacacttttcatagaattttatgggatcatgctatagatcctaaggttaaaggcttaataaaattaaaagacccaaaaaaaattgaaaaggtcattttatgttctggaaaagtttattttgatttgcttgaagctagagaaaaattaaaaaaaaacgatgttattctttatagaatagaacaactttatccatttccagcaaaaactcttgccaaagaattaaaaccctatgcaaaaaaagcaaaattttattggtgtcaagaagagccaaaaaatatgggtgcatggttttctgtcagagattatatccaatggacattagataatataaaggctaataataataaagtttcttacattggaagaagtcctgatgcatctcctgcaacagggtatgcaaaaaggcacgtttctcaacagcaagaaattataaaggaagtttttgaataa

SEQ ID NO: 217342 - DNA, 2872 bp, Unknown
  Bacterial polypeptide expressing nucleotide sequence isolated from the Sargasso Sea
atgagctcatcaaaaaatttagaacaaaaaaatacatcatttttaacgaagtcaaatagtgcatttattgagaatatgtacataagatatatcgaaaaagatccaaatctacctttgagttggaaagactattttgacactcttaatgatgatattaaatctgttgtcaaagaacttgaaggtcctacatggcaacctcataaaaaaagaattaaatatgaaagcacaaaatctacaactaaggtaacaaataatgaagatttagagacagcaaaaagtgagtccattaaagcaattgctctaattcgtgcatatagaattagaggccatttaatagcaaatcttgatccattaaatctaatggaaagaaaatatttatacgaacttcatccagaggatcatggttttaaaaaagaggattatgataaaaaaatatttttaggttcatacttagacacgggttactcatctgttaatgaaatattatctaaattaagaaaaatatattgttctacaattggggctgaatatatgcatattactgatcctattgaaaaagtttggtttagagacagaatggaaaaaagagagaaccaactaaattttacagaaaatgggaaaaaagctattttaaataaaattgttcaagctgagggttttgaaaaatttttggcaagaaagtatgttggaacaaaaagattcggtttagatggtggtgaagcgctaatacctgctttagagcaaataataaaaaggggcggccagttaggagttaaagaagtaaaaattggtatgccacatagaggacgattaaatgttttagcaaatgtattacaaaaatcttataagagaatttttaacgaatttgcaggagaagagaattatgcaaaagcagaggactcagcaggagatgtaaaatatcatttgggcgcatcatccgatagagaatttgacggaaactctgtgcatgttagtttaactgataatccttcacatctagaggcagtaaatccagttgtactaggtcaaactcgagcaaaacaattttttcatgaagacacaacaagagaaaaggtaataccaattttaattcatggagacgcggcatttgctggccaaggagttgttgccgaatgttttgcaatgtctggacttaaggggcataatactggaggtactattcatattatactaaacaaccaaattggatttaccactagtccgaggtttgctagatcaagtccttacccatcagatcttggtaaaattgttgaggcaccgatcctacattgtaatggtgatgatccagaagcggtcgtacattgtgcgaaaatcgcaatagaatttagacaaaagtttaaaaaagatgttgtcatagatttgatatgttacagaagatttggacataatgagggtgacgaaccatcttttactcaacctcttatgtacaaaaagattagaagtcatccaacaactttatcgatttatggaaaaaaattagtagatgaaagcactatctccaaagaatatttcgaaaaaaatataaatgacttcaaaaacttactcgatgaacagtttaaaaccgcaaaagattataaaccaaagcttaattggtttgaagggacttggtcaagatatcaacctaaaaaaggaaaagatagaagaggccaaacaggtgttgatataaataaattaataaaaatttcagaaaaaattaatcacatccaggaaaatcaaaatattcacaaaactatcaaaaaaattcttttaaatagacataaaagtgttttagaaaagaaaaatattgactgggccagtgccgaagctctcgcatttggtagtcttttggatgaaggctttccggtgagactagttggacaagactcaggtagaggaacttttagtcaaagacattctgttttaagaaatcaagaggataattctagatatattccattaaataatatttccgataaacaaaaaaaatttgaaattgtagacagttttttatctgaattggctgttcttggttttgaatatggttacagtttagttgaacctgaaacattaacattatgggaagcacaatttggtgattttgctaatggagcacaggttgttattgaccaatttatagcatcaggtgaaagaaaatggtcaagagcatcaggcttagttcttctattaccccatggatatgaaggtcaaggcccagaacactcatctgctaggctagaaagatttttacagttatgtggacaagaaaatttgcaagtattgaattgtacaacaccggctaactattttcatgcattaagaagacaaatacatagagattttagaaaacctttagtaataatgacacctaaatctcttttaagacacaaaaattgtgtttctaatttagatgattttagtaaaaaaaactcttttcacagaattcttaaagatcatgcttttgatgagaaaagtggttttattaaactcaaaaaagataaaaagattgaaaaagttgtaatgtgttcaggaaaaatatactttgatttactagaagctcgagaaaaagctaaaaatgacaaaataattatctttagaattgagcaattatatccatttccagcaaaatctttagcaaaagcattaaaaccgtatgcaaaaaatgcaagatttatttggtgtcaagaagaaccaaaaaatatgggagcttggttctcagtgagagattatatacaatggactttagataacattaaggctaataatagcacaatttcttacattggaagagatgttgctgcatctccagcaaccgggtatgcaaaaagacatctaaaacaacaaaaagaaattatagaaaaagtattaaactaaa

SEQ ID NO: 217343 - DNA, 2773 bp, Unknown
  Bacterial polypeptide expressing nucleotide sequence isolated from the Sargasso Sea
aatgtcttcctctaaaaatttagaatttaaaaaaacagcctttctcaataaatcaaacagcgctttcatcgaagaaatgtacttaaaatttgtaaataatgatcctgaattacctgatagctggataaaatatttcaaagaagttggagatgaagatgatataattgtaaatgaaatcaatggtccttcgtggagtccttctaagaaagtttcaataaataaaaagcaaaattttcaaaatcaaatcacagaagaaaataatggtgatataattaaatcaaatactaattcaattaaagctgttgcgatgatcaggtcttatagacaaagaggtcatctaattgcaaagcttgatccattaggattgttgaaaacagattatttagaggaacttcatccagagtcttatggatttaaaaaagaagattatcaaaaaaaaattttcttagacaatgtcactaataagcaatactctaatattaatgacatattaaaattcttaaaggataagtattgcggttctttaggttatgaatatatgcatatttcaaatcctactgaaagaaaatggtttagagatcgtgttgaaaaggcagatgattttaattttacacaaaatggtaaagaagcaatccttaacaaactgatacaagctgagggttttgaaaaatttcttcatacaaaatatgttgggacgaaaagatttggtcttgatggcggtgaaagcttaattcctgcacttgaacaaataattaaaattggtggtcagtcaaatgtcaaagaagtaaaaattggaatgtctcatagaggtcgactaaacgtattggccaatgttcttcaaaaatcttacaaaagaatatttaatgagtttgcaggagaaataagctcaaagtctaaagatgatactggagatgttaaatatcatttaggtgcctcatctaacagagagtttgatggaaattcagttcatgtaagtttgacagataatccttcacacttagaagcggttaatccagttgttttaggtcaaactagagcaaaacaattttttcataaagataaagagagaaaaaaagtaattccgattcttattcatggagatgcagccttcgctggacaaggagtggtagctgagtgttttgcaatgtctggtcttccaggacataatacaggtggcacaattcacattatagtaaacaatcaaataggttttacaacaagcccaagatttgcaagatcttcaccatatccttctgatatagcaaaaatggttgaggcaccgattattcatgtgaatggtgatgatccagaggcggttgtttatgcagcaagaattgcaacagactttaggttaaaatttaatagagacgttgtcattgatttgatttgttatagaagatttggacataatgagggagacgagccttcatttactcagcctttaatgtacaaaaagataagatctcatccctcaactatcaaagtttatggtgaaaaactggtaagtgaaggatcaattacaaatgattatttaaataattccataaaaaaatttaaagatttattagaggatcaatttaaaaatgcaaaaaattataaaccaaaaatagagtggtttgagggaacttggtcaagatatagaccagaacgaggaaaagacaaaagaggagtaacaggttttgatactaaaaaattaaaaaatatttctgataaaataaatacaatacccactgaaataaatattcacaaaacaattacaaaaattttagataatcgtaaaatttcagtttctaatagcaaaggcatagactggtctactgcagagtctttagcttttgggtcactattggaggagggttatccagtaagacttgtaggtcaagactcaggaagaggtacatttagtcaaagacattctgttttaagaaatcaaatagataattcgagatatattcctttaaataatatttctaataaacaaaaaaattttgaaatagtagatagttttttatcggaattagctgttctaggatttgaatatggatatagtttagttgaacctaatactcttactatttgggaggctcaatttggagattttgctaatggtgcgcaagtagttatcgatcaattcatagcttctggtgaacgaaaatggtcaagagcctctggtttagtaatgttgttaccacatggatatgagggtcaaggacctgagcattcatcagctaggttagaaaggtttttacaattatgttcaaatgataatatgcaagtcatgaattgcacaactcctgcaaattattttcatgctttgagaagacaaatgcatagagactttagaaaaccattaattattatgacacctaaatctttattacgtcataaacattgtgtttctaatttggatgattttagtaaaaaaaattcatttcatagagttttatgggatcatgctattgatccaaaagtaaaaggatttattaaactaaaaaaaccaaaaaaaattgaaaaagtgattctttgttcaggaaaagtttactttgatttacttgaagcaagagaaaaaataaaaaaaaacaacgtagtgttatataggattgaacaactctacccttttcctgcaaaagcacttgctaatgagctcaaaccatatgcaaaaaatgcaaaattttattggtgtcaagaagaacctaaaaatatgggcgcttggttttcagtcagagattatatccaatggacattagataatataaaggctaaaaataatata

SEQ ID NO: 217344 - DNA, 2971 bp, Unknown
  Bacterial polypeptide expressing nucleotide sequence isolated from the Sargasso Sea
atgaatgatcaatctcccaactcagaatttaaagcctcttcttttatgcaggggcataacgctgaatatttagagcaactttacgcacaatacgcacacaacccagaagccttagatgaaacctggcaagaatttttcaaagctatgggcgatgatgaagtaagtattaaaaaggatgcagcgggtcctagctgggggaggcgcgactggccacccacagtaaacgatgacctcatagctgcattagatggtcaatgggttcaaagcgaagatactcagcaaattgtagaaaaaataagccaagtggccgaagaaaagaatattgaaatatccaatgatgcaattcaacgggcagttctggacagcgttcgagctttaatgcttatccgggcttatagaatacgtggacatcttgcagccgatttggatcctcttggcatgagaaacacatcagaggcaaaagattctttagatccaaaaaattatgggtttttagaaaccgatttggaccgcccaattttcattgataatgtactcggtcttcaaatcgctacaatgagacaaattgttgaaatagttaaaagaacttattgcggtacttttgctttgcaatacatgcatatttctgatccagagcaatcagcatggcttaaggagagaatagagggctttgggaaagaaataaaatttacccgagagggacgaaaagcaatcttgaataaattagttgaagcggaaggcttcgaaaaatttttacacgttaaatacatgggaactaaacgctttggtttagatggtggagaaagcctaattcctgccatggaacaaatcataaagcgtggaggggcacttggagttaaagaaatagtaataggcatgcctcatagaggccgattatcagtgcttgctaatgttatgaacaaaccttatcgggcgatatttaatgaattccaaggaggatcttttaaaccagacgcggtagatgggtcaggagatgtcaaataccatctcggagcatcgtcagatcgcgaatttgatggaaataatgtccatctctccttaactgcaaaccctagccatttggaagccgtaaatcctgttgttattggcaaagcgagagccaaacaagaacagttaaaagataataagcgaacctctgtcatgcccgtactattacatggcgatgccgcatttgctggccaaggtgtggttgctgaatgtttcggtttatcaggtttaattgggcacaaagcaggcggtacaatgcatatcgtggttaataaccagattggttttacgactgcaccccactttagtagatcatctccttacccaaccgacatagcgttaatggttgaggcccctatatttcacgtgaacggagatgatccagaggctgttgttcatgcagctaaagtagcaacagaatatcggcaaaaatttcaaaaagatgttgttttagatatcatatgttatcgacgatttgggcataatgaaggggatgaaccaatgttcacaaatcctctaatgtataaacacatcaaaaaacaaaaaacttcactttcaatttataccgaaagactggttaatgatggacttatccctgaaggtgaaatcgaagatatgaaagcgtcttttcaggcaaaaatgaacgaggaatttgaagctggccgagactataaaccaaataaggctgactggcttgatggaagatggtcgcatttggacaggcataaagacgattaccaaaggggaaaaacagcaattagtgaagaaactttcttcgatattggtaaagctttatctcacccaccaaaagattatgaattgcacaagactgttgccaggcttttgggcactaaaggaaaaatgttcgatagcggcgaaggttttgattgggcaaccgctgaagctcttgcatttggatcacttttaacagaaggatttcccgtccgattatcagggcaagatagtacgcgcggcacctttagccagaggcattctgggctaatcaatcagtcaactgaagagcgttattatccactgaataatataagacaaggtcaagccaaatatgaagtgatagactctatgttatctgaatatgcagtcttggggtttgaatacgggtattctctggctgaaccaaatgcactagttttatgggaagcacaatttggtgattttgctaatggtgctcagataatgtttgatcagtttattagttctggtgaaagcaaatggctccgaatgtccggattgacaatgttattaccacatggatttgaagggcaaggtccagagcatagctcagcaagattggagcggtttttgcaaatgtgtggtcaagataattggattgtagccaattgctccacgcctgctaactactttcacatcttgagaagacaagtgcatcgggattttcgaaaacctcttgttctgatgacacccaaatcacttctcaggcacaaactatgcacctcaaaagttgacgattttacgaatggttcatctttccatcgtgttttatgggatgatgcggaaaagggaaactcaactaccaaattagtaaaagataaagaaatcaaacgcgtagttatgtgctcaggaaaagtctacttcgacttattggaagaaagagacgcaagagggttaaatgatatctatttactccggtttgagcaattttatccttttccggcaaagtcagcggttaaagagcttgagagattccaaaatgcagaaatgatttggtgtcaagaagaaccaaaaaatcaaggtgcatggtcattcatggaaccaaatatagaatgggttttaagcagaacgaatgcgaaattcaacaggccaatttttgttggtaggccagcaagtgcttcaccggctacaggactagcgagccaacataaagagcaacaaaaattgctcattgatgaagctttaaatttaaaggaaaccaaaaaatgac

SEQ ID NO: 217345 - DNA, 1153 bp, Unknown
  Bacterial polypeptide expressing nucleotide sequence isolated from the Sargasso Sea
atggttatcaacttaataaaaaaattaataagaattatcgaacaaagaagaaaaaacattcaagaaggacataatttagactggtcaacagctgagcatttagcatttggttcattattagaagaaggacatccggttagattatcgggtcaagatagttgcagaggaacattttcacaacgtcacgctgtttttgtagatcaagaaaatgaaaatagatatgtacctttgaataatttgagtaacaagcaacaacaattcgaagttattgactctcccttatctgaggcttccgtgttagcatttgagtatggctatactgtaacagacccgtctgctcttgttatgtgggaggcacaatttggtgattttgctaatggtgcacaggttatagtagatcaatttatatcgagtggtgaagctaaatggcttagaatgtctggtcttgtaatgcttttacctcatggatatgaggggcaaggtcccgaacattcctctgctagattagagagatatattcaattatgtgccgaagaaaatatgcaggttttgaattgcaccactccggcaaattattttcatgccctaaggcgacagttaaaaagagattttagaaaaccgttaattattatgactccaaagagtctattgagacacaaattgtgtgtatcaaaacttgaagatatgggtccaaacacaacgtttcatagggtaatgatggatccaaataagaatttaaaaaataataaaattaagagagtagtaatttgtacaggaaaagttttttataatcttttagaagaaagagaaaaaagaaagttagataatattaaactgttaagaatcgaacaaatatatccttttccaacttctacactcaaaaatgaacttgaaaaaactcctgatgcagaagtggtatggtgtcaagaggagcctaaaaatatgggtgcatggttttttgtagatagaaaaattgaggaaactttaacccttttcaaatcaaaatttaaaagaccaaaatatattggtcgtgatgaagccgcatctccggctactggttcatacgcaagacacaacgaagaacaagaaaatattgttaaaaagtctcttgaaatagaaaacaaaaaatcaaaaaaacaagcagcggagtagg

SEQ ID NO: 217346 - DNA, 1687 bp, Unknown
  Bacterial polypeptide expressing nucleotide sequence isolated from the Sargasso Sea
gttaacaatcagataggatttactacaagtcctaagtttgctcggtcttctccttatccttcagatttagctaaaatggttgatgcacctatactacatgttaatgctgatgatccggaggccgttactcattgtacaaaaattgcaactgattatagacaaaagtttaataaagacgttgtagtagatatgatttgttatagacggtttggtcataatgaaggagatgaaccttcctttacccaaccaactatgtatagaaaaataaaaaaacacccaacaacacttaatatttatgcaaataaattaattaaggaaggtgttgtagcacaagaagaatttaatagtatgaagacaaaatttaaaaatcttcttgaagaacaattcaaaacggcaaaagaatataaacctaaattagaatggtacgagggtgtatggtcaagatttaaacctgaaaaaggcaaagataaaagaggagtgactggagtgtctttagataaattaaaaaaaatcggtgaaaaaataacattaataccaaaagatcttaatgttcacccaactttaaaaaagatatttgaaaataagaaaaagatgtttgaaactggaaaaggttttgactgggcaacagcagagcatcttgcatttggaactttattagatgaaggttacccggtgagactttctggacaagattctgctagagggacttttagtcaacgtcactctgtgcttaaagatcaattgaacggaagcaaatatatacctttaaataatatttctacaaatcaaaaaaattttgaagtaatagatagtttgctttctgaaatggccgttcttggttttgaatatggctatgccttatctgagccaagtacacttgttatttgggaggcacaatttggagattttgcaaatggagctcaagttattatagatcaatttattgcttcagcagaaagaaaatgggctagagctaatggtttagtaatgttattacctcatggatatgaggggcaaggtcccgaacattcttcagctagattagaaagatttttacaattatgtgctcaagaaaatattcaagttgtgaattgtacaactccagcaaattattttcatgctttacgtagacagatacacagagattttagaaaacctttaataattatgacacctaaatctttattaagaaataaaatgtgcacgtctaatatagaagattttactaaaaagaatacttttcatagagttttaaatgatcatgcagactttcagaaaagcaatctcattaaacttgctgacgataaaaagatacagaaagttgttctttgttcaggaaaaatttattttgatcttcttcaagcacgagaaaaaaacaaaaatagaaatgtatttattataagaatagaacaattatatccatttcctgtaaaaacccttgcaaaagagttaaaacgttttagaaaaaaatctgaatttttttggtgtcaggaagaacctcaaaatatgggtgcatggaatactgtaagaaattatatcgagtggagcttacgttctgtaaaagcagagaataaagaagttaattatattggtagacaacctgccgcatcaccagcaagtggatatcttaaaaaacaccttgcagagcaaaatgaaatattagaaaaggtagtaggaaaattttaat

SEQ ID NO: 217347 - DNA, 2278 bp, Unknown
  Bacterial polypeptide expressing nucleotide sequence isolated from the Sargasso Sea
ggctatgagtatatgcatatttctaatccaacagaaagaaaatggtttagagatagagttgaaaaagatgaaaatgctttacaatttacaaaaaatggcaaggaagctattttaaataaaattattcaagcagatggatttgaaaaatttttacataaaaaatatgtaggaacaaaaagatttggcttagacggagcagaaagcttaattcctgcattagagcaaataataaaaattggtggccaaagcagagtaaaagaggtcaaaattggaatgtcccacagagggagactaaatgttttggcaaatgttttgcaaaaatcatataaaagaatatttaatgaatttgctggagaaatagatgcttcatcaaaagatgatagtgctggtgatgtgaaatatcatttaggagcatcatcagatagaatatttgataataattcagtacatgtaagtctaacagataatccatctcatttagaagctgtaaacccggtggttttagggcaaacaagagcaaaacaattttttcataatgataaagagagaaaaaaagtaattcctatattaattcatggtgatgcttcatttgctggtcaaggaattgtagctgagtgttttgcgatgtcaggtttgcctggtcataatactggcgggacaattcattttataattaataatcaaataggatttacaacaagcccaagatttgctcgttcgtctccacacccttctgatgtagcaaaaatggtggactcaccaattatacatgctaatggtgacgatccagaatcagttgtgtatgctgcaagaatagctgccgagtttagacttaaatttaatagagatgtagtagttgatttagtttgctacagaaggtttggtcataacgaaggagacgaaccttcatttacccaacctttaatgtataaaaaaattagatcccacttatcaacagtaaaaatatatggagataaattaataaatgaaaaaattatttcatctgaagatttaaataatcatattaaaaaatttaaagatcttctagatgatcaatacaaaaatgcaaaaaattataaacctaaaattgaatggtttgaaggaacatggtcgagatataaaccaagaagaggacaagataaaaggggggatactggttattcaacaaaaaaacttttggaaatttcagataaaatacattcactttcaactgaacttaatattcacaaaactatagtcaaaatttttgaagctagaaaaaattctatgaataaaggaaatgaaattgattggtctactgctgaggcccttgcgtttggttcgttattagaagaaggatatcctgtaagacttgttggacaagactctggtagaggaacttttagtcagaggcattcagttttaagaaatcaaattgataattcaagatatattccactaaataatatttcagcaaagcaaaaaaaatttgagatagttgatagttttttatctgaattggctgttttaggttttgaatatggatatagtttagtagaacctaatacactaactatttgggaagctcaatttggcgactttgcaaatggagcgcaggttataattgaccaatttatttcttcaggagaaagaaaatggttgagagcctcaggcttagtgttattgttaccccatggttttgaaggtcaaggcccagaacattcttctgcaagattagaaagatttttacagttgtgctcaaatgataatatgcaagttatgaattgcactaccccagcaaattattttcatgccctaagaagacaaatgcacagagattttagaaagcctttaattattatgacaccaaaatctttactaagaaataaatattgtgtttcacaaattgatgattttagtaaaaagaattccttccatagagttttatgggaccattcaatggatccaaagaccaaaggatttattaaattaaaaaaaaataatgaaattaaaaaagtgatattatgctcaggaaaaatatattttgatcttttatctgctagagaaaaattaaaaaaaaatgatgttattttatttagaattgaacaactttatccttttccagcaaaaagcttagtaaaagaaattaaaccttttgcacaaaatgctaaattttattggtgtcaggaagagccaaaaaatatgggggcatggttattagtgagagattatatacaatggacattagactatataaaagctaaaaatagacaaatttcttatattgggagaaatcctg

SEQ ID NO: 217348 - DNA, 1804 bp, Unknown
  Bacterial polypeptide expressing nucleotide sequence isolated from the Sargasso Sea
aaaaaaggtcattccaattctaattcacggtgacgctgcttttgcaggacaaggtatagttgcagaatgttttgccatgtctggattaaagggacataacacaggtggcacgatacatattatagttaataatcaaattggttttacgactagtcctagatttgcacgttctagtccttacccatctgatttaggaaaaatagtagacgcacccattttacactgtaatggagatgatccagaggctgttgtgcactgtgctaaaattgcaatagagtttaggcaaaaatttagcaaagacgtagtgatagacatgatatgttatagaagatttggtcataatgaaggagatgaaccttctttcacccaaccattaatgtataaaaaaatcaggtcacatccatcaacattaaaaatatatggtgaaaaattaataaaagaaaaaactataagtaaaagcgattttgaaaatcaaattatatcttttagatctttattagatgaacaatttaaaacagcaaaagatattaaaccaaaactagattggtttgagggtacttggtcgaggtaccaaccaaaaaaaggcaaagatagaagaggagcgactggagttgatatagataaaataattaagatttcagaaaaaataaataaagttagtgaaaaaataaatatacataaaacaattcaaaaaatattaaccaatagacacaaatgtatattggataaaaaaaacattgattgggcaagtgctgaaagtttagcttttgcaacgcttttagacgaaggttatcctgttagattagttggacaagattcaggtagaggtactttcagccaaagacattcagttttaagaaatcaagaggacaatacaagatttattcctttaaacaatatttccaaaaagcaaaaaaattttgaggtagtagatagtctactatctgaattagcagttttaggttttgagtatgggtacagtctagttgaacctgaaaccttaacgatgtgggaggcacaatttggcgattttgcaaatggagctcaagttattattgaccaattcatatcatcaggagaaagaaaatggtcacgcgcatcagggctagttttgcttttaccacacggatatgaaggacaaggtccagaacattcatcagctagattagaaagatttcttcaattatgtggtcaggaaaatcttcaagttatgaattgtacaactccagcaaattactttcacgcactaagaagacagatacacagagattttagaaaaccactcgtcatcatgacacctaaatcattactaagacataaaatttgtgtttcaaatttagatgattttagtaagaaaaattcttttcacagaattttagaagaccacgcttttgggaagaaaaatggttttctagaattagaaaaatcaaaaaatattaacaaggtaattttatgctcaggaaaaatatattttgatttactagaggcaagagaaaaatacaaaagaagagacgtcgttttactgagaattgaacagctttatccttttccagctaaatcattagtaaaatctattaaaccatatgctaaaaatgctgaatttatatggtgccaagaagaaccaaaaaatatgggggcatggtcgcatgtgagagattatatacaatggacattggactttattaaagctaataataaaaatgtttcttatattggaagagctccagctgcctctccagcgactggatatgctaaaagacatgttgctcaacaaaaagaaattttggaaaaagtgtttaattaa

SEQ ID NO: 217349 - DNA, 1243 bp, Unknown
  Bacterial polypeptide expressing nucleotide sequence isolated from the Sargasso Sea
agatataaaccagaaaaaggaaaagataaaagaggagcaactggaatagacttaaatattttatcaaatatatcaaacaagattaatacagtaccatcagaggttaatattcataaaaccataaataaaattttagataatagaaagaaaacaatagaacaagggtatggtatagattgggctacagctgaatctttggcatttggatctttattagaagaaggatatccagtcagattagtaggtcaggatactggaagaggtacttttagccaaagacattctgtattaaggaatcaattagataattcaagatatgtacccctcaataatatttctcaaaaacagaaaaattttgaagttgttgatagttttttatctgagttagcagtcttgggttttgaatatggatatagccttgttgctcctaacactttaactatatgggaagcacagtttggagattttgctaatggagcacaggtaattattgaccaatttatatcttccggtgaaagaaaatggaaaagagcatcaggattagttatgttgctaccacatggctatgaaggacaaggacccgaacattcatcagcaagactagaaagatttcttcaattatgcgcaaatgataatttacaagtcatgaattgtacaacaccagctaattattttcatgcacttcgtagacagttattgcgtgattttagaaaacccttgattatgatgacaccaaaatcattattaagaaacaagtattgtaaatctaatcttagagattttagtaaaaataattcatttcatagagtaatgtgggatcactctatggaccctaagaacaaggggtttataaaacttaaacaaaattcggaaattaaaaaagtaattttgtgttcgggaaaagtatattttgatttattagaagctagagaaaaaataaaaaaagatgatgtaattcttttaagaattgagcagctttatccttttccagcaaaaagccttgtaaaagaactaaaaccattcgcaaaaaatgctaattttttttggtgtcaggaagaaccaaaaaacatgggagcgtggttattagttagagattatatccaatggacattggagactataaaggctaaaaataatgaaatttcttacattggaagaaacccagatgcatccccagcaactggatatgctaaaagacatgtttcagaacaacaagaaattataagtaaggtatttgaataaa

SEQ ID NO: 217350 - DNA, 2341 bp, Unknown
  Bacterial polypeptide expressing nucleotide sequence isolated from the Sargasso Sea
tatgcacatatcaaatccaacagagagaaaatggtttagggacagggtagaaaaagacgaaaatgcattaaaatttacggaaaacggtaaaagtgcaattttaaataaattaatacaagctgagggatttgagaaatttttacatacaaaatatgttggttctaaaaggtttggtttagatggaggtgaaagtttaattccaggtcttgaacaaattataaaaattgggggccaatccaagattaaagaggttaaaattggaatgtctcacagaggaagactaaatgttttagctaacgttttacaaaaatcatacaaaagaatatttaatgaatttgcaggtgaaataaataatacagaagaagatagtgccggggatgtgaaatatcatttgggagcttcatcagacagagaatttgatggaaattctgttcatgtaagtttaacagacaatccctcacacctggaagcagttaatccagttgtgttgggtcagactagagcaaaacaattttttcacaaagatgctgagagaaataaagtaattccaattttaatacatggcgacgctgcttttgctggacaaggtattgttgccgaatgttttgcaatgtcgggtttaccgggacacaacacaggtggaacaattcacataatagtaaataatcaaataggatttacgacaagtccgaggtttgcaagatcttcccctcacccatcagatattgctaaaatggttgatgcacctattatccatgtcaatggagatgacccagaagctgttgtttatggttcaagaattgcaactgaatttagattaaagtttaatcgagatgtagtaattgacttagtttgttatagacgatttggacataatgagggtgatgagccatcattcactcaaccattgatgtataaaaaaattagatcgcatcaatcaacagcaaatatatatggatctaagcttataaacgaaagattaatatctaaagagggtttagatgatcaaataaaaaaatttaaagatcttttagatgatcaatttaagacagctaaagattataatcctaaaattgaatggtttgaaggggcatggtctagctataaacctaaaaaaggaaaagataaaagaggcattactggagcagataaaaaaatactcaaaaatatttcagataaaataaacgtcgttccaacagaaataaatattcacaaaactattaataaaattttacaaaatagaaaaaaatctgttgatgatggcataaatattgactggtctactgctgagtcattagcttttggttctttattaggtgagggttttccagttcgatttgtagggcaggactctggcagggggacttttagccagagacattcagttttaagagatcagatggataactctagatatattcctttaaacaacatatcaaaaaaccaaaaaaaatttgaaatagtagacagttttttgtctgaacttgcagttttaggatttgaatatggatatagtttagttgaaccaaacactcttacactttgggaagctcaatttggtgattttgctaatggtgcacaagttataattgatcaatttattgcttctggtgaaagaaaatggcaaagagcttcaggtttagtaatgttattgccccatggttatgaaggtcaaggaccagaacattcatcagctagacttgaaagatttttacaactgtgtgcaaatgataatcttcaagttatgaattgtacaacaccagcaaattattttcatgctttacgtagacaaatacatcgtgattttaggaaaccacttataatcatgacacctaaatctttgttaagaaataaattttgtgtatcaaccattgatgattttagtaagcaaacatcatttcaccgaataatgtgggatcatgcgttaagtgatcaatctaaaaattttattaaattaaaaaaatctagtgaaataaaaaaagttataatttgttcaggaaaagtatactttgatcttttgaatgctagagaaaagttaaaaagagacaatgtggtaatgttaagaattgaacaactttatccttttccagcgaagagtttagtaaaagaacttaaaccatatgctaaaaaggctaatttttattggtgtcaggaagagccaaaaaatatgggtgcatggttttcagtgagagattatatccagtggacattaaataccattaaagctaaaaataatgaaatttcttatattggaagaagtcctgatgcatcgccagctacaggatatgctaaaaggcatcaacttgaacaacaagaaattataaatgaagtatttaattaa

SEQ ID NO: 217351 - DNA, 2386 bp, Unknown
  Bacterial polypeptide expressing nucleotide sequence isolated from the Sargasso Sea
actgaagtttttaaaaaaaacttattgtggtcccataggttatgaatacatgcatatttcaaatccaactgagagaatgtggtttagagatagagttgaaaaagacgagaatgcactcaagtttacaaaaaatggaaagcaagcgattttaaataaactaatacaagcagagggctttgaaaaatttttaaatacaaaatatgttggtactaaaagatttggtttagatggcggagaaagtctaatacctgctcttgagcaaattataaaaattggaggacaatctaaaataaaagaagttaaaataggaatgtcacatagaggaagactaaatgttttagcaaacgttttacaaaaatcttataaaagaatttttaatgaatttgctggtgaaatggatggatcagaagatggtgctggagatgtaaaataccatttaggagcctcatctgatagagaatttgatggaaatcctgtacacgtaagtttaacagataatccttcacacttagaggcggttaatcctgttgttcttggccaaactagagctaaacaatttttccacaaagacaaacaaagaaataaagttataccaatattaattcacggcgatgctgcatttgcaggacaaggaatagtagcagagtgttttgcgatgtctggacttcctggtcataacactggagggacaatccatattattgttaacaaccaaattggatttacaacaagtcctagatttgcgcgatcttccccttatccttctgacgtaggtaaaatggttgatgcaccaatcatccatgttaatggagatgatcctgaggcagttgtttacgcaactagaatagcaactgagtttagattaaaatttaatagagatgttgtaattgatttaatatgttacagaagatttggacataatgagggagatgagccatctttcacccaaccacttatgtacaaaaaaattagatctcatccatctacaattaaaatttatggtgaaaagctagtaaatgaaggactttttacgaaacaagatttagatcaacaaattattgattttaaaaatttattagatgatcaatttaaaaatgcgaaagattataaacctaaaattaggtggtttgagggaacttggtcgagatataaacccgaaagaggtaaagataaaagaggtgtaactggatcagatttgaaaattttaaataatatttctgacagaatacatgtttttccaactgataaaaatattcacaaaaccataacaaaaattatggaaaatagaaaaaaaactattaatgaaggctcaggaattgattgggcaacagctgagtctttagcatttggttcattattagttgaaggttatccagtaaggttagtaggtcaggactcaggtagaggtacctttagtcaaagacactcagttttaagaaatcaaattgataattcaaggtacatacctttaaacaatatatctagtaaccaaaaaaattttgaaattgtagatagttttttatctgaacttgcagttttaggatttgaatatggatacagtttagtagaaccgaatacattgacaatttgggaagctcaatttggtgattttgcaaatggtgctcaagtaattattgatcaatttatatcatctggtgaaagaaagtggaaaagagcctcaggactggttatgttattaccccatggttatgaaggacaaggtccagagcactcctctgcgagattagagagatttttacaattatgtgcaaatgataatttacaagttatgaattgtactacacctgcaaattattttcatgctttaagaagacagatgcaccgtgattttagaaaacctttaatcataatgacacctaagtcacttttaagaaataaatattgtgtatcaaatttagaagattttagtaaaaaaaattcttttcatagagtgctatgggatcatgctagagatattaagcaaaaaggttttattaagttaaaagaagataaaaaaattagaaaagtgatattatgctctggaaaaatttactttgatcttctcgcggcaagagagaaactaaaaatcaatgatgtgattttgtatagaattgaacaactatatcctttccctgcaaaaagtttggttaaagagctaaaaccatttgcaaaaaatgcaaaattttattggtgccaagaggagcccaaaaatatgggtgcttggtttgctgttagagattatatacaatggacattagagactattaaggctaaaaacagtgcaatttcttacattggaagaagtccagatgctacacctgctacaggttatgcaagaagacataattctgaacaacaagaaattataaataaagtatttgaataa

SEQ ID NO: 217352 - DNA, 2821 bp, Unknown
  Bacterial polypeptide expressing nucleotide sequence isolated from the Sargasso Sea
atgcaccaaggcatcatgaaagcctggctcgaatcatctcacttaagtggtgcaaattcgacctacgtagaagagatgtatgaagcctatcaagaagaccctcagtcagtttctgacgattggcgtgcggtttttgataatctccctccggtgaacggtgcctctaaagacgcgccagaagcggcccactcaaaagtacgtgattattttcgcagtttagcgatggaaggacgtcataagagcgcagctcgtgtgaccgatcctgagttggatgctaagcaagttaaagtgctacagctaatcaacgcccaccgtttccgtggtcaccaaggtgctaaccttgatccattaggtttgtggaaacgtgaacctgtcgcagatttagatcccgcattccacggtctaaccaaagaagacatggagcgtgagttcaatactggctcattcgcccatggcggcgaaaccatgaagttggctgatttagtcaaagcgctaaaagccacttactgtggttctatcggcgccgaatacatgcatattaccgacaccgatgaaaagcgttggatccaacaacgtctcgaaccgtccttaggtaaagctaactacgataaaaacgttaagacccgcattcttgaaggcctaaatgctgctgaaggcattgaaaaatacttaggtgctaaattccctggtgcgaaacgtttctcgttagaaggcggtgatgcactagtacctatgatgcgcgaaattatttatcgtgcaggtgaagcgggcactaaagaaatcgtcgtcggtatggctcaccgtggtcgtttgaacgtccttgtgaacgtattaggtaagcgtcctgctgaactgtttgatgagtttgcgggtaagcatgctgatactcatggttctggtgacgtgaaataccaccaaggtttttcatctgactttgaaacaccgggtggcaatgtgcatttagcgctggcctttaacccgtctcaccttgaaatcgttaaccctgtggttatggggtctgtacgtgctcgtcaagaccgccgcggttgtaaagatggtttacaggtgatgccaatcactatccacggtgactctgccattactggtcaaggtatcgtacaagagacattcaacatgtctcagacccgtggctttaaagtgggtggtagtatccgcatcgttgtcaacaatcaagtgggctttaccacttcaaatcaccacgatgtgcgttcaactgaatactgtactgacatcgctaagatggtacaggcgccgattttccacgtaaattcagacgatccagaagcggttgccttcgttgcgcagttggccgttgattaccgtaacgaatttaaacgtgatgtggtgattgatttagtgtgttaccgccgtcatggccacaacgaagctgatgagccaagtgcaactcagccactgatgtatgccaagatcaagaaacacccaacgccacgtaagatttacgctgacaaactgatcgcagaaaacaccattgctgccgatgatgtgactagcatgatcaacacttatcgtgatgccttagatcaaggtgattgcgtagtgaaagaatggcgtccaatgacactgcacaccgtggattggactccttacattggtcgcgaatgggatgaagcctatgacgcttcactgcctatcgaacgtttgcagaaactagccgataaattgagctacgtgcctgaaagccattcactgcaatcccgtgttgctaagatttatagtgaccgcgtcgcgatggcaaaaggtgagaagttactcgactggggctttgctgaaaccttagcttacgcaacgattcttgaagataaacaacgtgttcgtattactggtcaagactctggtcgtggaaccttcttccaccgtcatgcggttctgcacaaccaaaacgatgcgactacgtatttaccactgcgtaatattgccgaaaaccaaggcccaatcgacatcactgactcagtattgtctgaagcgtcagtactcgccttcgaatacggttatgcaacagcggaacccggcggtctggcgatttgggaagctcaattcggtgactttgccaactgtgcgcaagtggttatcgaccagttcttgtcctctggtgagcagaagtggggccgtttatgcggtcttaccatgttgttgcctcacggctacgaaggccaaggtccagaacactcaagcgcccgtttagagcgtttcttgcagttatgtgctaaccacaatatgcaagtgtgtgtgccatcaacaccagctcaggtttaccatatgctgcgtcgccaagtggtgcgcccaatgcgtcgtccactggtggttatgtcacctaaatcattgctacgtcacccattagcggtttctagcatggaagaattggctaatggcagcttccaaaacgtgatcggtgaaatcgatacgttagaggcgagcaaggtcgatcgcgtggtgttctgtagcggtaaggtatacttcgagctgctggaaaaacgccgtaaagaaaatatcaataacgtcgcaataatccgtgtcgaacagttatatccgttcccgcatgaagaaatggttgcagccttagctgattaccaacatgtgaaggattttgtatggtgtcaggaagagccgcaaaaccaaggtgcttggtactctagccaacatcacttctgggctgctatccctgcgggtgcaaaactgacctatgctggccgtgaagcgtctgctgcaccagcttgtggttacccagagctgcatgctcaccaacaagaatctttagtgaacagtgcgttaaagctctaat

SEQ ID NO: 217353 - DNA, 2794 bp, Unknown
  Bacterial polypeptide expressing nucleotide sequence isolated from the Sargasso Sea
atgaaagagctttggggaagctcacatatttcagcgggacatgctgcctacttagaaaccctttacgaaacatttataaataatcctgaagacctttcagaggagtgggtagatttttttactaatctaccaaaacaccctaattctaatggtgaaatatctcatcaagaaatagtcagagaatttaaaaatatttctagaagcaacactgaacataaaatatcaatagatgagcggcagggtaaagttattagattaattaagtcttatagaaatagaggtcatcttaaagcaaatctagatcctctcgggatgatggagcataagaccgttgaagatcttagtattgaatttcatggcttatcaacaagcgatcttgatgaagagttttatacagatacttttactgatgcaactaaactaactttaagagaaattgttagacaattagaagcaagttattgtggaaatattgcaattgaatgcaatcatatctttgattccaaagaaaggagatggtttcaaagaaagtttgagtcaaggttaaaagactattcatttagagaagatgaaaaaattaatatctatgaaagactgaattctgcagagggtctggcaaaatatctttctgctaaataccctggtatgaaacgatttggaattgatggtgctgaagctcttgttccattagtagaaagcgtaattcaaaattgtggttcattaggcgcaaaccaattatgttttggtatggctcatagaggaaggctaaatcttttagtaaatgttctaggcaagcttccatctgaattattttcagctttcaatgaagaccttgaattagatggggccaacacaggcgacgtgaaatatcatttaggattttcatctaattttgatacacctggtggtgaagttcatgtttcattatttaacaatccatcacacttagaaattgttgatccagttgttctaggatctgttagggctcgacaagataggataaatgacatagatagatcacaagttgttccagtattgcttcatggagatgcctctttctctggtcaaggcgttgttatggaatctcttcagatgtctcaaaccagaggttttaatgtgggtggaacaattcatattattgttaataatcaaataggttttactacaagtaatattaacgattccaggtctaccgactattcatctgatgtagcaaaggtaatacaggctcctattattcatgttaatggagacgatcctgagatggttataaatgctgcaaagatagcatgcaaatatagaaataaattcaaaaaagatatcgtaattgatcttttttgttatagaagaagagggcataacgaggcagatgatccttctgcaactcaaccgttaatgtataagaaaatctctaaacatccatctgttgtaagccaatatgaaaataccttgaaagatgaaggacttttgtctgaagaaaagataaaaataattaaaaaagaatatagaaaatctcttgaaggtggaaaaagtgttgctaaaaatttagcaaaaaaaccaaatgattccttatggtttgattggaagcccttcatggatgttctatggtggccaaaagtagatacaacatttaataagaaaaaacttaataaacttgctaaagatatatgtaaaactcctaattcttttaatttaggcagccaagcatctaagatttttgaagaaagattaaaaatgaataatggtgaggtagagctaaactggggttttgctgaaaatatggcctacgcaactttattaagtgaaggatatccaataagaattactggccaagatgtaaggagaggaacattttctcataggcacgcatgtttatttgatagtgaaactgggatgggcttcattcctctatcagaaattgctgagaaaaataatacaagattcgatatatatgactcacttttgtctgaagaagcagtattgggttttgaatatggttattctgctacttggccatctggtttggcaatatgggaagctcaattcggagattttgctaatggcgctcaggtagttattgaccaatttatagtttctgctcaacataaatgggaaaggttgtctggattagtcatgttattacctcatggatatgaaggacaaggtcctgaacacagtagtgcaagaatagaaagatttctgcaattatgcgcttcagaaaatattcaagtttgtgtcccaagctctccaaagcaaatatttcatcttttaagaagacaagctataagaaaaatgagaactccattaatagttatttctccaaaaagtttattgagaaacccaatggcaacttcttctttagaagaactaacagatggcagcttttcttgtgtaattgacgatgatattaaagacaaagataaagtaaagaaattgataatgtgttctggaaaggtattttatgatcttataaaaaaaagaaatgatgaaaaacgacaagatattggaatagttaggatcgagcagctatatccttttccatatgatgaccttgaagaaatcctaacaaagtatcaaaatgtacatgaatatatatggtgtcaagaagaaccacagaatcaaggagcatggtttagtcacagacatagaattcaaagagttttagatagattaggtaaagaaaatgaggttaatttagttagtcgtgaacctgcagcagcgccagcggtcggactcatgaaattacacatacaacaacaagaagacttaatcaatgaggcaattagcaaatgag

SEQ ID NO: 217354 - DNA, 1423 bp, Unknown
  Bacterial polypeptide expressing nucleotide sequence isolated from the Sargasso Sea
aatatttaatgaatttactggagaaataagctcttcatctagcgaagaagatagttctggagatgtaaaatatcatttaggcgcttcctctgatagaatatttgacaataactctgttcacgtcagtcttacagataacccttcccatcttgaggcagtaaaccctgtagttttaggacaaactagagcaaagcaattctttcatggtgacaaggaaagaaaaaaagtaattcctatattgatacatggagatgcagcatttgcaggacaaggcattgttgcggaatgttttgcaatgtctggtttaccgggtcacaatactggcggaactatacattttataattaataatcaaattggatttactacaagtccaagattcgcccgttcatcaccacacccatctgatgttgcaaaaatggtagactcaccaattattcatgcaaatggagatgatccagaagcagttgtatatgcttcaagaatagctgctgagtttagattaaaatttaatagagatgtagtagttgatttagtttgttacagaagatttggacataacgagggagatgaaccttcatttactcagcctcttatgtataaaaaaattaaatctcaccaatctacaactcaagtatatggaaaaaaattaattaatgaagacacgatatcttctgaagatttaaataattatattaaaaaatttagagatcttcttgaagatcaatataaaaatgcaaaaaactataaacctaaaatagagtggtttgagggaacttggtcaaggtataaaccaagaaaaggacaagataaaagaggcgatacaggattctcagaaaaaaaattattaaaaatatcagataaaatacattcgatatcacctgaactaaatattcataaaactatagctaaaatttttcaatctagaaaagaaactgtaaaaaaaggctatggaattgattggtcttcagcagaagctcttgcatttggttcactactggaagaaggatacccagtaagactagttggacaagacacaggtagaggaacttttagtcaaagacattcagttttaagaaatcaaatagataattcaagatatataccattaaacaatatatcgattaatcaaaaaaagtttgaaattgttgatagttttttatcagaactagctgttttaggttttgaatatggttatagcttagttgaaccaaatacattgacaatatgggaagcacaatttggtgactttgcaaatggagcacaggtaataattgatcaatttatttcatctggagaaagaaaatggttaagagcatcaggtttagttttgttgttaccccacggttatgaaggtcaaggcccagagcattcatctgcaagattagaaagatttttacaattatgttcaaatgataatatg

SEQ ID NO: 217355 - DNA, 2278 bp, Unknown
  Bacterial polypeptide expressing nucleotide sequence isolated from the Sargasso Sea
aaatcaaattaattttacaaataacggaaaaaaagcaattttaaatacaattataaaagctgagggttttgagaaatttttagcaaaaaaatttattggtactaaaagatttggacttgatggaggtgaatctttagtacctgcattagaacaaattataaaacgcggaggtcaattaggggttaaagaaataaaaattggtatgcctcacagaggaagattaaatgtattagcaaatgtattgcaaaagtcttacaagaggatctttaatgagttcgcaggtgaactagactcaaaaagtgaagattcagcaggagatgtaaaatatcatttaggcgcatcgtcaaatagagaatttgatggaaactcagtgcatgttagcctaacagacaatccatctcatcttgaggcagtgaatccagttgttttaggccaagtaagagcaaaacagttttttcatggtgataaagagagaaaacaagtaataccaattttaatacacggagatgcagcatttgcaggccaaggtgttgttgcagagtgttttgcaatgtcaggtcttaaaggacataatacaggcggcactatacatataatcgttaataatcaaatcggttttactacaagtcctagatttgcaagatccagtccatatccctcagatttaggaaaagttgttgaggcaccaattctacattgcaatggcgatgatccagaagcagttgtgcattgtgcaaaaatcgcaattgaatttaggcaaaaatttaatagagacgtagttattgatataatttgctatcgaagatttggtcataatgagggtgacgagccatccttcactcaaccgttgatgtataaaaaaattagagaacatccgacaactttgaatatttatgcaaataaacttattgaagaaaattcgatttctaatgatgaattcgaaaaaaataaaacagatttcaatttgctactagacaatcaatttaaatcagcaaaagatgataagccaaaattagattggtttgagggaacttggtctagatataggccacaaaaagggaaagataaaagaggcaagacaggtgttgacgaaaatacattgatatcaatttcaaataaaatcaatagtttagaagatcaactaaaagctcacaaaactataaaaaaaatattttctaaaagacatgaaagtatattagcaaaaaaaaatatagattggtcaacatcagaggcgcttgcttttggatcacttttaaatgagggatttcctgtaagattagttggacaagactctggtagaggaacttttagccagaggcattcggttttaaggaaccaagaagataattcaagatatatacctttaaataatatttcggaaaatcaaaaaaattttgaaattgtcgacagttttctatctgaattagcagttttaggatttgagtatggttatagcttggttgaacctgaaactttaactatttgggaagctcagtttggtgactttgcaaacggggctcaagtagtaattgatcaatttattgcctcaggtgaaagaaaatggaatcgtgcatcaggtttagtattattgcttccacatggttatgaaggtcaagggccggaacattcttcagctagattagaaagatttttacaattaagtggtcaagaaaacctacaagtggtgaactgtactacaccagcgaactattttcatgtgttaagaagacaaatacacagagattttagaaaaccattaatcatcatgacaccgaaatcattactaaggaataaattttgtgtttccaaattagaggattttgacaaatcaaactcatttcatagagttttaagtgatcattcatatttagatgatacgaattttattaagttaaagcctaatgccgatataaagaaggtaataatttgctcgggcaaagtttactttgatttaatcaaagctagagaaaatttaaaaagagacgacgtagtttttgtaaggatagaacaattatatcctttcccagtaaaaccattagttaaagaaattaaaaaatactccaaaaatgcccatttttactggtgtcaagaggaaccaaaaaatatgggagcttggaactctgttagagattatatacaatggactttagattatattggggctaataataataaaatttcttatattggaaggaatgcagctgcatcacctgcaactggttatgctaaaagacattcagctcaacaggaagaaataattaatgaagtatttaaataa

SEQ ID NO: 217356 - DNA, 2911 bp, Unknown
  Bacterial polypeptide expressing nucleotide sequence isolated from the Sargasso Sea
aatgtctacggttaaaaacaataacatatttgaaaaaacttcatttttaggtggaaatagttcagaatttattgaagagctatattctcaatatgttcaaaacccaaaaagtatttcaaaagaatggaaagaattttttgatggtcttaaagataaaaaagaagagattattaacacggcaaatggaccaagctggtcaagaaaaaaaagtaaaataaatttatataaaaatggtgaagaacttgaaaataatgataaagaatttaaagatataaatatagatattggtgcctcgaatattaaacaaaactcaaaagactcaataagagctagcactttgatacgagcatatagaataagaggacacttacttgcaaatctagatcctttaggactccaaaaacgccttgaacatcctgaactaaatgcagaaacctatggatttaatgatcaatataaaaataaaaaaatttttcttgatggtattttaggattcgaatttgcagatataaataaactcattcatgaagcaaaaaatatctactgtggaaatattggttatgagtttatgcatatgtcagatccaattgaaagatcttggataagagaaaggatagaaggaaaagaaaaaggaattaaatttacagaaaatggtaagaaggcaattctaaataaacttgtagaagcagagggatttgaaaaatttttacatgtaaaatttgtaggcacaaaaagatttggtcttgacggagcagagtcacttataccagcgttagagcaaattataaaaagaggcggtcatttaggtgtaaaagaagtaaaaattggaatgccacatagaggaagattaaatgtgcttgcaaacatgatgcaaaaaccatttaaattaatctttaaggaattttttggagaaaaaattgactctaaaaaagattttgaaggcgacgttaaatatcatttaggcgcatcagcaaatagagaatttgatggaaatttagttcatatcagtcttaccgacaatccttctcatttagaagctgtaaatccaattgttctaggtcaagtgagagctaaacaattttttcataaagacaaagaaagaaaaaaagttattcctgttcttatacatggggatgctgcatttgctggccaaggtgtagtagcagagtgttttgctatgtcagggttacctggtcacaacacaggtggcacgatacatataattgtaaataatcaaattggttttactacagcaccaagatttgctagatcttcgccgtatccatcagatcttgcaaaaatggtggaagctccaatacttcatgttaacggtgatgatccagaggcagtagttcattgcgcaaagattgctacagaatttaggcaaaaatttaaaagcgatgttgtcattgatatggtttgttatagacgttttggtcataacgaaggtgatgagccatcattcacacaacctcttatgtacaaaaaaattcgaagtcaccctacaactttacaaatctacggaaaaaaacttattagccaaggcttaatttcacaacaagattttgatgaaagaaaaaataaacttaaagattttttgaatactgaatttaaaaatgcgaaaagttttaaacagaaaatgacatggtttgatggagtttggtcgagatttaagcctgaaataggaaaagataaaagaggaaaaactggtgttgaaaaaaaagaattgatcaatataggtaaaaaaattactgaagtgccaaataattttaatattcacaaaacacttataaaaattttagaaaataaaagaaaaatgtttacagatgacaaacccatagattggtcaacagctgagctattagcatttggcactttactcaatgagggtttttcagtaagactttctggacaggactcaggacgagggactttcagtcaaagacacgcagtattaagagatcaagatagtcacgatagatttgtgcctttgcataacatatctaagaaacaaaaaagctttgaagtcattgatagtttattgtcagagcttggtgttctaggttttgagtttggatattctctttctgagcctgagaccctagttctttgggaagcacaatttggagatttttcaaatggtgcgcaagtagttatagatcaatttatctcttctggtgagtctaagtggtcacgagcaagtggcctagtgatgcttcttcctcatggttatgaaggtcaaggaccagaacattcgtcagcaagattagagaggtttttacaattatgtgcacaagaaaatttacaggttgtcaattgtacaactccagctaattattttcatgtccttagaagacaaatgagaagagattttagaaaacctttaataattatgactcctaaatccttattgagacataagagatgtatttcttatcttgaagactttacaagaaaaacaagatttcacagaattttggaagatcatgcttatcttaatcaaagtaaacttataaaacttaaaaaaaataataatataaaaaaggttattatgtgctcaggtaaaatatattttgatctgttagaggctagagaaaaaaataaaaatgatgaaatagtcttcataagaattgagcaactttatcctttccctgtaaaacatttgggaagagagctacaaaagtataaaaatgcagaatttatttggtgtcaagaagagccaatgaacatgggagcatggaatactgttaaatattatatagatagaacactagaaatcattaaaattaaaggtgaaaaagtaaaatatattggaagaaatgctgcggcatcaccagcaactggaaacttaaacaaacaccttgcagaacaaaaagaaatattagaaaaggttgtaggtaggttaaattaa

SEQ ID NO: 217357 - DNA, 1150 bp, Unknown
  Bacterial polypeptide expressing nucleotide sequence isolated from the Sargasso Sea
gatgcagaacagcgctttgaaagcctggttggactcttcttacctctctggttctaaccagagctggatagaacagctctatgaagacttcttaaccgaccctgactcggtagatgctaactggcgttcgacgttccagcagttacctggtaccggagtcaaaccggatcaactccactcaaaaacacgtgattatttccgtcggcaggcgttgattactccacgttactcttcttctatctccgaccctgatgccaatgtgaagcaggttaaagtcctgcagctcattaatgcctaccgtttccgcggtcatcagcatgcgaatcttgatccgctgggactgtggcagcaagaaaatgtggccgatctggacccgtctttccacgatctgaccgatgcggatttccaggaaagctttaacgtaggttcttttgccggcggcaaagacaccatgaagctgagcgacctggttgttgcgctgaaacaaacctactgcggcccaattggcgccgagtatatgcacatcaccagcaccgaagaaaaacgctggcttcaacagcgtatcgagtctggccgtgccgcattcagtagcgaagagaagaaacgcttcctgagcgaactgaccgcagcagaaggtctggaacgctacctgggcgctaagttcccgggcgcgaaacgcttctcgctggaaggcggtgatgcgttaatcccaatgctcaaagagatgatccgccacgcgggtaacagcggtacgcgtgaagtggtgttgggcatggctcaccgtggtcgtctgaacgttctggttaacgtactgggcaaacgcccgcaggaactgttcgacgaatttgcgggcaaacataaagaacacctcggtactggcgacgtgaagtaccacatgggcttctcgtctgatatcgaaaccgaaggcggtctggtacacctggcgctggcgtttaacccgtcgcacctggaaatcgttagcccggtggttatcggctccgtacgtgcacgcctggatcgtctggacgagccgagcagcaataaagtactgccaatcaccatccacggcgatgcggcggtaaccgggcagggcgtggttcaggaaaccctgaacatgtcgaaagcgcgtggttacgaagtgggcggtacc

SEQ ID NO: 217358 - DNA, 981 bp, Unknown
  Bacterial polypeptide expressing nucleotide sequence isolated from the Sargasso Sea
cttttagtcaaagacattcagttttaagaaatcaaatagacaactctcgttatattcctttaaataatatttccgataaacaaaaaaaaattgaaattgttgatagtttattgtcagagcttgcagttttaggatttgaatacggttatagtttggttgaaccaagtacattaactatttgggaagctcaatttggtgattttgcaaatggagcccaggtagttattgatcaatttatttcatcaggtgaaagaaaatggtcaagagcgagtggcttagtaatgcttttgccacatggatatgaaggtcaagggcccgaacattcatcaggtagattagaaagatttttacaattatgtgcacaagataatttacaagtgatgaactgcacaactcctgcaaattattttcatgctttgagacgtcaaatacatcgagactttagaaaaccactagttattatgacacctaaatcattgttaaggaataaactatgtgtttcaaatttagaggattttggaaaaaagaattcttttcatagagttctttgggatcatgctattgatccaaatgaaaaagattttatcgagctcaagaaacctgaaaaaataaaaaaagtaattttatgttcaggaaaagtgtattttgacctactgcaggcaagagaaaaaataggaagagatgacatagttatatttagaattgaacaattgtatccttttccagttaaacctttagttaaagagataaaagcttatgctaaaaatgcaaagttttattggtgtcaagaagagccaaagaatatgggagcttggttttcagtaagggattatatccaatggacattagattatattggcgctaataataataaactttcttatataggaagaggaactgctgcctctcctgctacaggatatgctaaaaggcatatttctcaacagaaagaaattattgataaggtttttaagaaatgag

SEQ ID NO: 217359 - DNA, 2347 bp, Unknown
  Bacterial polypeptide expressing nucleotide sequence isolated from the Sargasso Sea
tctgaaaagaatttattgtgactctataggaattgaatatatgtacatcagaacacctgagagaataaaatggattcaaagtaaactaaatcagaatgataatagaccaaattttagcaagaatcaaaagaaacatattttaaaaaagttagttcaagcaactaattttgaacaatttttacaaaaaaagtatgttggtcaaaaaagattttctttggagggaggtgaatctcttattccagcattggattcaatttttgagaatgctgctataatgggagttaaagaatttgtagttggaatggctcacagaggcagactaaataccttatcaaatatttttggaaaaccagcgaaagaaatttttaatgaatttgatggtaaagattatgaagaacaaatttttgatggagatgtaaagtatcatctaggttggacatccaaaaggaagtcggattctggtattggcatatatatgaatttggcacctaatccatctcatcttgaatctgttggccctgtagttcagggaatttcaagagctaaacaagacaagtatcataaaaaaaatccaaaaaatgtattgccagtaataatacatggagatgcagctatagctgctcaaggtgtagtatatgaagtggttcaaatggaaagattaaaaggatataaaacatcagggaccattcatattgttgtaaataatcaaattggatttacaactaactatgtagatggcagatcatcaacatattgcacagatgtaggcaaagctaatctttgtccaattttgcatgttaatgcagatgatgtagaggctgttgttcatgctgctaattttgctttagaatatagaatgaaatatgaaagagatgtgttcattgatttacttggatacagaaaatatggtcacaatgaaggtgatgaaccacgatttactcagccaaaattatataaatcaatttctagccatccaagtgtaaaaaaaatatattctaattacttaattaatcaaaaagtcattagtgaaaaagaactcaaaaaaattgaggataagtatagtgatgaattgaatgaagatttatcagattccaaaaaagataaaaatgtcattatcactccttttatgcaacatgaatgggatggattaaaaagggttaaaaagaaagagatgttaaaaacattttctacagtagttaataaagctgatttgaaaaaagttgcaaatggtatttttcaagttgatgattcaaatctctacttaaaaaaagttgttagattgatgaatgatagatataatatgttttttgagcaagataaaattgattgggccatggctgaactattggcttatggtaccttaattaatcaaaattataatgttagaatttctggacaagatgtcgaaagaggtacattttcacatcgtcatgcaattctgaagacagaaaaaactgaaaaagagtacatcccgttaaataatatttctaaagcacaaggatcatttgaaatatataactcatcattatctgaatatggtgttatgggttttgaatatggatatgcacttacatcaccgaatacattaactatttgggaggcacaatttggagattttagtaatggtgcacaaatcatgattgatcaatatctttcttcagcagaagataaatggaaactacaaaatggacttgttttaatgcttccacatggatatgaggggcaaggagcagaacattcctcggcaagattagaaaggtatttacagctatgtgcaaaaaataacatgtacgttgcaaattgtacaacgccatctaacttatttcacattctacgtagacaacaaattacaagttttagaaaaccattggtattgctcactccaaagagtttgctgagacatccaaaagtaatttcaaagaccagtgatttaataaatggggaatttttatctgtaattgacgataaagatgatgaaaaaaatctcaaatcattagtcttttgtagtgggaaattttattatgatcttcttcactataagagagtcaataaaattacaaatgtggctattgttagaattgagcaattatttccattacccaaaaaagaaattaatgatattatcaaaagttattcttgtgatgaaatagtgtgggcgcaagaagagccaagaaatatgggtgcatggggatatttattaatgcatctagatattgcaaaaaacttcagagtagcctctagaagattttatggagcaccagcatcgggaagtaaagccagatttgataaaagacatagtgaagttattgaatatgtttttgataaatcaaaaaataatatgcgataa

SEQ ID NO: 217360 - DNA, 2821 bp, Unknown
  Bacterial polypeptide expressing nucleotide sequence isolated from the Sargasso Sea
atgcaccaaggcatcatgaaagcctggctcgaatcatctcacttaagtggtgcaaattcgacctacgtagaagagatgtatgaagcctatcaagaagacccacagtcagtctctgacgattggcgtgcggtatttgataatctccctccggtgaacggtgcttctaaagacgcgcctgaagcggctcactccaaagtacgtgattattttcgcagtttagcgatggacggacgtcataagagcgcagctcgtgtgaccgatcctgagttggatgctaagcaagttaaagtgctacagctgatcaacgcccaccgtttccgtggtcaccaaggggctaacctcgacccgttagaattgtggaaacgtgaacctgttgccgatttagatcccgcattccacggtctgaccaaagaagacatggaacgtgagttcaacactggctcgttcgcccacggcggcgaaaccatgaagctggctgacttagtcaaagcgctaaaagccacttactgtggttcgattggcgccgaatacatgcacattaccgataccgatgagaagcgttggatccaacaacgtctcgaaccatccttaggtaaagccaactacgataaaagcgttaagacccgcattctcgaaggcctaaatgctgctgaaggcattgaaaaatatttaggcgctaaattccctggtgcaaaacgcttctcgttagaaggcggcgatgcgttagtccctatgatgcgcgaaatcatttaccgcgcaggtgaagcgggcacgaaagaaatcgtcgttggtatggctcaccgtggtcgtttaaacgtactggtgaacgtgttaggtaagcgtccagccgaactgtttgacgagttcgccggtaagcatgccgatacccacggttcaggcgacgtaaaataccaccaaggtttctcttcagattttgaaacgccgggtggcaatgtgcacttagcactggccttcaacccatcacaccttgaaattgttaaccctgtggtcatgggctctgtacgtgctcgtcaagaccgccgtggttgtaaagacggtttacaggtgatgccaatcacgatccacggtgactctgcaattgcgggtcaaggtatcgtgcaagagacattcaacatgtctcaaacccgtggctttaaagtgggcggcagcatccgcatcgtggtaaacaaccaagttggttttaccacctcaaaccacttcgatgtgcgttcaacagaatactgtactgacatcgctaagatggttcaggcaccgattttccacgtaaactctgacgatccagaagccgttgccttcgttgcacagcttgctgttgattaccgtaatgagtttaaacgtgacgtggtgattgacttagtgtgttaccgccgtcatggccacaacgaagctgacgagccaagtgcaactcagccattgatgtatgccaagatcaagaaacacccaacgccacgtaagatctacgctgacaaactgatcgccgaaaacagcatcggcgcggatgaagtgaccagcatgatcaacacctaccgtgacgccttagatcaaggtgactgtgtggtgaaagaatggcgtccaatgacactgcacacagtggattggtcaccttatattggtcgcgagtgggacgaagcgtatcaagcatctctacctcttgagcgtctgcaaaatctggctgataagctgagctacgtgccagagagccacccactgcattcacgcgttgctaagatttacggcgatcgcgttgctatggcgaagggtgagaaattactcgactggggctttgctgaaaccttagcgtacgccacgattcttgaagacaacaagcgcgttcgcattactggtcaagactctggccgtggtactttcttccaccgtcatgcggttctgcacaaccaaaatgatgcaaccacctatatgccactgcgcaacctgtctgaagaccaaggtccaatcgacatcactgactcagtattgtctgaagcgtcagtactggccttcgaatacggctacaccacagcagagcctggtggtctggcgatttgggaagcccaattcggtgacttcgctaactgtgcccaagtggttatcgaccagttcctgtcgtctggtgagcagaagtggggccgtctatgcggtctgaccatgctgttacctcacggttacgaaggtcaaggtccagaacactcaagcgcccgtttagagcgtttcttgcagctgtgtgctaaccacaacatgcaagtgtgtgtgccatcaacgccagcacaggtttaccatatgctgcgtcgccaagtggtgcgcccaatgcgtcgtccactggtggtgatgtcacctaagtcattgctacgtcacccattagcggtttctagcatggaagaattggctaatggcaccttccaaaacgtgatcggtgaaatcgatacgttagaagcgagcaaagtcgatcgcgtcgtgttctgtagcggtaaggtgtacttcgagctactggaaaaacgccgtaaagaaaacatcaacaacatcgcaataatccgtgtcgaacagttatatccgttcccacatgaagaaatggttgcagccttagctgactaccaacatgtgaccgattttgtatggtgtcaggaagagccgcaaaaccagggtgcttggtactctagccaacatcacttctgggctgctatccctgcgggtgcaaaactgacctacgctggccgtgaagcatctgctgcaccagcctgtggttaccctgagctgcatgctcaccaacaagaatctttagtgaacagtgccctaaagctgtaat

SEQ ID NO: 217361 - DNA, 1057 bp, Unknown
  Bacterial polypeptide expressing nucleotide sequence isolated from the Sargasso Sea
taccgcagagtccttagcatttgccacacttttaaatgaaggtttttctgtaagactctctgtcagggactcaggcagaggaacttttagtcaaaggcatgctatcctaagaaatcaagatagtcatgacagatatgtcccgttacataatatatcaaaaaagcaaaaaaattttgagataattgatagtttattgtcagaacttggagttttaggctttgagtttggctattccttatccgaacccgaaacattagttctttgggaagcgcagtttggagattttgctaatggagcccaggtagtaattgatcaatttatttcatctggggaatctaaatggtccagggccagtggtcttgttatgctcttaccacatggttatgaaggacaaggtcctgagcattcatcggctagattagaaagatttttacagttatgtgctcaagaaaatttacaggttgtaaactgcacaaccccggcaaactattttcatgcacttagaagacagatgcacagagcttttagaaaacctttgattgttatgacaccgaagtctttattaaggcataaaagatgcatatcaaatattcaagattttactaagaaaaatagttttcacagaattttacaagacggttcttatctagaaaatagtaaactaatcaaattaaaaaaagataataaaataaaaaaagttgtaatgtgctcaggtaaaatttattttgatttaatagaagctagagaaaaagctgaaaataatgaagtagtctttataagaatagaacaactctatccattccctgtaaaacacttaggaaaggttttaaaaagatatgaaaaagctaaattttattggtgtcaggaggaacctatgaacatgggtgcgtggaacactgcccgatattatatagacagaacgttggaaatcattcaagtaaaaggcgaaaaagttgaatatattggcagaaatgctgcggcatctcctgccactggaaacttaaataaacatcttgcagaacaaaaagaaatattagaaaaggttttaagcgattaa

SEQ ID NO: 217362 - DNA, 2127 bp, Unknown
  Bacterial polypeptide expressing nucleotide sequence isolated from the Sargasso Sea
aatgagagagtcagaatatttagatgaactccatccagatttttatggttttaaaaaagaaaattatgataagaaaatttttctaaatggagtaattaatcgtaagcacgcaaacataagagaaatacttaaatttatgaagaagacctattgtgaaaaaataggttatgagttcatgcacatttcaaacccagtagaaagaaagtggtttagagacagaatagagcaagataaaaatgcacttcaatttacaaaaaatggtaaagaggcaattttaaataaattagtacaggcagaaggatttgaaaaatttctagccaccaagtatgtgggaacaaaaaggtttggtttagatggtggtgaaagtttaatacctgctcttgaacaaataataaaaattggtggtcaaaataatattaaagaagttaaaataggcatgtctcatagaggcagacttaatgttttggcaaatgttttacaaaaatcttacaaaagaatttttaatgaatttgctggtgagtttagttctgatactgaagatggcgctggagatgtaaaatatcatcttggagcatcatcagatagggaatttgatggaaactcagtgcatgtaagtttaactgataacccttcccatttagaggctgttaaccctgtagttttaggacagacaagggctaaacaatttttccataaagatagagagagaaataaagtgatacctatactcattcatggagatgcggcttttgcaggccagggagttgtggcagaatgttttgcaatgtctggactaccaggacacaacaccggaggaacaattcatattattgttaataatcagataggatttactactagtccaagatttgctaggtcttccccttatccatctgatgttgcaaaaatggtagaggcaccaattcttcatgttaacggagatgacccagaagcagttgtttatgcgactagaatagcaacagaatttcgattaaaatttaacagagacgtagtagtagacttaatttgttatagaaggtttggacataatgagggagatgagccttcttttacccaaccattaatgtataaaaaaattagatcacaccctagtgtttataaaatttatggaagtaaacttgttaatgaaaactctataactcaagaattattaaatcaaaacgttaaatcatttaaagatctgcttgatgaacaatataaaagtgcaaaagattataaacctaaaatagaatggtttgaaggaacatggtcaagatataaacctgaaagaggtaaagataaaaggggtataacaggctatgaagaaaataaattaaaaataatttcagacaaaattaatgttattccagagaaaaaaaatattcacaaaactatctctaaaatatttaattccagaaaagaaagtatagaaaaaggtgctggaattgattggtcttcagcggaggctcttgcatttggatctttgctagaagaaggatatccagtaagacttgtaggacaagattctggaagaggtacattcagtcaacgacattctgttttaagaaatcaaatagataattctaggtatgttcctcttaataatatttcagttaatcaaaatcaatttgaagtagtagatagttttttatctgaacttgcagttttagggtttgagtatggttacagtcttgtagagccaaatacactaacactttgggaggctcaatttggtgactttgcaaatggtgctcaagtagtaattgatcaattcattgcatctggtgagagaaaatggaatagggcatctggtatagtaatgttattgcctcatggatatgaaggacaaggaccagaacattcatcagcaaggttagaaagatttttacaattatgctcaaacgataatatgcaagtaatgaactgcacaactccagcaaattattttcacgctttaaggagacaaatgcatagaagttttaggaaacctctaattataatgacgccgaaatcattattaagaaataaatattgtgtctcaaatttagaagattttaacaaaaaaaatacttttcatagagtattgtgggatcatgcaatcgatcctaagtctaaaggatttattaa

SEQ ID NO: 217363 - DNA, 2881 bp, Unknown
  Bacterial polypeptide expressing nucleotide sequence isolated from the Sargasso Sea
aatgagttcatcaaaaaacttggaatatgaaaaatcgtcttttttaagtaagtcgaatagtgcctttatagaggaaatgtatattcgatttattgaaaaagatccaagtctacccgagagttggaaaaaatattttgaaatattggatgatgatattcaatctgtaataaaagaaattgaaggaccaacgtggcaacccaataaaaaaaaaataaatattaaaagttcatcaaaaaataacagcgaaaaagttttatcagcagacgattctgagcatagcaaaaatcaatctataaaagcaatcgcgcttattagagcctacagaataaggggtcacttgattgcaaatctagatcctcttggaatgatggatagagaatatatccacgatctacatccagaggatcatggttttaaaaaagaagattatgataaaaaaatatttttaggatcatatatggatactgatggctactcttctattaatgaaattcttttaaagttaagaaaaatttattgttcttcgataggtgtagagtatatgcatatttcagatccagtcgaaaaggtttggttcagaaatagaatggagaataaagaaaatgaactcaaatttactgatcatggaaaaaaagcgatattaaataaaattattcaagcggaaggatttgaaaaatttcttgctaaaaaatttgttggaacaaaaagatttggtttggatggagcagagtctttaattcctgcattagaacaaataattaaaagaggtggtcaactaggagtaaaagaaattaaaattggtatgccacaccgtggaagattaaatgttttagcaaatgttttacaaaaatcttataagagaatttttaatgaattcgctggagaatttactaatactcatgaagaatcagctggagatgtaaaatatcatttaggagcatcgtcaaatagagaattcgatggcaaatctgttcatgtaagtttaactgacaacccatcgcatttggaagctgtagatccagttgttcttggacaaacaagggcaaaacaattttttcataaagatttaaaaagaaataaagtaattccaatattaatccacggtgatgctgcttttgcaggacaaggaatagttgctgaatgttttgctatgtctggtttaccaggtcataataccggaggaacaattcatatcattgttaataatcaaattggattcacaactagtccaaggtttgcacgatcaagcccttacccatctgatttaggtaaagttgttgatgctcctattttacattgtaatggtgatgatccggaatccgttgttcattgtgcaaaaattgcaattgaatttagacaacaatttaacaaagatgttgtgatcgatatgatttgttaccgtagatttggtcataacgaaggtgatgagccatcatttactcaacctttaatgtataaaaaaattagacaacatcctacaacattaaatgtttatggagcaaaattggttaaaaatggaactcttattgaggaagaatttaataaaatgataaaaagttttcagagtttactagatgagcaatataaaacagcaaaagattataaacctaaaattgaatggtacgaaggaacctggtcaagatataaaccagaaaaaggaaaagataaaagaggaaaaagcggggtagatttaaataaaattcaaaaaatctctgaaaaaataaacaatgtaccttcagaagttagcattcataaaacaatctctaaaattctagaattaagaaaacaatcaataattaaaaaaaaagggatagattggtctacagcagaatctttagcattcgcaactcttctcgaggagggataccctgtaagattagtaggtcaggattctggcagaggtactttcagtcaaagacactctgttttaagaaatcaaatagataattcaagatatgttcctttaaataatatttcaaataatcaaaaaaaatttgaagtagttgatagttttttgtcagagttagctgtcctaggatttgaatatggttatagtttagttgaaccaagcacattgactatctgggaagcacaatttggagattttgctaatggagctcaaataatcatagaccagtttattgcgtcaggtgaaagaaagtggtccagagctagcgggcttgtaatgcttttaccacacggttatgaaggacagggccccgaacattcatctggaagactagaaagatttcttcaattatgtgcacaagataatttacaagttatgaattgcacaactccagcaaactattttcatgctttaagacgtcaaatccatagagattttagaaaacccttagttattatgacgcctaaatcacttttaagaaataaactttgtatatctaatttagaagattttagtaaaaaaaattcttttcatagagtactttgggaccatgctattgatccaaacgagaatagttttatcaaactaaaaaaaagtgaagaaatcagaaaagtaatcttatgttcaggtaaaatatattttgatctcttagatgctagagaaaaattaaaagtaaatgacatagttatatttagaatagaacaattatatccatttcctgccaaacccttggttaaagagataaaaaaatatgctaaaaatgctaaattttactggtgtcaggaagaaccaaaaaatatgggtgcttggcttttagtgcgtgattatattcagtggtctttaaattatattgcagctaaaaataaagaaatcatgtatattggtagaaacccagctgcatcgcctgctacaggttatgcaaaaagacattctgctcaacaaaaagaaattatagaaaaggtttttaaataa

SEQ ID NO: 217364 - DNA, 1564 bp, Unknown
  Bacterial polypeptide expressing nucleotide sequence isolated from the Sargasso Sea
gtaaataatcaaattgggtttacaactagcccaagatttgcaagatcctcacctcacccatcagatattgctaaaatggttgaggctccaataatacacgttaatggagatgatccagaggctgtagtttatggatcaagaattgcaacagagttcaggcttaaatttaatcgagatgtggttttagatttagtttgttatagaagatttggacataatgagggagatgagccctctttcacccaacctcttatgtacaaaaaaataagatcacatccttctgcggcaaaaatttatggatcaaaacttatagatgaggatttactttcagaaaatgatttaaataatcaaattaaaaaatttaaagctttattagatgatcaatttaaaactgcaaaggattacaaaccaaaaatagaatggtttgaaggagcttggtcgagttacaaacctaaaaaaggaaaagataaaaaggggatcacaggtgcagatcctgatctcttgagaaatatctcagataaaataaatataattcctaatgggattaatgttcataagacaattaataaaatatttcaaaacagaaaaaaaacaattgatcaaggttctaatattgattggtcatcagcagaagcacttgcttttggatcattattaaatgaaggctttccagtaagatttgtaggtcaagactctggaagaggaacctttagccaaaggcactcagttttacgaaatcaagaggataattctagatatataccgttgaatagtatatcaaaaacacaaaaaaaatttgagattgtagacagttttctttcagagttagcagttcttggttttgaatatggatacagtttagttgagccaaatacattaacaatttgggaagcacaatttggtgattttgcgaatggagcacaagtcatcattgatcaatttatatcttcgggtgaaagaaaatggcagagagcttctggattagtaatgttattgcctcatggatatgaaggccaaggacctgagcattcatctgcaagattagagagatttttgcagttgtgtgctaatgataatcttcaagtgatgaactgtactacaccagcgaattattttcatgctcttagaagacaaattcatcgtgacttcagaaaacctttggttttaatgacaccaaagtcacttttaagaaataaatattgtgtttcagatattaaggattttaataagcaaacatcatttcatcgtattttatgggatcacgcattaaataatgataacgaaaattttataaaattaaaaaatcctgacgaaattaaaaaagttattctttgttctggaaaagtttactttgatttattagctgcaagagaaaaaattaaaagagatgatgtaattttatttaggattgaacagttatatcctttccctgtaaaaagcttagtcaaagaacttaagccttatgcaaataaggccaaattctattggtgccaagaggaaccaaaaaatatgggagcatggttttcagtgagagattatattcaatggacattagaaactataa

SEQ ID NO: 217365 - DNA, 1597 bp, Unknown
  Bacterial polypeptide expressing nucleotide sequence isolated from the Sargasso Sea
gattgtggatcattaggagcatctcaaatatgttttggcatggctcacaggggcaggctaaatttattagtaaacgttttaggtaagctaccatccgatttattttcagcttttagtgaagattttgaattagagggagcaagcaccggagatgttaaatatcacttaggattttcttctaactttgacactccagggggcgaggtccatgtctcattatttaacaatccctctcatctcgagatagttgatccagttgtaataggatctgtcagagctagacaagatagaataaatgataaagatcgatcaaaggtaataccagtattacttcatggtgatgcagcattctctggccaaggtgtagtaatggagtcacttcagatgtctcaaactagaggttttaatgttggaggaacaattcatattatagtcaacaaccaaataggatttacaacaagcaatgtaaatgattcaagatctacagactattcttctgatgttgcaaaaataattcaagctcctgtcattcatgtgaatggcgatgatccagagatggtagttaatgctgcaaaaattgcatgtaaatatagaaataaatttaagaaggatatagtgatagatttattctgttacagaagaagaggccacaatgaggctgatgatccgtctgccactcagccattaatgtatgaaaaaatttctaaccatccctcggttttaaatcaatatgaaaataatttaatgaaagaggggatattggatgctgaacaatcaaagaaaataaaatcaaattatagaaaatcattagagggtggtgagagtgtcgctaaaaatttagcaaaaaaaccaaatgattctctatggtttgattgggaaccttatttagatgtcaaatggtggccaaaggtcgatacaaaatatagtaaaaaagaattaaaaaaattaggtaaagaaattatttcagtgcctaaagaatttaatatgggttctcaagcatcaaaaatatttgcagatcgacatgaaatgaatcaaggaaatattccaataaattgggggtatgcagaggtcatggcctatgcaacattactaaaagatggctatccaataagacttacaggtcaagatgtcagaaggggaacattttcacataggcatgcttgtatatttgattctcaaactggaatggggcatatatcgctttctgaacttgcagaaaaaaataagacaagctttgatatatatgattctttgctttcagaggaagcggttttagggtttgaatatggatactctgctacatggccatcaggattaacaatttgggaagcgcagtttggtgattttgctaatggtgctcaagtagtgattgatcaatttatcgtatcagcacaacataaatgggagagattgtcaggactaattatgcttttacctcatggttatgaggggcaagggcctgagcacagtagcgcgagaatagaaaggtttcttcaattatgtgcttcagaaaatattcaagtatgtgtaccaagctcacctaaacaaatttttcatcttctcagaaggcaagctataagaaaaatgcgcacacctt

SEQ ID NO: 217366 - DNA, 2824 bp, Unknown
  Bacterial polypeptide expressing nucleotide sequence isolated from the Sargasso Sea
aatgaaaaagactatgtcagagtatatgagtgactcacatacatctggcggacacctctcatatttagaggatttatatgagagttatttacaagatcccgattcaatttcagaggagtggaaaacttactttaatgatttaccgtttcaaaatggatcccaaaaggatagttctcatctcgatgtaataaaacactttcagaatgtttctaggagatctgcacctagagaaaaaattatctctcaagaaaagaatcctctagaagcaaagattcagagtttaataaaagcttatagagactatggacatactgctgcagacttagatcctcttggaattgctgaaaaagttattcattcagatttatacaaaacggaaggcttattcagttcagaagatctttcaagtaaggttaattgcaacttcccgataggaagcaatactgaatacgaagttaataatttaatagatggtcttaaagaaacttattgcagaaatataggtattgaatttcagcatatatcaaataaaagagaaagaagttggattattgagaagtttgagaattcagatcataaaatctcagataaagaaagaaaaaaagaaatccttaaaagattaatttctgccagaggcttagcccagttcctttcttctaaatatccaggcatgaagagattcggtattgatggatgcgaatcacttatcccacttgtagatacactaattaagacaacctcaaaaaatggcgctgagcaaatttgttttggaatggcgcacagaggcagactgaatttattagttaatgttttaggaaaggtttcaaaagagcttttcgaagcttttgaagaagattttgatcttaaaggatcaagtactggagatgtaaaatatcatttgggctactcttcaaatattagaactgatcacggagatgtccatgtatctttaacaaataatccttcacatttagaaattgtaaacccagttgttgttggttctgtgagagctcgtcaagatagattaggagatacattcagaaatagggttgttcctattcttattcatggcgatgcagcattctctggccaaggcgttgtgatggaaactttacaaatgtcacaaaccagagcatatggagtagggggcacaattcatgtcgttgtaaataatcaaatagggttcacaacaagtcatataagagatgctagatcaacaagatactccactgatataagtaaatttattgaggctccaataattcatgtaaatgctgatgaccctgaagcagttgtttatgtttcagaattggcatgcgaatacagagagaacttcaagaaagatattgttattgatttagtttgttatagaaggagcggtcataacgaagctgatgatccttcatcaactcaacctttaatgtataaagcaataaaaagtcataaaaccgtcttagatatgtatgaaaaacttttaactgctgattcaataatatctgatgacgaaataaaagattttaaaaaatcatacagaaagcaaatagaaaatggtgaatctgttacacctaatttggctacaagatctaatgatgatcagtggtttgattgggaaccatttatgaataggaaatggtacgaggaagtaaccacttctatccctcaaaaagaaattgaaaaaaatgccttatcaatcgtgaagactccttcagatttcttagttcaaaagaaggttcaaaagatttttgatgaaagagtaaaaatgtcaaagggagatctaaaactaaactggggatttgctgaaatgatggcatattcaagccttcttaaagaggggtatcctataagattcactggtcaggatgtcagaaggggcacatttgatcaccgtcatgctgttatctttgatcaggataatggagaagggtttctgtcactcgattcaattgcaaaagaaggaaaaacatcagttgatatttatgattcattattatctgaggaagcagttcttggctttgaatatggttatgcagcaacttggccaagtgggcttgttatatgggaagctcagtttggtgattttgcaaacggagcacaggttgttattgatcaatttattgtcagcgctgaacataaatgggaaagactttctggattagttatgctcctcccgcatggatttgagggaatggggcctgagcacagcagtgcaagattagagagatttttacaactatgtgcagcaaataacatacaagtttgtatgccaagctccccatcccaaattttccatcttctcagaaggcaggcaataaggaaaatgcgaagacctcttatcgttattactccaaagagtcttttgagattacctgaggcagcaagtgatttatctgagctaacaaatggaagctttaattgcatcatcggagatgatcttccaatggaaaaaattaaaagagtagtactttgcagcggaaaggtttattacgatcttaaaaaggctagagatgaaaaaggtatttcagatgtcgcattacttagacttgaacaactatatcctttcccatattttgaagttgaagaaatgcttaaagattattcacatgttgaggagtttgtttgggctcaagaagaaccaagaaatcaaggagcatggtttagtcatcgtcatagattagagagggttttaaataagctcaatatagagaattcatttaaacctatttcaaggcctcccgctgctgcaccagcagttgggttaatgaaattacatcttcaacaacaacaagaattagttgataatgtacttaaaagagataacaaatga

SEQ ID NO: 217367 - DNA, 2854 bp, Unknown
  Bacterial polypeptide expressing nucleotide sequence isolated from the Sargasso Sea
atgaagcagtttcagctgaactcctatctgttcggcggcaatgcttcgtacgttgaagaactgtacgatgcatacctcaacaatccggcatcggtgccggagaactggcgagagtatttcgacgcgctgcagaatgtgcctgcaacggacggttcgaatgccaatgacgtcgcccattttccgatcgtcgaatcgttcgccgagcgcgcgaaggccaatgccttcatcccgcgcgaaagcaccaccaatctggctgcggcacgcaagcaagtgcacgtccagtccctcatcagcgcctaccgcttcctcggctcgcaatgggccaatctggatccgctgaagcgtcgcgaacgtcccgccattcccgagctcgaacccgcgttctacgatttctccgaaggcgacctcgaccagacgtacagcgcaagcaacctgtacttcggtttcgaccaggcttcgctgcgtgacatcgtcaagggcctgcgcgacacgtactgcggcacgatcggcgccgaatacatgtacatcagcgacccggaacagaagcgctggtggcaggagcgcctggagtcgacccgcgcgacgccgaacttctcggcagacgagaagaagcacatcctgaatcgcctgacggctgctgaaggcctcgagcgctacctgcataccaagtacgtcggccagaagcgcttctcgctcgaaggcggcgaaagcttcatcgcggcgatggacgaagtcgtccagcacgcgggcaagcgcggcgtgcaggaaatcatcatcggcatggctcaccgtggccgtctgaacgtgctggtcaacacgctgggcaagatgccggccgacctgttcgccgaattcgaaggcaagcacgtcgacgacctgccggccggtgacgtgaagtaccacaagggcttctcgtcggacgtgtcgacggaaggcggcccggtccacctgtcgctcgcgttcaacccgtcgcacctcgagatcgtgaacccggtggtcgaaggttccgcgaaggcgcggatggaccgtcgcggcgacgaagacggcctgcaagtgctgccggtgcagatccacggtgacgcggccttcgctggccagggcgtcgtgatggaaacgctgaacctcgcgcagacgcgcggctacggcacgcacggcacgctgcacatcgtcatcaacaaccagatcggcttcacgacgtccgacccgcgcgatgcgcgctcgacgctgtactgtaccgatgtcgtcaagatgatcgaagcgccggtgctgcacgtgaacggcgacgatccggaagctgtcgtgctcgcgatccagatcgcgatcgactaccggatgcagttccacaaggatgtcgtgatcgacatcgtctgcttccgcaagctgggccacaacgagcaggacacgccggcggtcacgcagccgctgatgtacaagaagatcgcgcagcacccgggcacccgtgcgctgtacgccgagaagctcgtgcagcagggcgtgatcaccgcggaagacgccgacaactacgtgaaggcgtaccgcaaggcgatggacgacggtcaccacacggtcgacccggtcctgtcgaactacaagagcaagtacgcggtcgactgggttccgttcctgaaccgcaagtggacggatgcagccgacacggccgtgccgctcgcagaactgaagcgcctcggcgaacgcatcacgacggtcccggaaaacttcaaggtccacccgctcgtcgagcgcgtgatcaacgaccgccgcaacatggcgcgtggcgaccagccgctcgactggggcatgggcgaacacctcgcgttcgcgtcgctcgtcgcatcgggttactcggtgcgcctgacgggccaggattcgggccgcggcacgttcacgcaccgtcatgcggtgctgcacgaccagaaccgcgagcgctggaacgacggcacgtacgtgccgctgcagaacatcgccgaaggccaggcgaagttcacggtgatcgactcggtgctgtcggaagaggcggtgctgggcttcgaatacggttactcgaccgccgagccgaacacgctcgtgctgtgggaagcgcagttcggcgacttcgtcaacggcgcgcaggtggtgatcgaccagttcatctcgtcgggcgaagtgaagtggggccgcgtgtcgggtctgacgatgctgctgccgcacggctacgaaggccagggtccggaacactcgtcgacgcgtatcgagcgtttcctgcagctgtgtgccgatcacaacatgcaggtcgttcaaccgacgacgccggcacagattttccacctgctgcgtcgccagatgatccgcctgttccgcaagccgctgatcgtcgctacgccgaagtcgctgctgcgtcacaaggaggcggtgtcggatctgtcggaactcgcgaagggttcgttccagccggtgctgggcgaaaccgacggcggcatcgacgcgaagaaggtcaagcgcgtgctggcatgctcgggccgcgtgtattacgacctcgtcgcacatcgccgcgaagcgaaggcgaacgacgtcgcgatcatccgtatcgagcagctgtacccgttcgcgcacaagcagttcgaagccgaaatgaagaagtacgagaacgcgactgaagtggtctgggtgcaggacgagccgcagaatcagggcccctggttctacgtcgagcaccatctgaaggaaggcatgaaggaagggcagaagctggcatacagcggccgtccggcttcggcctcgccggcggttggctactacgcgaagcactacgagcagcagaaggccctcatcgaaggtgctttcggccgcctgaagagcacgtcgatcgcgaaataac

SEQ ID NO: 217368 - DNA, 1498 bp, Unknown
  Bacterial polypeptide expressing nucleotide sequence isolated from the Sargasso Sea
agagatgtgtttatgaccttaatttgtatcgaaagatttggtcataatgagggggatgaaccgtcttttactcaaccactaatgtataaaaaaatccgttcacatccttcacccatcaaagtttatggtgaaaaattaataaatgaaggatcaattacagatgattattttagaagatctataaaagaatttaaggaattacttgatgatcaatataagaacgcgaagaattataagcctaaaattgaatggtttgagggtacatggtcaagatataaaccagcgagaggaaaagataaaagaggcgttacgggttatgatgtaaaaaaattaaaaaatatttctgaaaaaataaatacaatacctaaagaaattaacatccataaaactatcgcaaaagtcttagaaaatagaaaatcaaacgttaataatgaggaaaaaattgattggtccacagctgaagctttggcgtttggatctttgttagaggaaggttacccagtaagattggttggtcaagactcaggaagaggtacatttagtcaaagacattcagtattaagaaatcaaatagataattcccgatatgttccgttaaacaaaatatctaaaaatcaaaagaattttgaaattgtagacagtttcttatctgaattagctgttttaggctttgaatatggttacagtttagttgaacctaatacacttacaatttgggaagctcaatttggtgattttgctaatggtgctcaagtagtcatagatcaatttattgcttcaggagaaagaaaatggtcaagagcctctggattagttatgttattacctcacggctatgaaggtcaaggtcctgaacattcttctgctagattagaaagatttttacaattatgttcaaatgataatatgcaggtaatgaattgtacaacacctgcaaactactttcatgcactaagaagacaaatgcatagagatttcagaaaacctctaattataatgactcccaaatctttacttagacataaacattgtgtttcaagtttaagtgattttagtaaaaaaaatacatttcatagagttttatgggatcacgcaatagatccaaaggtaaagggttttattaaattgaaaaaaaaggaaaaaattaaaaaggtaattttatgttcaggaaaaatttattttgatttacttgaggctagagagaaattcaaaagagatgatcttatattttatagaattgagcaactttacccttttccagctaaggcacttgcaaaagagctaaaaccttatgctaaaaaagctaaattttattggtgtcaggaagagccaaaaaatatgggagcttggttttctgctagagattatatccaatggacattagataatataaaggctaataataaaaagatttcttatattggaagaagtccagatgcgtcaccagccactggttatgcaaaagagacacatttcacaacaacaagaaattattaag

SEQ ID NO: 217369 - DNA, 2794 bp, Unknown
  Bacterial polypeptide expressing nucleotide sequence isolated from the Sargasso Sea
tatgaaagagctttgggggagctcgcacatttcagctgggcatgcagcctacttagaatctctttacgaaacttatatcacagatccaaactctctctctgaagagtggataaatttctttaagaatttgcctcatcatgctacttcaaatggtgagatatcacaccaaaatattgttagggagtttaaaaatgtttctagaaaaaactctgtcactaagtcatcagttgatgaaagacagggtaaagtaattcgacttatccaatcatatcgaaatagaggccatcagcaagccaacttagatccattgggtcttatgatcagggaaaaaattgaagatctcaatattgaatttcatggcctgagcagtagcgatcttgaagaggagttttatacagatacatttatgccgggttcagaaaaaatgaagttaaaagagatcttagcaagtctcgaagaaatttattgtgggaacattggcatagagtgtaatcatattatggaatcaaatgagagaaggtggtttcaaagaaaatttgaatcaaaacttaaagaatattctttttcagaagaagaaaaactcaatatttatgaaagattaaattcagctgaaggtctcgcaaaatatctatcggcaaaatatccaggaatgaaacgtttcggcattgatggagctgaatctttagtccctcttatagaaaatgttatccaaaactttggttcaatgggtgcaaatcaaatatgtttcgggatggcccatagaggaagattaaatttacttgtaaacgtattaggaaaattgccatcagaattattttccgctttcgatgaaaattttgaattagagggagcaagcactggcgatgttaaataccatttaggtttttcttcaaactttaatactcccggtggagaggttcatgtttctttatttaataatccatctcatttagaaattgtagatcctgttgtaataggctctgtaagagctcgacaagataggcttaaagataaggatagatcaaaagttgtcccaatattgcttcacggagacgcgtccttctctggacaaggtgttgttatggaatctcttcaaatgtctcaaactagaggttttagcgttggtggaacagttcatattattgttaacaatcagataggctttactacgagtaataaagatgattctagatcgactgactattcgtctgatgttgcaaaaatgatccaagcaccaataatccacgttaatggagatgatcctgaaatggtaattaatgctgcaaaaatagcttgcaagtatcgtaataaatttaaaaaagacattgttattgatctattttgttataggagaagaggtcacaatgaagctgatgatccttcagcaactcaaccaattatgtataacaaaatctctaaacatccttctgttttaagtcaatatgaagagaagttaattcatgaaggactaattgataaagttaaagctaaaaaaattaaatcagattatagaaaatcgcttgagggcggtaaatcggttgcaaaaaatcttgctgaaaaaccgaatgattctttatggtttgattggcaaccatacatggatgtaaagtggtggccaaaagttaataccaaatttccaaaacaaaaatttaaaaaactaggcagtgaaatatgcaaaataccagattcttttaatctaggttcgcaagcgaaaaaaatattttctgacaggttggaaatgaccaattctaaattgatgacgaattgggggtatgccgaaattatggcctatgcatcattactgagtgaaggttaccctataagaattactggacaagatgtaagaaggggtactttctctcacagacatgcatgtatttttgattccaaaacaggtaatggtcatattcctcttgcaaaaattgcagctgaaaataaaacaaagtttgatatttatgattcattattatctgaagaggcagtactcgcttttgagtatggttattctgcgacgtggccatcaggattaacaatttgggaagcgcaatttggtgattttgctaacggcgctcaagttgttattgatcaatttattgtttcagctcaacataaatgggagagattatctggtttggtcatgcttttacctcatggttatgagggacaaggtccagaacatagcagcgcaaggatagaaagatttttacagctttgtgcatctgagaatattcaagtttgtgttccaagtactccatctcaaatatttcatttgctccgaaggcaagctatcaggaaaatgagaacacctcttgttgtaatatcacctaaaagtttgttgagaaatccagaagcagtttctagtcttgaggatttatataatggcagtttttcatgtgtaattgatgacgactctgataagaaaaaagttaataaagtaattatgtgctctgggaaagttttctatgatttaaataaaaagaagaaagaaaataatataaaagacattgctttaataagaattgaacaactttatccttttccttacgatgaccttgaagaaatactcacaaagtacgaaaatgtacaagaatttgtatggtgtcaggaagaaccgttaaatcagggtgcatggtttagtcatagacatagaatacaaagagttattgatagaatagacacttccaaagaagtaggtcttgttagtagacccgctgcagcagcacctgcagttggactaatgaaactacatcttcaacaacaggaagagcttgttaataaggcattaattaaatga

SEQ ID NO: 217370 - DNA, 2761 bp, Unknown
  Bacterial polypeptide expressing nucleotide sequence isolated from the Sargasso Sea
tatgaaggagctttgggggagctcacacgtctcggcgggacatgctgcctatcttgaaagtctctatgaagctttcataaacgatcctgaaaatttatcaaaagagtggcttgatttttttacaaatcttccaaagaactcaaactctaatggagaaatatctcatcaagaaataattaaagaatttagaaacttttcaagaagcaaggtcaaggtatctgacagtagcaaaaaaacaatagatgaaagacagggtaaggttattagacttattcaatcatatagaaatagggggcatttaaaagcaaatcttgatcctcttggcatgatggagagaagggtaatagaggaccttagtattgagtttcatggactatcgcatgatgatttagatgaagagttttataccaatacttttacagattcaaacaaattaactttaagagagattttaaaaaggctggaagaagtttactgcggcaatattgggattgagtgtaatcatattctcgattcagaagaaagaagatggtttcaaaagaaatttgagtcgaaattgactgaatacggtttcgatcctgatgaaaaacttaatatttatgaaagactaaattctgctgagggtcttgcaaaatacctgtctgcaaaatatccaggaatgaaacgttttgggattgatggcgctgaagcattagtacccttggttgaaagtgttattcaaaactgtggatcaatgggagctaaacaattatgttttggaatggcgcatagaggaagattaaatcttttggttaatgtgctaggtaaacttccatcagaactattctctgcttttgatgaagatactgagttagagggtgcttccacaggagatgttaagtatcacttgggtttctcatcaaactttgaaacacctggtggtgaagtacatgtttcactttttaataatccatctcatttagaaatcgtagatcctgtcgtaattggctccgtgagagctagacaagatcgaattggagacaaagatagatcacaagttgtgccaattcttcttcatggagacgcttctttttctggacaaggagttgttatggaatcacttcaaatgtctcaaacaaggggattcaatgttggaggaacgattcatattattgtaaacaatcaaattggtttcactacaagcaatattaatgattcaaggtcaacagattattcgtctgatgtagcaaagattattcaagcccctgtaattcatgtgaacggtgatgatccggagatggttgtaaatgcagcaaaaattgcatgtaagtatcgaaacaaatttaaaaaagacattgttattgatttattttgttatagaagaagaggacataacgaagcagatgatccttcagctactcaacccttgatgtataacaaaatttcaaaacatccatctgttttaagtcagtatgaaacagatttaaaagatcatggaatattaacatctgataaggcaaaaaaaattaaaagtgaatatagaaaatctcttgaaggtggagaaagtgttgcaaaaaatttagcaaaaaatccaaatgatcaactttggtttgattgggagccatatatggatgttaagtggtggcccaaagttgataccaagtttaataaagataagtttatgaagcttggtaaagctatttgtaaagtacccaaatcatttaatcttggctcacaagctaaaaaaatatttgatgatagattgaaaatgaacaatggagagattcctataaattggggatatgctgaaacaatggcatacgcaactcttctagatgagggttatccgataagactaactggccaagatgtcagaagaggaactttttcacacagacacgcttgtgtttttgattctaaaaatggaatgggttacatacctttatcggatatagctgaaaaaaataaatctaagtttgatatatatgattcattgttatcagaggaagcagttttagcatttgaatatggttattctgctacttggccaagtggtcttgctatttgggaggctcagtttggagattttgcaaatggagctcaagttgtaattgatcagttcatagtttctgcacaacataaatgggaaagattatccggtcttgtaatgcttttgccacatggatacgaaggtcagggtcctgagcatagcagcgcaagaattgaaagatttttgcaattatgtgcatctgaaaatatacaagtttgtgttccaagttctccaaaacaaatttttcatcttttgagacgacaagcaataagaaaaatgagaactccactagttgtaatatcaccaaaaagccttctcagaaatcctatggctgtttctaacttaggcgaattaacaaacggaagttttgattgtgtaattgatgatgatataaaaaaacctgaggcagtaaaacgcttaattctttgttcaggtaaagttttttacgatctcattgaaaagaaaaaagaagaaaaccgagaagatattgctgttgtaagaatagaacaattgtatccatttccttatgatgaccttgaagaaatccttacaaagtatcaaaatgtacaagaatttatatggtgtcaagaagagcctttaaatcaaggtgcgtggtttagccatagacacagaattcaaagagttttagataggctaggtgatggttttgaggttagtttggtaagcagaccagcagcagcagcacctgcagttggattaatgaagcttcat

SEQ ID NO: 217371 - DNA, 1382 bp, Unknown
  Bacterial polypeptide expressing nucleotide sequence isolated from the Sargasso Sea
aaaattaataaaggaaaatataatattaaaagaagacttaaattcacaaattaaaaaatttaaagaacttttagatcaacaatttaaaacagcaaaggattataaacctaaaatagaatggttcgagggaacttggtcaagatataaaccagaaaaaggaaaagataaaagaggagcaactggaatagatttaaatattttatcaaatatatcaaataggattaataaaataccatcagagattaatattcataaaactataaataaaatattagataatagaaaaaaaacaattgaacaaggctatggtatagattgggctacagctgaatctttagcatttggctctttactagaagaaggatatccagttagattagtgggtcaagatactggaaggggtacttttagtcaaagacattctgtactaaggaatcaattagataattcgagatatgttcctctaaataatatttcaaaaaaacagaaaaattttgaggtcgtagatagttttttatctgagttagcagtgttaggttttgaatatggatatagtcttgttgctcctaatactttaactatatgggaggcgcagtttggagattttgctaatggagcgcaggtaattatcgatcagtttatatcttctggtgaaagaaaatggaaaagagcatcaggattagttatgttactaccacatggctatgaaggacaaggacccgaacattcatcagcaagattagaaagatttctacaattatgtgcgaatgataatatgcaagtcatgaattgcacaacaccagctaattattttcatgcacttcgtagacaggtattgcgagattttagaaaacctttgattatgatgacaccaaaatcattgttaagaaataagtattgtaaatctaatcttagagattttagtaaaaataattcatttcatagagtaatgtgggatcattgtatggatcctaaaaataaaggatttataaaacttaaaaaaaattcagaaattaaaaaagtaattttgtgttcaggaaaagtatattttgatttattagaagctagagaaaaaattaaaaatgatgatgtaattattttcagaatcgaacaactttatccttttccagcaaaaagccttgtaaaagaactaaaaccatttgcaaaaaatgctaattttttttggtgccaggaagagccaaaaaatatgggtgcatggttgttagttagagattatatccaatggactttacaaactattaaggctaaaaatactgaaatttcttatataggaaggaatcctgatgcatcacctgcaactggttatgcaaaaagacatctttcagaacaaaaagaaattgtaaataaagtatttgaataaa

SEQ ID NO: 217372 - DNA, 982 bp, Unknown
  Bacterial polypeptide expressing nucleotide sequence isolated from the Sargasso Sea
aggtacatttagtcaaagacattcagtattaagaaatcaaatagataattctcgttatgttccgttaaacaaaatatctaaaaatcaaaagaattttgaaattgtagacagtttcttatctgaattagctgttttaggctttgaatacggttacagtttagttgaacctaatacacttacaatttgggaagctcaatttggtgattttgctaatggagctcaagtagtcatagatcaatttattgcttcaggagaaagaaaatggtcaagagcctctggattagttatgttattaccccacggctatgaaggtcaaggtcctgagcattcatctgctagattagaaagatttttacaattatgttcaaatgacaatatgcaggtaatgaattgcacaacacctgcaaattattttcatgcactaagaagacaaatgcatagagatttcagaaaacctctaataataatgactcccaaatctttacttagacacaaaaattgtgtttcaaacttaagcgattttagtaaaaaaaatacatttcatagagttttatgggatcacgcaatagatccaaaggtaaaaggttttatcaaattgaaaaaaaaggaaaaaatcaaaaaagtaattttatgttcaggaaaaatttattttgatttgcttgaggctagagaaaaacttaaacgagatgatcttatattttatagaatcgagcaactttatccttttccagctaaagcacttgcaaaagagctaaaaccttatgctaaaaaagctaaattttattggtgtcaggaagagccaaaaaatatgggagcttggttttctgctagagattatatccaatggacattagataatataaaggctaataataaacagatttcttatattggaagaagtccagatgcatcaccagctactggttatgcaaaaagacacttttcacaacaacaagaaattattaagaaggtttttgaataa

SEQ ID NO: 217373 - DNA, 1831 bp, Unknown
  Bacterial polypeptide expressing nucleotide sequence isolated from the Sargasso Sea
ttttttcataaggatttaaaaagaaataaagtaataccaatactaattcatggcgatgctgcgttgcagggacaaggggtagtagcagaatgttttgctatgtcaggtttaccaggacacaatactggtggaacgattcatattatagtgaataatcaaattggattcacaacaagcccaagatttgcaagatcgagtccttatccatctgatttaggaaaagtggttgatgctccaattttacactgcaatggagatgatccagaatctgtcgtgcattgtgcaaaaattgcaatagagtttagacaaaaatttaataaagatgttgttatcgatatgatttgttatcgtagatttggtcataatgaaggtgatgaaccatcatttactcaaccattaatgtacaaaaaaattagacagcacccatcaacactaaatgtatatggagctaaattaattaaagatcaaattattaataaagaagaatttgataaaatgaaaaaagaattttcaaatctactagatgaacaatataaaactgcaaaagactataaacctaaaattgaatggtatgaaggaacatggtcaagatataaaccagaaaaaggaaaagataaaagaggaaaaagtggagtagatttaaataaagttattagaatttctgaaaaaataaataatatacctcctgaaattaatattcataaaacaatctctaaaattttagaagctaggagacaatctgttgtaaaaaaaaaaggaatagattggtctacagcagaagcattggcatttggctctcttcttgaagaaggatttccagtaagattagttggccaggactctggaagaggtacttttagtcagagacattctgttttaagaaatcaaatagataattctcgttatattcctttaaataatatttcaaataatcaaaaaaaatttgaagttgttgatagttttttgtctgaactcgcagttttaggatttgaatatggttatagtttagttgaaccaagcacattaactatttgggaagcgcaatttggagattttgctaatggcgctcaaataattatagatcaatttattgcatcaggtgaaagaaaatggtctagggctagtggacttgtaatgcttttacctcatggttatgagggacaaggtccagaacattcgtctggaagattagaaagatttcttcaattatgtgcacaagacaatctacaggtcatgaattgcactaccccagcaaattattttcatgctttaagacgtcagatacacagagattttagaaaaccactaattattatgacacctaaatcattattaagaaataaactttgtgtatcgaatttagaggattttggtaaaaagaattcttttcatagagttctttgggaccatgctattgatccaaaagaaagtagttttataaaacttaaaaaagctaaagaaattagaaaagtaatcttatgttctggaaaaatatattttgatcttttagcagctagagaaaaattaaacaaagatgatgtggtgatgtttagaatagaacaactctatccatttccagccaaacctttagttaaggagataaaaaaatatgctcaaaatgcaaaattttattggtgccaagaagaaccaaagaatatgggcgcttggcttttagtgcgtgattatattcaatggacattaaattatattggagctaaaaataaagaaatcatgtatataggaagaaatccagcagcatcaccagctacaggatattcaaaaagacatttagcgcagcaaaatgatataatagataaagtatttaaataaa

SEQ ID NO: 217374 - DNA, 2254 bp, Unknown
  Bacterial polypeptide expressing nucleotide sequence isolated from the Sargasso Sea
agttgaaaaagatgaaaatgctttacaattcactaaaaatggcaaggaagctattttgaataaaatcattcaagctgaaggatttgaaaaatttttaaatacaaaatatgtaggaaccaaacgatttggtttagatggagcggaaagcctaattcctgcattagagcaaataataaaaattggtggtcaaaataaaataaaagaagtcaaaattggcatgtctcatagaggaagactgaatgttttggcaaatgttttacaaaaatcatataaaagaatatttaatgagttcgctggagaaatagactcttcctcagatgatgatagcgctggtgatgttaaataccacttaggagcatcatctgatagagtatttgatggtaattcagttcatgtaagtcttacagataatccatctcatttggaggctgtaaaccctgtagttttgggacaaacaagagcaaagcaattttttcataacgataaagagagaaataaagtaattcctatattaattcatggtgatgcatcttttgctggccagggtattgttgctgagtgctttgcaatgtctggtttgcctggtcataatactggtggaacgattcattttataattaataatcaaataggatttacaacaagtccaagatttgcccgttcatctccacatccttctgatgtagcaaaaatggtagactcgccaattatacatgctaatggtgatgatccagaatcggttgtatatgcagctagaatagctgctgagtttagacttaagtttaatagggacgtagtagttgatttagtttgttatagaagatttggtcacaacgaaggagacgaaccttcatttactcaaccattaatgtataaaaaaattaaatctcatctatccactgtaaaaatatatggaaataaattagttaacgaaaaaactatttcatctgaagatttaaataatcaaattaaaaaatttaaagatcttcttgatgatcaatacaaaaatgcaaaaaattataagcccaaaattgagtggtttgaaggaacatggtcaagatataagccaagaagaggacaagataaaagaggagatacaggctattcaacttcaaaacttttagaaatttcagataaaatacattcactttcagctgagctaaatatccacaagactatagtaaaaatttttgaagctagaaaaaattctatgaacaaaggaaatgaaattgactggtctactgccgaggcacttgcatttggttcattattagaagaaggatatccagtaagactagttggacaagattctgggagaggaacttttagccaaagacattcagtattaagaaatcaaattgataattcaagatatatcccattaaataatatttcaaataaacaaaaaaattttgaaatagttgatagctttttatctgaattagcagttttaggttttgaatatggttatagtttagttgaaccaaatacattaactatttgggaagctcaattcggtgattttgcaaatggagcacaagtgataattgaccaatttatttcttcaggagaaagaaaatggttgagagcgtctggtttagtactattgttaccacatggttttgaaggtcaaggaccagaacactcatctgcaagattagaaagatttttacagctctgctcaaatgacaatatgcaagtgatgaattgtactactcctgcaaattatttccatgctttaagaagacaaatgcatagagattttagaaaacctttagttattatgacaccaaaatctttattaagaaataaatattgtgtttcgcaaattgatgattttagtaaaaaaaattcttttcatagagttttatgggaccatgcaatggatccaaaaaccaaaggatttattaagttaaaaaaaaataatgaaataaaaaaagtaatattatgttcaggaaaaatatattttgaccttttatcagctagagaaaaattaaaaaaagatgatgttattttatttagaattgagcaactttatccttttccagcaaaaagcttagtaaaagaaattaaaccttttgcacaaaatgctaaattttattggtgtcaggaagagccaaaaaatatgggagcatggctaatggtgagagattatatacaatggacattagattatataaaagctaaaaatagaaaaatttcttatattgggagaaatcctgatgcaacgccagctactggttatgcaaaaaga

SEQ ID NO: 217375 - DNA, 2491 bp, Unknown
  Bacterial polypeptide expressing nucleotide sequence isolated from the Sargasso Sea
tgaacttcatccagagttttatggttttaaaaaagaaaattatgaaagaaaaattttcttaaatggagtgattaataaaaagtatgccaatattaaagaaattttaaaatttatgaaaaaaacctattgtggaaaaataggttatgagtttatgcatatttctaatcctgatgaaagaaaatggtttagagatagaattgaacaagatgacaaagctcttcagtttaccaaaaatggaaaagaagcgatattaaataaattggttcaagcagaaggttttgaaaaatttttagcaaccaagtacgttggtacaaaaagatttgggttagatggtggagaaagtttaatacctgcgctagagcaaataattaaaattggtggtcaacaacaaataaaagaagttaaaattggaatgtctcatagaggtagattaaatgttttggcaaatgtattacaaaaatcttataaaagaatatttaatgaatttgctggagaatttagtgacgaaacagaggatagtgctggtgatgtaaaatatcatcttggtgcatcttctgacagacagtttgatggaaattctgttcatgttagtttgacagataatccatcccaccttgaagcagtaaatcctgttgttttagggcaaactagagcaaaacaattttttcataaagataaagagagaaacaaagttatcccaatactaattcatggtgatgcagcatttgctggacagggcgtggtagctgaatgttttgctatgtcaggtctgccaggacataacactggtggaactattcatataattgtaaataatcaaattggttttactacaagcccacggtttgcaagatcatcaccttatccatctgatgttgctaaaatggttgaagcaccaattttacatgtaaatggagatgacccagaagcagttgtttacgcgactagaattgcaacagagttcagattaaagtttaacagagatgttgtggttgacttaatttgttatagaagatttggtcataatgagggagatgagccatcatttactcagccattgatgtatcagaagattaaagctcacccaagtgtttataagatttatggaagtaaactagttagtgaaaatacgattaccaaggaattactagatcaaaatgttaagtcatttaaggatttattggatgatcagtataaaagtgcaaaagattataatcccaaaatagaatggtttgagggaacatggtctagatacaaacctgagaaaggtaaagataaaagaggagtttcaggttttgatgaagataatttaaaattaatttcagacaagattaattctgtaccagttgaaaaaaatattcataagaccatttctaaaatatttaatgtaagaaaagagtctgttgaaaagggaacagggattgattggtcatcagctgaggcacttgcttttggatctttattagttgagggatatccggttagattggttggtcaagattctggaagaggaacttttagtcaaagacattcggtattaagaaatcaagttgataactctagatatattcctttaaacaatatttcaaaagatcaaaaacaattcgaagttgttgatagttttttgtctgaactcgctgttttgggatttgaatatggatatagtttagttgaaccaaatacacttactatctgggaagctcaatttggagattttgcaaatggagctcaggttgtgattgaccagttcatagcatcaggtgaaagaaagtggaacagagcttcaggaattgtaatgttgttacctcatggatacgaaggtcaaggtcctgaacattcatctgctagattagaaagatttttacagttatgttcaaatgataatatgcaagtgatgaattgcacaactccagccaattattatcatgcattaagacgtcaaatgcatagagattttagaaaaccactaattataatgacaccaaaatcattactcagaaataaatactgtgtttctaacttagaggattttaataaacaaaatactttccacagagttttgtgggatcatgcaattgatccaaaatcaaatggatttattaaacttaaagaaagttctgagattaaaaaagttatcttgtgctcgggtaaagtttactttgacttacttgatgctagagaaaaattaaaaagagatgatgtaattttgtttagaatagaacaactttatccttttccagcaaaggctttggtaaatgaacttaaaccttattccaaaaatgctgaattcttttggtgccaagaagaacctaagaatatgggagcatggttttcagtgagagattatattcaatggacattagatactttaaaggctaaatataataaaatttcttatataggaagaagccctgatgcaactccagcaactggatatgcaaagaggcataattctcagcaacaagaaataattaataaggtgtttggttaa

SEQ ID NO: 217376 - DNA, 1693 bp, Unknown
  Bacterial polypeptide expressing nucleotide sequence isolated from the Sargasso Sea
tcattttattattaacaatcaaataggttttacaacaagtccaagatttgcaaggtcatcaccacatccttcagatgtttctaagatggttgacgctccaattattcatgttaacggagatgatccagaggccgtagtatatgctgcaagaattgcagcagaatttagattaaaatttaatagagacgttgtcattgatttagtttgttacagaagatttggacataatgaaggtgatgaaccatcttttactcaaccacttatgtataaaaaaattaagactcatccttcaacagtcaaagtttatggaaacaaattagtaaacgagaattttatgtccatagaggaattaaataatcaaattaaagattttaaagaattgctagaggatcaattcaaaaacgcaaaaaattataagcccaaaatagaatggtttgagggtacatggtctagatacaaaccaaaaaaaggtaaagataaaagaggtgttacaggatactcaacaaaaaggcttaaagagatatctgataaggtgcactcgatacctgaaaaaataaatgcgcacaaaactataataaaaatatttaagtcaagaaaagatattgttaataatggagatggaatagactggtctactgcagaaactttggcatttggatcgctgttagaagaaggttatccagttagattagtaggacaagacactggtagaggaacttttagtcaaagacactctgtgcttagaaatcagattgataatacaagatatatacctctaaataatataactgataatcaaaaaaattttgaagttgttgatagttttttatctgagttagcagtgttgggttttgagtatggatatagtttagttgaaccaaatactttaactttatgggaagcacaatttggtgatttcgcaaatggggctcaagtaattatagatcagtttattgcctctggagaaagaaaatggtctagagcatctggtttagtaatgttattaccacatggttatgaaggacaaggaccggaacattcatctgcaagattagaaagatttttacagctctgctcaaatgacaatatgcaagtaatgaattgcactactcctgcaaattactttcacgctttaagaagacagatgcatagagaatttagaaaacccttaattataatgacacctaaatctcttttaagaaacaaattttgtacttcaaaattggatgatttcagtaaaaataattcctttcatagagtgctatgggatcatgctatagacccaaaaagtaacggttttataaaactaaaaaaaagtagtgaaattaaaaaagttgttctttgctctggtaaggtttattttgatttattatcagcaagagagaaacaaaaaagaaatgatgttattcttttaagaatagaacagctttatccttttccagtcaaaagtctcgtaaaagaaattaaaccttttgcaaaaaatgctaagttttattggtgccaagaagaaccaaaaaatatgggagcatggttttcggtgagagattatatacaatggacattagatcatattaacgctaaaaatagtaaaatttcttatattggtagaagtccagatgcaacacctgctactggttatgcaaggagacatttggctcaacaagaagaaattattaataaaatttttaattaa

SEQ ID NO: 217377 - DNA, 1474 bp, Unknown
  Bacterial polypeptide expressing nucleotide sequence isolated from the Sargasso Sea
tttggtcatcacgagggagatgaaccatcatatacacaaccgctcatgtataaaaaaataaaacaacatccaacaactgttaatgtatatggaaaaaaacttataaatgaaaaaattatttcagaagaagattttggtaatatgaaaaaagagtttaggaatcttcttgatgaacaatttagaacagcaaaaaattataaaccaaaaattgaatggtacgaaggaacttggtcaagatataaaccagaaaaaggtaaagatagaagaggaaaaagtggggtcgatattaaaaaactagataaaatatctgaaaaagttcataatattcccttaaatctaaatatacataaaacaatatctaaaattttagatttaagaaaaaaaactatacaaaataaaaaagggattgattggtctactgcagaaacattagcttttggcagtttgttagaagaaggatatccagtaagactagttggtcaggacactgggagaggaacttttagtcaaagacattcagtattacgaaaccaaatagataactcgaggtatatacctttaaataatatttcaagtaatcagaagaaaattgaagttgttgatagctttctttcagagcttgcagtcttaggtttcgagtatggttatagtctagtttctccagagactctaacaatatgggaagcacaatttggggattttgcaaatggtgctcaagtagttatagatcaatttatttcttctggagagagaaagtggtctcgagcaagtggacttgtaatgcttttgccccacggttatgaaggccaaggacccgaacattcatctgcaagactagaaagatttctacaaatgtgtgctcaagacaatcttcaagttatgaattgtactacaccagcaaactattttcatgcgctaagaagacagattcatagagattttagaaaacccctagtaattatgactccaaaatcacttcttagacataagttttgcgtttctaatttagatgattttggaaaaaaaaattcatttcacagggttctctgggatcatgctttagaggagaataataaatttatagaacttaaaaagagtgaaaaaattaataaagtaattttgtgttctggaaaaatatattttgacttacttgaagcacgtgaaaaaattaaaaaagatgatattgttatctttagaattgagcaattatacccttttccagtaaaatcacttgtgaaagaaattaaaaaatacgctaaaaactcaaaattttattggtgccaagaggaacctaaaaatatgggcgcatggttttctgtgagagattatattcaatggacattagattatattggagctaaaaataacaaaatttcttatattggaagaaaccctgcagcatctcctgctacaggttatgcaaaaaggcatttaagccaacaaaaagaaattattgaaaaggttttaaaataac

SEQ ID NO: 217378 - DNA, 758 bp, Unknown
  Bacterial polypeptide expressing nucleotide sequence isolated from the Sargasso Sea
ggctcagtttggagattttgcaaatggagctcaagttgtaattgatcagttcatagtttctgcacaacataaatgggaaagattatccggtcttgtaatgcttttgcctcatggatacgaaggtcaaggtcctgagcatagcagcgcaagaattgaaagatttttgcaattatgcgcatctgaaaatatacaagtttgtgttccaagttctccaaaacaaatttttcatcttttgagacgacaagcaataagaaaaatgagaactccactagttgtaatatcaccaaaaagcctactcagaaatcctatggctgtttctaacttagacgaattaacaaacggaagttttgattgtgtaattgatgatgatataaaaaaacctgaggcggtaaaacgcttaattctttgttcaggtaaagttttttatgatcttattgaaaagaaaaaagaagaaaaccgcgaagatattgctgttataagaatagaacaattgtatccatttccttatgatgaccttgaagaaatccttacaaagtatcaaaatgtacaagaatttatatggtgccaagaggagcctttaaatcaaggcgcgtggtttagccatagacacagaattcaaagagttttagataggctaggtgatggtcttgaggttagtttggtaagcagaccagcagcagcagcacctgcagttggattaatgaagcttcatcttcaacaacaaaaggatctagttaatgaggcaattggtaaatgag

SEQ ID NO: 217379 - DNA, 328 bp, Unknown
  Bacterial polypeptide expressing nucleotide sequence isolated from the Sargasso Sea
ttgaacgaggtctgcgaagccaggccgatgattggcaacgaagccatcgcacgcggtgcgtgggaggccggggtcaaggttgctgctgcgtatcccgggaccccctcgacggaaatcctggaatacatgggaagctatcccttagaggatttgcacgcccagtggtcgaccaatgaaaaggtggcctgcgacgtagccatcggcgctttctttgaaggcgtgagggcaatgacagcgatgaagcatgtcggcctcaatgtcgccagtgatgcattgctatctcagtcttatatcggggtcaacggcggattggtccttgttgtctgtg

SEQ ID NO: 217380 - DNA, 702 bp, Unknown
  Bacterial polypeptide expressing nucleotide sequence isolated from the Sargasso Sea
ataaaaatttcaaaatagtatcactcactgagagtaaaataataaaaaaaagaataaacggaattaaagttgatttaaatactgggcaagcatttaaaaaagcagatttaattatagatttcacaatacccaagtgtacttttcaggttttaaaaattgcttctaaattaaaaaaaaaagtagttatagggactactggatttactaaaaaagaggaaaatttaatcaaaagattttcaaaaaatattccaattttaaaagccgggaatatgagcttaggaattaatcttctaatgtatttaaccgaaattgcttcaagttctttgggaggaaaatttttaagtaaagtttttgaaatacatcataaacataaaaaagattatccttcaggaactgcattaatgttaggaaagggaattgcaaaaggtaaaaataaagatttttataatctaataggaaaaaaatatttgaataaaaaaacttttccttatggaaataaaataaattttaattctctaagaaaaagtgaaattattggtgagcatgaagtaaaattctcaagtggtaaagaaataattactttaaaccatgaagcttttgacagagctttatattctgaaggcgcattatcagcagcaaaatggttaatgaaaaaaagaaatggtctttattcgatgagagatttaatgaattttaaataat

SEQ ID NO: 217381 - DNA, 778 bp, Unknown
  Bacterial polypeptide expressing nucleotide sequence isolated from the Sargasso Sea
atgaaaaaaattaatttagctatcacaggatgcatgggtagaatgggtcaacagctcattaaatctgcaaataaggataatacttttaaaataacatctttgactgaaagcagaagaataaataaaagaatttttggagttaacccagaaattaattcaatcgatgcatttaaaaaagccaacgtaatcatagattttactgttcctaagtgcacgtttgagatacttaaaattgcttttaaattaaaaaagaaagttgtaattggaacaacgggatttacgaaaaaagaggaaaaattaattaaaaagttttcaaataaaattccaatattgaaagctggaaatatgagccttggtgtaaatctcttgatgtatttaacagaaattacttcaagatcacttggtaaaacatttttaagtaaagtttacgaagttcatcacaaatacaaaaaagattatccgtctggaacagcattaatgcttggtaaaggaatagcggttggtaagaataaagaattttatagtataattgggaaaaaatatttgaataaaaaatcatttccttacggaaaaaaaataaatttcaattcaataagaaagggagatgtaattggagaacatgaagtatctttttctagtggtaaagaaatagtaaaattaaatcatgagtcttttgatagagcgctttactctgaaggagctttagctgctgcaaaatggttatctactaaaaaatctggcttatactccatgagagatcttttaaactttaagtgaa

SEQ ID NO: 217382 - DNA, 540 bp, Unknown
  Bacterial polypeptide expressing nucleotide sequence isolated from the Sargasso Sea
gatgaacgaaattgcacaaaacactgttttgatatcaggtggagctggctcaatgggtcaacttgtttcagattacataaactcaagagacgattttactctaacagcaattcatgatccgaattacgaagggcaggaatataatatctataaagatttagcgaatatagaagaagatgttgtcttagagttttcgcctgcctcggtaataaatgaaaatatagactcaatacttaattcagatgcagatttaataattggttcatctggtgtaagttcagaaatgttattaaaattaaaaacaatcacagatagaaaagtaatagtgataccaaatttttctataggcgctgcttatcaaaagcttttctcattagcgctttctaataattttaattcagcaaatattactgaaaaacatcatggtgagaagcaagatgcaccatctggcactgctatagatttagcaaacgcttttacatcagagtttaaatctcacgaaaaagatgaagatttttatgaaatcaataatgtgaataa

SEQ ID NO: 217383 - DNA, 772 bp, Unknown
  Bacterial polypeptide expressing nucleotide sequence isolated from the Sargasso Sea
atgagtaaaattaatttagccataacaggatgtatggggaggatgggtcaacagctcattaaatccgctaataaagataggactattaagttagttgcgcttacagaaaataggataataaataaaaagattaatggaattaaacctgaattaaatactgataaagctttaagtaaagcaaatgtcataatagattttactataccaaaatgtacattcgaagttttaaaaatagctacaaaactaaaaaaaaaagttgttattggaacaacaggctttacaaaaaaagaggaggatttaattaagaagttttctaaaaaaatcccaattttaaaagctggaaacatgagcattggaattaatttacttatgtacttaaccgagattacatcggcatcccttggcaataattatctaagtaaagtttttgaagtacatcacaagcataaaaaagatcatccttctggaacagctttaatgcttggaaaaggcatagctattgggaaaaataaagacttttataaattaatgggtaaaaaatttttaaataaaaaaaagtttccttacggaaaaaaaattaactttaattcaattagaaaaggcgaaatcataggcgaacacgaagttactttttcaagcggaaaagaaattttaacactaaatcatgaagctttcgatagagctttgtattcagatggagcaataactgctgcaaaatggttaataaataaaaggccaggactttattcaatgagaaatcttctgaacttta

SEQ ID NO: 217384 - DNA, 505 bp, Unknown
  Bacterial polypeptide expressing nucleotide sequence isolated from the Sargasso Sea
ttgaagttaattaaaattggaatatcgggatgtttaggcaggatgggcaaagaattagtagctcaaactaaaaacaaaagccgtataagctttgtgggcggctttgacctaaaagataaaaaaacatctccgaataatatatttagtaaggcagatgttgttatagatttttcttctcccggtgccataaaaaataatttggaaatggctattaataaaaaaactggtttagtaattggcacaacaggactgaaagataaagaagttaaaatgttaaaaaatgcatcaaaaaaaatcccgatacttatgtcttctaatatgagtcttggtgtaaatttactttttaatttagttcaacaagctgcttcgacactaaaagacaaagattatgatattgaaatagcagaaactcatcacaaacataaaatagatgctccttctggaaccgcattatctcttggtgatatgcagcaaaaggaagaaaagctaattttcaaaaaactaa

SEQ ID NO: 217385 - DNA, 778 bp, Unknown
  Bacterial polypeptide expressing nucleotide sequence isolated from the Sargasso Sea
atgaaaaaaattaatttagctattacaggatgtatgggaagaatgggtcaacaactcatcaagtcctctaagaaaaataaagattttaaactagttacacttacagaaaatagactaataaataaaaagtttaatggagttaaacctgaattaaattctgataaagcttttaaaaaaactgatgtaattattgatttcacagtaccaaattgtacgcttgaaatactcaaaatagcgtcaaaacttagaaaaaaagtagtaattggaacaactggatttagcagatctcaagaaaacctgattaaaaaatactcaaaaaaaattccaattttaaaagctggcaatatgagcttaggtgtaaatttattgatgtatttaactgaaattgcatcaaaatcattaaacgatgaatacttaagtaagatatttgaagtacatcacaaacataaaaaagactacccatctggtactgcgttaatgctaggtaaaggaattgctgatggaaaaaataaaaatttatataatttaattggtaaaaaattcttgaataaaaaatcttttccttatggaaaaaaaattaattttaactcaattagaaaaggtgaaattattggtgaacatgaagtgaaattctctagtggaaaagaaataattacattaaaccacgaggcttttgatagagcactttactcagatggagctttgacagcttctaaatggttaatgaaaaaaaaaccaggattatattccatgagagatttgcttaacttttcataat

SEQ ID NO: 217386 - DNA, 565 bp, Unknown
  Bacterial polypeptide expressing nucleotide sequence isolated from the Sargasso Sea
tttagagaatgttaaaatagcatcccagaataaaacggctgttattattggcacaactggaatgactgaatctcaaaaaaagaaagtgagaagttatgctaaaaaaatcccaatacttatgtcttcaaatatgagtcttggtgtaaatttgctttttaatttagttcaacaaacctcacaagctttaaaggatacagattatgatatcgaaattgcagaaacacaccataaacataaaaaggatgcgccgtcaggtactgctttatcacttggcgaatatgcggcagaaggaagaaaaacttcattgaacaaatcaaaggttttagaccggacaaaaaaattaacgaatagaaaaaaaggagacattggtttttcagtaacaagaggtggagagattgccggagagcatacagtcagttttattggtgaaaatgatagagtggatttagtgcacaaagcaaataatagatcaatttttgttaagggggctatcgatgccgcaatatttattagcaagaaaaaatcaggtttttattcaatgaatgatttattgttttctaactaa

SEQ ID NO: 217387 - DNA, 646 bp, Unknown
  Bacterial polypeptide expressing nucleotide sequence isolated from the Sargasso Sea
atgaaaaaaattaatttagctattactggttgcatgggaaggatgggccaacaatttattaggtcggctaaatcagacaaaaattttaaattagttagtcttactgagaataggataataaataaaaaaattagtggaattaaacctgaactaaatacagaaaaagcattcaaaaacacaaatgttataatagattttacagtcccaaaatgtacaattgaagtactaaagattgcatcaaaattaaaaaaaagagtagttataggaacaaccggctttactaaaaaggaagaaaacttaattaaaaaatattcaaaaaaaataccaatacttaaagctggaaatatgagtttaggtataaacttgttaatgtatttaactgaaattgcatctaaatcacttggaaataattttttaagtaaagtttttgaaatacatcataaacataaaaaagatcatccttcgggtacagctttaatgctaggaaaaggtatagcagtagggaagaataaagacttctataaattattaggtaaaaaattctttaataaaaaatcttttccttatggaaaaaaaattaattttaattcaattagaaaaggtgaaatcataggagagcatgaagtcacattctctagtgtaaaga

SEQ ID NO: 217388 - DNA, 478 bp, Unknown
  Bacterial polypeptide expressing nucleotide sequence isolated from the Sargasso Sea
atgagtgaaaaaattaatataacaattgttggcgctgctggtaaaatgggttgtgaactaataagacaaatatcaaactcctctaattataatttagttgcagcaattgagggaaaagactcaaaatttattggagaagatgcatataagaatgcagggtgttctattacaggaatcgaaataaatgatgatttaataagtgcagttacaaaatcagatgctctaattgattttagttccattgactctactttatatgcttctgaactcagtgctcaagcaagaatagtacatgtaattggcactactggttttaataataaacaggatgagatgattcaagctgcagcaagacacgcaactattattaagtcaggcaatatgagcctagggctcaatattttacttggaattgttcagaatgcttcaaaattattgacgacaattggagtatcgaaatttcagaggttcatcataa

SEQ ID NO: 217389 - DNA, 432 bp, Unknown
  Bacterial polypeptide expressing nucleotide sequence isolated from the Sargasso Sea
aatgaaaagaattaatttaactatttcaggatgcatgggaagaatggggcaacagctcattaaatctgtaaaaagaaataaaaattttaaaattgtatctttgactgagaatagacatattaataagaaaatttctggaattaaacctcaatttaattctctagaagcgtttaaaaaaactaacgtaataatagattttacagttcctcggtgcacttttgaaatccttaaaattgcagcaaaacaaaaaaaaagagttgtaattggaacaacaggttttactaaaaaagaggaaaaactaataaaaaatttttcaaagaaaattcctattctaaaggcaggcaatatgagtctaggggtaaatttactcatgtatctaacagagattgcttcaagatctcttggtaataattttttaagtaaaatatatga

SEQ ID NO: 217390 - DNA, 811 bp, Unknown
  Bacterial polypeptide expressing nucleotide sequence isolated from the Sargasso Sea
tatggctaaaattaaaattgcagtagcaggatgtctgggccgaatgggtcaagaattatctaagcagattattaaaaacaataagttagactttgttggtggttttgaacataaaaaacataaagacatcaataagcaatttaaaaatgtttctgatattcattcttcaaaaataattgaatctaatccaattaattcaattaagactgcaaacgttataatagattttactacaccccaatctactctagagaatgttaaaatagcatctcagaataaaacggctattattattggcacaacaggaatgactgagtctcaaaaaaagaaagtgaaaggttatgctaaaaaaatcccaattcttatgtcttcaaatatgagtctaggtgtaaatttactttttaatttagttcaacaaaccgcacacgctttaaagagtacagattatgatatcgaaattgcagaaacacaccataaacataaaaaggatgcaccgtctggtactgctttgtcacttggtgaatatgctgcagaaggaagaaaaatttcattgaataaatcaaaagttttagacaggacaaaaaagttaactaatagaaaaaaaggagatattggattttcagtaacaagaggtggggaaattgctggtgagcatactgttagttttattggtgaaaatgatagagttgatttagttcataaagctaataatagatcgatttttgtcaaaggggctattgatgccgctgtatttctcagcaaaaaaaaatcaaggcttttattcatgaacgatttattattttctaaataa

SEQ ID NO: 217391 - DNA, 346 bp, Unknown
  Bacterial polypeptide expressing nucleotide sequence isolated from the Sargasso Sea
atgggtaaaattaatatagctataacaggatgcatgggaagaatgggccagcagctcattaaatctgctaataaagacaaatccactaaattggttgctcttactgaaaataaattaattaataaaaaaattactgggattaagccagaattaaatactgaaaaggctctaagtaaagctaatgtgataatagatttcactatcccaaaatgtacattggaagttttaagaatagctgtaaaactaaaaaaaaaggtagttattggcacaacaggttttacaaaaaaagaggaaagattaataaaaaagttttctaaaaaaattccaattttaaaagcaaggtaat

SEQ ID NO: 217392 - DNA, 424 bp, Unknown
  Bacterial polypeptide expressing nucleotide sequence isolated from the Sargasso Sea
atgaaccagactcccctgcgattgctcatccacggtgcctccgggcgcatgggccaggccctgctgcggctggccgccgaacatcccgaaaccctgcagatcgccgctgcggtgacgggtcgtgcgccggcccagcgcgtggtcgatggcgtaccgttcttcgcggccagcgagctgcccggtgcgccggcattcgacgtggcgatcgacttcagcctgccggagggtttcgacccgatgctggcactgtgcgtggaacgtggtgcggggctggtctcgggcactaccggcatctccagcacgcagcgccaggcgctggaggcggcggcggcgaggatcccgctggtctgggcctcgaacttcagcctgggcgtggcggtgctggacgagctggtcgagcgcgcggcgcaggcgctggccggct

SEQ ID NO: 217393 - DNA, 568 bp, Unknown
  Bacterial polypeptide expressing nucleotide sequence isolated from the Sargasso Sea
aatgaaaaaaataaacatcggagtaacaggttgcatgggccgaatgggccaacagattatcaagactattaaatcagataaaaattttaaattagttaccctaacagaagataaaaaaattaacaaaaaaataaatgggatcggaattgagcaaaatacagagttagcttttaaaaaaactaacttaataatcgattttacaactccaaaatgtacttttcaaatacttaggatagctgcaaaattaagaaaaagattagttataggaacgacaggatttacaaaaaaagaagaaaatttaatcaaaaaattttctaaaaaaatcccaattttaaaagcaggaaatatgagttttggtataaatcttttaatgtatctaacagaaatagcagcaggctctcttggaaaaaattttttgagtaaaatttatgaagttcatcataaatataaaaaagattttccttctggaacagcattgatgttgggtaagggaattgctgttggtaaaaataagaatttttatagtattgtaggaaaaaaatatcttaataaaaaaaaatttccttat

SEQ ID NO: 217394 - DNA, 376 bp, Unknown
  Bacterial polypeptide expressing nucleotide sequence isolated from the Sargasso Sea
tcgatttgtagctgatttgataaaaccatatcaaacagattacaatgcaaatattaaagatattcatcataaacataaattagatgcaccaagtggaactgccatcagtcttgcagaagacattttaaataattcagagtataaagagtggcaaactgaaaaagcaaataaaggtaatcttcccatacaatcaattcgagaaggagacattgctggaactcatactgttagttatatttccgatatagacgaaataagcatcaaacacaaggcattcaaaagagatggatttgctttaggtgctttgattgcttcagaatggatacacgggaagcaaggggttttcagtatggaagatgttttaaaaaaagtttaa

SEQ ID NO: 217395 - DNA, 283 bp, Unknown
  Bacterial polypeptide expressing nucleotide sequence isolated from the Sargasso Sea
aatgaaaaaaattaatttagcgatttctggttgcataggtagaatgggccagcaattaattaagtcttcaaagaaaaataaaaactttaaactagttacacttacagaaaatagattaataaataaaaagtttaatggaattaaacctgagttaaattctgaaaaagcctttaaaaaaactgatgtaattattgattttacagtaccaaattgcactctagaaatattaaaaatagcatcaaaactgaggaaaaaagtagtaattggtacgactggatttact

SEQ ID NO: 217396 - DNA, 440 bp, Unknown
  Bacterial polypeptide expressing nucleotide sequence isolated from the Sargasso Sea
aatgaaaaaaattaaattagcgattactggatgtatgggtaggatgggtcagcagataataaaatccactaaatccaataaaaattttgtagttacagtaattactgaaaatatattaattaaaaaaaaaattaatggaataaatattagcttaaatgatgagaaagcttttaaaaaagctgatgttataattgattttacaattcctaaatgcacatttgaagttttaaaaattgcatcaaaactgaaaaaaaaagttgttatagggacaactggtttcactaaaaaagaagaaaatttaattaaaaaatactcaagaaaaatacctattttaaaagcaggaaatatgagcttaggtatcaatctcttaatgtatttaacagagattgcatctgcttcacttggaaatagctacctaagtaaagtttttgagatacatc

SEQ ID NO: 217397 - DNA, 649 bp, Unknown
  Bacterial polypeptide expressing nucleotide sequence isolated from the Sargasso Sea
attgcaggaattaaaccttagcttgaatacagctgaagcattcaaaaaagctaatttgataatagattttacagttcctaaatgtacatttgaagttttaaagattgcttcaaaattaaaaaaaaaagttgttattggaacaactggattttcaaaaaaagaagaaaatttgataaaaaaatattctaaaaaaatacctatactaagggctggaaatatgagtttaggtataaatttgttaatgtatttaactgagataacatcaaaatctttaggaagtaattttctgactaaagtttttgaaattcatcataaacacaaaaaagatcatccctcaggaactgcattaatgttggggaaaggtatagctgttggaaaaaataaggatttttataaattaattggaaaaaaatatttaaacaaaaaatcttttccttatggaaaaaaaattaatttcaattcattgagaaaaggagaagttgtaggtgaacatgaggtaactttttcaagtggtaaagaaataattacattgaaccatgaagcatttgatcgagctctttattcagaaggggcatttacagcagctaaatggttaatgaaaaaaaaacctggtctttattctatgagagatgttttgaattttaaatga

SEQ ID NO: 217398 - DNA, 514 bp, Unknown
  Bacterial polypeptide expressing nucleotide sequence isolated from the Sargasso Sea
atgaaaaaaattaatttagctattactggttgcatgggaagaatgggccaacaatttattaagttagctaaatcagacaaacattttaaattagttgctctcactgagaatagaataataaataaaaaaattagtggaattaaaccagaactaaatacagaaaaagcatttaaaaatacaaatgttataatagattttacagtcccaaaatgtacaattgaagtactaaagattgcatcaaaattaaaaaaaagagtagttataggaacaaccggctttactaaaaaagaagaaaacttaattaaaaaatattcaaaaaaaataccaattcttaaagctggcaatatgagcttaggaataaacttacttatgtatttaactgaaattacatctaaatcacttggaaataactttttaagtaaaatttttgaagtgcatcacaaacataagaaagatcatcaatcaggaacagctttaatgcttggaaaaaggtatagcagtaggaaaaaataaa

SEQ ID NO: 217399 - DNA, 700 bp, Unknown
  Bacterial polypeptide expressing nucleotide sequence isolated from the Sargasso Sea
aaaaattttaaaatagtttcgctaaccgaaagtagaaatatttcaaaaaaaatttcaggtattaaactagaacttaacactatagatgcttttaaaaaagctaatgtaattatagacttcacggtgcccaaatgtactcttcaagttttaaaaattgcttcaaaattgagaaaaagagtagtaattggtactactggtttttcaaaaaaagaggagatcataataaaaaaatattccaggaaaataccaattcttaaagctggcaatatgagcttgggtgttaatcttttaatgtatctaactgaaatagcttctaaatctttaaataaaaattttcttacaaaaatttatgaagtgcatcataaacataaaaaagatcacccttctggaacagctttaatgttaggtaaaggtgttgcaaacgggaaaagtaaaaacttttatagtttaataggaaaaaaatatcttaataaaaaaaattttccttatggaaaaaagataaattttaattctattcgaaaaggaagtgttattggagaacacgaagttaaattttcaagtggtaaagaaatagtaactttaaaccatgagtcttttgatagagctttatattctgaaggtgcattaactgcatcaaaatggttgatgaaaaagaaaccagggctttattcaatgagggatctattaaactttaagtgaa

SEQ ID NO: 217400 - DNA, 718 bp, Unknown
  Bacterial polypeptide expressing nucleotide sequence isolated from the Sargasso Sea
aaatcttcacaaaaaaatagtagttttaatttaaaaacccttacagaaaatagacctattaaccggaaaatttttgggatttcaccagaatttaacaccgaaaatgcatttaaaaaaacagatgtaataatagattttacagttcctcaatgcacattcgaggtattaaaaatagcttcaaaacttaaaaagaaagttgtgattggaacaactggatttagcagaagtcaagaaaaccaaattaagaagtactcaaaaaaaatttctattttgaaggcaggtaacatgagtttaggtgttaatttgttaatgtatttgactgagatcacgtcaaaatctttgaatgatgattatctgagtaaaatatttgaaatacatcataagcataaaaaagattatccttcgggaacagccttaatgttgggcaaaggaattgcagatggtaaaggtaaaaatctttataatttaattggcagaaagtatttaaataaaaaatctttcccttatggaaaaaaaattaatttttgctctttaagaaaaggtgaaatcataggtgaacatgaggttaaattctcaagtggaaaggaaatcattactttgaaccacgaagcctttgatagggctctatactctgatggagccttaacagctgcaaaatggcttatgaaaaaaaaacctggtttgtattcaatgagagatttgcttaatttttcataat

SEQ ID NO: 217401 - DNA, 805 bp, Unknown
  Bacterial polypeptide expressing nucleotide sequence isolated from the Sargasso Sea
atggcaaaaattaaaatagcagttgcgggttgtcttgggcgaatgggtcaggaaatatctaagcaaattttaaaaaataaaagtttagaatttgtaggaggttttgaacacaaagaacataaagatataaataaaccactaaataaggtttcagaaatacagtcttcaaaaacagttactgctaattcagctcaattaatcaaagaagcaaatgttgtaattgattttacaacgccagagtctactttagataatctaaaaactgcgtcagcaaacaaaactgccgttgttattggcacaaccggtatgactaatgttcaaaaaaagaaagtaaaattttattcaagaaaaatacctatacttatgtcttctaatatgagtcttggagttaatttattatttaatttagtagaacaaacagcaaccacattaaaagataccagttacgacatagaaattgccgagacccatcacaaacataaaaaagatgccccttctggaacagcattatctcttggtgaatatgcggcaaagggaagaaaaatcaaattcaataaatctaaagttttagatcgtacaaaaaaattaaaatctagaaaaaaaggtgacattggtttttctgttacaaggggtggtgaaattgcaggagagcatacagttagttttataggaactaatgacagaatagatttagttcacaaggctaataacagatctatttttgtaagtggagcgattgaggcagctatctttatttccaaaaaaagaccaggcctttttaatatgaatgatctcttattttaat

SEQ ID NO: 217402 - DNA, 773 bp, Unknown
  Bacterial polypeptide expressing nucleotide sequence isolated from the Sargasso Sea
aaaaataaatatagctgtaactggatgtttgggccgaatgggccaacaaataatcaaatctgtaaacaaagatagaaattttaatttagtagcaattacagaaattaaaaaaaagaaccaaaaaattaacggaatcaaaattgactcaaataatgaacgatcattaaaaaatgctaatgtaataatagattttacaatccctaaatgtactttagaagtactaaaaatagcaactaaattgagaaaaagagttgtaattggaactactggattttcaagaaatgaagagggttcgatacaaaaattttcaaaaaaaattccaattttaaaagctggaaacatgagtttaggtattaatctcttaatgtatcttacagaaattgcatctagttcacttggaagaaattttttaagtaagataaatgaaattcatcataaacataaaaaagattatccatctggaacagctttaatgttagcaaaaggaattgcagaagggaaaaaaaagaactttcataatttaattggaaaaaaatatcttaataaaaaaaaatttccttatggaaataaaattaactttaattctataagaaaaggtgaaattatcggtgaacatgaagttaaattctctagtggaaaagaaatcataaccctaaatcatgaggcttttgatagagctttgtattctgagggtgctttatcagctgcgaggtggttgatgaacaaaaaacctgggctatactccatgagagatcttatgaatttcaaataat

SEQ ID NO: 217403 - DNA, 520 bp, Unknown
  Bacterial polypeptide expressing nucleotide sequence isolated from the Sargasso Sea
atgaaaaaaattaatttagcgatctctggttgcatgggtcggatgggccagcaattaattaagtcttcaaagaaaaataaaaattttaaactagttacacttacagaaaatagattaataaataaaaagtttaatggagttaaacctgaattaaattcagataaagcttataaaaaaactgatgtaattattgacttcacagttccaaattgtacgcttgaaatacttaaaatagcatcaaaacttaagaaaaaagtagttattggtactacggggtttaccaagagccaagaaaatcaaattaaaaagtatgcaaaaaaaatacctattttaaaagctggtaatatgagcttgggtgtaaatttgttaatgtatttaactgaaatcgcttcaaaatcattaaatgatgaatatttgagtaaaatatttgaagtacatcacaaacataaaaaagactacccatctggtactgcattaatgctgggcaaaggaattgctgatggaaaaaataaaaatttgt

SEQ ID NO: 217404 - DNA, 320 bp, Unknown
  Bacterial polypeptide expressing nucleotide sequence isolated from the Sargasso Sea
tgcaccatcaggaacagctttaagtatgggaaaggtcgcagcagcttcaagggaatatcaattcgaaaagattaaaaagctttctagagagggtaaagttggccaaagatcaaatgaagaaattggctttgccactttgagaggtggatcagttgtaggagatcatactatgatacttgcacatgaggatgaaagaatagaattaacacataaagcaacaaatagaaaaatttatgcgaatggagcagtaaaagcagcaatctggtgttcagataaacaaaagggtttatttagcatgaaacaagtacttggattatgat

SEQ ID NO: 217405 - DNA, 561 bp, Unknown
  Bacterial polypeptide expressing nucleotide sequence isolated from the Sargasso Sea
aatgaaaaaaataaatttagttataactgggtgcatggggagaatgggtcaacagctcataaaatccataaagactgacagaactacaaaacttgttggtttaactgaaaatatattaataaaaagaaagataggtggaattaaaccacaattaaataatgataatgtgtttaaaaaaacagatgtaataatagattttacagtaccaaagtgcacctttgaagttttgaaaatagcttcaaaattaaagaaaagagttgttattggaaccactggttttactaaatccgaagaggataagattaaaaaaatttcaaaaaaaattcctattttaaaggctggtaatatgagtcttggaataaatctcttaatgtatttaactgaaataacatcaaaagcacttggggataaatatttaagtaagatttttgaaattcatcacaaacataaaaaagattttccatctggaaccgctttaatgcttggaaaaggtatagctgttggtaaaaataaagatttttataaattacttggaaaaaaattcctaaataagaaaaaatt

SEQ ID NO: 217406 - DNA, 538 bp, Unknown
  Bacterial polypeptide expressing nucleotide sequence isolated from the Sargasso Sea
tatgcaaaaaattaaaatagcagttgcaggttgtcttggtcgaatgggtcaggaaatatcgaaacaaattttacaaaataaaaatttagaatttgtcggtggctttgagaacaaaaaacataaagatataaacaaacctttaaacaaagtttcaagcatacactctgaaaaattagttacagctaatgcagctcagttaatcaaagattcaaatgttataattgattttacaactcctgaatctacgttagataatcttaaaattgcctctgcaaataaaacagcagttgttattggcacaactggaatgacagatccacaaaaaaagaaagtaaaaagtttttctaaaaaaatacctatactcatgtcttctaacatgagtttgggtgttaacttattatttaacttagtacaacaaacagcatcagctctaaaagatacagattatgatattgaaattgctgagactcatcataaacataaaaaagatgccccttctggaactgcattatctctgggagagtatgctgctgaaggt

SEQ ID NO: 217407 - DNA, 346 bp, Unknown
  Bacterial polypeptide expressing nucleotide sequence isolated from the Sargasso Sea
atgaaaaaattaaatttagcaataactggttgtttgggtcgaatgggacaacaaatcatcaaaacttcaaataaagataaagaagttaaattggttactcttacagaaaataaattagtcaataaaaaaattaatggaattattcccgaattaaattctgaaaaagctctagcaaaagcggatgtgataatagattttactattcctaagtgtacttttgaagtgttaaaaattgcgtcaaaattaaagaaaaaagttgttataggaactactggttttacaaaaaaagaggaaagtataattaaaaaattctcaaagaggactgctattttgaaagactggtaat

SEQ ID NO: 217408 - DNA, 620 bp, Unknown
  Bacterial polypeptide expressing nucleotide sequence isolated from the Sargasso Sea
tcaatgcaaacaattggatgtaaaagtttcggattttcaatctaaagcaatagatttaaatgatatatcagctgtaatagatttttcttccccaggagggcttaaagcttgtatcagttcatgtattgagaataagctgcctttaatatcagggactactggtctgacagatgagcattttaagttagtgagttctgcaaagaaatctatacccatattacttgcctctaacatgtccattggaattgctaatttaaagagctcaatagaaacgtacctttcgtcaattagcatccctttaaagtgcaagatcatcgaaattcatcacactaaaaaaaaagatgccccgtctggaacagccatagaaattcaaaaatttatagaaaatttgcctggaagcaaaatagatagccctattgacgttcaatctctcagaattggtaatatttttggaattcatagaattatttttgaaaatgctgagggagttacaacttttcaacatattgcaaactctagagatgtttttgctagaggtgctgttcaagctgtcaagtggattcattcccaagaaattggagagtatagctttaccgacttcttgaataaaaagctttaat

SEQ ID NO: 217409 - DNA, 325 bp, Unknown
  Bacterial polypeptide expressing nucleotide sequence isolated from the Sargasso Sea
aatgaaaaaaattaatttagcaatttctggttgcttgggtaggatgggccggcaattaatcaagtcttcaaagaaaaataaaaattttaaactagttacgcttactgaaaatagattaataaataaaaagtttaatggaattaaacctgaattaaattcagataaagcctttaaaaaaactgatataattattgatttcacagtaccaaattgtacgcttgaaatacttaaaatagcatcaaaacttaagaaaaaggtagtaattggtactactggctttactagaagccaagaaaatcaaattaaaaaatatgcaaataaaata

SEQ ID NO: 217410 - DNA, 658 bp, Unknown
  Bacterial polypeptide expressing nucleotide sequence isolated from the Sargasso Sea
atgaatgaaatcgcgcaaaagactgttttgatatcaggtggagcaggctcaatgggccaacttgtttcagattacataagtactagaaacgatttcatcatgacagcaattcatgatcctaattatgatggacaagaatataaaatctataaagacttaacaaatatagaagaagatatagttgtagagttttcgcctgcttcagtaataaataaaaatatagaaaaactattagattcaaatgcagatctaataattggatcatccggagtaagtccagaaatgttgtcaaagttaaaaaaaacaatagatagaaaaataattgttattccaaacttttctataggcgctgcttatcaaaagcttttcgcagcatcactatctgaaaattttgattcagtaaatataactgaaaaacatcatggtaaaaaacaagatgcaccatctggaactgctatcgatttagcaaattatttaccatcagaattaatctctcacgaaaaaaatggagatttttataaaactaacaaagtcaacaacaaaaatatttattcattgagggacgatatatttctagctgaacaagaagtagatttcgaaaatgaatatgaatcttttaatttagataacaaagtaaatgatagaagagcatatctct

SEQ ID NO: 217411 - DNA, 529 bp, Unknown
  Bacterial polypeptide expressing nucleotide sequence isolated from the Sargasso Sea
atgaacgaaattgcacaaaacactgttttgatatcaggtggagctggctcaatgggtcaacttgtttcagattacataaactcaagagacgattttactctaacagcaattcatgatccgaattacgaagggcaggaatataatatctataaagatttagcgaatatagaagaagatgttgtcttagagttttcgcctgcctcggtaataaatgaaaatatagactcaatacttaattcagatgcagatttaataattggttcatctggtgtaagttcagaaatgttattaaaattaaaaacaatcacagatagaaaagtaatagtgataccaaatttttctataggcgctgcttatcaaaagcttttctcattagcgctttctaataattttaattcagcaaatattactgaaaaacatcatggtgagaagcaagatgcaccatctggcactgctatagatttagcaaacgctttaccatcagagttaaaatctcacgaaaaagatgaagatttttatgaaatctaat

SEQ ID NO: 217412 - DNA, 556 bp, Unknown
  Bacterial polypeptide expressing nucleotide sequence isolated from the Sargasso Sea
aatgaagaaaaaaattaatttagcaataactggttgtatgggaagaatgggtcaacaacttgtgaaaacctcgaaagccaataaaaactttaagttagtatctctaactgaaagtaggataataaataaatcagtaatgggtattagaccaaatctaaacactgaaaacgcatttaaaaaagcaaatgtaataatagactttactatacccaaatgtaccttagaagttttaaaaattgcttcaaaactaaaaaaaaaagttgttataggaactacagggttcactaaaaaggaagaaaatataataaaaagatactcaagaaaaattcctattcttaaagctggaaatatgagtctgggggtaaatttgctaatgtatttgactgaaatagcttcaaaatcacttgatagtaatttcttaactaaagtttttgaagttcatcataaaaataaaaaagattacccttcaggaacagctttaatgcttggcaaaggcattgctgtaggaaaaaataaagatttgtacaaagtaatgggaaaaagatatctaaataaa

SEQ ID NO: 217413 - DNA, 634 bp, Unknown
  Bacterial polypeptide expressing nucleotide sequence isolated from the Sargasso Sea
atgggcaaaataaatctagccataacaggatgtatgggaagaatgggtcaacagctcattaaatctgctattaaagataagtctactaagctggtttctcttacagaaaacaggtcaattaataagaaaattagtggaattaaacctgagttaaatactgaaagagcctttagcaaagcgaatgtgataatagatttcacaattccgaaatgtacatttgatgttttaaagatagcctctaagttaaaaaaaaaagtagttattgggacaacaggttttacaaaaaaagaggaagatttaattaagaagttttcaaaaaaaattccaattttaaaagcgggtaacatgagccttggtattaatttacttatgtacttaactgagatcacatcagcatctcttggcaataattacctaagtaaaattcttgaggtgcatcacaaacacaagaaagatcatccatctggtacagctttaatgctaggaaaaggaattgctgtaggaagaaataaaaacttttacagaattgtgggaaaaaaatatttaaacaaaagtaaattcccttatggaaaaaaaattaactttaattcaataagaaaaggtgagattataggtgaacatgaagttacttttt

SEQ ID NO: 217414 - DNA, 454 bp, Unknown
  Bacterial polypeptide expressing nucleotide sequence isolated from the Sargasso Sea
atgaaaaaaataaatttagtaataactgggtgcatgggtagaatgggccaacaactaataaaatctacaaaatctgatagagctataaaactagttggtttaactgaaaatatattaataaaaaaaaagataggtggaattaaaccacaattaaacaacgacaatgtatttaaaaaaacagatgtaataatagattttacagcgcctaaatgcacctttgaagttttgaaaattgcttcaaaattaaagaaaagagttgttattggaactactggttttactaaggctgaggaagataagattaaaaaaatttcaaaaaaaattcctattttaaaggcaggtaatatgagtcttggaataaatcttttgatgtatttaactgaaatagcatcaagggcacttagagatagatatttaagtaaggtttttgaagttcatcacaaacataaaaaag

SEQ ID NO: 217415 - DNA, 482 bp, Unknown
  Bacterial polypeptide expressing nucleotide sequence isolated from the Sargasso Sea
gatgaacgaaatcgcagaaaacactgttttgatatctggtggcgcaggctcaatgggtcaacttgtttcagattatataaactccagagacgattttactcttacagcaattcatgatcctaattacaaagggcaggagtataaaacctataaagatttagagaatatagaagaaggagttgtcttcgagttttcacctgcctcggtaataaacgaaaatatagactcacttcttaattcagatgcagatttaattattggctcctctggtgtgagttcagatatgttattaagattaaaaacaatcactgacagaaaagtaatagttataccaaacttttcgataggcgctgcttatcaaaagcttttctcgatagttctttctgataattttaaatcagtaaatattaccgaaaaacatcatggcaagaaacaagatgcaccatctggtactgcaatagatttagcaaattcgttaccat

SEQ ID NO: 217416 - DNA, 694 bp, Unknown
  Bacterial polypeptide expressing nucleotide sequence isolated from the Sargasso Sea
aatgagcaaagtaaatttagcgatatctggttgcatgggacgaatgggccaacaactggtaaaatcttcaagagttgataaaaattttaaactaacaactctcacagaaaatagattaataaaaaaaaaaatttctggaattaaacctagtttaaataatgaaaattccttcaaaaatgttgatttaattattgattttacagtccctaattgtacttttgaaattcttaaaattgcatcaaagcttaaaaaaagagttgttattggcacaaccgggtttaccaaaaaagaagaaggtcttattaaaaatttttcaaagaaaattccaatactgaaagctggaaacatgagtttaggtataaatttgttaatgtatttaactgaaatagcatctaaatcgttaggaaataattttttaagtaaagtatatgaagttcatcataaatataaaatagaccatccttctggaactgctttaatgttaggtaaaggaattgctattggcaaaaataaagatttttataatttgcttggaaaaaaatatctaaataaaaaaagttttccatttgcaaaaaaaattaattttaactcaatccgaaaaggcaaaacagttggcgaacatgaagttaaattttcaagtggaaaagaaattattactttaaatcatgaagcatttgatagagctttatacagt

SEQ ID NO: 217417 - DNA, 328 bp, Unknown
  Bacterial polypeptide expressing nucleotide sequence isolated from the Sargasso Sea
atgaaaaaaattaatatagctatttctggttttatgggccgtatgggacaacaactcataaaatcagcaaataaaaataaagcattcaagattgtatctttaactgaaaataaaaaattaaataaaaaaatatttggaattacacctgaacttaactctaaaaatgcatttaaaaaagctagtataataatagattttactgttcctaaatgcaccctagatatattgaaaattgcagcgcaacaaaaaaaaagggttgttattggaacgactggttttacaaaaagagaagaaaatttaattaaaaaattttcaaaaaaaataccga

SEQ ID NO: 217418 - DNA, 679 bp, Unknown
  Bacterial polypeptide expressing nucleotide sequence isolated from the Sargasso Sea
tatggcaaaaattaaaatagcagttgcaggttgtcttggccgaatgggtcaggaaatatcgaaacaaattttacaaaataaaaatttagaatttgtcggtggttttgaacacaaaaaacataaagatataaacaagcctttaaacaaagtttcaattatacactctgcaaaattagttacagctaatgcagctcagttaatcaaagtttcagatgtcatgattgattttacaacacctgagtctactttagataatcttaagatctcttctgaaaataaaacagcagttgttattggcacaaccggaatgacggatgcacaaaaaaagaaagtaaaaagttattctaaaaaaatacctatactcatgtcttctaacatgagtttgggtgttaacttactatttaacttagtaaaacaaacagcatcagctttaaaagatactgattatgatattgaaattgcagagactcatcataaacataaaaaagatgctccttccggaactgcattatctctgggtgaatatgcagctgatggaagaaaaactaaattaaataaatcaaaagttttagatcgtacaaaaaaactatcatctagaaaaaaaggtgacattggcttttctgttacaagaggcggtgaaattgcaggcgaacacacagtaagttttattggtaccaat

SEQ ID NO: 217419 - DNA, 628 bp, Unknown
  Bacterial polypeptide expressing nucleotide sequence isolated from the Sargasso Sea
atgaatagtgaaaatgcacttaaaaacgtagacttaataattgacttcacaaccccaaaatgcaccttggaaatactaagaattgtatcaaaattaaaaaaaaaaatagtaattggtacaactggattttcaaaaaaagaagaaatgttaattcaaaaatattccaaaaaaatttctatacttaaggcaggaaacatgagcttaggcattaacctgttgatgtacctcacagaaattacctcacgatcgctagataaaaaatatttaactaaaatttttgaagtacaccataaatataaaaaagactatccgtctgggactgctttgatgttaggaaaaggagtagcgattggaaaaaacaaagatttttataagttaataggtaaaaaattgttaaataaaaaatcatttccttatggaaaaaaaataaatttcaattcattaagaataggcaaaattataggtgagcatgaggtaaaattttctaatgggaaagaggttataactttaaatcatgaggcttttgacagaaccttatattctgaaggtgctctaacagctgcaaaatggcttataaataaaaaacctgggttatactctatgagagatttgctgaactttgagtaaa

SEQ ID NO: 217420 - DNA, 640 bp, Unknown
  Bacterial polypeptide expressing nucleotide sequence isolated from the Sargasso Sea
aataaaaccagagttaaattcgaataaagccttcaaaaaaactgacgtaattattgattttacaatacctcaatgtacaattgaaattcttaagattgcctcaaaactaaaaaaaaaggttgtaatcggtactactggttttactagaagccaagaaaaccttattaaaaaatattcaaaaaaaataccaatattaaaagctggtaatatgagtcttggtgtaaatttattaatgtatctaaccgaagttgcatctaaatcattgaatgaggaatatttaagtaaaatatttgaagtacatcacaaacataaaaaagactatccatcgggtacagccttaatgcttggaaaaggaattgcgaatggaaaaaacaaaaatttatataaattaattggtaaaaaatttttaaataaaaaatcttttccctatggaaaaaaaattaattttaactcgattagaaagaatgaaattataggagaacacgaagttaaattctcaaatggaaaagaaataatttcattaaatcatgaagcttttgatagggccttatattcagatggagcgctgacagcttccaaatggttaatgaaaaaaagaccaggtttatattctatgagagatttgcttgatttctcataa

SEQ ID NO: 217421 - DNA, 805 bp, Unknown
  Bacterial polypeptide expressing nucleotide sequence isolated from the Sargasso Sea
atggcaaaaattaaaatagcagttgcaggttgtcttggccgaatggggcaggaaatatcgaaacaaattttacaaaataaaaatttagaatttgttggtggttttgaacacaaaaaacataaagatataaacaaacctttaaacaaagtttcaagtatacgctctgcaaaattagttacagctaatgcagctcagttaattaaagatacaaatgtcatcattgattttacaacacctgagtctactttagataatcttaagatcgcctctgcaaataaaacagcagttgttattggtacaaccggaatgacggacgcacaaaaaaagaaagtaaaaagttattctaaaaaaatacctatactcatgtcttctaatatgagtttgggcgtcaacttactatttaacttagtaaaacaaacagcatcagctttaaaagattctgattatgatattgaaattgctgagactcatcataaacataaaaaagatgctccttccggaactgcattatctctgggtgaatatgcagctgagggaagaaaaactaaattaaataaatcaaaagttttagatcgtacaaaaaaactatcatctagaaaaaaaggtgacattggtttttctgttacaagaggtggtgaaattgcaggtgaacatacagtaagttttattggtaccaatgatagagttgatctagttcataaagctaataatcgatcaatttttgtagacggggccatcgaagcagctatctttatttctaaaaagaaaacaggtctttacaatatgaatgatttgttatgttaat

SEQ ID NO: 217422 - DNA, 139 bp, Unknown
  Bacterial polypeptide expressing nucleotide sequence isolated from the Sargasso Sea
tttcggtggaaaaagtcaaaccctcacaatccgtcacgattcgatccacagggattccttcatgccgggagtttgcctggcctgtaaaaaggtcatggccttagacgaactggtttatggattagagcatgttttatga

SEQ ID NO: 217423 - DNA, 613 bp, Unknown
  Bacterial polypeptide expressing nucleotide sequence isolated from the Sargasso Sea
cattcaaaacgctagtgtaattatagattttactgtcccaaaatgtacgttagaagtacttaaaattgcttctaaactaaaaaaaagagtggttattggaactaccggatttaataaaaaagaagaaaatttaataaaaaaatattctagaaaaatacctatactgaaagcaggcaatatgagtgtgggcataaatttattaatgtatttaactgaaatagcctctaaatcacttggaaataattttttaagtaaagtttttgaagtacaccataaatataaaaaagatcatccttctggaacagctctaatgcttggaaaaggtattgcagaaggaaaaaataaagatttttataaaatagcagggaaaaaatatttgaacaaaaaaacctttccttatagtaaaaaaataaattttaattcaattaggaaaggcaaaattgtaggaaatcataaagtttacttttcaagtgcaaaagaaactatcactttgaatcacgaagcttttgatagagctttatattcagagggggcatttactgctgcaaaatggttaatgaataaaaaacctggtctttatagcatgagggatgttttaaaattagatgcataa

SEQ ID NO: 217424 - DNA, 778 bp, Unknown
  Bacterial polypeptide expressing nucleotide sequence isolated from the Sargasso Sea
gatgaaaaaaataaatttagctatcactggatgtatgggtagaatgggtaagcaaatcattacttctgcaaaatctgacaataattttaaaattgttgctttaacagaaaataagaaatcaaataaaaaaatcaataatataagaatttctcaaaataatcttgaaacttttaaaaaagcaaatgtgataatagatttttcaataccaaaatgtacttttgaagttttaaaaattgcatcaaaattaaataaaaaagttgtaattggaacaactggttttactaaaaaagaggaaaatttaataaaaaaattttcaaagaaaatttcaattttaaaagctggaaatatgagcttaggaattaatctacttatgtatctaactgaaattgcatcaaaatcattaggtaaaaattttttaagtaaaatatttgaagttcatcataaacataaaaaagattttccatcaggcactgctcttatgttaggaaaaggtatagctgttggaagaaataaaaatttttatagtttattaggaaagaaatatttgaataaaaaaacatttccatattctaataagattaattttaattctcttagaaaaggagaaattattggtgaacatgaagtaaagttttcaagtggaaaggaaattattactcttaatcatgaggcttttgatagagcattatattctgaaggagctctatcagcagcaaagtggattatgagaaaaaaatcaggactatattccatgcgtgatttgatgaatttcaaataa

SEQ ID NO: 217425 - DNA, 396 bp, Unknown
  Bacterial polypeptide expressing nucleotide sequence isolated from the Sargasso Sea
gatgagtgaaaaaattaatataacaattgttggcgctgctggtaaaatgggttgtgaactaataagacaaatatcaaactcctctaattataacttagttgcagcaattgagggaaaagactcaaaatttattggagaagatgcatataagaatgcagggtgttctattacaggaatcgaaataaatgatgatttaataagtgcagttacaaaatcagatgctctaattgattttagttctattgactctactttatatgcttctgagctcagtgctcaagcaagaatagtacatgtaattggcactactggttttaataataaacaggatgagatgattcaagctgcagcaagacacgcaaccattattaagtcaggcaatatgagcctagggct

SEQ ID NO: 217426 - DNA, 781 bp, Unknown
  Bacterial polypeptide expressing nucleotide sequence isolated from the Sargasso Sea
aatgaaaaaaattaatttagctatcactggttgcatggggaggatgggccagcaatttatcaagtctgcaaaattagataaaagttttaaactagtaactctaacagaaaatagaattatcagtaaaaaaataagtggaattaaaccagagcttaatacagaaaaagcatttaaaaatacaaatgtcataatagattttacagttcctaaatgtacgcttgaggttctaaaaatagcttcaaaactaagaaaaaaagtagttattggaacaactggattttctaaaaaagaagaaaatataattaaacaatatgcaaaaaaaattccaatacttaaggctggtaatatgagtttgggaataaatttattaatgtatttgaccgaaattgcatcaaaatctcttggaaagagatttttaagcaaagttttcgaaattcatcataaacataaaaaagattatccatcaggtacagctttaatgcttggaaaaggtatagcaataggaaagaataaaaatttttataaattatttggaaaaaaatatcttaataaaaaatcatttccttatggaaaaaaaatcaactttaattcaataagaaaaggtgaaattattggagaacatgaggtcactttttcaagcggcaaggagataattactctaaatcacgaagcattcgatagagctctttattcagagggagcatttactgcagccaaatggttaataaataaaaaacctggactttattctatgagagatgttttaaaattatatggatag

SEQ ID NO: 217427 - DNA, 766 bp, Unknown
  Bacterial polypeptide expressing nucleotide sequence isolated from the Sargasso Sea
taatttaacaataactggttgtatgggaagaatgggccaacagcttattaagactgctaaggcaagtaaaaactttaagttggtatctttaactgaaaatagaataataaataaaaatattgcaggtatcaggcccgacctaaatactgaagaagcgtttaaaaaagcaaatgttataatagattttacagtacctaaatgtaccttagaagttttaaagatcgcatcgaaactaaaaaaaagagtagtaataggaactacgggatttacaaaaaaagaggaaaatttaataaaaaaattttctagaaaaatacctattcttaaagctggaaatatgagtctaggagtaaatttacttatttatttaactgaaatagcgtcaaaatctcttaataacaatttcttaagtaaagtttttgagactcaccataaaaagaaacaagatcatccttcaggaacagctttaatgattggtgaaggaattgcttcaggaaaaaataaagacttttatagattaatggggaaaaaatatctaaacaaaaaatcctttccttatggaaaaaaaattaattttaattcaatgagaataggctctgttataggaaaacatgaagtttctttttcaagtggaaaagaaatagtttctttatatcatgaggcttttgatagaacacttttttctgaaggtgcattaacagctgcaagatggattatacgtagaaaacctggcctatactctatgagaaacgttttaaattttaaataa

SEQ ID NO: 217428 - DNA, 592 bp, Unknown
  Bacterial polypeptide expressing nucleotide sequence isolated from the Sargasso Sea
aataatagatttcacaatcccagagtgtacttttcaagttttaaaaattgctacaaaattaaaaaaaagggtggttataggaactacgggttttagtaagaaagaagaaaatctaattaaaaaatactcaaaaaaaataccaattttaaaagctggtaatatgagccttggaattaatctaatgatgtatttaacagaaattgcttcatcatctttaggaaaaaaatttttaagtaaaatttacgaaattcatcataaacataaaaaagattatccctctggaactgcattgatgctaggtaaagggatagcaacaggaaaaaataaaaatttttataacctagttggaaaaaaatatcttaataaaaaaaaatttccgtatggaaataaaattaattttaattctattagaaaaggaaagataattggagaacatgaggttcaattttctagtggtaaagaaactataacattaaaccatgaagcttttgacagaacactttactcggaaggggcgttgtcggcagccaaatggttgatgcataaaaaaccaggtctatattccatgagggatcttatgaattttaaataa

SEQ ID NO: 217429 - DNA, 517 bp, Unknown
  Bacterial polypeptide expressing nucleotide sequence isolated from the Sargasso Sea
atgaaaaaaattaatttaactataacaggttaccaaggtcgtatgggtaaacaattaattaaatctattaagaaatttaaaaattttagacttatatcaataacggaaaataaaaaaatttctaaaaaatatttaaatttgaaaccgcaattaaattcaattaatgccttcaaaaataccaatgtaattatagatttttctgtacccaaaagtactttggaaattttaaaatatgcatccaaattaaaaaaaagagtggtaataggaacaactggtttttcgagtaaacaggagcaacttataaaacgatactctaaaaaaattcctattcttaaagctggtaatatgagtttggggattaatttacttgttcacttgactaaaattgcatcaacatctttgaacaaaaagtttttatcaaaaattttagaagtacaccacaataagaaaagagatcatccttcgggtaccgctctgatgcttggcaaaggtattgcggatggaaaaaataaaagtt

SEQ ID NO: 217430 - DNA, 550 bp, Unknown
  Bacterial polypeptide expressing nucleotide sequence isolated from the Sargasso Sea
atgagcaaagtaaatttagcgatatctggttgcatgggacgaatgggccaacaactggtaaaatcttctagagttgataaaaattttaaactaacaactcttacagaaagtagattaataaaaaaaaaaatttctggaattaaacctagtttaaataatgaaaattccttcaaaaatgttgatttaattatcgattttactatcccaaattgtacttttgaaattcttaaaattgcatcaaagcttaaaaaaagagttgttatcggtacaactggatttaccaaaaacgaggaaggtcttattaaaaaattttcaaagaaaattccaatactgaaagctggaaacatgagcttaggtataaatttgttaatgtatttaactgaaatagcgtctaaatcattaggaaataattttttaagtaaagtatatgaggttcatcataaacataaaatagactatccatctggaacagcgataatgttgggtaaaggaattgctgttggcaaaaacaaagatttttataatttatttggaaaaaaaatatcttaat

SEQ ID NO: 217431 - DNA, 567 bp, Unknown
  Bacterial polypeptide expressing nucleotide sequence isolated from the Sargasso Sea
gcactcttgaaatattaaaaatagcatcaaaactaagaaaaaaagtaataatcggtactactggatttaccataagtcaggaaaatcagataaaaaaattgtcaaaaaaaatacctattttaaaagctggaaacatgagcttaggtgtaaatttattaatgtatttaactgaaattacatcaaaatcattaaatgatgaatacttaagtaaaatatttgaagtacatcacaaacataaaaaagactacccatccggtactgcgttaatgctaggtaaaggaattgctgatggaaaaaataaaaatttatataatttaattggtaaaaaattcttaaataaaaaatcttttccttatggaaaaaaaattaattttaactcaattagaaaaggtgaaataattggtgagcatgaagtaaaattctcaagtggaaaagaaataattacactaaatcatgaggcttttgacagagcgctttattcagatggagctttgactgcttctaaatggttaatgaaaaaaaaaccaggtttatactctatgagagatttgcttaacttttcataat

SEQ ID NO: 217432 - DNA, 778 bp, Unknown
  Bacterial polypeptide expressing nucleotide sequence isolated from the Sargasso Sea
aatgaaaaaaattaacttatcaataactggatgtttaggcagaatgggaaaacaacttattaaatcttcaaaaagatcccgagactttaaaattgtttctattactgaaaatagaaaaataaataaaagaatatctggtctaagaccttcgcttaactcgaaggacgcatttaaaaaagcaaaggtaattatagattttacggttcctaagtgtactttagaagttcttaaaattgcgtcaaaattaaaaacaagagtcgtgattggtacaaccggtttttccaaaaaagaggaaattttaataaaaaaatattctaaaagaatacctattttaaaagcaggaaatatgagcttaggtataaatttattagtttatttgaccgaaattgcttcgagatctcttggtaataaatttttaagcaaaatacacgagactcatcataaacataaaaaagatcacccctcaggaactgctttaatgctaggaaaaggaatagctgtgggtaaaaatattgatctaagcaaaaatatgggaactaaatactttaataaaaagaattttccatattcaaaaaaaattaattttaactctcgaagaaaaggtaaagttgttggcgaacatgaagtaaaattttctagtggaaaagaagttatcactttaaatcacgaagctttcgatagggctctgtattctgagggtgctcttaccgcagcaaaatggttaatgaataaaaaaccaggtttatactcaatgaaaaatgttttaaattttaactaa

SEQ ID NO: 217433 - DNA, 610 bp, Unknown
  Bacterial polypeptide expressing nucleotide sequence isolated from the Sargasso Sea
ttttaaaaaagctaatttaattatagattttacagttccaaaatgcacttttgaagttttaaaaattgcagcaaaacttcaaaaaagagtagttataggaacaactggattttcaaaaaaagaagaaaacctgattaaaaaattttctagaaaaataccaatacttaaagctggaaatatgagtttaggtataaatttattgatgtatttgactgaaattacatcaaaatctttaggaaataatttcctaggcaaagtttttgaaattcatcataaacataaaaaagatcatccctcaggcacagctttgatgctcggaaaaggtatagctgttggaaaaaacaaggacttttataagttaataggaaaaaaatttttaaacaaaaaatcctttccttatggaaataagattaattttaattcattaagaaaaggtaaagttgttggcgagcatgaagtatctttttcaagtggaaaagaaataattacattaaatcatgaagcatttgatagagctctttattcagaaggagctttcacagcggccaaatggttgatgaataaaaaacctggcctttattcaatgagagatgttttgaacttcaaatga

SEQ ID NO: 217434 - DNA, 577 bp, Unknown
  Bacterial polypeptide expressing nucleotide sequence isolated from the Sargasso Sea
aatgaaaaaaattaatttagcgatttcaggttgtatgggtaggatgggccagcaattaattaagtctgcaaaaaaaaataaaaactttaaactagttactcttacagaaaatagattaataaataaaaagtttaacggagttaaactcgagttaaattctgtcaaagcttttaaaaaaactgatgtaattattgatttcacagtaccaagttgtactcttgaaattctcaaaatagcatcaaaactgaggaaaaaattggtaattggaaccaccggatttactagaagccaagaaaatcaaattaaaaaatattcaaaaaaaatacctattctaaaagcaggtaacatgagtttaggtgtaaatttattaatgtatttaactgagattgcatcaaaatccctaaatgatgaatatttgagtaaaatatttgaagtacatcacaaacataaaaaagactatccatctggtactgccttgatgcttggtaaaggaattgctgatggaaaaaataaaaatttatataatttaattggtaaaaaattcttaaataaaaagtcttttccttatgggaaaaaa

SEQ ID NO: 217435 - DNA, 778 bp, Unknown
  Bacterial polypeptide expressing nucleotide sequence isolated from the Sargasso Sea
atgagcaaagtaaaattagcgatatctggttgcatgggacgaatgggccaacaactgataaaatcttctagaattgataaaagttttaaactgacagcacttacagaaaatagattaataagaaaaaatattgctggtataaaacctagtttgaaccatgaaaattcttttaaaaatgttgatttaataatcgattttacaattcctaaatgtacatttgaaattcttaaaatagcatcaaagctgaaaaaaagagtagtaattggaacaactggtttctcaaaagaagaggaaatccaaattaaaaaattttcaaaaaaaattcctattttaaaagctggtaatatgagtttagggataaatttattgatgtatttaactgaaattgcatctaaatcattaggtaataatttcttaagtaaagtatatgaggtacatcataagcataaaatagatcatccgtctggtactgcattgatgcttggtaaaggtatagcaattggtaaaaataggaatttttataatttaattggaaaaaagtatcttaacaaaaaaagttttccttatgcaaaaaaaattaattttaactcaattcgtaaaggtaagactgttggtgagcacgaggtaaagttttctagtggtaaagaaattataacactaaatcatgaagcttttgatagagctttatatagtgaaggggctttaacagctggaaaatggctaatgaataaaaaacctggtttatactcgatgcgtgatgttttagactttaaatgag

SEQ ID NO: 217436 - DNA, 712 bp, Unknown
  Bacterial polypeptide expressing nucleotide sequence isolated from the Sargasso Sea
cgtaaaatcagacaaaaattttaatttagtggctcttacagaaaatagaataattaataaaaaaattagtggaattaaaccccaacttaacactgaaaaagcatttaaaaatacaaacattataatagattttacagttccaaaatgtacttttgaagtattaaaaattgcgtcaaaattaaaaaaaagagtagtaattgggacaacaggattttcaaaaaaagatgaaaatttaattaaaaaatactcaaaaaaaataccaatacttaaagctggaaatatgagtttaggaataaacttattaatgtacttaactgaaattgcctcaaaatctcttggaaataatttcttaagtaaagtttttgaaatccatcataaacataaaaaagatcatccctcaggaacagctttaatgcttggaaagggaatagcctttggaaagaataaagacttttacaagttaataggaaaaaaatatttaaacaaaaaatcttttccttatgggaaaaaaattaactttaattcattaagaaaaggtgaaattgttggtgaacatgaagtaactttctcaagtggtaaagaaataattacattaaatcatgaagcctttgatagagccctatattcggaaggagcattcacagcagctcaatggttaatgaataaaaaacctggcctttattcaatgagagatgttttaaattttaaatga

SEQ ID NO: 217437 - DNA, 709 bp, Unknown
  Bacterial polypeptide expressing nucleotide sequence isolated from the Sargasso Sea
aatgagtgaagaaattttaattgtagacgataacgctgatattagaaatattattaatgaattaattatagatgctggttataaaactagattagctgcaaattataaccaagcacttgcagaaatagataaaaaattacccgatgttgcaattcttgatgttaaattagataagggagataacgatggtattgagcttctctcacatattaaatctaaaaataaagatactcctgttataattatttcaggtcatgcaaacattgaaatggctgtcaaatctttgcagcatggagcatttgaatttatagaaaaaccatttgatcaagaaagattacttaactttgttaaaagagcagtagaaaactttaatttaaaaaaacaaaacagagaatacgaaagtaaattattttcatcttatgaattgataggaaacagcaaaaatatagtaaatataattgatcaaattaaaaaaatttctgtaactgaaagcagagtttttataagtggtccttcaggttcaggaaaggaattaattgctagaaaaattcataaagcttcttctaggagcaaaaaaccatttattgtcctaaatggtgctttacttgatatcaacaagtatgaactagaattatttggtgaagaaaaagaaaatggatctatttcatatggtgcacttgaaaaagcaaataaaggtacacttttgatt

SEQ ID NO: 217438 - DNA, 542 bp, Unknown
  Bacterial polypeptide expressing nucleotide sequence isolated from the Sargasso Sea
aatgggtaaaattagcttagccataacgggatgcatgggaagaatgggccaacagctcattaaatcagcggttagagataaatccactaaattggttgctcttacagagaatagatttattagaaaaaaaataggtggaattaaacctgaattaaataatgaaaaatctctaagtaaagcaaatgtcataatagattttacaacaccaaaatgtacattcgaagttttaagaatagctgtaaaattaaaaaaaaaagttgttattggtacaactggttttacaaaaaaagaggagcaattaataaaaaagttttctagaaaaattccaattttaaaagcaggtaatatgagcctaggaattaatctactgatgtacctaacagagatcgcatcagcatcactcagtaacaattatttaagtaaagtttttgaagtgcaccacaaacataaaaaggatcatccatctggaacagctttgatgcttggaaaaggaatagctataggaaaaaataaaaacttttataaaatgataggaaaaaaat

SEQ ID NO: 217439 - DNA, 721 bp, Unknown
  Bacterial polypeptide expressing nucleotide sequence isolated from the Sargasso Sea
aatgagtaaaattaacctaactattactggatgtatgggtagaatggggcaacaactcatacgatcagcaaataaagataaatctttaaaaattgtttctcttacagaaaattttcttataaataaaagaataggattaataaaaccagaattaaatactgaaagagcattcaataaatccaatataataatagattttacagtgccaaaatgtacttttgaagtacttaaaattgcatctaaattaaaaaaaaaagtcgtaatcggcacaacaggatttactaaaaaagaggaaaatttaattaaaaaatattctaaaaaaatagcaattttgaaggctggcaacatgagcctgggtataaatctattaatgtatatcacagaaattgcatcagcatctcttggcgacaaatttttaagtaaagtatttgaagttcatcacaaatataaaaaagatcatccatcaggaactgctttaatgcttggaaaaggaattgctactggaaagaagaaagatttttataaaattattggtactaaatatttaaataaaaaaaaatttccttatggaaaaaaaataaactttaattcaataagaaaaggagaaattgttggagagcacgaagtaaaattctcaagtgggaaggagatcattacccttaatcatgaagcatttgatagagctctttactctgagggtgcgattgctgcagcaaaatgg

SEQ ID NO: 217440 - DNA, 633 bp, Unknown
  Bacterial polypeptide expressing nucleotide sequence isolated from the Sargasso Sea
ctattactaattcagaaaaagcatataaaaaagctaatgtaattattgattttaccgtacctaaatgcacacttgaaattcttaaaatagcgttaaaacaaaaaaagaaagttgtaattggaacaaccggttttacaaagaaagaagaagatttaataaaaaaaatttcaaaaaaaatccctattttaaaagctggaaatatgagcctgggtataaatttattgatatatctaacagaaataacatcaaaatctttgggaaaaaattttctaagtaaaatttacgaagttcatcataaacataaaaaagattatccatctggcactgctttgatgcttggaagcggagtagcgaaaggtaaaaataaagatttttatagtatgatcggtaaaaaatatttaaataaaaaatcatttccatatggaaaaaaaataaattttaattcaattagaagaggagatgtaattggagaacatgaggtaactttctcaagtggtaaagaaattataactctcaatcatgagtcttttgatagagctctatactcagagggagcacttttagcggctaaatggttgttcaataagagaccaggtctttactcgatgagagatcttttaaaatttaagtgaa

SEQ ID NO: 217441 - DNA, 766 bp, Unknown
  Bacterial polypeptide expressing nucleotide sequence isolated from the Sargasso Sea
aatttagctataactggcggtctagggagaatgggtcaacaaattattaaatcttgtaaaaaagataagaatattagaattatctcaataacggaaaatagaatatataaaaaaaaaatctctgggcttaaacttcaaacgaatagtaaaaattcattaaaaaatgcccaagttattatagatttttcagtacccaaatgtactcttgaaattatcaaaattgcttcagagttaaaaaaaagagttgtcataggaacaacggggttttctaagagtgaagaaaaaataatagaaaagtattcaaggaaagtcccaattttaaaagctggaaatatgagcttaggagttaatttattagtttatttgacagaaattgcatctagatcactagataataattttttaagcaaagtttacgaagtgcatcacaggcaaaaaaaagatcatccatcaggcacagctctaatgcttggcaaaggtatagcaagaggaaaaaataaggatcttaataagataattggtaaaaaatatttaaataaaaaatcatttccatttagcaataaaattaattttaattctcttagaaaaggtaaaattgtaggggagcatgaggttagtttttcaagcggaaaagaaataattactttaaaccacgagtcttttgacagagctttatacgctgaaggtgctttagcagctgcaaaatggttaataaataaaaaaccaggtttatactctatgagaaatgttttaaattttaaataaa

SEQ ID NO: 217442 - DNA, 609 bp, Unknown
  Bacterial polypeptide expressing nucleotide sequence isolated from the Sargasso Sea
aatgattgaaaattctcaaaaacctataccagtactagtatccggagccttaggcagaatgggtggcgaagttgtgaatacagtattaaattctaaagattgtaaacttgttgcagcaattgacataaatgaaaagaacaatggctcaaatatttctgaattattgaaggtaaaaaattgtgatgtttttgtttctaacgattttgaaggaactttatgttctgttagtcaaaattatagagataaaaatatcaaacctgttctggttgattttactcatcctgattctgtatatgaaaatactagatcagctatcgcatacggtatttcaccagtaatcggaaccacaggactttctccttcgcaaataaaagatttgtctgtttttgctcagaaagcatctgttggttgtgcaataattcctaatttttcagtaggaatggttcttcttcagcaggcagcgtcagtagccgctaggttttatgacaatattgaattaatagagatgcatcataatcaaaaagctgattctcctagtggaacttgtataaaaactgcagaaatgattgaagaatatccaaagaaatttaatcagaatttagtgaaaga

SEQ ID NO: 217443 - DNA, 363 bp, Unknown
  Bacterial polypeptide expressing nucleotide sequence isolated from the Sargasso Sea
atatcgaaattgcagaaacacaccataaacataaaaaggatgcaccgtctggtactgctttatcacttggtgaatacgctgcagagggaagaaaaatttcattgaaaaaatctaaagtcttagaccggacaaaaaagttaaccaatagaaaaaaaggagatattggtttttcagtaacaagaggtggggagattgctggagaacatacggttagttttattggtgaaaatgatagagtggatctagtacataaagcaaacaacagatcaatctttgttcagggagctatcgatgccgctatatttcttagcaaaaaaaaatcaggtttttattcaatgaatgatttgttgttttctaattaag

SEQ ID NO: 217444 - DNA, 766 bp, Unknown
  Bacterial polypeptide expressing nucleotide sequence isolated from the Sargasso Sea
cgaatgggtcaggaaatatcgaaacaaattttacaaaataaaaatttagaatttgtaggtggttttgaacataaaaaacataaagatataaacaaaccgttaaacaaagtttcaaatatacactctgcaaaattagttacagctaacgcagctcagttaatcaaagattcaagtgtcataattgattttaccacacctgagtctactttagataatttaaaaattgcttctataaacaaaacagcagttgtaattggtacaactggaatgacagatggtcaaaaaaagaaagtaaaaagttattctaaaaaaatacctatactcatgtcttctaacatgagtttgggcgttaacttattatttaacttggtaaaacaaacagcatcagctctaaaagatactgattatgatattgaaattgctgagactcatcataaacataaaaaagacgccccttctggaactgcattatctctgggcgagtatgctgctgaaggaagaaaaactaaattaaataaatcaaaagttttagatcgtacaaaaaaactaacatctagaaaaaaaggtgacattggtttttctgttacaagaggtggtgaaattgcgggtgaacatacagtaagttttattggtactaacgatagagttgatctagttcataaagctaataatcgatcaatttttgttgatggagccattgaagcagctatatatatatgtagaaaaaaaagcggcttatatacaatgcaggatttattaatttaaa

SEQ ID NO: 217445 - DNA, 286 bp, Unknown
  Bacterial polypeptide expressing nucleotide sequence isolated from the Sargasso Sea
tatgaaaataaatttaactataacaggctgcatgggaagaatgggacaacagcttattaaatcttcaaataaaaataaaaacttcaagttagtttcactcacagaaaactttaaaattaatagaaaaataaataatgttttacccgaatttaataacgttaattctttcaaaaaaactaatgtgattatagatttcacagtacctaaatgtactctggaagtccttaaaattgcctcaaaattaaaaaaaagggttgttataggcactactggttttactaaaaat

SEQ ID NO: 217446 - DNA, 334 bp, Unknown
  Bacterial polypeptide expressing nucleotide sequence isolated from the Sargasso Sea
atgggtaaaataaacttagccatcactggatgtatgggaagaatgggtcaacagctcattaaatcagcaattaaagataaatctactaaactggttgccctaacagagaatatgttaattaataaaaaaattaacgggataaaacctgaattgaatacagaaaaagctctatgtaaagcaaatgtaataattgatttcacaataccaaaatgcacattcgaggttttaaaaatagctaaaaagcttaaaaaaaaggtagttattggcacaactggttttacgaaaaaagaagaggatataataaaaaagttttctaaagaaattccaattttaa

SEQ ID NO: 217447 - DNA, 628 bp, Unknown
  Bacterial polypeptide expressing nucleotide sequence isolated from the Sargasso Sea
gctcaataccaaagatgcttttaaaaaaactgatgtaataattgattttacaattcccaaatgtactttcgaagttttaaaaatagcttcaatacttaaaaaaagagtagtgatcggaacaactggatttacaaagaaagaggaaaatttaattaaaatttactctaaaagaattccaattttaaaagctggtaatatgagtttaggaattaatcttttaatgtatttatctgaaattacatcaagagccttagatgataaatatttaagtaaaatttttgaagcacatcacaaacataaaaaagattatccctctggcacagctttaatgcttggcaaaggtattgctgatggaaaaaataaagatttctttaaaatgataggcaaaaaatttttgaataaaaaaatttttccttttgggaaaaagattaatttcaattctataagaaaaggtgaaataattggagagcatatagtcaaattttcaagtggaaaagagataattactttaaaccaccgagcttttgatagagaattatattctgaaggagctctttcagctgctaagtggttaataaataaaagatcaggtctttattctatgagagatttaatgaatttcaaataa

SEQ ID NO: 217448 - DNA, 418 bp, Unknown
  Bacterial polypeptide expressing nucleotide sequence isolated from the Sargasso Sea
tatggtaaagaagattaaggtagcgatagctggctgtactgggcgcatgggtaaaatgattgcaaaaattttgcccgaatataaaaattttgagctttcaggtttacttgaaaaaagtgggcatccagatctgggtacggaattttcaaaaattaccgatgactcatcatacaatcttaaaatttctgacagctatagagaaacacttttgaaaagcgatgtattgattgattttacgctcccagatgcaactttaaatctgttagagtgttctagagatatggaagtaaggcacgtaattggaaccacgggattttcggtatctcaggaatcagacattttacgatatgccaaagaaaaagtgattgttaaggcaggcaatatgagccttggagtaaatttgataacaaaattaact

SEQ ID NO: 217449 - DNA, 805 bp, Unknown
  Bacterial polypeptide expressing nucleotide sequence isolated from the Sargasso Sea
tatggcaaaaattaaaatagcagttgcaggttgtcttggcagaatgggtcaggaaatatcgaaacaaattttacaaaataaaaaattagaatttgtcgggggtttcgaacacaaaaaacataaagatataaacaaacctttaaacaaggtttcaagtatacactctgcaaaattagttacagctaatgcagctcaattaatcaaagaagcaaatgtcatcattgattttacaacacctgagtcaactttagataatcttaaaatcgcctctgcaaataaaacagcagttgttattggtactactggaatgacagacgcacaaaaaaagaaagtaaaaatttattctaaaaaaatacctatactcatgtcttctaacatgagcttgggtgttaacttactatttaatttagtaaaacaaacggcaatagccttaaaagatactgattatgatattgaaatttctgagactcatcacaaacataaaaaagatgctccttctggaactgcattatctttgggtgagtatgctgctgaaggtagaaaaactaaattaaataaatcaaaagttttagatcgtacaaaaaaactaacatctagaaaaaagggtgacattggtttttctgttacaagaggcggtgaaattgcaggtgaacatacagtaagttttattggtaccaacgatagagttgatctagttcataaagctaataatcgatcaatttttgtagaaggagctatcgaagcagctatctttatttttaaaaagaaaacaggccttttcaatatgaatgatttgttattttaa

SEQ ID NO: 217450 - DNA, 409 bp, Unknown
  Bacterial polypeptide expressing nucleotide sequence isolated from the Sargasso Sea
tatatttaatttagtaaacaaacagcatcaagctctaaaagatactgattatgatattgaaattgctgagactcatcataaacataaaaaagatgcaccttcaggaacagcattatctttaggagaatacgctgctgaggggagaaaaactaaattaaataaatcaaaagttttagatcgtacaaaaaaattatcatctagaaaaaaaggtgacattggcttttctgttacacgaggcggagagattgcgggcgaacataccgtgagctttataggaataaatgacaggatagacttagttcataaagccaataatagatctatttttgtaagtggagccattgatgcagcaatctttttatttaaaaagagaaatggattattttcaatgaatgatttgttattttaa

SEQ ID NO: 217451 - DNA, 715 bp, Unknown
  Bacterial polypeptide expressing nucleotide sequence isolated from the Sargasso Sea
atgagcaaagtaaatttagcgatatctggttgcatgggacgaatgggccgacaactagtaaagtcttctagagttgataaaaactttaaattaacaacacttacagaaaatagattagtaaataaaaagatttatggaattaaacctagcttaaataatgaaaattcatttaaagacgttgatttaattatcgactttactgtacccaagtgtacttttgaagtgcttgaaatagcttcaaagctaaaaaaaagagttgttattggcacaactggatttaccaaaaaagaagataatcttattaaaaagtattcaaaaaaaatcccaatattaaaagctgggaacatgagtttaggtataaatttattaatgtatttaactgaaattgcttcaaaatcattaggaagtaattttttaagtaaagtctacgatgtacatcataaacataaaattgaccatccatcaggaactgcgttaatgctagggagaggaattgccattgggaaaaataaagatttttataatttagttggacaaaaatatttaaataaaaagaattttccttacggaaaaaaaataaattttaactcaatacgtaagggtgagactattggtgaacacgaagttaaattttcaagtgggaaagaaattattactttaaatcatgaagcatttgacagagccctgtatagtgaaggtgctttaacagcagcaa

SEQ ID NO: 217452 - DNA, 424 bp, Unknown
  Bacterial polypeptide expressing nucleotide sequence isolated from the Sargasso Sea
atgagaaaaattaatttagctataactggttgtatgggaagaatgggccaacaatttatcaagtctgcaaaatcagataaaaattttaaattaattgctcttacagaaaatagaattattaataaaaaaattagtgggattaaaccagaacttaattcggaaaaagcatttcaaaatacaaatgtcataatagattttaccattccaaaatgtacatttgaagtattaaaaatagcatcaaaattaaaaaagagagtagttataggaacgactggctttactaaaaaagaggaaaatttaataaaaaaatattcaaaaaaaatacctatacttaaagctggaaacatgagtctcggaataaacttacttatgtatttaactgaaattgcatcaaaatctcttggaaataattttttaagtaaag

SEQ ID NO: 217453 - DNA, 376 bp, Unknown
  Bacterial polypeptide expressing nucleotide sequence isolated from the Sargasso Sea
atgaaaataaaattatcaattactggttacaaaggaagaatgggtcaacaattaataaaatcgtgtaagaataatagcagttttaaattggtttctattaccgagaaccaaattttaaaaaaaaaaataaatggaattaaaccagaattaaatagtttatcagcatttaaaaaaactgatgtgataatagatttttcagtcccaaggtgtacgtttgaagtgcttaaaatagcaacaaaattaaaaaaaagagtagtgattggtacaacaggttttacaaaaaaagaggaaaaactaattgaaagatattcaaaaaaaattccaattctaaaagcaggaaatatgagtttgggcattaatcttttaatgtattaac

SEQ ID NO: 217454 - DNA, 682 bp, Unknown
  Bacterial polypeptide expressing nucleotide sequence isolated from the Sargasso Sea
catgaataaaattaaattagctgtaactggttgccttggccgaatgggtcaacaaattattaaatcctcaaaattagataaaaagtttaaacttgttactcttactgaaaatagaaaaattgatagaaaaatttataaaatcaaacctgaattaaataatgaaagtgcttttaaaaaagcaaatatcattatcgattttacaacaccaaaatgtactttccaggttttaaaaatagcatcaaaactaaaaaaaaaagtggtgatcggtactactggatttactaaaaaagaagaacaattaataaaaaaatactctagaaaaattccaattttaaaggcaggaaatatgagtctcgggattaatcttttaatgtatctaactgagattgcgtcaagttcgttgggcaataattttttgagtaaagtttatgaagtgcatcacaaacataaaaaagatcatccatcaggtactgctttaatgctgggtaaaagtatagcggttggaaaaaaaaaggatttttataaaatgattggtaataaatactttaataaaaaaacatttccttacggtaaaaaaattaattttaattcaataagaaaaggtgaaactgttggtgaacatgaggtaaagttttcaagtggtaaagaaattataaccttaaaccatgaagcatttgataga

SEQ ID NO: 217455 - DNA, 560 bp, Unknown
  Bacterial polypeptide expressing nucleotide sequence isolated from the Sargasso Sea
tatgaataaaattaagttaggtataactggatgcatgggtagaatgggcaagcagctcattaaatcctctaaaaaagataaaagctttaaattaaccactctcactgaaaatattgaaattgctaaaaaaatttctggaattaagcctgaattaaattcatttaattcattaaaaaaagttgacgtaataatagatttttcggttcccaagtgtactttggaaattctaaagatagcagcaaaactgaagaaaaaagtagtaatcggcactacaggatttacaaaaaaagaagaaaaattaataaataacttttcaaaaaaaatacctattctaaaagctggaaatatgagcttaggaattaatctcttaatgtatttaacagaaattacctcaagatccttaggaaataattttaatagtaagatacttgagattcatcataaatataaaaaagatcacccatctggtacagcattgatgctgggaaaaggaattgctgctggaaaaaataaaaagttttataacattgtagggaaaaagtttttaaataaaaaaaatt

SEQ ID NO: 217456 - DNA, 583 bp, Unknown
  Bacterial polypeptide expressing nucleotide sequence isolated from the Sargasso Sea
tttactgtacctaattgtacttttgaaattcttaaaattgcatcaaagcttaaaaaaagagttgttattggtacaactggatttaacaaaaaagaagaaagtcttattttaaaattttcaaagaaaattccaatactgaaagccggaaacatgagcttaggcataaatttgttaatgtatttaactgaaatagcatctaaatcattaggaaataattttttaagtaaagtatatgaggttcatcataaacataaaatagactatccatctggaacagcgttaatgttgggtaaaggaattgctattggcaaaaacaaagatttttataacttatttggaaaaaaatatcttaataaaaaaagttttccttatggaaaaaaaataaattttaattcaatacgaaaaggtgaaacagttggtgaacacgaagttaaattttcaagtggaaaagaagttattacattaaatcacgaagcttttgatagggctttgtatagcgaaggagctttgacagctggaaaatggttaatgaaaaaaaaaccaggattatattcgatgcgtgatgttttaaattttaaatgag

SEQ ID NO: 217457 - DNA, 694 bp, Unknown
  Bacterial polypeptide expressing nucleotide sequence isolated from the Sargasso Sea
ttttaagattgttgctcttacagaaaatagaattgttaataaaaaagttgctggaatcaaacctagctttaatacagaagaatcttttaaaaaagctaacttaataatagattttacggttcccaaatgcacatttgaagttttaaagattgcattaaaattaaagaaaagagtagttattggaacaactggattttcaaaaaaagaagagaaattgattaaaaagtattctaaaaaaataccaatattgagagctggaaatatgagtttaggaataaacttattaatgtatttaactgaaattgcatcaaaatctttaggaagtaatttcctaagcaaagtttttgagatacatcataaacacaaaaaagatcacccatcaggaactgcattaatgcttggaaagggtatagctgttggtaaaaataagaatttttataaattaataggaaaaaaatatttaaacaaaaaatcttttccttatggaaataaaattaattttaattcattaagaaaaggtgaagttgtaggagaacatgaagtgactttttcaagtggtaaggaaataattacattaaatcacgaagcatttgatagagctctttattcagaaggagcattcactgcagctaagtggttaatgaaaaaaaaacctggtctttattcaatgagagatgttttgaatttcaaatga

SEQ ID NO: 217458 - DNA, 778 bp, Unknown
  Bacterial polypeptide expressing nucleotide sequence isolated from the Sargasso Sea
atgaaaaaaattaatttagctatttcaggatgcatgggtaggatgggccagcaattaatcaagtcttcaaagaaaaataaaaactttaaactaattacacttacagaaaatagactaataaataaaaagtttaatggagttaaacctgagttaaattctgaaaaagcttttagaaaagctgacgtaattattgattttactgttcctaagtgcaccctcgaaatattaaaaatagcatcaatacttaagaagaaagtagtaattggtactactgggtttaataggagccaagaaaatcaaattaagaaatattcaaaaaaaatatctattttaaaagctggaaatatgagcttaggtgtaaatttattaatgtatttaactgaaattgcatcgaaatcattaaatgatgaatactttagcaagatatttgaagtacatcacaaacataaaaaagactacccatctggtactgcgttgatgcttggtaaggggattgcagatggaaaaaataaaaatttatataatctaattggaaaaaaattcttaaataaaaaaacttttccttatggaaaaaaaattaattttaactcgattagaaaaggtgaaattattggtgagcacgaagtaaaattctcaaatggaaaagaaattatcacattaaaccacgaggcttttgatagagctctatattcagatggagctctaactgcttcgaaatggttaatgaaaaaaaagccaggtttatattctatgagagatttgcttaacttttcataat

SEQ ID NO: 217459 - DNA, 325 bp, Unknown
  Bacterial polypeptide expressing nucleotide sequence isolated from the Sargasso Sea
atgaaaccaattaaaattattgttactggagcatctggaagaatgggccaaacaattataaaaaaaattttaataaataagtcgctgaaacttataggtgcaacagaaggttccaaaaacaagttccttggaagtgatattagtgcgttaattaagtcaaaaaaaactggaataataataactgacaaaatcgaaccacttttcgctaaagcagatgccgttatcgattttaccataccaattgctacattaaattatgctgagatggccgcaaaatataaaatagtacatgttattggaactactgggtttagccccaagtgac

SEQ ID NO: 217460 - DNA, 472 bp, Unknown
  Bacterial polypeptide expressing nucleotide sequence isolated from the Sargasso Sea
gattttgctgcgcagcacgccacaattattaaatctggcaatatgagtttaggaataaatttattagagagtattgtaaaaattgcttcctcgaaattagatagctcttttgatataaaaataaatgaaactcatcataaacataaaattgatgcaccatcaggaacagcaataatgcttggtaaagctgctgctagtgggaaaaataaaaaattggaaaatgtaatgaaaattaatcgtactaatacaattggtaaaaatgtaaaaaataaaattgtaatgtcgtcctttagaaaaggtgaaatcattggagaccatgaggttatattctcatcaaatgatgaaactattagaattcagcatatagctgaaaataggggcatttttgccaatggtgcgcttcaagctgtaaaatggggaatggataaaggaccaggtcttttttcgatgaccgacgttttgaatatttaaa

SEQ ID NO: 217461 - DNA, 657 bp, Unknown
  Bacterial polypeptide expressing nucleotide sequence isolated from the Sargasso Sea
cttcaaggtaactgctctcacagaaagtagagtagtaaataaaaaaataaatcgaataaaaattgaaaataattcagaagtttccttcaaaaaatctgatttgataatagattttacagttcctaaatgtacttttgaggtattgaagattgcatcaaaattgaaaaaaagagttgtgataggaacaacaggttttacaaagaaagaggaaaatttaattaaaaaattctctaaaaaaatacctattcttaaagctggaaacatgagtttaggtataaatcttttaatgtacctaacagagattgcctctagttcccttggaaaaaattttaaaagtaaaatatttgaaattcatcataaacataaaaaagattatccttctggaaccgctttaatgttaggcaaaggaatcgctgttggcaaaaataaaagcttttacaatttaattggaaaaaaatatttgaataaaaaaaacttcccctatggaaataaaattaattttaattcactcagaagaggtgagattattggtgaacatgaagtaaaattttcaagtggaaaagaaattataacattaaaccatgaggcttttgatagagctctatattcggaaggtgctttatctgcagcaaaatggttaatgaataaaaaacctgg

SEQ ID NO: 217462 - DNA, 421 bp, Unknown
  Bacterial polypeptide expressing nucleotide sequence isolated from the Sargasso Sea
gatgagtaaaaaaattaatataacaattgttggtgctgctggtaaaatgggttgtgaactaataagacaaatatcaaactcctctaagtataatttagttgcagcaattgagggaaaagactctaaatttattggagaagatgcatataagaatgcagggtgctctattacaggaatcgaaataaatgatgatttaataagtgcagttacaaaatcagatgctctaattgattttagttccattgactctactttatatgcttctgaactcagtgctcaagcaagaatagtacatgtaattggcactactggttttaataataaacaggatgagatgattcaagctgcagcaagacacgcaaccattattaagtcaggcaatatgagcctagggctcaatattttacttggaattgttcag

SEQ ID NO: 217463 - DNA, 743 bp, Unknown
  Bacterial polypeptide expressing nucleotide sequence isolated from the Sargasso Sea
gggaagaatgggtcaacagattattaaatctgctagatccgataaaaattttaagttagttgctctcacagaaaatagaattataaagaaaaaagttagtggaattaaacctagcttaaataatgaagaagcttttaaaaaagctaatttaataatagattttactgtccctaaatgcacatttgaaattttaaaaattgcagcaaagcttaaaataagagtagttataggaacaactggattttctaaaaaagaagagaacttaattaaaaaattcgcaaagaaaatagcaatacttagggctggaaatatgagtttaggaattaacttgttaatgtatttaactgaaattgcatcaaaatctttgggaaataattttcttagcaaagtttttgaaatacatcataaatacaaaaaagatcatccctcaggaactgcattaatgcttggcaaaggtatagctgttggcaaaaataaagatttttataatttgataggaaaaaaatatttaaacagaaaatcttttccttatggaaaaaaaattaattttaattcattaagaaaaggtgaagttgtgggtgagcatgaagtaactttctcaagtggaaaagaaataattacattaaatcatgaagcatttgatagagctctttattcagaaggagcatttacagctgctaaatggctaatgaaaaagaaacctggcctttattcaatgagagatgttttgaactttaaatgaa

SEQ ID NO: 217464 - DNA, 545 bp, Unknown
  Bacterial polypeptide expressing nucleotide sequence isolated from the Sargasso Sea
gatgaaaaaaattaatttagcagtaaccggatgtcttggaagaatgggacaacagattattaaatcttctaaaaatgcacaaaattttaaactagtttctattactgaaaatagaataattaatagaaaaatatccggtctaaaacctcaattaaattcggaggaggcatttaaaaacgcaaatattataatagattttactattccaaaatgtacgttggaagtattaaaaatagcctttaaattaagaaaaaaagtagtaattggaacaaccggatttacacaaaatcaagaaaagttaattaaaaaatattcaaaaaaaataccaatacttaaagctggtaatatgagtttaggcataaacttattaatgtatttaaccgaaataacttcgaaatctcttggagataactttttaagcaaagtttttgaaatacatcataaacataaaaaagatcatccatcaggaacagctctaatgcttggaaaaggcattgcaataggtaaaaaaaaagatttttataaactggtaggaaaaaaatacc

SEQ ID NO: 217465 - DNA, 778 bp, Unknown
  Bacterial polypeptide expressing nucleotide sequence isolated from the Sargasso Sea
atgaaaaaaataaatttagctataactggatgtatgggaagaatgggtcaacagattataaagtctgttaaaaaagacaaaagctttaaattaaaatctcttacagaaaatagaaaaataagaaaaaagatatatggattaacagtaaatcttaatagtgaaaatgtatttaaagatatagatttaataatagattttacaatcccacaatgtacttttcaaatattaaaaatagcttcaaaactgaaaaaaagagttgttattggaactacgggattttcaaaaaaagaggaaaagttaattcacaaatattcaaaaaaaattccaattttaaaagccggaaatatgagtttaggtattaatctattaatgtatttaactgaaatttcatccagttctttaggtaaaaaatttttaagcaaagtttttgaaatccatcataaacataaaaaagactatccgtctgggacagctttgatgcttggtaaaggtatagcagttggaaaaaataaaaatttttatgacctgattggaaagaaatatctaaataaaaaaaaatttccttatggaaataaaattaattttaattcaatcagaaaaggtgaaataattggagaacacgaggttcaattttcaagtggtaaggaaataattaccttaaatcatgaagcttttgatagaagtttatattctgagggtgcattgtctgctgcaaaatggttaatggcaaaaaaacctgggctttattctatgagagatcttatgaattttaaataat

SEQ ID NO: 217466 - DNA, 493 bp, Unknown
  Bacterial polypeptide expressing nucleotide sequence isolated from the Sargasso Sea
atgtctcaattaaatattggaatttcaggttgctctggaaaaatgggaaaaactctaattaaactcatttcaaatcataaagagtgccgtttagcttgtggtttagaggcagaaaataatccagaaataggcaaacttatcaattcagaatattcaagcgaagttatagtatcaaatagacaaatatttttcgaaaagtctgatatcatcattgacttcagtactcctagctcaacaatagaaaatattaaatttgctaataaatatgaaaaaagtatagtaatcggaacaactggacttagccctgaagttgaacaagagatagaaaaagcctctaataatatacctatagtatactctgcaaatatgagcataggaataaatataattttagaattgacaaataaattatcaaacatattagaaaaggaggaatttgatatagaaattcttgaaatgcatcataaacataaagttgatgctccctctggaa

SEQ ID NO: 217467 - DNA, 586 bp, Unknown
  Bacterial polypeptide expressing nucleotide sequence isolated from the Sargasso Sea
gattttactgttcctaagtgcacgtttgagatacttaaaattgcttttaaattaaaaaagaaagttgtaattggaacaacgggttttacgaaaagagaggaaaaattaattaaaaagttttcaaataaaattccaatattgaaagctggaaatatgagccttggtgtaaatctcttgatgtatttaacagaaattacttcaagatctcttggtaaaacatttttaagtaaagtttacgaagttcatcacaaatacaaaaaagattatccgtctggaacagcattaatgcttggtaaaggaatagcggttggtaagaataaagaattttatagtataattgggaaaaaatatttgaataaaaaatcatttccttacggaaaaaaaataaattttaattcaataagaaagggagatgtaattggagaacatgaagtatctttttctagtggtaaagaaatagtaaaattaaatcatgagtcttttgatagagcgctttactccgaaggagctttagctgctgcaaagtggttatctactaaaaaatctggcttatactccatgagagatcttttaaactttaagtgaa

SEQ ID NO: 217468 - DNA, 808 bp, Unknown
  Bacterial polypeptide expressing nucleotide sequence isolated from the Sargasso Sea
tatgtcaaaaattaaagtcgctgttgcaggatgtcttggtcgtatgggtcaggaaataactagagaaatacttaaaaataaaaaactattatttgttggaggttttgaacacaaatctcatcccgatttaaataaaatatttaatgaagtaacaagcataaattcaaaactaaaaatttcagataatgcaaaccaaattataaaaaatgctgatgtagttattgattttacatcaccaaactcgactttatctaatgttaaaattgcagctaaaaataaaactgcaatagtaattggaacaacaggtatgactgaaaatcaaaagaagaaagtaaaaaatttttcaaaaaaaataccaatacttatgtcttccaatatgagtctaggagtaaatttactttttaatcttgtaaatcaaacagcatcaatcttaaaagatgaaaattatgatatagaaatttcagaaactcatcacaaacataaaaaagatgcgccctcaggcacagcaatttcgcttggcgaatatgctgctataggaagaaaaacaaaattaaataaaacaaaggttactgaccgaacaagaaaaattaccaaaagaaaaaaaggacaaattggtttttcagtcactaggggtggtgagatagcaggagagcacactgttagttttataggtactaatgatcgggttgatttaactcacaaagcaaacaatagatctatttttgttaatggagcaattgaggccactatttttttatcaagtaaaaaaaacggtttctttgatatgagcaatctctttataaaataa

SEQ ID NO: 217469 - DNA, 778 bp, Unknown
  Bacterial polypeptide expressing nucleotide sequence isolated from the Sargasso Sea
atgaaaaaaattaatttagctatttctggttgcatgggtaggatgggccaacaattaattaagtcttcaaagaaaaataaaaattttaaactagttacacttacagaaaatagattaataaaaaaaaagtttaatggagttaaacctgagttaaattctgaaaaagcttttagaaaagctgacgtaattattgattttactatccctaattgcactcttgaaatattaaaaatagcatcaaaactaaaaaaaaaagtaataatcggcactactggatttactagaagtcaggaaaatcagattaagaaattttcaaaaaaaattcctattcttaaagctggtaatatgagcttaggtgtaaatttattaatgtatttaactgaaattgcctcaaaatcactaaatgatgaatacttaagtaaaatatttgaagtacatcacaaacataaaaaagactacccatctggtaccgcgttaatgctaggtaaaggaattgcagacggaaaaaataaaaatttatataatttaattggtaaaaaattcttaaataaaaaatcttttccttatggaaaaaaaattaattttaactcaattagaaaaggtgaaattattggtgaacacgaagtaaaattctcaagtggaaaagaaataattacattaaaccatgaagcttttgatagagcgctttattcagatggagctttgactgcttctaaatggttgatgaaaaaaaaaccaggattatactctatgagagatttgcttaacttttcataat

SEQ ID NO: 217470 - DNA, 778 bp, Unknown
  Bacterial polypeptide expressing nucleotide sequence isolated from the Sargasso Sea
tatgaaaataatcaaactaggaatttcaggttgcatgggaaggatgggtcagcaactaattaggtcttctaagaaaaataaaaattttaaattagttacacttacagaaaatagattggtaaataaaaaatttaatggaattaaacctgaattaaattctgataaagcctttaaaagaattgatgtaattattgattttactattcctaaatgcacctttgagatattaaaaatagcatcaaaattgagaaaaaaagtagtaattggtactactggatttactagagctcaagaaaatcaaattaaaaaatattcaaaaaaaatagctattttaaaagctggtaacatgagtttgggtgtaaatttattaatgtatttaactgaaattgcatctaaatcactaaatgaggaatatttgagcaaaatatttgaggtacaccacaaacataaaaaagactatccatccggtacagcattaatgcttggaaaaggaattgctaatggaaaaaataaaaatttatacaatttaattggtaagaaattcttgaataaaaaaacgtttccttatggaaaaaaaattaattttaactcaattagaaaaagtgaagttattggtgaacatgaggtaaaattctcaaatggaaaagaaataattactttaaatcatgaggcttttgatagagcactttactcagatggagctttaactgcatctaaatggttaataaagaaaaaacgaggattatattcaatgagagatttgcttaacttttcataa

SEQ ID NO: 217471 - DNA, 778 bp, Unknown
  Bacterial polypeptide expressing nucleotide sequence isolated from the Sargasso Sea
aatgaaaaagattaatttaagtataacaggttgtatgggtcgtatgggccaacacttagttaaaacttccaaaaaagataaaagaattaaattatatagtttgaccgaaggaaagattatttcaaaaagaatctataatattaaacctcaacttaatactgaagatgcttttagaaatacagatgtaataatagatttcacaataccaaaatgcacttttgaagttttaaaaatagcatccaaattaaaaaaaagagtagttattggcactactggtttttcaaaaaaagaagaaagaataattaaatcttattcaaaaaaaataccaatattaaaagcgggtaatatgagtttaggtattaatcttatgatgtatttaactgaaattgcatccaaagtgcttggggataaatatttgaataaaatttttgaagttcatcataaacataaaaaagattacccatcaggaacagctctgatgttaggaagaggaatcgcaactggtaaaggtaaagatttttatagattacttggaaaaaaatatctaaatgtaaaatcttttccttatggaaataaaataaatttcaactcaataagaaaaggagaaattataggtgaacatgaagttttattttcaagtggtaaagaagtaattaaactaaatcatgaggcttttgatagagctttgtactcagaaggagccattgaagcttcaaaatggttagtaaataaaaaacctggcctatattcaatgagagatttaatgaatttcaaataa

SEQ ID NO: 217472 - DNA, 659 bp, Unknown
  Bacterial polypeptide expressing nucleotide sequence isolated from the Sargasso Sea
gatgagtgaaaaaattaatataacaattgttggcgccgctggtaaaatgggttgtgaactaataagacaaatatcaaactcctctaagtataacttagttgcggcaattgagggaaaagactcaaaatttattggagaagatgcatataagaatgcagggtgttctattacaggaatcgaaataaatgatgatttaataagtgcagttacaaaatcagatgctctaattgattttagttctattgactctactttatatgcttctgagctcagtgctcaagcaagaatagtacatgtaattggcactactggttttgataataaacaggatgagatgattcaagctgcagcaagacacgcaaccattattaagtcaggcaatatgagcctagggctcaatattttacttggaattgttcataatacttcaaaattattagacaacaattggagtatcgaaatttcagaggttcatcataaagaaaagaaagaccatccatcaggaacagctctcgcactcggatcttttgtagcaaatggaatgaatattgatttagaaaataaaaaagttatcgatgatccaatagttatagaagatgaaataaatcttactcaagtgaaagagggcttaatacgcaaaaaaggtgatataggatttt

SEQ ID NO: 217473 - DNA, 523 bp, Unknown
  Bacterial polypeptide expressing nucleotide sequence isolated from the Sargasso Sea
aatgagcaaagtaaatttagcgatatctggttgcatgggacgaatgggccaacaactagtaaaatcctctagagttgataaaaattttaaacttacaactcttacagaaaatagattaataaaaaaaaaaatttctggaattaaacctagtttaaataatgaaaattcctttaaaaatgttgatttaattatagattttactgtcccttattgtacttttgaaattcttaaaattgcatcaaagcttaaaaaaagagtagttattggtactactggatttaccaaaaaagaagaaaatcttattaaaaaattttcaaagaaaattccaatactgaaagctggaaacatgagcttaggcataaatttgttaatgtatttaactgaaatagcctccaaatcattaggaaataattttttaagtaaagtatatgaagttcatcataaacataaaatagactatccatctggaacagcgttaatgttgggtaaaggaatgctgttggcaaaaataaagattttatag

SEQ ID NO: 217474 - DNA, 778 bp, Unknown
  Bacterial polypeptide expressing nucleotide sequence isolated from the Sargasso Sea
aatgaaaaaaattaatttagctattactggatgtatgggaaggatggggcaacagattattaaatcagccaaatctgataaaaattttaaaatagtaactcttactgaaaatagaaaaataaataaaaaaattcatggaattaaacctagcttaaatactgtagaagcttttaaaaaagtaaatttaataatagattttacagttccaaaatgcacttttgaagttttaaaaattgcatcaaaacttaaaaaaagggtagttattggaacaactggcttttctaaaaaagaagaaaacttaataaaaaaatattcaaggaaaataccaatacttagggctggtaacatgagtttaggaataaatttactgatgtatttaacagaaatagcatcaagatctcttggaaataatttcttaagtaagatctttgaaattcatcataaacacaaaaaagatcatccctcaggtactgctttaatgcttggaaaaggtgtggccattggaaagaacaaaaacttttataaattattaggaaaaaaatatttaaacaaaaaatcttttccatatggaaaaaaaattaattttaattctttaagaaaaggtgaagctataggtgaacatgaggtaactttctcaagtggtaaagaaataattacattaaatcatgaagcatttgatagagctctttattcggaaggggcattcacagcagctaaatggttaatgaataaaaaaccaggactttattcaatgagagatgttttgaatttcaaatga

SEQ ID NO: 217475 - DNA, 778 bp, Unknown
  Bacterial polypeptide expressing nucleotide sequence isolated from the Sargasso Sea
atgaaaaaaattaatctaggtatttcgggttgtatggggaggatgggtcaacaacttattaaatcatcaaaaaaaaataaagattttaacttaaaagcccttaccgaatacataaccatagataaaaagattcttggtgtaaaacctgaattaaattcagaagatgcatttgataaaacagatataataatagatttcacaattcctaaatgcacattacaaatattaagaatagcatcaaaacttaagaaaaaagttgtgattggaactactggatttaacaaagctcaagaaaaccaaattagaaaatactccaaaaaaattccaatattaaaggctggtaatatgagtttgggggtaaatttattaatgtatttaactgaaattacctcaaaatccctaaatgacaactatctaagtaaaatatttgaagtacatcacaaatataaaaaagattacccatcaggaacagctttaatgttaggaaaaggtattgcagatggtaaaggtaaaaatctttataatttaattggtaaaaagtttttaaataaaaaatcttttccttatggaaaaaaaattaattttaattctttaagaaaaggtgaaattataggagaacatgaggtcaagttctcaagtggtaaagaaattattactttaaaccatgaagcttttgatagagcattgtactctgatggagccttaacggcagcaaaatggcttatgagaaaaaaaccaggtttgtattcaatgagagatttgcttaatttttcataat

SEQ ID NO: 217476 - DNA, 778 bp, Unknown
  Bacterial polypeptide expressing nucleotide sequence isolated from the Sargasso Sea
aatgagcaaagtaaaattagcgatatctggttgcatgggacgaatgggccagcaactagtgaaatcttctagaactgataaaaattttaaattaaccacacttacagaaaacagattaatagaaaaaaaaattgctgggataaaacctagtttgaatcatgaaaattcttttaaaaatgttgatttaataatcgattttacaattcctaaatgtacttttgaaattcttaaaatagcatcaaagctaaaaaaaagagtggttattggcacaaccggtttctctaaaatggaagaacttcaaattaaaaaattttcaaaaaaaattcctattttaaaagctggtaatatgagtttaggcataaatctattgatgtatttaactgaaattacctctaaatcattaggtaataattttttaagtaaagtgtatgaggtacatcataagcataaaatagaccatccatctggaacagcgttgatgctgggtaaaggtatagctgtaggtaaaaatagggatttttacaatttaattggaaaaaagtatctaaacaaaaaaagttttccttatggaaaaaaaattaattttaactcaatacgtaaaggtaaaacggtaggtgaacacgaggtaaagttttctagcggtaaagaaattattacactaaatcatgaggcatttgatagagctttatatagcgaaggagctttaacagctggaaaatggttaatgaataagaaacctggtttatattcgatgcgtgatgttttaaattttaaatga

SEQ ID NO: 217477 - DNA, 673 bp, Unknown
  Bacterial polypeptide expressing nucleotide sequence isolated from the Sargasso Sea
gatgagtgaaaaaattaatataacaattgttggtgctgctggtaaaatgggttgtgaactaataagacaaatatcaaactcctctaagtataatttagttgcagcaattgagggaaaagactctaaatttattggagaagatgcatataagaatgcagggtgctctattacaggaatcgaaataaatgatgatttaataagtgcagttacaaaatcagatgctctaattgattttagttccattgactctactttatatgcttctgaactcagtgctcaagcaagaatagtacatgtaattggcactactggttttaataataaacaggatgagatgattcaagctgcagcaagacacgcaaccattattaagtcaggcaatatgagcctagggctcaatattttacttggaattgttcagaatgcttcaaaattattggacgacaattggaatattgaaatttcagaggttcatcataaagaaaagaaggaccatccatcaggaacagctctcgcacttggatcttttgtagcaaatggaatgaatattgatttagaaaataaaaaagttatcgatgatccaatagttatagaagatgaaataaatcttactcaggtgaaagagggcttaatacgtaaaaaaggtgatataggattttcttcatatagaaaa

SEQ ID NO: 217478 - DNA, 757 bp, Unknown
  Bacterial polypeptide expressing nucleotide sequence isolated from the Sargasso Sea
atgattgataatataaaaaaaattgcaatatctggtggtaatggaaaaatgggtaaacttctatcagaacatattaaaggtaaagattcttttgaagtttctggtatttatgatcctatttcaaatagtaaagaatataaaaactttaaagattataaagaagtaaaagcagattttctttttgaattttcaccatcaaacaaaattaataaaaatatagaaattttatgcaacgaacagctaaattttggaataataattggatcatcaggtatctctgaagaaagtatagaaaagctaaaagttttgggggagagattgttagttattgttattccaaatttttcaatcggagcaagctatcaaaaacttatgtcagtaattctatctgatgtatttgtaaataaagatattattgagaaacatcattctcaaaaaaaagatgctccttctggtacagcaattgatttagctaatagtataaattcaataaataatgaaattaatgaacgagagtctgaaaacataataaatgtgattaataatataaaaatagaatcaataagatcggatgaatttttagctgaacaaactataagcatgtctaatgaatatgaaatatttaatacagagcatatagttaatgatagaaaagcatatctgtctggaattaatttagttttagattctcttgaagatttagatggatattattttggcttggagagcatattaaagaacaggtttaaaatataaa

SEQ ID NO: 217479 - DNA, 778 bp, Unknown
  Bacterial polypeptide expressing nucleotide sequence isolated from the Sargasso Sea
catgaagaaggtaaatcttttaataactgggtgtatgggaagaatgggccaacagattataaaatctgtaaggtcaaataaaaaattcaagatcgtagctcttacagaaaataaactaattaaaaaaaaaattaacggagtcaatctaagtttaaattctgtggacacatttaaaaaagctaatttaattattgattttacagtccctaaatgtacgattgatgttttaagaattgcatcaaaattaaaaaagaaagtagttattggaactacaggtttcaataaaagacaagaaatgcaaataaagatttattcaaaaaaaattccaattttaaaggctggaaatatgagtcttggaattaatttgttaatgtatttgactgaaatcacgtccttctcccttggagaaaatttcatgagtaaaatttatgaagaacatcataaatacaaaaaagatcacccatctggaactgcattaatgttgggtgaaggtatagctattggaaaaaaaaagaacttttataaaattttgggaaaaaaatatttaaataaaaagacttttccttatggaaaaaaaattaattttaactctataagaagaggaaataccataggcgaacatgaagtaaagttttcaaatggtaaagaaattttaacattaaatcatgcagcttttgatagagctttgtattctgaaggagctttggctgctgctagttggcttatgtccaaaaaacctggactttattcaatgagagatgttcttagttttaaatga

SEQ ID NO: 217480 - DNA, 385 bp, Unknown
  Bacterial polypeptide expressing nucleotide sequence isolated from the Sargasso Sea
aatgaaaaaaattaatttagctattactggttgcatgggaaggatgggccaacaatttattaagtcagctaaatcagacaaaaattttaaattagttgctctaactgagaatagaataataaaaaaaaaaattagtggaattaaacctgaactaaatacagaaaaagcattcaaaaatacaaatgttataatagattttacagtcccaaaatgtacaattgaagtactaaagattgcatcaaaattaaaaaaaagagtagttataggaacaaccggctttactaaaaaagaagaaaacttaattaaaaaatattcaaaaaaaataccaatacttaaagctggcaatatgagtttaggtataaacttgcttaatgtatttaactga

SEQ ID NO: 217481 - DNA, 805 bp, Unknown
  Bacterial polypeptide expressing nucleotide sequence isolated from the Sargasso Sea
tatggcaaaaattaaaatagcagttgcaggttgtcttggacgaatgggtcaggaaatatcaaaacaaattttacaaaataaaaatttagaatttgtcggtggttttgaatacaaaaaacataaagatataaataagccactaaataaagtttcaagcatacagtcttcaaaattggttaccgctaatgcagcgcaattgatcaaaaaagcaaatgttataattgattttacaacacccgagtctacgttagataatcttaaaatagcctctgcaaataaaacagcagttgttattggtacaactggaatgacagatgggcaaaaaaagaaagtaaaaagttattctaaaaaaatacctatactcatgtcttctaacatgagtttgggggttaacttattatttaacttggtaaaacaaactgcatcagctttaaaagataatgattatgatattgaaattgctgagactcatcataaacacaaaaaagatgctccttctggaactgcattatctttgggtgagtatgctgctgagggaagaaaaactaaattaaataaatcaaaagttttagatcgtacaaaaaaactaacatctagaaaaaaaggtgacattggtttttctgttacaagaggtggtgaaattgcaggtgaacatacagtaagttttattggtaccaacgatagagttgatctagttcataaagctaataatcgatcaatctttgtagatggagctattgaagctgctatctttatttctaaaaagagaacaggtcttttcaatatgaatgatttgttattttaa

SEQ ID NO: 217482 - DNA, 1054 bp, Unknown
  Bacterial polypeptide expressing nucleotide sequence isolated from the Sargasso Sea
aatgagtgaagaaattttaattgtagacgataacgttgatatcagaaatataattaatgaattaattatagatgcaggttataaaactcgtttagctgcaaattacaatcaagctctcgccgagattgataaaaaattgcctgatgttgcaattctagatgttaaattagacaaaggggacaatgatggtattgaacttctcactcatattaaatctaaaaataaagatacaccagttataattatatctggacatgcaaatattgaaatggcagttaaatcattacaacacggagcgtttgagttcatagaaaaaccatttgatcaagaaagattactaaattttattaaaagagcagttgaaaattttaatttaaaaaaacagaataaagaatatgaaagtaaattattttcatcttatgaattaataggaaatagtaaaaatattgtaaatataattgatcaaattaaaaaaatatcagtaactgaaagtagagtttttataaatggtccatcaggctcaggaaaagaattaattgcaagaaaaattcataaagcttcctctagaagtaaaaatccatttgttatattaaatggtgctttacttgatataaataaatatgaattagaactatttggtgaagaaaaggaaaacggatctatatcttatggtgcccttgaaaaagcaaataaaggaactctcttaattgatcaagtctcagaaataccattagatattcagtctaaaatactaagagtattaatagatcaaaaatttaaaagagttaatggaagtaatgatgttagtgttgatgtaagattaatctgttcgtcaagcaaagacttaaaaaaagaaattgaaattggaaactttagagaagatttatttcatagaattaatgtttttgaaataaatattgaaccattaaatcaaagaatttctgatattcctcttttaatcaaatatttttcaaaaaaaatatctgaaaattataaaattagagaattagatatagatgaaaataatagttacatacttaaccataattggcat

SEQ ID NO: 217483 - DNA, 778 bp, Unknown
  Bacterial polypeptide expressing nucleotide sequence isolated from the Sargasso Sea
aatgaaaaaaattaatttagctataactggatgtatgggaagaatgggtcaacagattattaaatctgccaaatctgataaaaatttcaaaatagtaactcttacagaaaatagaataattaataaaaaaattgttggtattaaacctagtttaaataatgaagaagcctttaaaaaagcaaatttaataatagattttacagttcctaaatgcacatttgaaattttaaagattgcttcaaaattaaaaaaaagagtagttattggaacaactggattttcaaaaaaagaagaaaatttgattaaaaagtattctagaaaaatacctatacttaaagctggaaatatgagtttaggaataaatttattaatgtatttaactgaaattgcatcaaaatctcttggaaataattttttaagcaaaatctttgaaattcatcataaacataaaaaagatcacccatcaggaactgctttaatgctcggcagaggtatagccgctggaaaaaatagagatttttacaaattgataggaaaaaaatatctaaacaaaaaatcttttccttatggaaaaaaaattaattttaattcattaagaaaaggtaaagttgtcggcgaacatgaagtaactttctcaagtagtaaagaaataattacattaaatcatgaagcttttgatagagccttatattcagaaggagcattcacagcagctaaatggttaatgaataaaaaacctggcctttattcaatgagagatgttttgaactttaaatga

SEQ ID NO: 217484 - DNA, 575 bp, Unknown
  Bacterial polypeptide expressing nucleotide sequence isolated from the Sargasso Sea
aatgaaaaaaattagattattagtgaccggttgcatgggtcgtatggggcaacaaataattaaatctgtaaaaaaagataaaaattttaaacttactgctcttacagaaaatagaaaaattaataaaaaaattaatggagttaaagttgaactaaataatgaaaaattatttaaaaatgtcgatctaattattgattttacaataccaaaatgtacttttcaggttttaaaaattgctacaaaattaaaaaaaagagttgtaatcggcacaactggttttaccaaaaaagaggaaaatttaataaaaaatttttcaaaaaaaatacctattttaaaagcaggaaatatgagcttaggtataaatcttttgatgtatttaactgaaattgcttcaagttcattagggaaaaattttttaagtaaaatttttgaaatccatcacaagcataaaaaagattatccatcaggaactgcattaatgttgggtaaaggaatagccgtaggaaaaaataaaaatttttatggtttattaggaaaaaaatatttaaataaaaaaacttttccatatagcaaaa

SEQ ID NO: 217485 - DNA, 778 bp, Unknown
  Bacterial polypeptide expressing nucleotide sequence isolated from the Sargasso Sea
aatgaaaaaaattaatctaggtatttcaggttgtatgggaaggatgggtcaacaacttattaaatcttctaaaaataataaagattttaatttaaaggctcttactgaatacataaccataaataaaaaaattcatggtgttaaacctgagttaaattcagaagatgcatttaaaaaaacagatataataatagatttcacaattcctaaatgcacactagaagtattaaaaatagcatcaaaacttaaaaaaaaagttgtgattggaacaactggatttaacagatttcaagaaaaccaaattagaaaatactccaaaaaaattccagttttaaaagctggtaatatgagcttaggtgtgaatttattaatgtatttaactgaaattgcctcaaaatctctagatgaagactatctaagtaaaatatttgaagtacatcacaaacataaaaaagattacccttcaggaacagccttgatgttggggaaaggtattgcagatggtagaggtaaaaatctttataatttaattggtaaaaagtttttaaataaaaaatcttttccttacggaaaaaaaattaattttaactctttaagaaaaggtgaaattattggtgagcatgaagttaaattctcgagtggtaaggaaatcattacgttgaaccacgaggcttttgatagagctttgtactccgatggagccttgacagctgcaaaatggcttatgaaaaaaaaaccaggtttatattcaatgagagatttgcttaatttttcataa

SEQ ID NO: 217486 - DNA, 432 bp, Unknown
  Bacterial polypeptide expressing nucleotide sequence isolated from the Sargasso Sea
gatgaaaaaaattaatttggcaataactggttgtatggggagaatgggtcaacaactcatcaaaacttcaaaagtaaataaaaactttaagttagtatctctaactgaaaatagaataataaataaaaatataatgggtattagacctaacttaaatacagaaaatgcatttaaaaaggcaaacgtaataatagattttacagtacccaaatgtaccttggaagttttaaaaattgcttcaaaactaaaaaaaagagttgtgatcggaacaacaggattcactaaaaaacaggaaaatattataaaaaaatactcaagaaaagttcctattcttaaagctggaaatatgagtttaggagtaaatttattaatgtatttgactgaaataacttcaaaatcccttaataatgattttttaagtaaagttttgaa

SEQ ID NO: 217487 - DNA, 673 bp, Unknown
  Bacterial polypeptide expressing nucleotide sequence isolated from the Sargasso Sea
attgcatattttagtaaatggcttcaatggaaatatgggtcaagcaattcaggctcaatgcaagcaattggatgtaaaagtttcggattttcaatctaaagcaatagatttaaataatatatcagctgtaatagatttttcttctccaggagggttcaaagcttgtatcagttcatgtattgagaataagctgcctttaatatcaggaactaccggtctgacagatgagcattttaagttagtgagttctgcaaagaaatctataccaatattacttgcctctaacatgtcaattggaattgctaatttaaagagctcaatagaaaagtaccttttgtcaattagcatcccttcaaagtgcaagatctttgaaattcatcacactaaaaaaaaagatgccccctctggaacggccatagaaattcaaaaatttatagaaaatttacctaaaagcaaagtagttaactctatcgatattgaatctctcagaattggcaatatttatggaattcatagaattgaatttgaaaatgcagagggaaagacaacgtttcaacatattgcaaactcaagaaacatttttgcaagaggtgctttgcaggcagcaagatggattaaatcaaaagaaattggagaatacagctttgctgacttcttgaataaaaagctttaa

SEQ ID NO: 217488 - DNA, 778 bp, Unknown
  Bacterial polypeptide expressing nucleotide sequence isolated from the Sargasso Sea
atgaaaaaaatcaatttagctataactggctgtctaggaagaatgggacaacaactcattaaatcctctaaaaataacaaagattttaaaatagttgctctgacagagagtaagattgtttcaaaaaagatttctggcgttaagctcaaacttaatactgttgatgctttcaaaaaagcaaatgtgattgttgacttcactgtgccaaaatgtactttgcaggttttaaagattgcttcaaaacttaagaaaagagtagtcatcggaactactggcttttctaaaagagaagagagtttaataaaaaaattttcaaaaaatataccaattcttaaagctggtaatatgagtttaggtgtaaaccttttaatatatttaacggaaattgcctctaaatctttaggtaataattttcttacaaaagtatatgaggttcatcataaatacaaaaaagatcatccttctggaacagctttaatgttaggaaggggtatagcggatgggaaaagtaaagacttttataacttgataggaaagaaatatttaaataaaaaaaactttccttatggaaaaaaaataaattttaattcgattcgaaaaggtaattttattggagaacatgaggtaaatttttcaaatggcaaagaaattgtaacattaaatcataagtcttttgacagagctttatactctgaaggcgctttgtcagcatctaaatggctgatgaaaaaaaaaccaggtctatattcaatgagagatctgttaaactttaagtgaa

SEQ ID NO: 217489 - DNA, 328 bp, Unknown
  Bacterial polypeptide expressing nucleotide sequence isolated from the Sargasso Sea
aatgaaaaaaattaatattgtaattacaggttttatgggtcgaatgggccagcaaattattaaatcagcatacaaagatagttcaattaaaatagtatctttaacggaaagtaaaattattaaaaaaaaaattaggggaattttaccagaattaaatagtgaaaaagcttttaaagactcagatgttattatagatttcactataccaaaatgtaccttagaaattttaaagattgcaaaaaaattaagaaaaagggtcgtaataggaacaactggctttacaaaaaaagaggaaaatttagtcaagaattattcaaaaaaaattcct

SEQ ID NO: 217490 - DNA, 778 bp, Unknown
  Bacterial polypeptide expressing nucleotide sequence isolated from the Sargasso Sea
atgaaaaaaattaacttatcaataactggatgtttgggtagaatgggaaaacaacttattaaatcttcaaaaaaatcccgagattttaaaattgtttcaattactgaaaataaaaaaataaacaaaagaatatttggtcttagaccttcacttaattcgaaggatgcatttaaaaaaacaaaggtaattatagattttacagttcctaagtgtactatggaagttcttaaaattgcttcaaaattaaaaaaaagagttgtaattggtacaactggtttttccaaaaaagaggaaattttaataaaaaaatattctaaaaaaatacctatactaaaagcaggaaatatgagcttaggtataaatttgttagtttatttaaccgaaattgctgcaagatctcttggtgataaatttttaagtaaaatcaatgagactcatcacaaacacaaaaaagatcacccttcagggactgcttttatgcttgggaggggaatagccgttggtaaaggtattgatctaagtaaaaacataggaacaaaatacttaaataaaatgtcttttccttattctaaaaaaattaattttaactctcttagaaaagggaaagttattggcgaacatgaggtaaaattttctagtggaaaagaaattatcactttaaatcacgaagcttttgatagggctctgtattctgagggtgctctttccgcagcaaaatggttaataaataaaaaaccaggtttatactcaatgaaaaatgttttaaattttaattaaa

SEQ ID NO: 217491 - DNA, 685 bp, Unknown
  Bacterial polypeptide expressing nucleotide sequence isolated from the Sargasso Sea
aatgaaaaaaattaatttagctattactggttgcatgggaaggatgggccaacaatttattaagtcagctaaatcagacaagaattttaaactagttgcactcactgaaaatagaataataaataaaaaaattagtggaattaaacctgaactaaatacggaaaaagcatttagaaatacaaatgttataatagattttacagtaccaaaatgtacatttgaagtactaaaaattgcatcaaaattaaaaaaaagaatggttataggaacaaccggctttaccaaaaaagaagaaaacttaattagaaaatattcaaaaaaaataccaatactaaaagctggtaatatgagtttaggaataaacttgcttatgtatttaactgaaattgcatctaaatcacttggaaataattttttaagtaaagtttttgaaattcatcataaacataaaaaagatcatccttcaggaacagctttaatgttaggaaaaggtatagcagtaggaaagaataaaaatttctataatttattaggtaaaaaatatctaaataaaaaatcttttccttatggaaaaaaaattaattttaattctctaagaaaaggtgaaattattggagaacatgaagtaactttttcaagcggtaaagaaataattactttaaatcatgaagcattcgatagggct

SEQ ID NO: 217492 - DNA, 1720 bp, Unknown
  Bacterial polypeptide expressing nucleotide sequence isolated from the Sargasso Sea
ttgcgcgattcctttcttcttcggcgccgtcacgccggcgggcaaaccgcgccgcgccgccgtcgacgcgttgctgcaagccatcgaacatgcgacccgcgaactgctcgacggcgtggtcctgcatccgccccagcaacacgacgcactgctgcaacgcgaaacgcgtgccgctcgtacgcgcaccaaacatccggaacacacagcatgaatcgccttgccgatctcgaagcccgcttgcgtgaagatctgcgctggctggaattacccgcgccctcctgggtgccgccacgtttcgccgctgccgaacgcgtactcgatgtcgcggtgatcggtggcggcatggcggggctcgccgcggcagcggaattgcgctggctgggcgtcgacaatctgcgggtattcgatcgcgcagcaccgggacgcgaaggtccgtgggtatcgttcgcgcgcatggaaacgctgcgctcgcccaagcagctcacgggtcccgcgctgcgcatgccggctctcacatttcgcgcgtggtacgaagcgcaattcggcgaacccgcgtgggaggcactctacaagattccgcgcacccaatggatggactatctgcgctggtatcgcgaagtgctcgatctgccggtgcagaacgacaccgcgctcacctcgctgcgtccgcgcgacgacggtctgcttgaactcgatctgcacgatctcaggaaagcaggcgcgcggcgcacgctgctcgcgcggcatgtcgtgctcgccaccggccgtgacggattgggcggcccattcgtaccggtgatcgccaatacggttgcgcgccgctactgggcgcattccgcggagcctatcgatttcgccgcgctggccggcaaacgtgtcggtgttgtcggcgcgggagcgtccgccttcgacaacgccgcgaccgcgctcgaagcgggggcggccggcgtcgatctgtttatccgccgcgacgacattccacgcgtgaacaagctgaccggcatcggcagtccggggctggtgcatggtttcgccgatctcgacgacgcatcgaagtggcgctttctgcactatgcacagaccgagcagacgccaccgccgcgagacagcgtgctgcgggtttcacgccatgccaatgcccgctttcatgtcggtagtccggtggcggcgctcgacgaactcgacggcgcgctcgtggtaacaacacccaagggccgttacgtggtggactttctgatcttcgcgaccggctttcactcggatatcgccacgcgtaccgagttcgcgccgttcgccggttttgtacggcgttggaaagaccgctatcgggcggacccgtcgctgccttcgcacgaactggcggagtcgccggacctcggcgacgcgttcgcgtttcaggagcgcgaacccggcacctgtgcggcgctgacgcagattcattgcttcaatcatgcggcgagccttagccatggaaagctgtccggcgacatccccgcgatcagcgaaggcgcgcagcgcctcgcacgcggcatcgcgagccgcctgttcgacgcggatcgcgagcgccactacgaggcgctggtcgccttcgataaagcggagttacaaggggatgaatggacggatgcggatgcaccgtccggcactgcgcgcgctcatctgcaagcagagcatgccgctaacaatcccgctgacgatcccgccgaaaacactgattaac

SEQ ID NO: 217493 - DNA, 499 bp, Unknown
  Bacterial polypeptide expressing nucleotide sequence isolated from the Sargasso Sea
atgacggatgtacaaaaaaagaaagtaaaaagttattctaaaaaaatacctatactcatgtcttctaatatgagtttgggcgttaacttattatttaacttagtaaaacaaacagcatcagctttaaaagatactgattatgatattgaaattgctgagactcatcataaacataaaaaagatgcaccttctggaactgcattatctctgggtgaatacgcagctgagggaagaaaaactaaattaaataaatcaaaagttttagatcgtacaaaaaaactatcatctagaaaaaaaggtgacatcggcttttctgttacaagaggtggtgaaattgcaggtgaacatacagtaagttttattggtaccaatgatagagttgatctagttcataaagctaataatcgatcaatttttgtagatggagccatcgaagctgcaatctttatttctaaaaagaaaaaaggtcttttcaatatgaatgatttgttattttaat

SEQ ID NO: 217494 - DNA, 716 bp, Unknown
  Bacterial polypeptide expressing nucleotide sequence isolated from the Sargasso Sea
aatgaaaaaaattaatttagcgatttctggttgtatgggaaggatgggtcaacaactgatcaaatcctctaagaagaataaaaatttcaaattagttacacttacagaaaatagattggtgaataaaaaatttaatggaattaaacctgagttaaattctgataaagcctttaaaaaagctgatgtaattattgatttcacagttccaaattgtacgcttgaaatactcaaaatagcgtcaagactaagaaaaaaagtagtaattggtactacggggtttaccaggaaccaagaaaaccagattaaaaagtattcgaaaaagatacctattttaaaagctggtaatatgagcttaggtgtaaatttattaatgtatttaactgaaattgcctcaaaatcacttaatgatgaatacttaagcaaaatatttgaggtacatcataaacataaaaaagattatccatcgggtaccgccttaatgcttggaaaaggaatagctgatggaaaaaataaaaatttatataatttaattggaaagaaatttttaaataaaaaatcttttccgtatggaaaaaaaattaattttaattctataagaaaaggtgaaattattggtgaacacgaagtaaaattctcaagtggaaaagaaataattacattaaatcatgaggcttttgatagagcactttactcagatggagctttaacagcttcta

SEQ ID NO: 217495 - DNA, 559 bp, Unknown
  Bacterial polypeptide expressing nucleotide sequence isolated from the Sargasso Sea
tttggaagttttaaaatttgcattaaaacataaaaaaagagttgttatcggtacaactggttttactaaaaaacaagaaaaaattattaaaaattactcaaaaaaaattcctattttaaaagctgggaatatgagtttaggagtaaatctattaatatatttaactgaaatagcatcaaaatcgttaggaaaaaaatttttaactaaagtctacgaagttcatcataaacataagaaagattatccttctggaaccgctttaatgcttggaaagggaatagctgttggtaaaaataaaaattttaataatttaattggtaaaaaatatttaaataaaaagacttttccttatagtaagaggataaactttaactcgattagaaaaggagaagttgttggagaacatgaagttagattttctagtggcaaagaaattgtgactttaaatcacgagtctttcgatcgcgctttatattctgaaggagctttagctgcagctaagtggataatgagtaaaaggccaggtctttactcgatgaggaatcttttaaacttttaa

SEQ ID NO: 217496 - DNA, 778 bp, Unknown
  Bacterial polypeptide expressing nucleotide sequence isolated from the Sargasso Sea
aatgaaaaaaattaagttatcaataactggatgtttgggtagaatggggaaacaactaataaaatcctcaaaaagatctcgagattttaaaattgtttcaattactgaaaatagaaaaataaataaaaaaatatttggtcttagaccttcactaaactcgaaagatgcatttaaaaaaacaaacgtaattatagattttacagttcccaggtgtactttggaagttcttaaaattgcatcaaaattaaaaacaaaagtcgtaattggtacaacaggtttttccaaaaaagaagagattttaataaaaaaatattctaaaaaaatacctatactaaaagctggaaatatgagcttaggtataaatttattagtttatttaaccgaaattgccgcaagatctcttggtaataaatttttaagtaaaatcaatgagactcatcacaaacacaaaaaagatcacccttcagggactgcttttatgctagggaaaggaatagccgttggtaaaaatattgatctaagcaaaaatataggaacaaaatactttaataaaaagtcttttccttattctaaaaaaattaattttaactctcttagaaaagggaaagttattggtgaacatgaggtaaaattttctagcggaaaagaaattatcactttaaatcacgaagctttcgatagagctctgtattctgagggtgctcttaccgcagcaaaatggttaataaataaaaaaccaggtttatactcaatgaaaaatgttttaaattttaattaa

SEQ ID NO: 217497 - DNA, 607 bp, Unknown
  Bacterial polypeptide expressing nucleotide sequence isolated from the Sargasso Sea
atgaaaagaataaatttagcaataactgggtgtatgggtcgaatgggccaacaactaattaaatcatcaaaaaaaaataaagactttaaactggttgcacttacagaaaacagattaataaataaaaaatttaataaaattaaacctgagtttaattctaatatggcatttaaaaaaacagatgtaattattgattttactgtccctgtatgcaccctggaaatattaaaaatagcttctaaacttaagaaaaaagtagtaattggaactactggatttactagaagtcaagaaaatcaaattaaaaaatattcaaaaaagatacctattttaaaagctggaaatatgagcttgggtataaatttgttaatgtatttaactgagattgccgcaaaagcattgaatgatgaatacctaagtaaaatatttgaagtacaccataaatataaaaaagattatccatcaggtacagccttgatgcttggaaaagggattgcagatgggaaaaataaaaacttgtataatttaattggtaaaaaatttttaaacaaaaagtcttttccttacggaaaaaaaattaattttaactcaattagaaaagggtgaa

SEQ ID NO: 217498 - DNA, 681 bp, Unknown
  Bacterial polypeptide expressing nucleotide sequence isolated from the Sargasso Sea
tatggcaaaaattaaaatagcagttgcaggttgtcttggccgaatgggtcaggaaatatcgaaacaaattttacaaaataaaaatttagaatttgttggtggttttgaacacaaaaaacataaagatataaacaaacctttaaacaaagtttcaagtatacactctgcaaaattagttacagctaatgcagctcagttaatcaaagaagcaaatgtcataattgattttacaacacctgagtctactttagataatcttaagatcgcctctgcaaataaaacagcagttgttattggcacaaccggaatgacggattcacaaaaaaagaaagtaaaaatttattctaaaaaaatacctatactcatgtcttctaacatgagtttgggcgttaacttattatttaacttagtaaaacaaacagcatcagctttaaaagatactgattatgatattgagattgctgagacccatcataaacataaaaaagatgctccttctggaactgcattatctctgggtgaatatgttgctgagggaagaaaaactaaattaaataaatcaaaagttttagatcgtacaaaaaaactatcatctagaaaaaaaggtgatattggcttttctgttacaagaggcggtgaaattgcaggtgaacatacagtaagttttattggtaccaatga

SEQ ID NO: 217499 - DNA, 778 bp, Unknown
  Bacterial polypeptide expressing nucleotide sequence isolated from the Sargasso Sea
atgagaaaaataaatttagctataactggttgtatgggacgaatgggtaaacatataatcaaatcagcaagatctgataaaaatttcaagattgtaactcttacagaaaatagaattataaaaaaaagtatcaatgggattaagcctagcttaaataatgctgaagcttttaaaaaagcaaacttaataatagattttagtgtaccgaaatgtacccttgaagtacttaaaatttcaagcaaactgcaaaagaaagttgttattggaacaacaggattttcaaaaaaagaagaaaatttaataaaaaaatactcgagaaaaataccaattctcaaggcgggaaatatgagtttaggtattaatctgttaatgtacttaacggaaattgcatcagaatctttaggtgataaatttttaagtaaagttttcgaagttcatcataagtataaaaaagaccacccttcaggaacggcattaatgcttggtaggggtatagctaaaggtaaaaagaaggaattttataaattagtaggtaaaaagtatttaaataaaaaatctttcccctatgggaaaaaaattaattttaattcttttagaaaaggagaaattgttggtgaacatgaggttactttttctagtggtaaagaaataattactttaaaccatgaagcatttgatagggcactttattctgaaggagctttagctgctgctatatggttaaataaaaaaaaacctggtctttactctatgagagatgtcttgaattttagttaat

SEQ ID NO: 217500 - DNA, 778 bp, Unknown
  Bacterial polypeptide expressing nucleotide sequence isolated from the Sargasso Sea
aatgaaaaaaattaatttagctataacaggttgtttaggtagaatgggccagcagctaattaaatctgctaggtcagataaaacatttaagctaatcactcttactgaaaaccaattaattaaaaaaaaaatttcaggcattaaaccaagcctgaataatttggattcatttaaaaaagtaagtttaataattgatttcacagttcctaagtgcacttttgaagttcttaaaatagctcaaaagcttaataaaagagtagtaattgggactactggatttagcaaaaaagaggaggaattgattaaaaaatactcaaaaaaaataccaattttaaaggctggtaacatgagtttaggtataaatcttttaatgtatttaactgaaattacatcaaaatcactgggaaaaaactttcttagtaaagtttttgaagtccatcataaacataaaaaagatcatccgtctggtacagctttaatgcttggcaaaggtatcgctgatggtaaagggaaaaatttatataaaatcatgggcaagaaatattttaacaaaaaaacatttccttactcaaaaaaaatcaattttaattcacttagaagaggcgaagttgtaggtgaacatgaggtaaaattttcaagtggaaaagaaataataacactaaatcatgaagcatttgatagagctttatactctgagggagcattaactgctgcgaaatggcttataaataaaaaaccaggtctttattcaatgagagatgtattgaattttaaatag

SEQ ID NO: 217501 - DNA, 745 bp, Unknown
  Bacterial polypeptide expressing nucleotide sequence isolated from the Sargasso Sea
tatgggtcgaatgggccaacactttattaaatcatcaaaaaaaaataaagactttaaactggttgcactaacagaaaacagattaataaataaaaaatttaatggaatcaaacctgagttaaattctaatgtggcatttaaaaaaacagatataattatcgattttactatcccagtatgcaccttggaaatattaaagatagcgtctaaacttaagaaaaaagtagtaattggaactactgggtttactagaattcaagaaaatcaaattaaaaaatattcaagaaagatacctattttaaaagctggaaatatgagcttgggtgtaaatttgttgatgtatttaactgaaattacttcaaaagcattaaatgatgattacttaagtaaaatatttgaagtacaccataaatataaaaaagactacccatcgggaacagcgttaatgcttggaaaagggattgcagacggaaaaaataaaaacttatataatttaattggtaaaaaatttttaaataaaaaatcttttccttacggaaaaaaaattaattttaactcaattagaaaaggtgaaattattggaaaacatgaggtaaacttctcgagtggaaaagagataattactttaaaccacgaagcctttgatagagcactttactctgatggagctttgactgcctctaaatggttaatgaaaaaaagaccaggattatattctatgagagatttgcttaatttttcataa

SEQ ID NO: 217502 - DNA, 472 bp, Unknown
  Bacterial polypeptide expressing nucleotide sequence isolated from the Sargasso Sea
ttattctaaaaaaatacctatactaatgtcgtctaacatgagtttgggtgttaacttactatttaacttagtaaaacaaacagcatcagctctaaaagatactgattatgatattgaaattgctgagactcaccataaacataaaaaagacgccccttctggaactgcattatctttgggtgattatgctgctgaaggtagaaaaactaaattaaataaatcaaaagttttagatcgtacaaaaaaactaacatctagaaaaaaaggcgacattggtttttctgtcacaagaggcggtgaaattgcaggtgagcacacagtaagttttataggatcaaatgacagaatagatttggtgcataaggctaataacagatcaatttttgtaacaggcgctattgatgctgcagtatttgtatcaaagaaaaaaatgggatttttttctatgaatgatttgatttctttaaaataa

SEQ ID NO: 217503 - DNA, 757 bp, Unknown
  Bacterial polypeptide expressing nucleotide sequence isolated from the Sargasso Sea
aatgattgataatattaaaaaaattgcaatatctggtggtaatggaaaaatgggtaatcttctatcagaacatattaaaagtaaagactcgtttcaagtttctggaatatatgatcctattgcagaaagtaaagaatataaaaattttaaggatattaaagaagtagaagcagattatctttttgaattttctccatcaaacaaaataaatgaaaatatagagattttatgcaaggaacaagtaaattttggaataataattggctcatcaggcatatctgaagaaagtatagaaaagttaaaaggcttgggggagaggttactagttgttgtaattcctaatttttcaattggagcaagttatcagaaacttatgtcagttattttatctgatgtatttgtaaataaaaatataattgagaaacaccattctcaaaagaaagatgcaccttcgggtacagcaattgatttagctaataatataaattcaaaaaataatgaaattaacgagcaaaagtctgaaaacataataaatgtgattaataatataaaaatagaatcaatacgatctgatgaatttttagctgaacaaattgtaaatatgtctaatgaatatgaaatatttaatacagagcatatagttcatgatagaaaagcgtatctatctggaattaatttagttttagattctcttgaagatttagatggatattattttggcttagagagcatattaaagaacaggtttaaaatataa

SEQ ID NO: 217504 - DNA, 502 bp, Unknown
  Bacterial polypeptide expressing nucleotide sequence isolated from the Sargasso Sea
tttcaaaaagaagaaattgagagtttaaagaaagctggaaatcacgctgttctagttcaatcgggcaatatgagcctaggcataaatatactatctcaaatgactgaaaagattgctagagcattatcagattttgatattgaaattactgaaatacatcataatcaaaaactagatgcaccatccggaacagcattattacttggagagtcagcggcaaaaggaagatcattaaatttaaacgataatgctgtttatgaaagacatgggaataccggtcgcagagacaaaaataccatcggcttctcatcaatcaggggcggaagtattgttggtgagcactctgttatatttgccggtgacagtgaggtgataaccttatctcattcagcgttaagtcggaaaatatttgtaaaaggggcaatgttagctgcaagatggtcgctcggcaaggatcctggttattacagtatggatgatgttctaaatatagaaaaatagg

SEQ ID NO: 217505 - DNA, 707 bp, Unknown
  Bacterial polypeptide expressing nucleotide sequence isolated from the Sargasso Sea
tgggtcgtccctactgggggctgacgccggaacccttgcgggccttcctgagccgctgggtgttgccatcactgaggacccgctgccgctcgttgcggaagcagatgcgattatcgacttcaccgtaccagcggcgacggttgaatatgccgctcttgccgctcaggcgcggatcgttcatgtgattgccacaacgggctttgacgcagagcaggaagcgcagattgaagcggccgcgcgccacgcgaccgtcatcaaggctggcaatatgagccttggggtcaatctgctgacagcgctcactcggaaagtcgccgagacactggatgcggattgggatattgaaattctggagatgcaccatcggcacaagattgatgcgccctctggcaccgctttgatgctcggccgggcggccgcagatggccggggcatcgatcatgacgtggtggcagaccggagccgcgatggcattaccggcgaacgcacacctggcgatataggctatgcggtgttgcgtggcgggtctgttattggtgaacattccactatctttgccgctgagaatgagcgcattgttctttcgcatattgcagaggatcgggggctgtttgcccgcggcgctctggcggcagcccgctggggacagggtaaaggccccggtctcttttcaatgcttgatgtactcgggctctctgatttctaac

SEQ ID NO: 217506 - DNA, 748 bp, Unknown
  Bacterial polypeptide expressing nucleotide sequence isolated from the Sargasso Sea
atggcaaaaattaaagtaggtattgctggctgtttaggacgaatgggtcaagagcttatcaaacaaatattgattgataaaaaatttatatttataggcggctttgaacataaagctcatcccaaaattggaaaaaaaattagcgatgttactgacattaattcaagcagcctaataacaagtaatgcattatcaatttttaaaaaagctaatgttgtaatagattttaccacacctcaatcaacattatctaatgttaaaattgcaagtaccactaagacagcattggtaataggaacaacgggtattactaatgcacaaaaagttaaaattaaaaatttttcaaaaaagattccaatccttatgtcatccaatatgagtgtcggtgtaaatcttttatttgatttagtaaggcaggccgcatcttctcttcatgccgatgagtatgatattgaaattgctgaaacacatcataaacacaaagttgatgctccatctggcactgctctttcacttggagaatatgctgcggctggtcgcaaaactaaactagataaaactaaagtactagaccgaacaaaaagtttaaagaaaagaaaaagtggagatataggattttctgttactagaggtggcgagatagctggtgagcacaccgttagctttattagtaaggacgacagaatagatttatatcacaaagcaaataacagatctatttttgtaagcggagccttaaaagctgcag

SEQ ID NO: 217507 - DNA, 752 bp, Unknown
  Bacterial polypeptide expressing nucleotide sequence isolated from the Sargasso Sea
aatgaaaaatcaattaaagcttaccgttctaggagcctctggtaggatgggatcaacaataatcgaggaagtattgaaatcaagtgaaataaagttacattcggtttcagaagtaacacaacatcaatggattggtagagatttaggagatattctaaatggaaaaaaaactggtgtttttgttacagacgatttgtctgaagcaataaaaggttctgacgcagtaattgatttcactcaaccaaacaatacagttgagtgttcaaagctgtgctctcatcgtggggtggctcatattataggaaccactggtttcaacaaaaatcaagaaaatgagatactggatgcttcaaaaaaaacagcaatagtgaaagcaggaaatatgagcttaggaataaatttgcttaccactttgatagaaagagttgcagcctcactagatgcagattttgatgtagaaatattagatattcatcatagaaacaaattggacgccccttcaggcactgctttgatgttaggcgagtcggtagcaaaaggacgcggagaaaagttaactgaagtaatgttacctattagagaaggtataactagtgtaagagaaagaggaaaaattggttttgctgcattaagatcaggaggggtaattggagagcacgaagtaatctttgcttcagagacagaaaaaatttctattaaacatgaagctctatcaagaaatatttttgctaatggagccctcaaagcagcca

SEQ ID NO: 217508 - DNA, 526 bp, Unknown
  Bacterial polypeptide expressing nucleotide sequence isolated from the Sargasso Sea
atgactataaaagttggagtacttggtgcatcaggacgcatgggttcagaggtgtgtagagctgtcatcgatgaccttgatacttctctggtatcagcgatagatgagatgaatgttggcgaaaacgtagctggttctgatgtgagcattaccgatgatttttcggcgctggaagatgctgacgtaatagtagatttcactgttgctgattcggctcgggagaatctgcaacgtgtggcgaaagcagggattcatgccgtagtaggaactacaggattaacggaatcagacatagcaacattagacagcctgtttcaagatagcaattgtgtcgtagcttcaaattttgctatcagtgccgttttgatgatgcgctttgcggagatggcggccccacatttcaataacgttgaaatcatcgagtatcaccacaactcaaagattgacgctccatcaggcacagcgctaacaacagctgagcgaataagtgcatcatcttccgaatgggataaaagctctacaagta

SEQ ID NO: 217509 - DNA, 733 bp, Unknown
  Bacterial polypeptide expressing nucleotide sequence isolated from the Sargasso Sea
aatgatcaaaaattccaaaaaaactatacctgtacttgtttctggtgcattaggcaaaatgggaagtgaggttgttaattccgtcctaaattcttcagattgtgaacttgttgcagcaattgatacaaataaaaaaaataatggtgaaaacatttcacaattgttaaatcttaaaaaaagtgaagtttttgtctcaaatgatcttgaggggtctttatgttcaataagtcaagattatcgaaatgagaaaattaagccagtattagttgactttactcatcctgattctgtttatgaaaatacaagatctgcaattgcttatggtatatcgccagttgtagggactacaggccttacaccctctcaaataaatgatttggctatttttgctcaaaaagcaaacataggttgtgcaataattccaaatttttctgtaggaatggttcttcttcaacaagctgcttctgtagcagcaaagttttacgataatattgaattaatagaaatgcatcacaatcaaaaagcagattctcctagtggaacttgtattaaaactgctgaaatgattgaagaatatccaaaaaaatataatcagagcttagttaaggaaactgaatcattaaaaggagtaagaggaggtcttagagattcaggcctaaatattcattcaataaagatagcctgggcttttggctcatcaagtagttattatgggttctcctggagaaactta

SEQ ID NO: 217510 - DNA, 778 bp, Unknown
  Bacterial polypeptide expressing nucleotide sequence isolated from the Sargasso Sea
atgaaaaaaattaatttagctatttcgggatgtatgggaaggatgggtcaacagcttataaaatcctcaaaaagtaataaaaattttaaattagttgcactgacagaaaatagattaataaataaaaaatttaatggaattaaacctgaattaaattctgataaagcctttaaaaaaactgatgtaattattgatttcacattacctaagtgtacgcttgaaatacttaaaatagcctcgaaattgaggaaaaaagtagtaattggtacaactggatttactagagcccaagaaaatcaaattgaaaaatattcaaaaaaaatagcaattttaaaagctggcaacatgagtttaggcgtaaatttattaatgtatttaactgaaattgcctcaaaatcacttagtgatgaatacttgagcaaaatatttgaagtgcaccacaaacataaaaaagattatccgtccggtactgcgttaatgcttggtaaaggaattgcagatggaaagaataagaatttatataatttgattggtaaaaaattcttaaataaaaaatcttttccatatgggcgcaaaataaattttaactcgattagaaaaggtgaaataattggtgagcatgaagtaaaattttcaagcggaaaagaaataattacattaaaccatgaggcttttgatcgagcgctatattctgatggagctttaactgcatctaaatggttaataaaaaaaaaaccaggtttgtattctatgagagatttgcttaacttttcataat

SEQ ID NO: 217511 - DNA, 736 bp, Unknown
  Bacterial polypeptide expressing nucleotide sequence isolated from the Sargasso Sea
taacaataagttagaatttgttggtggttttgagcacaaaaaacataaaaatataaataaagaatttaataaagtctctgagattcaatcttcaaacttaattcactcaaatccaactccttctattaaacttgcaaatgttttaattgattttacaacacctcaatctacgttggagaatataaaaattgcttctttaaataaaactgctgtagtgataggtacaactggcatctctggtgctcagaaaaataaaattaaaattttatcaaaaaaaatacctatacttatgtcttcaaatatgagtcttggagtaaatttactttttaatcttgtaaaacaaacctcttcagcattaaaagaaactgattatgacattgagatagctgaaacacaccataagcataaaaaagatgctccttcaggaacagccctgtctcttggagattatgcagctcttggtagaaaaacttcattaaataaatcaaaaattttagaccgcactaaaaaattaagctcaagaaaaaaaggtgatattggtttttctgtaactagaggtggagagattgccggagaacatacagttagttttattggagaaaacgatagggttgacttagttcataaagcaaacaacagatcaatctttgtaaaaggtgctcttgatgccgctatatttcttagtaaaaagaaatcaggattttatacaatgaatgatttattatttaataaataa

SEQ ID NO: 217512 - DNA, 419 bp, Unknown
  Bacterial polypeptide expressing nucleotide sequence isolated from the Sargasso Sea
agtaggtatggttcttcttcagcaggcggcatctgtagcggcaaggttttatgacaatattgaattaatagagatgcatcataatcaaaaggctgattctcctagtgggacgtgtataaaaactgcagaaatgattgaagaatatccaaagaaattcaatcaaaatttagtaaaagagtctgagtcattgaaaggtgtaaggggtgggctcagagattctggaattaatgtacattctgtacgattaccaggattactcgctcatcagttagtgattatgggttctccaggagaaacttacacaattaagcatgacactattgatagaaaggcatatatgcctggagttttacaggctataaaaaaaattggtaattatgaaactttagtttacggacttgaaaaattgattttttaaa

SEQ ID NO: 217513 - DNA, 640 bp, Unknown
  Bacterial polypeptide expressing nucleotide sequence isolated from the Sargasso Sea
tgtaaggttgacctaaattcagaagcattatttaagaaagtagacctaattattgattttacaatacctaaatgtacttttcaggttttaaaaattgcttctaaattaaaaaaaaaagtagttatcggaactaccggctttacaaaaaaagaggaaaatttaattaaaaaattttcaaaaaaaataccaatattaaaagcaggaaatatgagcttaggtattaatcttttaatgtatttaaccgaaattacttcaagttcattaggcaggaattttttaagtaaaatttttgagattcaccataagcacaaaaaagattatccctcaggaactgcattaatgttgggtaaaggaatagcattaggaaaaaataaaaatttttacaatttgttgggaaaaaagtatttaaataaaaaaacttttccatatggtaaaaagataaattttaattctgttaggaaaggtgagattattggtgaacatgaagttaaattttcaagtggcaaagaaataattactttaaatcatgaagcctttgatagagctctttactctgagggtgccttaacagcagcaaaatggctcataaataaaaaaccaggtctttattcaatgagaaatttgatgaatttcaagtaat

SEQ ID NO: 217514 - DNA, 655 bp, Unknown
  Bacterial polypeptide expressing nucleotide sequence isolated from the Sargasso Sea
aaaaaaaataaatggtgttgatttaagtttaaatagtgaaaaatctttaaaaaaagccgatttaataatagattttacaacaccaaaatgcacttttgaaattctaaaaatttcagcaaaattaaaaaaaaggattgttataggcacgactggatttacaaaaaaagaagaaaatttaataaaaacattttccagaaaaataccaattttgaaagcggggaatatgagcttaggaataaatttattaatgtacttaactgaaattacttcaaaatctctaggaaataattttctaagcaaagtttttgaaatacatcacaaacataagaaagatcatccatccggaacagctttgatgcttggaaaaggaatagctgttggtaagaaaaaagacttttataaattaatgggaaaaacatatttaaataaaaaatcatttccttatggaaaaaaaattaattttaattcattaagaaaaggggaaattattggagaacatgaagtatccttttcaagtggtaaagaaattattactttaaatcatgaggcatttgatagagcactttattctgaaggggctctcgcagccgcaaaatggttaagaaataagaagccaggtctttattcaatgagagatcttttgaactttaattaa

SEQ ID NO: 217515 - DNA, 630 bp, Unknown
  Bacterial polypeptide expressing nucleotide sequence isolated from the Sargasso Sea
tcacggataatgccgaagacctgtttacccgcgcggacgccgttattgattttactgcacttgatgctaccgcgcagcatgcggcactcgccgcagagcatggcgttatcctgattgccgccacgtcaggccttagcccagatcatgaggcagcccttgccacagctggcgagaaaacacctgtcgtttacgccgcaaacacagccgtcggcgttaatatgttgatcgcacttgtccaagaagccgcagcccgccttggcggcgctgattgggatgcagaggtcatcgacattcaccaccgccataaagtcgacgccccatcgggcacatcctacgcccttgccagcgctattaaagaaggacgcgatgatcctgatgcgacgctcaccttcgaacgccaaggccatacaggccagcgcgaagacgggtcaattggcttttccgtgcaacgcggcggcgatgacacaatcgaaaatacagtcactttctttggcaatggcgagcgcctagagcttacccaccgcgcgacgaaccgcgcaatctttgccaagggcgccattcgcgccgcgctttgggcaaaggataaacctcctgccttgtattccatgcgcgacgttctagatatttaaa

SEQ ID NO: 217516 - DNA, 778 bp, Unknown
  Bacterial polypeptide expressing nucleotide sequence isolated from the Sargasso Sea
aatgattaatgttagtgttaatggagcattaggaagaatgggatctacagtttgtggagctgttttagctgatccagaaactgatcttgtggattcagtagactataattctaaagggaatcaaacatcaaataataaaactattcattctagctatgagtacttatcctcagaaaacaaaccagatgtgatcgttgattttacaaaccgagatggattgctagatttagcaaaaaaagcatctcctcttggtatacacattgttagtggatcaacaggtttgttggataaagattaccaagtattgaaaaacttagctgataaaaattcttctggaatcttgtctgcatcaaattttgcaattggagcagtactaatgatggaacttgcatcgattgctggaaaatattttgagtatgcagatttagttgagagtcatcatgaaaataaaattgatgctccttctggaacagctatatcaattgctgaggctgctgcctcaaaaagacaaaatgatttcaagcaaaacgaagttgaaaaagagactataaaaaatactagaggaggatctctaggaggtgttcaaatccactctgctcgtatgccaggcagagttgctagacatgaattagtttttggaggtttaggccaaacatttaccatgctacatgattctattgaccgacaatcatttatgccaggagttatacttggtatcaaagaaattttaagtcgcaaagaattggtagttgggttagataaaataatgggtatttaa

SEQ ID NO: 217517 - DNA, 490 bp, Unknown
  Bacterial polypeptide expressing nucleotide sequence isolated from the Sargasso Sea
tccagagcagctgcaagagctcgccagctttgcggcgaaggcctcgatggggggggctgtgatccccaatttctcggtgggcatggtgctgctgcagcaggctgccgccgctgctgcccgcttctatgaccatgccgagctggtggaattgcatcacaaccgcaaagccgatgcccccagcggcacctgcatcaaaaccgccgagctgatggaggagctgggcaaacagttcaatgcccaagaggtggaggagcacgaaaccctcgagggcagccgaggggggctgcgccccggtggcctcaggctgcattcgattcgtctgcccggtttggtggctcaccaggaagttcaattcggcggggccggcgagcgctacgtgctgcgccatgacacctttgatcgagcggcctacatgcccggcgtgctgctgaccgtgcgcaaggtgcgtcagctcggcgctctggtgtacggcttggagcgcctgctgtaa

SEQ ID NO: 217518 - DNA, 736 bp, Unknown
  Bacterial polypeptide expressing nucleotide sequence isolated from the Sargasso Sea
aatgggccaacagctcattaaatctgctattaaagataagtctattaatttagtcacgcttactgaaaatagagcaattaatagaaagattagtggaattaaaccagaattaaatactgaaaaagccttaagcaaagcaaatgttataatagatttcactataccagaatgtacattcgaagttttaaaaatagccacaaaactaaagaagaaagtagtaattggcacaacaggttttacaaaaaaagaagaaaatttaataaagaaattttctaaaaaaattccaattttgaaagcaggaaatatgagtctaggtattaatttgcttatgtacttgacagaaattacatctgcatcactaggaaataattaccaaagtaaagtatttgaaattcatcacaaacataaaaaagatcatccatcaggtacagctttgatgcttggaaaaggaattgctgtaggaaaaaataaagacttttataaaatgataggaaaaaaatatttaaacaagaaatattttccttatggaaaaaaaattaattttaattctataagaaaaggtgaaattattggtgaacatgaagttactttttcaagtggaaaagaaataattaaactaaaccacgaagcttttgatagagctttatattcagatggagcaataactgctgctaaatggttaattaataaaaaacctggactttattcaatgagaaatcttcttaattttaaatga

SEQ ID NO: 217519 - DNA, 590 bp, Unknown
  Bacterial polypeptide expressing nucleotide sequence isolated from the Sargasso Sea
tatcgactttacaactcctcaatcgacattatcaaatgttaaaattgccggcaatacaaaaacagctttagttattggcacaacaggtattactaaagcgcaaaaaaataaaattaaaagtttttcaaaaaaaacccccatccttatgtcatctaatatgagtatcggagtaaaccttttatttgatttagtaaaacaagcagcttcctctcttgggggaaatgaatacgatattgaaattgcagaaacacatcataaacacaaagtggacgccccttcaggtacagcactttctttgggagaatatgccgcaaagggtcgtaaaacttcattagacaaatccaaggttctggatcgcactaaaaatctcaagaaaagaaaaaatggggatattggtttttctgttacaagaggtggcgagatagccggtgagcatacagttagttttattagtaaagatgatagagttgatcttattcataaagcaaacaacagatcaatttttgtctccggagcattaaaagcagcgatatttgtttcaaaaaggaagtctggttattttgaaatgaaagatttgcttaaaatttaaa

SEQ ID NO: 217520 - DNA, 676 bp, Unknown
  Bacterial polypeptide expressing nucleotide sequence isolated from the Sargasso Sea
aatgaaaaatcattttaaggtgagtgttttaggtgcttcagggcgtatgggatcccaaataataaagagagttaatgaatctcctaacattgatctacactgtgtagttgagcataaaggccacaattggataggacaagattgtggggaaaagctactaggcaaagagaacaatatcatcgtaaccgatgatttaaatttggctgtaagctctgctgatgctgtcatcgattttagtacacctgataactcgttggagtgtcttaaaatttgcacacacaccaacacagctcatataattggaacaactggttttgacgcaagccaagaaaataatattaaggggtatgcagaaaaggtggttgttgtaaaggctggaaatatgagcttaggaataaatatattaactagtttagttgaaaaaatttcatcttctctagactctgattttgatacagaaattttggaaatgcaccataggaacaaagttgatgctccatctggaaccgccttgatgctgggtgaagcagcagcaaagggcaaagggaaaagcctatcagagttaagaggagccatacgtgaaggcaaatttggtattcgagataaaggttcaataggttttgcctctctccgaggtggtggcattgtaggtgagcatgaagttcttttacatcag

SEQ ID NO: 217521 - DNA, 808 bp, Unknown
  Bacterial polypeptide expressing nucleotide sequence isolated from the Sargasso Sea
gatggtaaaaattggtgtcgccggagtcggcggtcgaatggggataatgatcctgaaagaaatcgaaaaccgatctgacacagttatagcctccgggctggtaaggtcaggcagtagcttagtaggaagcgacctcggcacaatcgcgttgctcgcaagtgttggcgtggccgcgaccgacaacgcaaagcaatgtttcgctgatgcagatgtggtgattgatttctcgctcccggaggcgatagaagagattgcggaggccgctatcgacgcgaaaaagccttgggtcgttggaactaccggacttgatgaaaagcaagaggcgattttacgtgctgcaagtcataaggttccggtagtgtttgcgtccaatatgagtttgggagtgaacttgctttttgcattagttgagcaagtggcaggctcacttgatgataattacgatatagagatccttgattttcaccataataataaagtcgatgcacctagtggtaccgctattagtcttggagaagccgccgccacaggacgagggataaattttaagtcaagtgctaccctttctagagaaggtctggtgggggcacgaggaagaggagagataggtttctccgcactacggggtggcgcggttgtaggagagcatgctgtactgttcgccagtgcgggagagcgtattgaactacatcataaggcaagtgaccgcggtatatacgcagcgggtgctgtaaccgcaagtctttgggtaagaaataagtcaccagggctttattcaatgaaaaacgttttgggaataaaaagctaa

SEQ ID NO: 217522 - DNA, 664 bp, Unknown
  Bacterial polypeptide expressing nucleotide sequence isolated from the Sargasso Sea
atgcctaaagttaaaattgcagttgctggatgtttaggtcgaatgggccaagaattatcgaagcaaattcttaataataagaaacttgaatttgttggagggtttgagcacaaaaaacataaacatgtaaataaagaatttaaaaaggtatctgatattaattcttcaaaaataattgattctgatcctgccctatcaattaagttagcaaaagtattaattgattttactactcctcaagcaactttagagaatataaggattgcatcgcaaaacaaaactgctgttattattggcacaacaggaatgacagaagctcaaaaaaagaaagttaaaagttttacaaaaaagattccaatacttatgtcctcaaatatgagtcttggtgttaatcttctttttaatttagtacagcaaacttctaatgctttaaaagacatagattatgatattgagatagccgaaacacatcataaacataaaaaagatgcaccttcaggaactgctttatctcttggagaatatgctgcagagggaagaaaaattgcattaaataaatcaaaagttttagatcgaaccaaaaaactaatgactagaaaaaaaggcgatattggtttttcggttacaagaggtggagagattgctggggaacacactgttagtt

SEQ ID NO: 217523 - DNA, 661 bp, Unknown
  Bacterial polypeptide expressing nucleotide sequence isolated from the Sargasso Sea
atgattgaaaattctaaaaaacctataccagtacttgtatccggagctttaggcaggatgggaagcgaagttgttaagactgtattaaattctacagattgtgaacttgttgcagcaattgacataaacgaaaagaacaatgggtcaaatatttctgaattattaaaagtaaaaaattgtgatgtttttgtctcaaacgattttgagggaactttatgttctgttagtcaaaattacagaaatgaaagaattaaacctgttttagttgattttactcatcctaattctgtttacgaaaatactagatcagctatcgcatatggggtcttaccagtcgttggaactacaggtcttactccttcgcaaataaaagatttgtctgtttttgcacagaaagcatctattggttgtgcgataattccaaatttttcagttggtatggttctccttcaacaggcagcatctgtggctgcaaaattttatgacaatattgaattaatcgagatgcatcataatcaaaaagcagattctcctagtggaacctgtataaaaactgcagaaatgattgaagaatatcctaagaaatttaataagaatatagttaaagagagtgagtcattgaagggtgtgcgaggaggactcagagattcaggaataaata

SEQ ID NO: 217524 - DNA, 625 bp, Unknown
  Bacterial polypeptide expressing nucleotide sequence isolated from the Sargasso Sea
tttaaatgagattattagcaaagaacaaccagatgttgtgttagactttacgcatccaagtgtggttttttccaatgctaaactaattttaacagccggtaaacatgctgttattggtaccactggattaacagaagttcaattaacagagctttcacaaatagcggagcaaaataattcagggttattggtttgtccaaattttgccattggtgctattttgatgatgcagtttgcaactcaagcagccaaatatttaaaagaggttgaaattattgagtatcatcatccatataaggcggatgctccatctggaactgccattaaaacggttgatatgattacagatcaagtcaatgatattaattctgctttttcagatttaaagcaaaccgaacatatttctggttcaaagggtgggtattataaaaatatcccgattcattcagttcgattagatagttatattgcatcgcaagaggtattaattggtgggccgggtcagcgcttaaccattcgtcatgatagtattgaccgaatgagttttatgcctggtgtttgtttagcaattaaaaaatcaatggatgttactggtttagtgtatggtttggaaaacgtgctttaa

SEQ ID NO: 217525 - DNA, 564 bp, Unknown
  Bacterial polypeptide expressing nucleotide sequence isolated from the Sargasso Sea
ctgtatatgaaaatactagagcatctatcgcatatggtgtatcaccagttgtaggaactacaggtctaagcccttcgcaaatacaagatttgtctgtttttgctcagaaagcatcggtaggttgtgcaataattcctaatttttcagtaggtatggttcttcttcagcaggcggcatcggtagctgcaaggttttatgacaatattgaattaatagagatgcatcacaatcaaaaagctgattcacctagtgggacgtgtataaaaactgcagaaatgattgaagaatatccaaagaaatttaatcagaatttagtaaaagaatctgagtcattgaaaggtgtacggggtgggctcagagattcaggaattaatatacattcagtgcgattaccaggattactcgctcatcagttagtaattatgggatctccaggtgaaacttacacaattaagcatgacactattgatagaaaggcatatatgtcaggagttttgcaggctattaaaaaaatcggtaattatgaaactttagtttacgggcttgaaaaattgattttttaaa

SEQ ID NO: 217526 - DNA, 432 bp, Unknown
  Bacterial polypeptide expressing nucleotide sequence isolated from the Sargasso Sea
ccggggtcaacctgctcttttatctgacgcaacaagccgcccgtgttcttgatgcccagtccgggtttgatcccgaagtcatcgagatgcatcatcgatcaaagaaggatgcgcccagtggcaccgcggaccgcctgctcgagatcctaaaggactccaggaagcttgggccagacgacgtttcgcacggacgttccggaatggtcggcgaacgaaaggatgacgaaatcggatcccacgccctgcgaggcggtgacgtagtaggcgagcatacggtcatgttcgccgggctcggcgagcgtatcgagcttacccaccgtgcgaccgaccggacgatttttgccgccggcgcattgaaggccgccagatgggcagtgaatcaggctccggggctctattcgatgcaggacgttcttggtcttcaggcctgag

SEQ ID NO: 217527 - DNA, 769 bp, Unknown
  Bacterial polypeptide expressing nucleotide sequence isolated from the Sargasso Sea
aattaatttagcgatttctggttgcatgggtaggatgggccagcaattaattaaatcttcaaagaaaaataaaaattttaaactagttacacttactgaaaatagattaataaataaaaaatttaatggagttaaacctgaattaaattctgaaaaagcctttaaaaaaactgatctaattattgattttacagttccaaattgtacccttgaaatactcaaaatagcatcaaaactaagaaaaaaagtagtaattggtactacagggtttactaggagccaagaaagccaaattaaaaaatattcgaaaaagatacctattttaaaagctggtaatatgagcttgggtgtaaatttattgatgtatttaactgagattacttcaaaatcacttaatgatgaatacttaagtaaaatatttgaaatacatcacaaacataaaaaagactatccatctggtactgctttaatgctaggtaaaggaatagcagatgggaaaaataaaaatttatataatttaattggtaagaaattcttaaataagaaatcatttccttatgggaaaaagattaattttaactcaattagaagaggtgaaataattggagaacacgaagtgaaattctcaagtggaaaagaaataattacattaaaccatgaggcttttgatagagcactttactcggatggagcattaactgcttctaaatggttaatgaaaaaaaaaccaggtttatattctatgagagatctgcttagcttttcataa

SEQ ID NO: 217528 - DNA, 559 bp, Unknown
  Bacterial polypeptide expressing nucleotide sequence isolated from the Sargasso Sea
atggtaaaaattaaaattgcagtagctggttgccttggccgtatgggacaggaaatttctaaaaaaattattagcaataaaaagcttgaatttattggaggctttgaacacaaaaaacataagcatattaaaaaagaatttaaaaaagtatcagaaataaattctacgaaattaattgattctaatccaattttatcaattaaattagcaaatgttttaatcgattttacaaccccagaatcaactttgcagaatataaaaattgcatcacaaaataaaacagctgtgatagttggtacgacagggataacagaaactcaaaaaaagaaaattattagttattcaaaaaaaataccaatactaatgtcttcaaatatgagtattggagttaaccttctttttaatttagttagacaaactgcagccacactagaagatattgattatgatattgaaatagcagaaacgcatcataagcataaaaaagatgcgccctcaggtacagctttatcccttggagaacatgctgcgaagggcaggaaagttttattaaataaat

SEQ ID NO: 217529 - DNA, 560 bp, Unknown
  Bacterial polypeptide expressing nucleotide sequence isolated from the Sargasso Sea
tctggccctagcacgggtttgctccgaaaagggcaatgccatggtggttggtacgacaggattcgacgatcaacaaaccaatgccctggaggggtactctcgaaaaacagccatattcgtttcacctaacatgagcgttggggtgagcttatcaatgaagctgattgaaattgcggcaaaggccttgggcgatgagtttgatgtagaagtcattgaggcccaccacaagcacaagattgatgcaccctctggcactgcggtgaggatcggcgaggtgcttgccacagcgctgaaccgaagcctggcgagcgatgcggtctatcataggcagggcattactggggcacgagacccgaaagctatcggcttttcgaccatccgcggcggcgacatcgttggcgaacacacggttttatttgcaggggagggagagcgattagaaatcacccatcgcgccacaagccgcaacaatttcgcccaaggtgcgctgcgcgcagtggcactggttgccaatgccgcaccgggctggtacgacatggatgatttgttggatatctagt

SEQ ID NO: 217530 - DNA, 724 bp, Unknown
  Bacterial polypeptide expressing nucleotide sequence isolated from the Sargasso Sea
tcgcagattattgtttgtaggaggttttgaacatcaatcacacaagaatttaaataaaaaactcaatcaaattacaaatattaaatctaatcttattgttacaagtaattctaatgaaattattaagaaatcagacgtattgatcgattttacctctgcagtttcaactatagacaatgttaaaaaagctgctttaaataaaacagctattgttataggaacaacaggacttactgaatcacaaaaaaataaaataaaaacctattcaaaaaaaactcccattcttatgtcttcaaatatgagtttaggagtcaatttattatttaatcttgtagagcaggctgcgtcaactttgaaacatgaagattatgatatcgaaattgccgaaactcaccataagcataaaaaagatgcaccttctggtacagctatttctttgggtgaatatgcagctattgggagaaaaacaaaactgaaaaaaatacaagtttttgatcgaacaaaaaaaactactgtaagaaaaaaaggtgaaattggtttttctgttactaggggtggagaaattgctggcgaacatactgttagttttattggacaaaatgatagactagacctttttcataaagcaagtaacagatctatttttgttagtggcgcaattgaagctgcaatttttatatcaaaaaagaaaactggtttttttaatatgaaagatcttttttag

SEQ ID NO: 217531 - DNA, 589 bp, Unknown
  Bacterial polypeptide expressing nucleotide sequence isolated from the Sargasso Sea
atgtctcaattgaatattggagtttctggttgctcaggaaaaatggggaaaactctaattgagctaatttcaaatcgtcaagattgtaatatcgttagcggtctagagacagaaaaaaacccagatataggaaaagatttaggaaagcttattggctcagaaaacattaatggaaaagttacatttgatagaaaaatattttttgaaaactccgatattatcatcgactttagcacacctttgtcaacacttgaaaatataaaattcgcaaaaaaatatggaaaaggtttggtagttggaacaacgggactgagtgaagaaattgaacaagagatagaaactgcaacgaaaaatattcctatagtttattcagcaaatatgagtatagggataaatatacttttagagttaactaataaattatcttatattctgaataaggaagatttcgatattgagattcttgaaatgcaccacaaacataaagttgatgcaccatcaggaacagcattggctttaggaaaagcagctgcaagtggaagaaaaattgagctatcaaaaaatagcgagatagttcgtgacggtataa

SEQ ID NO: 217532 - DNA, 637 bp, Unknown
  Bacterial polypeptide expressing nucleotide sequence isolated from the Sargasso Sea
caaaccagaattaaatgatgaaaatgcttttaaaaaagcaaatatcataatcgattttacagtaccaaattgcactttccaagttttgaaaatagcatcgaaactaaaaaaaaaagtagttataggcactaccggatttacaaaaaaagaagaggagttaataaaaaaatactctagaaaaataccaattttaaaggcaggaaatatgagtctagggattaatcttttaatgtatcttactgaaatcgcttcaagttcattgggaaataatttcttaagtaaagtttatgaagtacaccacaaacacaaaaaagatcatccatcaggtactgccttaatgctgggtaaaggtatagcagttggtaaaaagaaagatttttataaaataattggcaataaatatttcaacaagaaaacatttccttacgcgaaaaaaattaactttaattcaataagaaagggtgagactgttggggaacacgaggtaaagttttcaagtggtaaagagatcataacacttaatcacgaggcatttgatagagcgttgtattctgaaggggctttaacagctgctaaatggcttatgtctaaaaagccgggactttactcgatgaggaatgttttaaattttaaatga

SEQ ID NO: 217533 - DNA, 804 bp, Unknown
  Bacterial polypeptide expressing nucleotide sequence isolated from the Sargasso Sea
aaagaattaacattggccttcccggtggtggtgggcgtatgggaggcatgctaatccgtgaaatcgcgcgggcagatgatttgcatcttgttgcaacaacagaccgggcagatagtttacatattggaaaagacgcgggtgaagtggccggtcttgcattaaatggtgtgttaatcggcattgatccggcaagcttatttttagaggcggatgtagtgattgatttcagcgcgcctgatgcaagcatgcatcatgcggcgctggcggccaaaaccggcagggcaatggtgattggcaccactggcctaacgtcagaccaagaagatatgctgcgtcaagctgctaggcaggtggccattgtatattgtgctaatacatcagtcggtgtgacgttactaacacagcttgtcgaacaggtggctgctcaattgacaatcggctgggatattgaaattttggaaacacatcaccatcacaaagtcgatgccccatcgggcaccgcgctgtcacttggtaaagctgccgcccgcgggcggcaggtcgatttagatcgtgttgccgatatggtacgtaaaggccagactggtgcaagaggtgagggtgatatcgggtttgcagtattgcgcggtggtgatgtagcgggcgagcattcggttattttttatggcgagtctgaacgcattgaaatcacccaccgggcaaatgaccgggtaattttcgcgcgcggcgcattgcaggctgccagatttgccgcagcggcggaacctggattttatgacatgcatgacgtgctgaaaggctagg

SEQ ID NO: 217534 - DNA, 532 bp, Unknown
  Bacterial polypeptide expressing nucleotide sequence isolated from the Sargasso Sea
aaaaaaagggtagtgattggtacaacaggatttacaaaaaaagaggagaatttaataaagaagttttctaaaaaaattccaattttaaaagcaggcaatatgagtcttgggattaatctacttatgtacctaacagagattacatcatcatcgcttgatgataattatcaaagtaaagtttttgaagtccatcataaacataagaaagatcatccttctggtacagctttaatgcttggaaaaggaattgctattggaaaaaataaagacttttataaaatgatggggaaaacatacctaaacaaaaaaaagtttccttacggaaaaaaaattaattttaactcaattagaaaaggtgaaattataggtgaacataaagttactttttcaagtggaaaggaaaccataactctaaaccatgaagcttttgatcgagctttatattcagaaggagcaataactgctgccaaatggttaattaataaaaaaccaggcctttactcaatgagaaatcttctgaattttaaataat

SEQ ID NO: 217535 - DNA, 535 bp, Unknown
  Bacterial polypeptide expressing nucleotide sequence isolated from the Sargasso Sea
tggaagtagcccacattattgggcacccacgggattcaatgaaaatcaggaaaatgaaatacttaccttttctaacaaaatccccattgttaaagcaggaaatatgagtctgggtattaacgtattaaccaaattagttgaaaaagttgcaaaatcattagacttagactttgatgtagaaatattagaaatgcatcacagaaataaagtggatgccccatcgggtacagcattaatgcttggagagtcagtagctttgagtcgtggtaaaaaattatctgatttagcttcgtacaataaagaaggtataacaggcattagagaaagaggaaaaattggatttgcatctttgagaggaggaggagtaattggtgagcatgaagtgattttcacctctgagagtgaaaaaatttcaataaagcacgaagctctatcaagaaacatttttgcgaacggagctttaaaagcggctatatgggcagcaggcagagatccgggtctttacggcatgaacgacgtgctggggattaactag

SEQ ID NO: 217536 - DNA, 693 bp, Unknown
  Bacterial polypeptide expressing nucleotide sequence isolated from the Sargasso Sea
gatgtctgaggttcgctccgctgatcccatccacgtggttgttgccggtgctctcggtcggatgggggctgaggttgtcaaggctgtgcaaggagccgcggattgtgaattggtcggtgcaatcgacaacacacctggtcaagagggggtggatgtgggtgaagccctcggcctcggaagtctggacgttgcgatcacggccgatctcgagggctgtctgtgttcggccagtcaggccgttcgtgatcgtggtcctggtggcggtgccgtcatggtggatttcactcacccatcggttgtttatgcgaacaccagggcagcgattgcctatggggtgcatcccgtgatcggtaccaccggtctgtctccggagcagttggaggatctgcagtcctttgcccacaaagcgtccgtagggggcgctgtgattccaaatttttcagtgggcatggtgctgctgcaacaagcggccgccgctgctgcacgcttctatgaccatgcggagctcacggagctgcatcacaaccgcaaggcggatgctccaagtggcacctgcatcaaaacagccgagctcatggaggaactcggcaaagcgtttaacccggctgaagtcgatgagcatgaatcccttgcgggcagtcgtggcggcgtaagagccagtggcttgaggttgcattcccttcggcttcctgg

SEQ ID NO: 217537 - DNA, 748 bp, Unknown
  Bacterial polypeptide expressing nucleotide sequence isolated from the Sargasso Sea
aatgaaaaaaattaaagtaatcgtaacgggtgcttcaggtcgtatgggcacacaaatagcaaaaagaattgttcaagataaatcttttacattatttggagcaaccgagagcgttggtcatcctttaataggaaaagatataggtcaaattttaaaaacaaaaaaaactggtattttaattacagataacattattgaactgtttgcaaaagctgatgcagttattgattttacaattcccaaagcaacattagagcatgcaaaatattctgcacaagcaagaattgttcacgtaattggaacaactggtttcagcaaaaaccagttacgtaaaatagattttgctgcgcagcacgccacaattattaaatctggcaatatgagtttgggaataaatttattagaaagtattgtaaaaattgcttcctcaaaattagatagctcttttgatataaaaataaatgaaactcatcataaacataaaattgatgcaccatcaggaacagcaataatgcttggtaaagctgctgctagtgggaaaaataaaaaattggaaaatgtaatgaagattaatcgcactaatacaattggtaaaaatataaaaaataaaattgtaatgtcgtcttttagaaaaggtgaaaccattggagaccatgaggtaatgttctcatcaaatgatgaaacgattagaattcagcatatagctgaaaataggggcatttttgccaatggtgcgcttcaagctgta

SEQ ID NO: 217538 - DNA, 610 bp, Unknown
  Bacterial polypeptide expressing nucleotide sequence isolated from the Sargasso Sea
aatgaaaaaaataaaaattgtcataactggcgtaaccggacgcatgggaatgcaaatcgctaaaagagttttgaaagataaatcacttgttttgtacggtgcaaccgagagaagcgggcataaagctattggcaaggatttaggtcaattactcaaaacgaaaaaattaaaaattaaagtcacagataatataattccattatttgctaaaactgacgctgttattgacttcacaactcctgaagcaactatcatgcatacaaaatacgcagctcaagcaagaatagtacatataattggcactacaggttttaatagctctcaattaaaaaaaattaaactcgctgcgcagcatgcaacaatcataaagtcaggtaatatgagtttaggtataaacctaataaataaattaattaaaataagttcctcaagtttaaaaaatgattttgacacagtaataaacgaaacgcatcatcgacataaagttgatgcaccttcaggcactgcagtaatgatggggcaagctgcagcagaaggtaaaaataaaaactttgaaaaaaatgaaaaaatctctcgtctaaacataaaggctaaaagtactaaagataag

SEQ ID NO: 217539 - DNA, 778 bp, Unknown
  Bacterial polypeptide expressing nucleotide sequence isolated from the Sargasso Sea
atgaaaaaaattaatttagcaattactggatgtctgggtagaatgggccaacagctcataaaatcatctaaatctaacaaaaattttaaattagtttcattaactgaaaatgtaaaaattaaaaggaaaattaatgggttatatccctctttgaataactcagaggcatttaaaaaagcaaatgtaataattgattttactgtacctaagtgtactttagaggttctaaaaattgcgttaaaattaaaaaaaaaagttgtaatcggaactacgggatttaccaataagcaagaaaagattattaagacttttgcaagaaaaattccagtgctgaaggcagggaatatgagtttaggtgtcaatttattaatgtatctaacagaaattacatctaagtcattaggaaataattttctaagtaaaatttacgaagttcatcataaaaataaaatagattacccgtcaggaacagctttaatgctaggacaaggaatagccacaggcaaaaataaaaatttacgtaatataatgggaaaaaaatatttaaacaaaaagacttttcctttttctaaaaagattaattttaattctattagaaaaagtgctgttataggtgagcatgaggtgaaattttctagtggcaaagaaattataactttaaatcatgaatcttttgatcgctctttatactccgaaggagcactaattgcagcaaagtggcttaatggaaagaaacctgggctttactccatgagagatcttttaaactttaagtgaa

SEQ ID NO: 217540 - DNA, 652 bp, Unknown
  Bacterial polypeptide expressing nucleotide sequence isolated from the Sargasso Sea
aatgaaaaaaattaaagtaatcgtgacgggtgcttcaggccgcatgggcacacaaattctaaaaaggattattcaagataaatcttttgtattatttggagcaactgagagcgttggccatccttctttaggaaaagatataggtcaaattttaaaaacaaaaaaaaccggcattttaataacagataatattattgaactgtttgcgaaagctgatgcagttattgattttacagttccaacagcaacattggagtatgcaaaatattctgcgcaggcaagaattgttcatgtaattggaacaactgggttcagcaaaagtcagttacgtaaaatagattttgctgcgcagcacgccacaattattaaatctggcaacatgagtttaggtgtaaatttattagaaagtattgtaaaaattacttcctccaaattagatagctcttttaatttaaaaataaatgaaactcaccataaacataaaattgatgcaccttcaggaacggcaataatgcttggcaaagctgctgctgctgggaagaataaaaaattggaaaatataatgaaaattaatcgaatcaatacaattggtaaatatttaaaggataaaattgtaatgtcatcctttagaaaaggtgaaatcattgggtga

SEQ ID NO: 217541 - DNA, 636 bp, Unknown
  Bacterial polypeptide expressing nucleotide sequence isolated from the Sargasso Sea
aactccaaatgaattcagaaaatgcgtttaaaaaagctaatataattatagattttacaattccagaatgtactttagaaattctcaaaattgcagttagacaaaagaaaaaggtagttattggaacaacaggctttacaacaaaacaagaaaatttaattaagaaattttcaagaaaaataccaattttaaaggctggtaatatgagcttaggtgtaaatttacttatgtacttaactgaaattgcatccaagtcgctaggtaaaaaatttttaagtaaagtttatgaagttcatcataaacataagaaagattatccatctggtacggcattaatgcttggaaaaggaatagcaaaagggaagggtaaagaattttacagtttgattggaaagaaatatttaaataaaaaattctttccttacggaaataaaataaattttaattcaattagaaaaggtgaagtaattggggagcatgaggttacattttctaatggcaaagaaatagtatcgttaaatcataagtcttttgatagggctctttattctgaaggtgcgcttgcagctgcaaaatggttggcaaataaaaagccgggactttattctatgagaaatcttttgaatttcaaataaa

SEQ ID NO: 217542 - DNA, 777 bp, Unknown
  Bacterial polypeptide expressing nucleotide sequence isolated from the Sargasso Sea
ttggtcgaatgggacaagaaatatcaaaaaaaataattaccaacaataagttagagtttgttggcggttttgagcacaaaaatcataaaaatataaataaagaatttaataaagtatctgagattcgatcttcaaacttaattcactcaaatccaattccttctattaaacttgcaaatgttttaattgattttacaacaccgcaatctactttggagaatataaaaattgcttctttaaataaaactgccgtagtaataggtacaactggcatctcgagtgctcagaaaaataaaattaaaactttttcaaaaaaaatacctatacttatgtcttcaaatatgagccttggagttaatttactttttaatcttgtaaaacaaacctcttcagctttaaaagaaactgattatgacattgagatagctgaaacacatcataagcataaaaaagatgctccttcaggaacagccctgactcttggggattatgcagccctaggtagaaaaacttcattaaataaatcaaaaattttagaccgcactcaaaaactaagttcaagaaaaaaaggcgatatcggtttttctgtaactagaggtggagagattgctggagagcatacagttagttttattggtgaaaacgatagagttgatttagttcataaagcaaacaacagatcaatctttgtaaaaggtgctctcgatgctgctatatttcttagtaaaaagaaatcaggtttttatacaatgaatgatgtattatttaataaataat

SEQ ID NO: 217543 - DNA, 775 bp, Unknown
  Bacterial polypeptide expressing nucleotide sequence isolated from the Sargasso Sea
atgagtaaaattaaacttactattacagggtgtatgggtaaaatggggaaacaactaactaaatcctcaaaaaaagacaaatcttttcaaatagtttctcttacagagagtaggttattaaaaaaaaaaattggaaatgtcatacctcaaataaattcaactgagtcattaaagaatagtgatgtaataatagattttactataccaaaatgtactttagaggttttgaaattagcttcgaaattgaacaaaagattagtcattgggaccacaggttttacaaaaaaacaagatttaataattaaaaatttttcaaaaaaaatacccattttaaaagctggtaatatgagtttaggaattaatttattaatgtatcttacagagataagtgcaagatcattaaacgataaatttaaatataaaattttcgaggttcatcataaacacaaaaaggattatccatctggaacagctttaatgctaggtagtggaattgcaaagggcaaaaggaccaatttatttagtctaattggaaaaaaatttttaaacaaaaaatcttttccctatggtactaaaattaattttaattcgctaagaaaaggaaagataattggagaacatgaagttaaattttcaagtggaaaagaaataattaccttaaatcatgaggcttttgacagaactctttattctgaaggagcgttgttggcagcaaaatggttaatgaaaaaaaaacctggtctttactcaatgcgagatctcctaggtttttaga

SEQ ID NO: 217544 - DNA, 685 bp, Unknown
  Bacterial polypeptide expressing nucleotide sequence isolated from the Sargasso Sea
aatgaaaaaaattaaagtgattgtaacaggtgcttcaggtcgcatgggcacgcaaatagcaaaaagaattgttcaagataaatcttttacattgtttggagcgaccgagagtgttggtcatccttcaataggaaaagatataggtcaaattttaaaaacaaaaaaaactggtattttaattacagataacattattgaactatttgcaaaagctgatgcagttattgattttacagttccaaaagcaacattagagcatgcaaaatattctgcacaagcaagaattgttcacgtaattggaacaactggtttcagcaaaagccagttacgtaaaatagattttgctgcgcagcacgctacaattattaaatctggcaatatgagtttgggaataaatttattagagagtattgtaaaaattgcttcctcaaaattagatagctcttttgatataaaaataaatgaaactcatcataaacataaaattgatgcaccatcaggaacagcaataatgcttggcaaagctgctgctagtgggaaaagtaaaaaattggaaaatataatgaagattaatcgcactaatacaattggtaaaaatataaaaaataaaattgtaatgtcgtcctttagaaaaggtgaaaccattggagaccatgaggtaatattctcatcaaatgagaaacga

SEQ ID NO: 217545 - DNA, 778 bp, Unknown
  Bacterial polypeptide expressing nucleotide sequence isolated from the Sargasso Sea
atgaaaaaaataaacttattagtaacagggtgtatgggtcgtatgggccaacaaataataaagtctgtaaaatcagataaaaggtttaaacttgtggctataactgaaaatagaataataaataaaaagatctatggtatcaaaccaagttttaattctgaaaaaatatttaaagatataaatttaatcatagatttcacagtcccaaaatgtacttttgaagttttgaaaattgcagctaaattaaaaaaaagagtagtcattggcactactggatttactaaaaaagaagaggatttgattaaaaaattctcaaaaaaaattccaattttgaaagctggaaatatgagtttaggcattaatcttttaatgtatctaacagaaataactgctgccactcttggaaaaaattttttaagtaaaatttatgagattcatcataaacataaaaaagattatccatctggaactgcgttaatgttaggcaaaggtatcgcacatggtaaaaataagaatttttataatttaattggaaataaatatttaaataaaaaaaaatttccttatggaaaaaaaataaatttcaattctgttagaagaggtgagattataggtgagcatgaagtaaaattttcaagtggtaaagaaataataactcttaatcatgaggcttttgacagagctttatactctgaaggtgcattatcagctgctaggtggttaattaataaaaagccaggtctttattcaatgagagatcttatgaatttcaaataat

SEQ ID NO: 217546 - DNA, 790 bp, Unknown
  Bacterial polypeptide expressing nucleotide sequence isolated from the Sargasso Sea
agtagcaggatgtcttggacgaatgggacaagagctatcaaaaaaaataattgccaacaataagctagaatttgttggtggctttgaacacaaaaaacataaaaatattaataaaaaatttaataaagtttctgatattcactcttcaaacctaattcactcaaacccaaccccttctattaaactggcaaatgttttaatagattttacaactcctcaatctacgctggagaatataaaaattgcttctttaaataaaacagcagtggttataggcacaactggtattaccagtgctcaggaaaaaaaaattaaaagtttttctaaaaaaatccctatacttatgtcttcaaatatgagtcttggagtaaatttgctatttaatcttgtaaaacaaacatcttcagctttaatagatactgattacgatattgagatagccgagacacatcacaagcataaaaaagatgctccttcaggaacagccctatctcttggtgattatgcagcactaggtaggcaaacctcattaaataaattaaaaattttagaccgtaccaaaaaattaagttcaagaaaaaagggcgatattggcttttctgtaactagaggtggagaaattgccggagagcatactgttagtttcattggtgaaaatgacagaattgacctagttcacaaagcaaacaatagatcaatttttgtaaagggagctcttgatgccgcgatatttcttagcaaaaagaaatcgggcttttatacaatgaatgatcttctattttctaaataa

SEQ ID NO: 217547 - DNA, 777 bp, Unknown
  Bacterial polypeptide expressing nucleotide sequence isolated from the Sargasso Sea
gaaggatgggtagagaaattctaaaacttgtcatgaaaaatgatgagtttcgattgatcggcgctttagaacatgaaaattgcgttgagattggtcaagacgcgatcaagtttattgggcagaattctggaatcacaataaccgataatgcagctagtattagtttcaaaagtcaaaataatttagttttgattgatttttccaatccaaaaaatacaatcaagatgcttgaaatatgtgtatctaaatcaatcgggatggttataggtacaacaggattttcggaaaaggagctcttgcttcttagacacgcttcaaaaactattccaattttgtttgctccaaatatgagtttaggggtcaataaagtttttgctattgtaaaagaagctgttaagcattttagtgacaattatgatgttgagatttttgaagctcatcacagagataaattagatgccccttcaggtactgctttaaagatgggttcgattattgcagatgctttagggttgaaccctgaagattctttttgcttttcgagaaatggtagaaaaacgaatagaggacacggggaaattgggttttctgtggttaggggaggcgacatagttggtcaacacaaggtcatctttgcgggaaatggggaacagattgaaattacccataattcaaactccagaaaaggttatgcattaggagccttagaggccgccaggtttttatcaaaaaaaaataacccgggatttttcgggatggacgatgtaattagttgac

SEQ ID NO: 217548 - DNA, 544 bp, Unknown
  Bacterial polypeptide expressing nucleotide sequence isolated from the Sargasso Sea
ttgaataacatcaaaattttagtaaatggattcaaagggaggatgggcattgaaaccctaaaagccatagaggatgatcctgaactggctttggtgggtcagactgatttgggagatgatcttgaatcggcaatacgacagaccgaagccgacgcggtggtggatttcaccacagcttctgcagcgttttcaaattgtaaagccatcattcaagcatcttctcgaccggtgattggaaccagcggactgcttccgaaacaagtcaaggagctccaggatttagcacttcagaaaaacataggcggaatcattgccccgaattttgccattggtgcagttttaatgatgaaatttgcatctgaggcagccagatttatgccggatgttgaaattttagaactgcatcatgaaaaaaaagcggacgctccatccggaacggcaataaaaaccgcggcattgatcgcagaatcacgtaacagcattcctgaaccaattaaggaaaaagaaatccttaccggtgcccgtggtggaagggctaacgagg

SEQ ID NO: 217549 - DNA, 607 bp, Unknown
  Bacterial polypeptide expressing nucleotide sequence isolated from the Sargasso Sea
taaaaaagcaaatgtaataatagattttactattccaaaatgcaccctagaagtgcttaaaattgcatctaaactaaaaaaaaaagtagttattggaacaactggtttttctaaaaaagaagaaaatttaataaaaaaatattctagaaaaatacctatccttaaagctggcaatatgagccttggaataaacttgttgatgtatttaactgaaattgcttcaaaatcacttggaaataattttttaagtaaagtttttgaagtgcatcatagacataaaaaagatcatccatcaggcacagctttaatgcttggaaaaggtatcgcagttggaaaaaataaagatttttataaattacttggaaaaaaatatttaaataaaaaggcttttccttacagcaaaaaaattaattttaattcaattagaaaaggtgaaatcataggaaatcataaagtccatttttcaagtggaaaagaaaccattaccttagatcatgaagcatttgatagagctctttactctgaaggtgcatttacagcagcaaagtggttgttaaataaaaaacctggtctttattcaatgagaaacgttttgaattttaaataa

SEQ ID NO: 217550 - DNA, 227 bp, Unknown
  Bacterial polypeptide expressing nucleotide sequence isolated from the Sargasso Sea
taaaggctcacgaggcggtactcgtgctagtggtttgagactccattccgtaaggttgcctggtcttgttgcacatcaacaagtcatgtttgggtcaaatggagagacatatgagttatctcataacactattgaccgatctgcctatatgcctggcgttctcctagtcgtcaaaaaaattagatcattcaataaattggtttacggacttgagaaaattttatagt

SEQ ID NO: 217551 - DNA, 778 bp, Unknown
  Bacterial polypeptide expressing nucleotide sequence isolated from the Sargasso Sea
aatgaaaaaaattaatttagctatttcaggttgcatgggaaggatgggtcaacaacttatcaagtcatcaaagaaaaataaaaattttaaattagttacacttacagagaatagattaattaaaaaaaaatttaatggaattaaacctgaattaaattctgataaagcctttaaaaaaactgatgtaattattgattttacggtaccaaattgtactcttgaaatactcaaaatagcttcaaaactaaggaaaaaagtagtaattggcacaactggctttaccagagcacaagaaaatcaaattaaaaaatattcaagaaaaatacctattctaaaagctggaaatatgagtctgggtgtaaatttattaatgtatttaactgaaataacttccaaatcattaagcgatgaatacttaagtaaaatatttgaagtgcatcataaacataaaaaagattatccatctggtactgctttaatgcttggtaaaggaattgctgatggaaaaaataaaaatttatataatttaattggtaaaaaattcttaaataaaaaatcttttccttatggaaaaaaaatcaattttaactcaataagaaaaggtgaaattattggagagcatgaagtaaaattctcaagtggaaaagaaataataacattaaatcatgaggcctttgatagagcactttactctgatggagctttgactgcctcaagatggttaattaaaaaaaagccaggattatattctatgagagatttgcttaacttttcataa

SEQ ID NO: 217552 - DNA, 612 bp, Unknown
  Bacterial polypeptide expressing nucleotide sequence isolated from the Sargasso Sea
gcttaatatttaaagaagcagatgtagtgatagattttactacacccatatcaacattatcaaatgttaaagttgcaagtgtcaccaagacagcattagttattgggacaacaggcattacaaatactcagaaagctaaaattaaaagtttttcaaataagcttccaatccttatgtcatctaatatgagtattggtgtaaatcttttatttgatttagtgagacagactgcatcttcacttcatgctgatgagtatgatattgaaattgcagaaacgcatcacaaacataaggtagatgccccttctggaacagctctttcacttggagaatatgctgcttttggtcgtaaaactaaaattgataaaactaaagtactagacagaactaaaagtttaaagaaaaggaaaaatggagaaataggattttctgttacaagaggtggcgagatagcaggagaacacactgttagttttatcagtaaagatgatagaatagatctgcatcataaagcaaacaacagatctatttttgtaaatggagccttaaaggcagcaaagtttatttcaaaaaagaaaacaggttattttgaaatgaaagatttgttttaaa

SEQ ID NO: 217553 - DNA, 548 bp, Unknown
  Bacterial polypeptide expressing nucleotide sequence isolated from the Sargasso Sea
aattgctactaaattaaaaaaaagagtggttattggtacaacaggatttactaaaaaagaagaaaatttaatcaaaaaatattctaaaagaatacctatacttaaggctggcaatatgagtttgggtattaatttattaatgtacttaactgaaatagctgcaaaatcactgggaaataatttcttaagcaaagtttttgaggtgcatcataaacacaaaaaagactatccatcaggtactgctttgatgctcggaaagggtatcgctgtaggaaaaaataaagatttttataaaattgctggaaaaaaatatttaaataaaaatagttttccttatagtaaaaaaattaattttaattcaattcgaaaaggtgaaatagtaggaaaccataaagtttatttttcaagtggaaaagaaactataactttggatcatgaggcttttgatagagctctttattctgagggtgcttttactgcagctaaatggttgatgggtaaaaaacctggactttactcaatgagagatgttctgaatttcaaatgaa

SEQ ID NO: 217554 - DNA, 679 bp, Unknown
  Bacterial polypeptide expressing nucleotide sequence isolated from the Sargasso Sea
atgagtaaaaaaaaaatagcagtatccggctgtttaggaagaatgggccaagagcttgttaaacagatttcaaaagataagcgtctcgattatataggtggctttgacttaaaagataaaaaaacttttttaaataatatatttaaaaaagctaatgtcgtaattgatttttcatcacctagttcaattaaaaacaatcttgaaatggccgttaataataattctgggctggtaattggcacaacgggacttagagaaaaagaacttaagatgttaaaagcagcatcaaaaaagattccaattttagtttcatctaatatgagtcttggtgttaatctgctttttaacctagttcagaaaacagcatctactctcagcgatatggactatgatatcgaaatagcggaaacccatcacaaacataaagtagacgccccatctggcaccgccttatctcttggagagtttgcagcaaaaggtagaaaaattaattttcaaaaatctaaagtactagacagaacatctaaaaacctaaaaagaaaaaaaggaacaattggtttttctgttgcgagaggcggagaaatagccggagaacatgtagtaagttttattggagagaatgatagaattgatttagtgcacaaagctaataatagatcaatctttgtaagaggagcta

SEQ ID NO: 217555 - DNA, 773 bp, Unknown
  Bacterial polypeptide expressing nucleotide sequence isolated from the Sargasso Sea
aatgaaaaaaataaatttggctataacaggttgcatgggtaggatgggacaacaattcatcaaatcagcaaaatcaaataaaagttttaaattagtagctcttacagaaaatagaataataaagaaaaaaattaatggtattaaacctgagctcaatacagaaaaagcatttaaaaatacaaatgttataatagattttactgttccaaaatgtacgtttgaaatattacaaatcgcatcaaaattaaaaaagagagttgttataggaacaacaggatttacaaaaaaggaagaaaatttaattaagaagtattcaaaaaaaatacctatacttaaagctggaaatatgagtttaggcataaacttgcttatgtatttaactgagattgcatcaaaatctttaggaaataattttttaagtaaagtttttgaaatacatcataaacataaaaaagatcatccatcaggaacagctttaatgttaggaaaaggtatagcaattggaaaaaataaagatttctataaattattaggcaaaaaattccttaataaaaaatattttccttatggaaaaaaaataaactttaactctataagaaaaggtgaaattattggagaacatgaagtcactttttcaagtggtaaggaaattattactctaaatcatgaagcatttgatagagctctttattcagagggtgcatttactgctgcaaaatggttaataaataaaaagccaggactttattctatgagagatgttttgaatttta

SEQ ID NO: 217556 - DNA, 775 bp, Unknown
  Bacterial polypeptide expressing nucleotide sequence isolated from the Sargasso Sea
atgacaaaaataaaaatagcagtagcaggatgccttggtcgaatgggacaagagctatcaaaaaaaataattgcaaataataagcttgaatttgttggtggttttgaacacaaaaaacataaaaatataaataaagaattcaataaagtttctgatattcaatcatcaaacctaattcattcaaatccaacttcttctattaaaatagcaaatgttttaatagattttacaacacctgaatctactttagagaatataaaaattgcttctttaaataaaaccgctgtagtaataggaacaactggtatttccagtgctcagaaaaataaaattaaaagtttttctaaaaaaatacctatccttatgtcctcaaatatgagtcttggagttaatttactttttaatcttgtaaaacaaacttcttcagctttaaaagatactgattatgatattgagatagctgaaacacaccataaacataaaaaagatgctccttcaggcacagctctatctctgggagattatgctgcattaggtagaaaaacttcattaaataaagcaaaaattttagaccgtacaaaaaagttaagctcaagaaaaaaaggtgaaattggtttttctgtaactagaggtggagagattgccggggagcatactgttagttttataggtgaaaacgacagagttgacttagttcataaagcaaacaacagatcagtgtttgtaaagggagctcttgatgctgcgatatttcttagcaaaaagaaatcaggct

SEQ ID NO: 217557 - DNA, 661 bp, Unknown
  Bacterial polypeptide expressing nucleotide sequence isolated from the Sargasso Sea
tatgaatatctgtaagataggaatttcaggttgtttaggtcggatgggacaggagctattaaaagaaatttatctgaatccaaaaacaattatatctggatgttttgaacatcctgataatgattatattggtcaaccaattagttcgatcataaataaatttgcaaatcaagatatagaattaccaaatctaaatatagaatcaaaaggggaaacaacattcaaaaattcagatgttgttattgattttacaacacctaaatcaacaatgcaaaatgttcatcttgcagaaatatctaaaacaccgatagtaatcggaacaacgggattaaataaagaaaatttaataattattgagaatgtttcaaaagttgttcctattgttcaatctgcaaatatgagtattggggttaatttattactccaaataaccgaaaaagcatcaaaaattttatctgaagaaaattatgatgctgaaatttcagacacccatcacaggcacaaaatagatgcaccttctggaacagccttggaattaggcaattctattgcaagaggaagatcagtatctttagatgaaaaaaagattttagacagaacttcgaaaaaagaatcaaggaaactaggagacatcggctttgctattagtagagctggagaa

SEQ ID NO: 217558 - DNA, 584 bp, Unknown
  Bacterial polypeptide expressing nucleotide sequence isolated from the Sargasso Sea
tcatcctgaagctagtgttaatcactctgttttggcagctcaagcaaggaccgtgcatgtaattggtaccactgggttttcaaactcccagcaaaaaaaactttccttggctgcccagcacgcacctataatccgggccggcaatatgagtttaggagtaaatctattgactcaaattacaaaagtagttgctgcttctttagatactaattttgatatagaaatactggaaacccatcataacaagaaaattgatgcgccttctggcactgctttaatgctaggagaggctgcagcagaaggtagaaagactgaaattcccagaggaattaatgttgttaagcaaggactgacgcaagaaagagaaaatggcagtattaatttttcgtctatgcgggggggagacgttgtaggggaacattcagtgaattttcttggcgctggggagagaattgttttgagtcatgttgcgactgacagaatgatttttgcaagaggtgccgtgaaggccgctctctggggatttggtaaagaacctgcagaatataatatgcttgatgttttaggcttggggagtagctaaa

SEQ ID NO: 217559 - DNA, 340 bp, Unknown
  Bacterial polypeptide expressing nucleotide sequence isolated from the Sargasso Sea
catcacaaccgcaaggcggatgctcccagtggcacctgcatcaaaaccgccgaactgatggaggagctcggcaagagcttcaaccctgccgaagtggatgagcatgaatcgctggcaggctcccgaggtggtcgtcgtgaaagtgggcttcggctccattccctgcgcttaccgggcctggtggcccatcaggaagtgatgttcggtgcaccgggcgagacctacacgctgcgccacgacacgattgatcgttccgcttacatgccgggtgtcctgctcaccgtgcgcaaggtgcgctcacttgagaccttggtttacggccttgaacggctgatctgat

SEQ ID NO: 217560 - DNA, 748 bp, Unknown
  Bacterial polypeptide expressing nucleotide sequence isolated from the Sargasso Sea
atgtccacttcatcgcgtcttgttgttcatggtgctgctggtcggatggggcaaagaattattgcctgtgcatcgacagacacccatccgtggaagcttgtatcggcattggagtgccctgggcatccaaagacaggaacagatgctgggatccttgcaggcattgaagagttaggtgtttgtgtcagtgattcgtggacatgccctgctgatgtcgtgattgatttttctctgccagaagccgtccctggcattgttgaggcatgtgttcgtgcaggcgtgccgctcgttgttgcgaccactgggttcgagcctgaagtcagtgagaagatccgcgatgcttctcaacgtattccagttcttcaggccccaagcatgagccttgcggtaaatattgcgatggatttagtgcatcgggctggttcccttcttcaccaaagtggggttcgtgcggatgttgagattatggaatgccatcaccgacataaggaagattcaccaagtggaacagcattgaaattcggatcaattgtccaagacgcaatgggacaatcacagtctgcgcatggtcgggaaggacgccctggtgctcgtcctgctgatgaaattgggtatcatgctgttcgcgcaggggataatccgggagagcacacgattctctttgggttggacggtgagtcactttcagtcgcggtgcgtgcaacaagccgtgattgctatgcacagggagccttggcagcagctgcgt

SEQ ID NO: 217561 - DNA, 474 bp, Unknown
  Bacterial polypeptide expressing nucleotide sequence isolated from the Sargasso Sea
aggcagcaagtttccactcggttgttgttagagctggaaacatgtctctcggcgtaaatttgttagtagctttaactaaaaaagttgcagcggcgcttgatgatgaatttgatattgaaattattgaggcgcaccacaagcataaggtagatgctccctctggaacggctttgatgcttggtgaggcagcagcagatggtcgaggcataaaattagctgagttagcagatagagggcgagatggtataactggagcccgaaataaaggctctatcggattttcctcaatcagaggtggtgacattataggaaggcatgatgttttatttgcatcaaacggtgaacaattgaccctcagccataatgcaacagacaggaacatatttgctcaaggggccataaaagcagtgctttggggtatagataaacagcctggtcagtacgatatgatggatgtattaggtttaacctagt

SEQ ID NO: 217562 - DNA, 538 bp, Unknown
  Bacterial polypeptide expressing nucleotide sequence isolated from the Sargasso Sea
aaactaaaaaaaaaagttgttataggtactactggatttactagaagtcaggaaaataagattaagagattctcaaaaaaaatcgctattctaaaagcaggtaacatgagcttgggtgtaaatttattaatgtatttgactgaaattgcatcaaaatcattgagtgatgaatacttaagtaaaatattcgaagtacaccacaaatacaaaaaagattatccatcaggtacagctttaatgttaggcaaaggaattgcagatggaaaaaataaaaatttatataatttaattggaaagcaatttttaaataaaaaatcatttccatacggtaaaaaaattaattttaattcaataagaaaaggcaatattataggagagcatgaggtaaaattttcaagtggaaaggaaataatcacattaaatcatgaagctttcgatagggctctgtactttgatggagcgttgacagcatcaaaatggctaatgaaaaaaaaaccaggtttatattctatgagagatttgcttaacttttcataat

SEQ ID NO: 217563 - DNA, 778 bp, Unknown
  Bacterial polypeptide expressing nucleotide sequence isolated from the Sargasso Sea
gatgaaaaaaattaatttaacaataactggttgtatgggaagaatgggtcgacaactcattaaaacttcaaaagcaaataaaaactttaaaatagtatctctgaccgaaaatagaataataaataaaaatataatgggtatcagacctaatttaaatacagaaaatgcatttaagaaagcaaatgtaataatagattttacagtgcctaaatgtaccttggaagttttaaaaattgcatcaaaactaaaaaaaagagttgtgattgggacaactggattcactaaaagagaggaaaatataataaaaaaatacgcaagaaaaattcctattcttaaagctggaaatatgagtctaggagttaatttgctaatgtatttagctgaaatagcttcaaaatcccttaataataatttcttaagcaaagtttttgaagttcatcataaaaataagaaagattatccttcaggaactgctttgatgcttggtaaaggtatagccgtaggaaaaaataaagatttttatggattaataggaaaaaaatatcttaataaaaaatcttttccttatggaaaaaaaattaattttaattcactcagaaagggatcagttataggcaaacatgaagtttctttttcaagtggaaaagagatagtttctttaaatcatgaagcttttgatagagcacttttttccgaaggtgcattaacagctgcaagatggataataggcaaaaaacctggcttgtactccatgagaaacgttttgaattttaaataa

SEQ ID NO: 217564 - DNA, 538 bp, Unknown
  Bacterial polypeptide expressing nucleotide sequence isolated from the Sargasso Sea
tatgacagatcagatcccagttgtggtggccggagccctgggccggatgggtgccgaagtgatccaagcggtccatggagctgaggactgtcagctggtaggggcaatcgatacatgtccggggcgtgaaggcgaggacgttggcctggccttgggtctgggtgagttagaggtcgccctcacccaggatttcgagggtgctctttgcttagccagtcagcagcatcccggcgctgtgctggtggatttcacccatcccaaggtggtctatgaacacacccgcgcggcgattgcctatggggttactccggtgatcgggacgactggtctgtccccagagcagttacaggagttggccacctttgctgccaaagcctcgatggggggagccgtgatccctaatttctcagtgggcatggtgctgctacagcaggctgctgctgctgctgcacggttttatgaccatgccgagctggttgagttgcatcacaaccgcaaagccgatgcccccagcggtacttgcattaagacggccgag

SEQ ID NO: 217565 - DNA, 778 bp, Unknown
  Bacterial polypeptide expressing nucleotide sequence isolated from the Sargasso Sea
gatgaaaaaaattaatttagcaataactggttgtatgggaagaatgggccaacaactcatcaaaagctctaaagcaagtaaaagctttaaaatagtagctataactgaaaataaaataataaataaagatataatgggtatcagacctaatgttaacaatgagaatgcatttaaaaaagcaaatgtaataatagattttaccgtacctaaatgcacctttgaagttttaaaaattgcatcaaaacttaaaaaaagagtggttattggaacaacaggatttactaaaaaagaagaagatataattaaaagatactcaagaaaaattccgattcttaaggctggaaatatgagtcttggggtaaacttgctaatgtatttgactgaaatagcttcaaagtcacttaatagtaatttcttaactaaagtttttgaagctcaccataaaaataagaaagatcatccttctggaacagctttaatgcttggtaaaggcatagccgtaggaaaaaataaagatttgtataggttaatgggtaaaaagtatttgaacaaaaaatcttttccctatggaaaaaaaattaattttaattcattaagaaaaggttcagtaataggaaaacatgaggtttctttttcaagtggaaaagaaatagtttctttaaatcacgaggcttttgatagagctcttttttcagaaggtgcattaacagcagcaaaatggataataggtaaaaaacctggcttatattccatgagaaacgttttgaacttcaaataa

SEQ ID NO: 217566 - DNA, 535 bp, Unknown
  Bacterial polypeptide expressing nucleotide sequence isolated from the Sargasso Sea
tatggcaaaaataaaagtaggaatagccggctgtttagggcgcatgggccaggagctcacaaaacaaatattagaagataaaaactttacatttgttggcggatttgaacataaggctcacaaaaaaattggaaaaaaaattagtgatgttacaaatataatatcggaagaagttgtaaaaaataatgccagttctatttttaaaatagctgatgtcgttatagattttacgactcctcaattgacattatcaaatgctaaaattgccagtattacaaaaacagctttggtcataggcacaacaggtattacaaaatcacaaaaaaataaaattaaaagtttttcaaaaaaaacccctatcctcatgtcatctaacatgagcattggagtaaaccttttatttgatttagtaaaacaggcagcatcctcgcttcagagcaatgaatacgatattgaaattgcagaaacacatcacaagcacaaagttgatgccccctctggtacagccctttctttgggagaatgtgctgcagca

SEQ ID NO: 217567 - DNA, 805 bp, Unknown
  Bacterial polypeptide expressing nucleotide sequence isolated from the Sargasso Sea
ttgttacgtctaggaatatcaggtgtggctggcaagatgggtagggctcttgttcaagcaatttttgagacaaaggatctccgccttggagcagcctttgagagtgcttcgagtccagtcattggcatggacgcgggggagtttgcaggtgtaggtaagctggatgtcaaggttggagaattgaaaaatggaaatctcagccagacagatatcatcatagatttttccatacccgaggcgaccttggctttggctgagatatgcaaaagtcaggacaagggtatggtgattggcacgacaggttttaaaaaaagtcagcttaggtatcttgaagagtgcagcgctaacattcctatatttatgtccccaaatatgagtgtcggagtgaatgtcttatttaagcttgtaggcatggcttctgaagcctttggcgaagaagtggactgtgaaatctttgaggctcatcattcgcaaaaaattgatgcgccttctgggaccgcagtcaggatcggcgaaatacttgccgacagtcgctcggtagatatgaaaaatgtcggaaaatacggacgggaaggcctagttggtaagcggacgcagcaagaaataggcttttcgtcgattcgtggaggagatattgtcggtgaccacacggtgttttttattggggagggggaacgagtagaaataacccaccgagctcaaagtcgcgttaatttcgctcagggcgcgataagagcggcgcgatttttgtcggataaaaagaacgggctgtatgacatggagcaattgctagaattatcataaa

SEQ ID NO: 217568 - DNA, 693 bp, Unknown
  Bacterial polypeptide expressing nucleotide sequence isolated from the Sargasso Sea
tatgtcaaaaataaaagtagctgttgcaggatgtcttggtcgaatgggccaagaaattacaaaaaaaattttatcaaacaataaattaacctttattggtggttttgagcatgcagatcattttaatttaaataagcaattaaataaaattactgacattaattccagttttgttgttacaagcaatgccaatcaaattataaaaaaagcagacgtagttattgatttcacaacaccttcttcgactctaatgaatgttaaaaaagcatctctcaataaaacagctatggttataggcactacaggaataacagaatcacaaaaaaacaaaatcaaagcccactccaaaaaaattccaatacttttgtcttcaaatatgagcgttggggtaaacttattatttaaccttgttcaacaaacagctgaagctttacaacaaacagaatatgatattgagatttctgaaactcatcataaacataaaaaagatgcaccttcaggcactgcaatttctttgggtgagtttgcagcaaaaggaagaaaaacaaatctaaaaaaagtaaaaatttttgaccgaacaaaaaaacttaattcaagaaaaaaaggtgaaattggtttttctgtaactagaggtggtgaaattgctggagaacataccgttagttttattggtgaaagcgatagaattgattt

SEQ ID NO: 217569 - DNA, 775 bp, Unknown
  Bacterial polypeptide expressing nucleotide sequence isolated from the Sargasso Sea
atgaaaataaatttagctattactgggtgtatgggtagaatgggtcagcagatcattaaatctgcaaaatctgacaaaaatttaaaattagttgctcttacagaaaatcgaacagttagtaaaaaaattagtggaattaaacctagtttaaatacagaacaaacttttaaaaaagcaaatttaataatagattttacagttccaaaatgcacttttgaagttctaaaaattgcatcaaaacttaaaaaaaaagtagttataggaacaactggattcactaaaagagaggaaaatttaattaaaaaatatgctaaaaaaatacccatacttaaagcaggtaatatgagtttaggaataaatttattgatgtatttaacagaaattgcgtcaaaatcacttggtaataatttcttaagtaaagtttttgaaattcatcataagcataaaaaagaccatccttcaggtactgctttaatgctcgggaaaggcatagctgttgggaagaataaagatctttataagttaatgggaaaaaaatatttaaacaaaaaaacgttcccttatggtaagaaaattaattttaattcaatgcgaaagggcgaggttgttggtgaacatgaagtaactttttcaagtggcaaggaaataattacattaaatcatgaggcatttgacagagctttgtatagtgaaggcgcattaacagctggcaaatggttgatgaaaaaaaagcctggtttatattcaatgcgagatgttttgaattttaaatgag

SEQ ID NO: 217570 - DNA, 769 bp, Unknown
  Bacterial polypeptide expressing nucleotide sequence isolated from the Sargasso Sea
atggcaataaaagttggagtactcggcgcatcaggacggatgggttctgaggtatgtagggccgtagtcaatgatctcgacacttcactcgtatcagcaatagatgagatgaacgttggcgaaaacgtagctgggtctgacgtgagcattaccgatgacttttcggcactcgaagatgctgatgtgatcgtagatttcactgttgctgattctgctcggcgaaatctgcaacgtgtggcaaaagcagggattcatgccgtagtaggaactaccggattaacagaatcagacataacaacattaggcagcctgtttaaagacagtaactgtgtcgtagcttcaaattttgctatcagcgctgtcttaatgatgcgcttttcggaaatggcggccccacactttaataacgttgaaatcatcgaatatcaccataactcgaagattgacgccccatcaggcacagcgctaacaacagctgagcgtataagtgcatcatctactgaatgggacgaaagctctacaagtaacttcatacttggcggagctagagggggaataacagaaggtggtattccaattcacagcgttcggatggaagggatggtagctcaccaagatgtgatttttgggacagagggacagacgcttactatccgtcaagatagttatgaccgctcatcgttcatgcctggggtattactagcagttaaaaaagtgagggactttcctggcgtcacgctaggacttgaagcactactcaacctatgag

SEQ ID NO: 217571 - DNA, 430 bp, Unknown
  Bacterial polypeptide expressing nucleotide sequence isolated from the Sargasso Sea
gatgagtacagtaggtatcttaggtgcaaacggccgtatgggcagagctttggtcagtgtagctaaagagcaccaattgccaatcactgctgctactgtgcgcgccggttcagctttaacaggcatggatgcaggtgaactggccggttgtggcaaattgaacctaccttttatagaaacatctgtagcagctttagattcagctgacatttggattgattttactatgccagacgccatgctacagcatctggagctggcggtgcaggccaaaaaagcgctggtgattggtgtgactggcctcacagatagccaatatgctgcagtacaacaagccgcccagtctattcccatcgtttgggcgcctaatatgagcgtcggcgtgaacttattactgcatttggtagaaactgcagctaaggtaatgggg

SEQ ID NO: 217572 - DNA, 695 bp, Unknown
  Bacterial polypeptide expressing nucleotide sequence isolated from the Sargasso Sea
ttttaaactaacaactcttacagaaaatagattaataaaaaaaaaaatttcaggaattaaaccttgtttaaataatgtagattccttcaaaaatgttgatttaattatcgattttactgtccctaattgtacttttgaaattcttgaaattgcttcaaaattaaaaaaaagagttgttattggtacaactggatttaccaaaaaggaagaaagtctaattaaaaaattttcaaaaaaaataccaatattaaaagctggcaacatgagcttaggtataaatttattaatgtatttaactgaaattgcgtctaaatcattaggaaataattttttaagcaaggtatatgaggttcatcacaaacataaaatagaccatccttcgggaactgctttaatgttaggtaaaggaattgctattggtaaaaataaagatttttataatttgcttggaaaaaaatatctaaataaaaaaaaatttccttatggaaaaaaaataaactttaactcaatacgaaaaggtaaaacagttggagagcacgaagttaaattttcaagcggaaaagaaataattacattaaatcatgaagcatttgatagagctttatacagcgaaggagctttgacagctggaaaatggttaatgaaaaaaaaaccaggtttatattcgatgcgtgatgttttaaattttaaatgag

SEQ ID NO: 217573 - DNA, 808 bp, Unknown
  Bacterial polypeptide expressing nucleotide sequence isolated from the Sargasso Sea
atgaaaaaaattaaagtgattgtaacgggtgcttcaggtcgcatgggcacgcaaatagcaaaaagaattgttcaagatgaatcttttacattatttggggcaaccgagagcattggtcatcctttaataggaaaagatataggtcaaattttaaaaacaaaaaaaactggtattttaattacagataacattattgaactgtttgcaaaagctgatgcagttattgattttacagttcccaaagcaacattagagcatgcaaaatattctgcacaagcaagaattgttcacgtagttggaacaactggtttcagcaaaagccagttacgtaaaatagattttgctgcgcagcacgccacaattattaaatctggcaatatgagtttgggaataaatttattagagagtattgtaaaaattgcttcctcaaaattagatagctcttttgatataaaaataaatgaaactcatcataaacataaaattgatgcaccatcaggaacagcaataatgcttggcaaagctgctgctagtgggaaaagtaaaaaattggaaaatataatgaagattaatcgcactaacacaattggtaaaaatataaaaaataaaattgtaatgtcgtcctttagaaaaggtgaaaccattggagaccatgaggtaatattctcatcaaatgatgaaacgattagaattcagcatatagctgaaaataggggaatttttgccaatggagctcttcaagctgtaaaatggggaatggataaaggaccaggccttttttcgatgaccgacgttttgaatatttaga

SEQ ID NO: 217574 - DNA, 778 bp, Unknown
  Bacterial polypeptide expressing nucleotide sequence isolated from the Sargasso Sea
atgaaaaaaataaatttagctataactggatgtttaggacgaatgggtcaacaattaatcaaatcagtaaaagatgataaaaactttaaattggtagcaattactgaaagtaaaaaaagaaataaaaaaattaatggggttaaaatagatgtaaacaccgaacaaacatttaaaaaagtgcatttgataattgattttacagtaccaaaatgtacttttcagattttaagaatagcaacaaaactaaaaaaaagagtagtaattggaactactggattcacaaaaaaagaggaaaatttaattaaaaaattttcaaaaaaaattccaattttaaaagcaggaaatatgagtttaggtattaaccttttaatgtatctaacagaagttgcttctagttctcttggaaaaaattttttaagtaaaatttatgaaattcatcacaaacataaaaaagactacccttctggtactgcattaatgttgggtagaggaatagctgttggaaaaaaaaagaacttttatagcctatttggaaaaaaatatttaaataaaaaaaattttccttatggaagtaaaattaatttcaactctgtaagaaaaggtgaaattattggtgaacatgaagtaaaattctcaagtggaaaagaaataataactttaaaacatgaagcttttgatagagctttatattcagagggcgccttatcagccgcgaaatggctgatgagtaaaaaaccaggcctatactctatgagagaccttatgaatttcaaataat

SEQ ID NO: 217575 - DNA, 805 bp, Unknown
  Bacterial polypeptide expressing nucleotide sequence isolated from the Sargasso Sea
aatgacaaaaatcaaaatagcagtagcaggatgtcttggccgaatgggacaagaactatcaaaaaaaataattgctaacaataagttagaatttgttggtggttttgagcacaaaaaacataaaaatataaataaagaatttaataaagtttctgatattcaatcttcaaaattaattcactcaaatccaaccccttctattaaactagctaatgttttaatagattttacgacccctcaatcttcgttggagaatataaaaattgcctctttaaataaaactgctgtcgtaataggtacaaccggtatctctgttgcacagaaaaataaaattaaaaattttgcaaaaaaaatacctatacttatgtcttcaaatatgagccttggagttaatttactttttaaccttgtaaaacaaacatcttcagctttaaaagaagctgattatgatattgagatagctgagacacaccacaagcataaaaaagacgctccttcgggaacagccctgtctcttggagattatgcagcactaggtagaaaaacttcattaaataaatcaaaaattttagatcgcactaaaaaattaagtttaagaaaaaaaggtgatattggtttttctgtaactagaggtggagagattgccggagagcacactgttagtttcattggtgaaaacgatagagttgacttagttcataaagcaaacaacagatcaatctttgtaaaaggcgctcttgatgctgcgatatttcttagtaaaaagaaatcaggattttatacaatgaatgatttattattttaa

SEQ ID NO: 217576 - DNA, 688 bp, Unknown
  Bacterial polypeptide expressing nucleotide sequence isolated from the Sargasso Sea
gatgaaaaaaataaaagttgtcataaccggcgtaaccggacgcatgggaatgcaaatcgctaaaagagttttgagagataagtcacttattttgtatggcgcaacagaaagaaacggacataaagctattggtaaagatttgggacgattacttaaaacaaaagaattaaaaattaaagtcaccgataatataattccattatttgctaaaactgacgctgttatcgacttcacaactcctgaggcaactatggtgcatacaaaatatgcagctcaagcaagaataatacatataattggaactacaggttttaatagttcacagttaaaaaaaattaaactcgctgcgcagcatgcaacgatcataaaatcaggtaatatgagtttaggtataaacctgataaataaattaattaaaataagttcaacaagtttaagaaatgattttgacatgatcataaacgaaacccatcatcgacataagattgacgcaccttcaggcactgcagtaatgatggggcaggctgctgcggagggtaaaaataaaaattttgaaaatataaaaaaaatctctcgtctaaacacaaaagctagaagcactaaagataaaattgtagtctcgtcctttcgcaaaggtgaagtaattggtgatcacgaaatattttttcgagtaaggatgaggatataa

SEQ ID NO: 217577 - DNA, 778 bp, Unknown
  Bacterial polypeptide expressing nucleotide sequence isolated from the Sargasso Sea
atgagcaaagtaaatttagcgatatctggttgcatgggacgaatgggccaacaactggtaaaatcttcaagaattgataaatattttaaactaacaactcttacagaaaatagattaataaaaaaaaaaatttctgggattaaacctagtttaaataatgaagattccttcaaaaatgttgatttaattatcgattttactgttcctaattgtacttttgaaattcttaaaattgcatcaaagcttaaaaaaaaagttgttattggtacaactggatttaccaaaaaagaagagagtcttattaaaacattttcaaagaaaattcctatacttaaagctggaaacatgagcttaggtataaatttgttaatgtatttaaccgaaatagcatctaaatcattaggaaataattttttaagtaaaatatatgatgttcatcataaacataaaatagactatccatctggaacagctttgatgttgggtaaaggaattgctattggcaaaaataaagatttttataatttatttggaaaaagatatcttaataaaaaaagttttccttatggaaaaaaaataaattttaactcaatacgaaaaggtaaaacagttggtgaacacgaagttaaattttcgagtggaaaagaaattattacattaaatcacgaagcatttgatagggctttatacagtgaaggagctttgacagctggaaaatggttaatgaaaaaaaaaccgggtttatattcgatgcgtgatgttttaaattttaaatgag

SEQ ID NO: 217578 - DNA, 611 bp, Unknown
  Bacterial polypeptide expressing nucleotide sequence isolated from the Sargasso Sea
actaaattcagaagttattattgattttacatctcctgaagcaacaatcaatcatgctgaaatagcttcaaaaaataatgttgcacatgttatagggacgacaggattatcagagaaggatgaaaaactattatcagaattatctttacttactcaaattttttactctgccaatatgagtttaggtgttaatctgcttatagaattaattaataattctgtttcaaaattaggaaatgattgggacatagaaattatagaaatgcatcataaacaaaaggtagatgcaccatccggaacagctttggcacttggtaaagagattgctaaattattaaataaaaacctcaacgacatagctgtttattctcgagaaggaagaattggtccaagaaaagatggagaaattggatttgcagtattaagaggcggatcagtggttggtgatcatacagttatattatccaatggagatgaaagaatagagttgtgtcacaaagcgggcaacagatcaatttttgcaaatggggctatcaaggccgccatttggattgttaaacaaaagcctggtttatatagtatgaaaaacatttttcaaaaaaactcataaa

SEQ ID NO: 217579 - DNA, 778 bp, Unknown
  Bacterial polypeptide expressing nucleotide sequence isolated from the Sargasso Sea
aatgaaaaaaataaatttagctattactggttgtttgggaagaatgggccagcaatttatcaagtcagcaaaatcagataaaaattttaaattgttagctcttacagaaaatagaataattaataaaaaaattagtggaattaaacctgaacttaatacagaaaaagcatttaaaaatacaaatgttataatagattttacagttccaaaatgtacatttgaggttttaaagattgcatcaaaattgaaaaaaagaatagttataggtacgacaggttttacaaaaaaggaagagacccttattaaaaaatactccaaaaaaataccaatacttaaagctggtaatatgagtgtaggaataaatttattgatgtatttaaccgaaattgcttcaaaatcacttggaaataactttttaagtaaagttttcgaagtacatcataaacacaaaaaagatcacccttcaggtacagcactaatgcttggaaaaggtatagcaattggaaaaaataaagacttatataaactattaggtaacaaataccttaataaaaagtcttttccttatggaaaaaaaattaattttaattctataagaaaaggagaaatcattggagaacatgaagtcaaattctcaagtggcaaagaagtcataactctaaatcatgaagcatttgatagagctctttactcagaaggggcttttaccgctgctaaatggctaatgaacaaaaaacctggactttattccatgagagatgttttaaattttaaataa

SEQ ID NO: 217580 - DNA, 808 bp, Unknown
  Bacterial polypeptide expressing nucleotide sequence isolated from the Sargasso Sea
catgaccatcaaaattgggatatgtggtgcagctgggagaatgggcaaaacaattctcgaggtttgcaagaatataaaagatgtgaaaatctgcgcggcaatagaacacccagattctccttatattggacatgatgccggtgaagtggccggtataggtaatttaggcgtacaaattactgatagtatctcaagctcttcaaacaaagttgatgttttcatcgatttcacactagcagattctgttattcaaaatattaatgaatgtgagtcactaggttgcagcatggtaatcggaacaactggtttaaatgatgaagcaaaggcacgcatacaatctgccgcaaaaaatatttcaatagtttttgcacccaatatgagtattggcgtgaatctttgttttagattgctcgaagtagctgccagtacaatcggaaaagatgccgatgttgaaattgtagaggcacatcaccgagacaaaaaagatgctccatcaggaactgcaatacgaatgggtgaaattattgcgagcacaacagatagagatcttaaagattgcgcaatttacggtagagaaggaacatccgaatcaagagataagaacagcatcgggtttgaaactatacgcgcaggagatattattggtgatcatacagtaatatttgcgacaacaggcgaacgtatcgaaattagtcataaagctacatctagaaagaatttcgcgaatggagctgtgagagcggctttatggttggcagacaaagataaaggattgtttgatatgcaagatgtaataagccttaaataa

SEQ ID NO: 217581 - DNA, 748 bp, Unknown
  Bacterial polypeptide expressing nucleotide sequence isolated from the Sargasso Sea
atgattgaaaattccaaaaaacctataccagtactagtatccggagctttaggcagaatgggcagtgaagttgttaatactgtattaaattctacagattgtgaacttgttgcagcaatcgacataaacgaaaagaacaatggttcaaatatttctgaattattgaaggtaaaagattgtgatgtttttgtttcaaatgattttgaaggaactttatgttctgttagtcaaaattatagaaatgaaaatatcaaacctgtacttgttgattttactcatcctgattctgtatatgaaaataccagatcagctattgcatatggtgtatcaccagttgtaggaactacaggtctaagcccttcgcaaatacaagatttgtctgtttttgctcagaaagcatcggttggttgtgcaataattcctaatttttcagtcggtatggttcttcttcagcaggcggcatctgtagctgcaaggttttacgacaatattgaattaattgagatgcatcataatcaaaaagctgattctcctagtgggacgtgtataaaaactgcagaaatgattgaagaatatccaaagaaatttaatcagaatttagtaaaagagtctgagtcattgacaggtgtacgcggtgggctcagagattcaggaatcaatatacattctgtacgattaccaggattactcgctcatcagttagtaattatgggatctccaggtgaaacttacacaattaaacatgaca

SEQ ID NO: 217582 - DNA, 474 bp, Unknown
  Bacterial polypeptide expressing nucleotide sequence isolated from the Sargasso Sea
ttttacgttttaagcaaacaagtaattcaacaaaagtattttatgcaccaaatatgagttatggagttaatacattttttgaaatagcaagaaaagccgcaaaacatttaaaagatttcgatatagaaataattgaaacacaccaccgacacaaaaaggatgcacctagtggaacagctttaaagcttggagaagagattgtagcagagcttgggctatccaaatcaaattttaattttaaacgtcaggatcaagaaggccaaagaaaagaaaatgaaattggtttctcctctattagaggtggaaatattccaggtgaacatacggtcatatttcacggtgacaatgagtctgtagaattaacacacaaggcccacaacagaaaaattttttctgatggcgctattcaagcagcagtatggttatcatcaaaggaaaaaggcttttacaccttcaaagatatgattagctaga

SEQ ID NO: 217583 - DNA, 566 bp, Unknown
  Bacterial polypeptide expressing nucleotide sequence isolated from the Sargasso Sea
ctttcgcggtatcgctgaggcgtgtattcaaagaggcgtgccgctcgttgtcgcgacgaccggccttgagccagatgatgaagctgcaattactgaagcggccaaaacagttcctgtgctgatctctccgagcatgagtctcgcagtcaatattgctatggatcttgtgggccgtgcaggtaggctgctgcgcggcgttggaagtcgtgctgatgtggaaatcattgagtgccatcaccatcacaaggaagacgcaccgagtgggacggcgctgaagtttgggcacattatcaaagatgcaatgggtcagtctcgcgagacacatgggcgtgagggtcgcccgggcgctcggcctgaagatgaggtcgggtaccatgcagtgcgatcaggtgataacccgggagagcacacgattctctttggccttgagggagagagtctgtctgtcaatgttcgggcaaccaatagagactcctatgcacgaggagcacttgctgccgcggcgttcttggttggtaaaccagccggcagatatgacatgaacgacgttttgggtatttcgtaga

SEQ ID NO: 217584 - DNA, 595 bp, Unknown
  Bacterial polypeptide expressing nucleotide sequence isolated from the Sargasso Sea
ttggttataggaattgcaggacgcatgggcacgacgattgccgagtgtattgaagacaccgatggtatcgaactgggtggcggaaccgagtgcgtgggtagcgacttaataagtcaggatgttggaaaagtaataggcagtgataataaaggggttttaattgtggatgacccggcgagtgctcttcaatcgtgtgatgtcgcgatcgattttactaccccggcatccagcatgtttaccctcaaggctgctgcaaaaagtggaaaaccagttgtggtcggtacgacgggcttttcggcagaacaaaaaaaagaaattgcagggcttgcacaaaaaattccattagtggtcgcgcccaatatgagtatcggagtgaatgttttgttcaagctggtcgccgatgcagcgcgtgttctgggagatgattatgatgtagaaattgttgaggctcaccacaagtttaaaaaagatgctcccagcggtaccgcggtacgtatttctgaaattgttgccgattcgctagggcgcaatctcgatgaggttggagtgtatggaagaccagggcatcacggagcgcacgtcaaaggaaattggt

SEQ ID NO: 217585 - DNA, 811 bp, Unknown
  Bacterial polypeptide expressing nucleotide sequence isolated from the Sargasso Sea
atgaaaaaaataaaaattgtcataactggcgtaaccggacgcatgggaatgcaaatcgctaaaagagttttgaaagataaatcacttgttttgtatggtgcaaccgagagaagtgggcataaagctattggcaaggatttaggtcaattactcaaaacgaaaaaattaaaaattaaagtcacagataatataattccattatttgctaaaactgacgctgttattgacttcacaactcctgaagcaactatgatacatacaaaatatgcagctcaagcaagaatagtacatataattggaactacaggttttaatagctctcaattaaaaaaaattaaactcgctgcgcagcatgcaacaatcataaaatcaggtaatatgagtttaggtataaacctaataaataaattaattaaaataagttcctcaagtttaaaaaatgattttgacacaataataaacgaaacgcatcatcgacataaaattgatgcaccttcaggcactgcagtaatgatggggcaggctgcagcagaaggtaaaaataaaaaatttgaaaatgttaaaaaaatctcccgtctaaacataaaggctaaaagtactaaagataaaattgtagtctcatccttccgcaaaggtgaagtaattggtgatcacgaaattattttttcaagcagggatgaggatattactatcaagcatacagcaaaagataggggtatttttgctaacggagcaatacaagctgtgaaatggggcatgaacaaaaaacctggcctatttgacatgtcggatgtgctaaatataagttagg

SEQ ID NO: 217586 - DNA, 547 bp, Unknown
  Bacterial polypeptide expressing nucleotide sequence isolated from the Sargasso Sea
aaaaaataccggaaaggtttagtgataggaacaactggccttagccaagaaattgaaaaagcgatagaaacagcaacaaaaaatgtacccatagtttactcagcaaatatgagtataggaattaatatacttttagagttaacaaataagttatctaatatactaagcgaggaagattttgatattgaaattcttgaaatgcatcataaacataaggttgatgcaccatcaggaacagccttagcgctaggaaatgcagccgctaatggaagagaaattgaattaaaaaaacatagtgaaattgttcgtaatggtatcaatactaaaagaacagttggaaatattggctttgcttcactccgaggaggtagcgtaactggagaccattcagttttatttgcaagtgatcatgaaattatagaattaaaacataaagcagataatagaagcctttttgcagctggtgcaatcaaagctgccatctggttatcagataaagaaaatggtctttactcaatgaaagatgtattaaatttaaaaatttaaa

SEQ ID NO: 217587 - DNA, 337 bp, Unknown
  Bacterial polypeptide expressing nucleotide sequence isolated from the Sargasso Sea
tcacaaccgcaaagccgatgcacccagtggcacctgcatcaaaaccgctgaaatgatggaggaactcggcaagagcttcaatccttatgaagtggatgaacatgaatccctggagggatcccgaggcggttgtcgcgagagcgggctgcggatgcattccctgcggttacctggccttgtggctcaccaggaggtgatgttcggtgcagcgggtgagacttacaccctgcgccacgacaccattgatcgttccgcttacatgccgggtgtgctgctcacggtgcgcaaggtgcgttcactcgaggccttggtttacggccttgaacgcctgatctga

SEQ ID NO: 217588 - DNA, 850 bp, Unknown
  Bacterial polypeptide expressing nucleotide sequence isolated from the Sargasso Sea
atgattgaaaattctaaaaaacccataccagtactagtatctggagctttaggcagaatgggtagcgaagttgttaatacagtattaaattctacagattgtgaacttgttgcagcaatcgacattaacgataagaacaatggctcaaatatttctgaattattgaaggtaaaagattgtgatgtttttgtttcaaatgattttgaaggaactttatgttctgttagtcaaaattatagaaatgaagatatcaaacctgtaatggtagattttactcatcctgattctgtatatgaaaataccagatcagctattgcatatggtgtatcaccagttgtaggaacaacaggtctaagtccttcgcaaattcaagatttgtctgtttttgctcagaaagcatcgattggttgtgcaataattcctaatttttcagtaggtatggttcttcttcagcaggcggcatcggtagctgcaaggttttatgacaatattgaattaatagagatgcatcataatcaaaaagctgattctcctagcgggacttgtataaaaactgcagaaatgattgaagaatatccaaagaaatttaatcagaatttagtaaaagagtctgagacattgaaaggagtacggggcgggctaagagattcaggaattaatatacactctgtacgattaccaggattacttgctcatcagatagtaattatgggatctccaggtgaaacttacacaattaagcatgacactattgatagaaaggcatatatgcctggggttttagaagctattaaaaaaattggtaattatgaaactttagtttacggacttgaaaaattgattttttaaa

SEQ ID NO: 217589 - DNA, 451 bp, Unknown
  Bacterial polypeptide expressing nucleotide sequence isolated from the Sargasso Sea
gtctgggcgccgaatatgagtgtaggcgtcaatatcaccttgagactgctggaacttgcggccggggcatttggcgacgacgttgatgtcgagatcattgaggcgcaccatcgccacaaggtagacgcgccttccggcactgccctgaagatgggcgaagtggtggccgagacactcggcagaacacttgacgaacacggggtttttgcccggcaaggtcatacggggccgcgcacggacaaggaaatcggattttccactatccgggcgtcggacgtgatcggcgagcacagcgtgtggtttgccggggccaaagagcgggtggaaattacccacaaggcgtccggtcgggaaatctatgccaatggggcgctgcgctgcgcgcaatggctgatggaaaagtcttctggcctcttcgacatgcaggatgtattgggattaaagtcgtaaa

SEQ ID NO: 217590 - DNA, 493 bp, Unknown
  Bacterial polypeptide expressing nucleotide sequence isolated from the Sargasso Sea
atgcaacgtattgctgtgatgggcgccgccgggcgcatgggcaagaccctgatcgaagccgtgcagctggtcgatggcgcaagcctgagcgcggcgattgatcgtgcagacagcagcctggttggtgcggatgtcggtgagctggtggcgcagggcaagattggcgtcaatctgtccggcgatctgaatgcggtgcttgatcagttcgatgtgctgatcgacttcactcatccatcggtcaccctgaagaacctggaaatctgccgtcaggccggtaaatccatggtgatcggcaccaccggtttttccccggaagaaaagcagcagctggctgaggccggcaagcagatttccatcgtgtttgccgccaacttcagtgttggagtcaatctgtgcctgaaattgctcgatactgcggcgcgggtgcttggcgatgacgtggatatggaaatcatcgaagcccatcaccgccacaaggtcgatgcaccgtccg

SEQ ID NO: 217591 - DNA, 595 bp, Unknown
  Bacterial polypeptide expressing nucleotide sequence isolated from the Sargasso Sea
cctgttttggttgattttacgcatcctgactctgtatatgaaaataccagatcagctattgcatatggggtatcaccagtagtaggaactacaggtctaagcccttcgcaaataaaagatttgtctgtttttgctcagaaagcatcggtcggttgtgcaataattcctaatttttcagtaggtatggttcttcttcagcaggcggcatctgtagctgcaaggttttacgacaatattgaattaattgagatgcatcataatcaaaaagctgattctcctagtgggacctgcataaaaacagcagaaatgattgaagaatatccaaagaaatttaatcagaatttagtaaaagagtctgagtcattgaaaggtgtacgcggtgggctcagagattcaggaattaatatacattctgtgcgattaccaggattactcgctcatcagttagtaattatgggatctccaggtgaaacttacacaattaaacatgacactattgatagaaaggcatatatgccaggagttctacaggctattaaaaaaattggtaattatgaaactttagtttacggacttgaaaaattgattttttaaa

SEQ ID NO: 217592 - DNA, 754 bp, Unknown
  Bacterial polypeptide expressing nucleotide sequence isolated from the Sargasso Sea
gcagcgctacagatgaaaggcgttgcgcttggtgcggcgcttgagcgtgagggatcgtcactgttgggcagcgacgccggagaactggcgggcgtcgggaagaccggcgttaccgtacaaagcagccttgaggcggtaaaaggggatttcgatgtgtttatcgattttacccgtccggaaggcacgctgaatcatctggcattttgtcgtcagcatggcaaagggatggtcattggcaccaccggttttgacgatgcgggaaaacaggcgattcgcgacgccgcccaggacattggcattgtcttcgcggcgaactttagcgtcggcgtcaacgtgatgcttaagctgctggaaaaggcagcgaaagtgatgggcgactataccgacattgaaatcattgaagcacaccaccgccataaggttgatgcgccatcaggcaccgcgctggcgatgggggaggcgattgcccatgcgctggataaagatctgaaagaatgcgccgtctacagtcgtgaaggctacaccggcgaacgcgtgccgggaacgattggctttgccaccgtccgcgccggggacattgtgggcgaacataccgcaatgtttgccgatatcggcgaacgtgtcgaaatcacccacaaagcgtccagccgtatgacttttgccaatggcgcggtgagatcggcactttgggtcagtgcaaagcagaatggtctttttgatatgcgagatgtccttgatctcaacaatttatagt

SEQ ID NO: 217593 - DNA, 521 bp, Unknown
  Bacterial polypeptide expressing nucleotide sequence isolated from the Sargasso Sea
accagtagtaggaaccacaggtctaagcccttcgcaaatacaagatttgtctgtttttgctcagaaagcatcagttggttgtgcaattattcctaatttttcagtaggtatggttcttcttcagcaggcggcatcggtagctgcaaggttttatgacaatattgaattaatagagatgcatcataatcaaaaagctgattcacctagtgggacgtgtataaaaactgcagaaatgattgaagaatatccaaagaaatttaatcagaatttagtaaatgaatctgagtcattgaaaggtgtacggggtgggctcagagattcaggaattaatatacattctgtacgattaccaggattactcgctcatcagttagtaattatgggatctccaggagaaacttacacaattaagcatgacactattgatagaaaggcatatatgccaggagttttacaggctattaaaaaaattggtaattatgaaactttagtttatggacttgaaaaattaattttttaaa

SEQ ID NO: 217594 - DNA, 585 bp, Unknown
  Bacterial polypeptide expressing nucleotide sequence isolated from the Sargasso Sea
tatgtcaaaaataaaagtaggtattgctggttgtctggggaaaatgggacaagagctcaccaaacaaattttagatgatagaaattttatatttgttggaggttttgaaaataaaaaccatcctaaaattggaaaaaaaataagcgatgttacagatataagatcaaatacaattgtaactaataatgcggtatcagtatttaaagcagccaatgttgttatagattttacaacaccgcaatcaacattatcaaatgttaaaattgcaagcacaacaaaaacagctttagttattggtactacaggtattacagctaatcaaaaaaataaaattaaaagtttttcaaaaaatattcctattcttatgtcatcaaacatgagtgttggggtaaaccttttatttgatttagttagacaagcagcatcttcactccactatgatgaatatgatattgaaatcgcagaaactcatcacaaacataaagttgatgctccttctggtacagctctttcacttggagaatatgctgccgcaggtcgcagaaccaaactagacaaaaacaaagtacttgatcgaaccaaaag

SEQ ID NO: 217595 - DNA, 231 bp, Unknown
  Bacterial polypeptide expressing nucleotide sequence isolated from the Sargasso Sea
acgagcgagataggagtgctatagggtttgccacagtgcgtgctggcgatatcgtgggcgaccacacagtcacttttgctggacggggtgagcgaatcgagattactcacaaagctagtagcagaatgacttttgcaaacggcgcagtaagagcggcaacttggattgtgtcaaagaaaactgggatttactctatgcgtgatattcttaactcgactagtaagggctaat

SEQ ID NO: 217596 - DNA, 305 bp, Unknown
  Bacterial polypeptide expressing nucleotide sequence isolated from the Sargasso Sea
gcgtatgggggaggtcgtggctgatgcgctgggtcgtgacttggcaaaagtggctgtgtatggccgtgaagggcaaaccggtgcgcgcgacccgcagaccatcggctttgctaccgtgcgtgctggcgatgtagtgggcgaccatacggtgctctttgcgactgagggcgagcgtgtggagattacccacaaggcctccagtcgcatgacctttgccaagggcgcggtgcggtctgccatgtggctggctggtcgtgaccgggggttgtttgatatgcaggatgtgctgggcttgaaggactgag

SEQ ID NO: 217597 - DNA, 588 bp, Unknown
  Bacterial polypeptide expressing nucleotide sequence isolated from the Sargasso Sea
gaagctgatcgatttcacgtcaccagagtcgaccatggcgaatgtcgaactatgccagaagcacggcaaaggcattgtgatcggtactaccggcctcaccgatgagcagaagtcgaagttgaaagccgcggcggcagatacccgtatcgtatttgcgccgaactactcagtgggtgtgaacctgtgtctgaacctgctgcgcatggcagccaaggtgatgggtgaagacagtgatatcgaagtgatcgagatgcaccaccgtcacaaagtcgatgcgccatcaggcaccgcactgcgcatgggcgaagtcgttgctgaaaccatgggctgggatctgaatgaagtggcttgctacggccgcgaaggccagacgggtgctcgcccgcacaagcagattggttttgaaaccattcgaggcggcgacgtcgttggtgatcacactgtgatgttcgccaccgaaggcgagcgcgtagaggtgactcataaagcgcagagccgtatgacttttgctaaaggtgcagtgcgtgcggcgaaatggctgactgaacagccagcggggctgtacgacatgcaagacgttttaggctt

SEQ ID NO: 217598 - DNA, 784 bp, Unknown
  Bacterial polypeptide expressing nucleotide sequence isolated from the Sargasso Sea
tatgcatgatgcacaaatccgcgttgccatcgcgggagccggaggacgcatggggcgtcagttgattcaggccactctcggcatggaaggcgtacagctgggcgcggcgctggagcgcgaaggttcctccttattaggaagcgatgccggagagttagcgggagccgggaaaacgggcgttaccgtacaaagtagccttgaagcggtgaaagatgatttcgatgttttcatcgattttacccgcccagaaggcacgctgacgcatctggcgttttgccgccaacacggtaaagggatggtgattggcaccaccggctttgatgacgcgggtaaacaggctattcgtgatgccgcgcaggagattgctatcgttttcgccgcgaactttagcgtcggcgtgaacgttatgcttaagctgctggagaaagcggcgaaagtgatgggcgattacaccgatattgagattattgaagcccaccaccgccataaagttgatgcgccgtcaggcactgcactggcgatgggcgaggcgattgccggggcgctggataaagatctgaaagactgcgcagtctattcgcgtgaaggttacaccggcgagcgcgtaccgggcacgatcggctttgccacggtgcgggcgggggatatcgttggtgagcataccgcgatgtttgctgatattggcgagcgtattgagatcacgcataaagcgtccagccgcatgacttttgctaacggcgcggtgagatcggcaatttggctaaaatcaaagtcaaatggtctt

SEQ ID NO: 217599 - DNA, 580 bp, Unknown
  Bacterial polypeptide expressing nucleotide sequence isolated from the Sargasso Sea
actgcgccagaggccagtattgtccatttagactggtgtgtgcgccataagaaagccatggtgatcggcacaactggtttcaatcatgctcaaaaagaacagatcaatgcctttgccgagcaaacgccagtagtgatggcgccgaatatgtctgtgggtgtcaatctgatgtggaaattgctcgaattggccgctgaggtcatgggcgattacaccgatatcgaaattatcgaaggtcaccacagatataagaaagacgcgccatctggcacggcactaaaaatgggtgaagtgattgctaagaccttaggtcgtgatcttgaaaaatgcgccgtctatggccgcgaagggatcactggcgagcgcgaccgtgaaactatcggttttgccacaattcgtgctggtgatttagtcggtgagcataccgccatgtttgccgatatcggtgagcgtttagagatcacccataaagcctctagtcgtatgacctttgcaaatggcgctatgcgtgccgcccattggttagtggagcaaaaaccgggtctgtatgacatgcagcaggtattaggtttgaattaac

SEQ ID NO: 217600 - DNA, 547 bp, Unknown
  Bacterial polypeptide expressing nucleotide sequence isolated from the Sargasso Sea
tttagccataaaaaataaaacaaggacatgggtaattggaacaacaggcttatcttctgatcaagaacaaactattagaaaaaattctttaaaagcccctattgtttatgcggcaaatatgagcgtcggagtaaatttgcttatagcattgattgaaaaagctgtgaaatcgatcgattatgattgggacattgaaatacttgaaatgcaccataggcataaagttgacgctccatctgggacagccttaacattaggaaaaacagcagcaaaagttagagatgaccactttgaaaaagtttccaaattatcaagagaaggcagagttggagaaagaattaaaaaagaaattgggtttgcaacacttcggggtggatctgttgttggagaccacacaatggttttagctcatgacgatgaaagaatagaactaacgcataaggcgactaatagaaaaatttatgcaaatggtgcagtgaaagctgctatatggtgtgcaacaaaacaaacaggcttgttcaacatgaaagaagtattaaagctgtaa

SEQ ID NO: 217601 - DNA, 743 bp, Unknown
  Bacterial polypeptide expressing nucleotide sequence isolated from the Sargasso Sea
gatgactgtccgggttggtgtcatgggccctgggggaagaatggggcgaatgctggtagaggcgatcacagagggcgaggcctcaagcactctcgcagcggcggttgatcgccccgggtcctcactggttggtactgatgtgggacagtcactgggtgcaggggcactcggggttcgtgtcgccgacgacctttctgccatcatcggcgacatagatgtgctgatcgatttcactttaccggaggcgactttggcccatgcgcagacctgcgccgagcatgacgtgccgatggtgattggtacaaccgggttcaccgacgaccagagtgcaagtctgcattcgatcactacagggctggcagtctgccaatcgtccaactttgcgccgggtgtgaacctgacttttcaactggtagaggtggctgccagagcactgggtgacagtgtcgatgtggagatcgttgaagctcatcatcggcataaaattgacgcgccgtcgggtacggccttgagtttgggagaggcagtcgcccgagcacggggcacggatttgtctgatgtggcggttcacgctcgcgagggccgcacaggcgcgcgaccccaaaatgccattggctttagctcgatcagagccggcgatattgtgggtgaccactccgtcattttcgtcggcgatggagaacggttggaaatcacacaccgggcgggctcccgactggcttttgcccacggtgctcttaccg

SEQ ID NO: 217602 - DNA, 280 bp, Unknown
  Bacterial polypeptide expressing nucleotide sequence isolated from the Sargasso Sea
taagaccttaggtcgtgatcttgaaaaatgcgccgtctatggccgcgaagggatcactggcgagcgcgaccgtgaaactatcggttttgcgactgtgcgcgcgggcgacttagtcggtgagcataccgccatgtttgccgatatcggtgagcgtttagagatcacccataaagcctctagtcgtatgacctttgctaatggcgctatgcgtgccgcctattggttagtggagcaaaaaccgggtctgtatgacatgcagcaggtattaggtttgaattaa

SEQ ID NO: 217603 - DNA, 811 bp, Unknown
  Bacterial polypeptide expressing nucleotide sequence isolated from the Sargasso Sea
atgagtgaaaatattcgagttgtcgtaacgggggtttcggggcggatggggcaaatgattgtttcaggagttctgagtagtacaaaaactaggcttgttggagcattagaacgagaaggtcatgactggattggtaaggatctaggtttggtaagtggcttaaaccctcttggggtagaagtctctgatgatccagctttggtttttaaaaatgctgatgcaattgttgatttctctgcgccaaaagcctctgttgaattttctaaactagctgctgaacgtgggattgtgcatgtaattggtaccaccggctttaatgatcaggagttagctctgatagaaaattctggtaaaaaagcaaagattataagagctggaaatatgtctttgggtgtaaatctgctagttcaattgactaaaaaagttgctgcaaccttagacaatgattttgatatagaaattattgaaacgcaccataataaaaaagttgatgctccctcaggtactgctctaatgttagggaatgcggcggcagatggaaggcaaatatcattatcaaacgtccgtgatagtggaagagatggaataactggggctcgtaatagaggagatataggattcgtttctattagaggtggtgatgtagtaggagagcatgatgtattattcgcagcggctggagagagaattactttacgccatgtagctacagatcgcgctatttttgtcaggggtgcactaaaagcagttgagtggggtattcagcaagaaccgggtcaatacagtatgaaagatgttctggatctttagc

SEQ ID NO: 217604 - DNA, 853 bp, Unknown
  Bacterial polypeptide expressing nucleotide sequence isolated from the Sargasso Sea
ttgcccgcaattgtcggaatttgccgggtttacccctttcgaaccctcgtagccatgaaaattgccattgctggcgcatcgggccgtatgggccggatgctcatcgaaaccgtcctcaacgattccggcgcaacgctgtccggcgcgctcgaccgtgcggattcgccgcaactcggtcaggacgccggcgcatttctcggcaaacagaccggcgtgctgctgacggacgatgtcgagcgcgtgttcgccgaatccgactacctgatcgacttcacgcgtcccgaaggcacgctgatgcatctggaagccgcgcagcgccacaacgtcaagatggtgatcggcaccaccggtttcgacaacgggcagaaagcgcaactgcgcgacgcggcggacaagatcgcgatcatgttttcgtcgaatatgagcgtgggcgtcaacgtcacactcaagctgctcgagtacgccgcgaagcatttcgcgactggctacgacatcgaaatcatcgaggcgcatcaccgccacaaggtcgacgcaccgtccggcacggcgctgaccatgggcgaagtgatcgctcatgcgctcggccgcaatctcgacgactgcgcggtctatagccgcgaaggcgtgaccggcgaacgcgatccgtccacgatcggcttttcggcgattcgtggcggcgacatcgtcggcgaccatacggtgctgtttgccgggatcggcgagcgcatcgagatcacgcacaaatcggcgagccgcctgtcgtatgcgcaaggcgcgcttcgtgctgtacgtttcctcgaaggccacaagaccggcttcttcgacatgcaggacgtgctcggcctgcgctgag

SEQ ID NO: 217605 - DNA, 814 bp, Unknown
  Bacterial polypeptide expressing nucleotide sequence isolated from the Sargasso Sea
tatgtctaaaaaaattgtaaaaatatctattgcaggttctgctggcagaatgggtaaaatgctagtaaatgctgtagataaacatgttgaatgtgaattggttgctgcaacttgtcacccttctgaggaaggggttattggtaaagatgctggtttgatttcaggaataaatgaaaatgagattgttatctcagacgatccaaaagaactacttaagggagaagttatcattgattttacaactccagaatcaacagttcaaaactctaatttagcagcagaaaataaaattggtttggttataggcacaaccggtttaagcaaagagcaagaaaatataatcaaaaaaaattctcaattatcaccaataatatactcgtcaaatatgagtattggtgttaatttgcttttttcattgattgataaagccgttaaatcaattgacaataattgggacattgaggttttagaaatgcatcacaggcacaaagttgatgcaccatcaggaacagctttaagtatgggcaaagttgctgcagcttcgagggaatatcaattcgaaaagattaaaaagctttctagagaaggtaaagttggtcaaagatcaaatgaagaaattggctttgccactttgagaggtggatcagttgtaggagatcatactatgatacttgcacatgaggatgaaagaatagaattaacacataaagcaacaaatagaaaaatttatgcgaatggagcagtaaaagcagcaatctggtgttcagataaacaaaagggtttatttagcatgaaacaagtacttggattatga

SEQ ID NO: 217606 - DNA, 799 bp, Unknown
  Bacterial polypeptide expressing nucleotide sequence isolated from the Sargasso Sea
catgaagattgcgattgccggggcatcgggccgaatgggccggatgctgatcgaagccgttctcaacgatgccgacgcgcagctcgtcggcgcgctcgaccgcgccgattcgccattcctcggccaggacgccggcgcgttcctcggcaaggaaaccggggtcaagctgaccgccgacctcgacgccgtgttcgcgcaggccgacaccctgatcgatttcacgcgtccggaaggcacgatggcgcatatcgaggccgcgctgcgccacgacgtgaagctcgtgatcggcacgaccggcttcaccgccgagcagaaggccgagctgcaggccgcggcaggcaagatcggcatcgtgttcgcggcgaacatgagcgtcggcgtgaacgtcacgctgaagctgctcgaattcgcggcgaagcatttctcgcacggctacgacatcgagatcatcgaggcgcatcaccgtcacaaggtcgatgcgccgtcgggcaccgcgctgatgatgggcgaagccgtcgccggcgcgctcgggcgttcgctcgacgagtgcgcggtgtacggccgccacggcgtgacgggcgagcgcgatccgtcgtcgatcggctttgccgcggtgcgcggcggcgacatcgtcggcgatcacaccgtgctgtttgccgggatcggcgagcgcatcgagatcacgcacaagtcgtcgagccgcgtgtcgtatgcgcagggcgcgctgcgcgcggtccacttcctgtcggcgcgcggcgccggcctgttcgacatgcaggacgtgctcggcctgcgctga

SEQ ID NO: 217607 - DNA, 805 bp, Unknown
  Bacterial polypeptide expressing nucleotide sequence isolated from the Sargasso Sea
tatgcaacgtattgcagtgatgggcgccgccgggcgtatgggcaagaccctgatcgaggccgtgagtcaggccgagggcgccaagctcagcgccgccatcgaccgcgccgatagcagcctgatcggtgccgatgccggtgaactggtcggcctgggcaagattggcgtgaccctggcgggtgatctggccgcagtggtcgacgatttcgacgtgctgatcgatttcacccatccgtcggtgaccctgaagaacctggaagtctgccgccaggcgggcaaggccatggtcatcggtaccaccggtttcaccgtggaagagaaacagcagctgagcgaagcggccaagcagatccccatcgtctttgccgccaacttcagtgtcggcgtcaacctgtgcctgaaactgctggataccgctgctcgcgtgctgggtgacgacgtggacatcgaaatcatcgaggcccaccaccggcacaaggtcgacgcaccgtccggtaccgcactgcgcatgggcgaagtggtggccgatgcactggggcgtgatctgcagaaagtcgccgtatatggccgcgaaggtcagaccggcgcccgtgagcgcgagaccatcggcttcgctaccgtgcgtgccggtgacgtggtgggtgatcacaccgtgctgttcgccgccgatggcgagcgtgtcgagatcacgcacaaggcctccagccgcatgaccttcgccaagggcgcggtgcgttcggcgctgtggctgcaggggcgtgatgccgctctgtatgacatgcaggacgtgctgggtctgcgttga

SEQ ID NO: 217608 - DNA, 850 bp, Unknown
  Bacterial polypeptide expressing nucleotide sequence isolated from the Sargasso Sea
atgattgaaaattctaaaaaacccataccagtactagtttccggagctttaggcagaatgggtagcgaagttattaatactgtattaaattctacagattgtgaacttgtcgcagcaatcgacacaaacgaaaagaacaatggctcaaatatttctgaattattgaaggtaaaaaattgtgatgtttttgtttcaaatgattttgaagggactttatgttccattagtcaaaattatagaaatgaaaaaatcaaacctgttttggttgattttactcatcctgattctgtatatgaaaatactagatcagctattgcatatggggtatcaccagtagtaggaactacaggtctaagcccttcgcaaatacaagatttgtctgtttttgctcagaaagcatcggttggttgtgcaataattcctaatttttcagtaggtatggttcttcttcagcaggcggcatctgtagctgcaaagttttacgacaatattgaattaattgagatgcatcataatcaaaaagctgattctcctagtgggacgtgtataaaaactgcagaaatgattgaagaatatccaaagaaatttaatcataatttagtaaaagagtctgagtcattaaaaggtgtacggggtgggctcagagattcaggaattaatatacattctgtacgattaccaggattattagctcatcagttagtaattatgggatctccaggtgaaacatacacaattaaacacgacactattgataggaaggcatatatgccaggagttttacaggctattaaaaaaattggtaattatgaaactttagtttacggacttgaaaaattgattttttaaa

SEQ ID NO: 217609 - DNA, 847 bp, Unknown
  Bacterial polypeptide expressing nucleotide sequence isolated from the Sargasso Sea
atggaagtgatgaacaggtttgaggagattgaaatgggtggacaagtgagagttgcaattgtcggtgcgggtggacgcatgggacggactcttattgaatcggcttatcatcaagagcacattcgcttaggtgccgccattgagcgtcccggttcaagcttagtcggcgtggatgcaggcgaactcgtcggtgtgggtaagttaaatgtcattatcatggattcgctcgactatgcgaccgatgactttgatgtgctgattgattttactgcgccagaggccagtattgtccatttagactggtgtgtgcgccataagaaagccatggtgatcggcacaactggtttcaatcatgctcaaaaagaacagatcaatgcctttgccgagcaaacgccggtggtgatggcgccgaatatgtctgtgggtgtcaatctgatgtggaaattgctcgaattggccgctgaggtcatgggcgattacaccgatatcgaaattatcgaaggtcaccacagatataagaaagacgcgccatctggcacggcattaaaaatgggtgaagtgattgctaagaccttaggtcgtgatcttgaaaaatgcgccgtctatggccgcgaagggatcactggcgagcgcgaccgtgaaactatcggttttgcgactgtgcgcgcgggcgacttagtcggtgagcataccgccatgtttgccgatatcggtgagcgtttagagatcacccataaagcctctagtcgtatgacctttgctaatggcgctatgcgtgccgcctattggttagtggagcaaaaaccgggtctgtatgacatgcagcaggtattaggtttgaattaac

SEQ ID NO: 217610 - DNA, 850 bp, Unknown
  Bacterial polypeptide expressing nucleotide sequence isolated from the Sargasso Sea
atgattgaaaattctaaaaaaaccataccagtactagtttccggagctttaggcagaatgggtagtgaagttgttaatactgtattaaattctgcagattgtgaacttgttgcagcaatcgacataaacaaaaagaacaatggctcaaatatttctgaattattaaatgttgaaaattgtgatgtttttgtttcaaatgattttgaaggaactttatgttctgttagtcaaaattatagaaatgaaaaaatcaaacctgtgctggttgattttactcatcctgattctgtatatgaaaataccagatcagctattgcatatggtgtatcaccagtcgtaggaactacaggtctaagcccttcgcaaatacaagatttgtctgtttttgctcagaaagcatcagttggttgtgcaataattcctaatttttcagtaggtatggttcttcttcagcaggcggcatctgtagctgcaaggttttatgacaatattgaattaatagagatgcatcataatcaaaaagctgattctcctagtgggacgtgtataaaaactgcagaaatgattgaagaatatccaaagaaatttaatcagaatttagtaaaagagtctgagtcattgaaaggtgtacggggtgggctcagagattcaggaatcaatatacattctgtacgattaccaggattactcgctcatcagttggtaattatgggatctccaggtgaaacttacacaattaaacatgacactattgatagaaaggcatatatgccaggagttttacaggctattaaaaaaattggtaattatgaaactttagtttacggacttgaaaaattgattttttaaa

SEQ ID NO: 217611 - DNA, 564 bp, Unknown
  Bacterial polypeptide expressing nucleotide sequence isolated from the Sargasso Sea
tatgtctaaaaaaactgtaaaaatatccatcgcaggttctgctggaagaatgggcaaaatgctcgtcaatgtcgtagatcagcatgttgaatgtgaattagttgctgcaacttgccacccttccgaagtagacgttattggtaaagattctggtttaatttcaggaataaacaaaaacaatatctttatctctgataatccaaaagaattgcttgagggtgaagttattattgattttacaactccagaatcaacagtgcataactctaatttagcttcagaaaataaaattgggttggttattggaacaacaggtttaagtaaagaacaggaaaatataattgaaaaaaattctcaattatcaccaattatttactcatctaatatgagtgttggtgttaatttgcttttttctctaatcgataaagctgtaagatcaatcgacaacaattgggatatagaagtgttggaaatgcatcacaggcataaagttgatgcaccatcaggaacagctttaagtatgggcaaggttgctgcggcttcaagggagtatcaattcgaaaa

SEQ ID NO: 217612 - DNA, 736 bp, Unknown
  Bacterial polypeptide expressing nucleotide sequence isolated from the Sargasso Sea
ttgaataacatcaaaattttagtaaatggatccaaagggaggatgggcattgaaaccctaaaagccatagaggatgatcctgaacttgctttggtgggtcagactgatttaggagatgattttgaatcggcaatacgacagaccgaagccgacgcggtggtggatttcaccacagcttctgcagcgttttcaaactgtaaagccatcattcaatcatcttctcgaccggtgattggaaccagcggactgcttccggaacaagtcaaggaactccaggatttagcacgtcagaaaaacataggcggaatcattgccccgaattttgccattggtgcagtattaatgatgaaattcgcatctgaggcagccaaatttatgccggatgtggaaattatagaactgcatcatgaaaaaaaagcggacgccccctccggtacggcaataaaaaccgcggcattgattgctgaatcacgaaacagggttccagaagcaattgaggaaaaagaaatccttaccggtgcccgcggtgcatgggccaacgaggtttcggttcattcagttcgactcccaggaaaagttgctcatcaggaagtgattttcggaggaaaaagtcaaaccctcacaatccgtcacgattccatccacagggattccttcatgccgggagtttgcctggcctgtaaaaaggtcatggacttagacgaactggtttatggattagagcatgttttatgaa

SEQ ID NO: 217613 - DNA, 835 bp, Unknown
  Bacterial polypeptide expressing nucleotide sequence isolated from the Sargasso Sea
atgcccccatccatacccgtcgtggtggccggtgcccttggtcgcatgggtgccgaagtgatcaaggcagtggtgggatctgcggattgcacgctggtgggggccatcgacaacaccgccggcaaagaagggagtgacatcggccttgaactgggactgggcgagctggaggttgcggtgacagccgatttcgaaggctgcctctgcgccgtgagccagtcggtgcgggatgaggaagccggggccgtgctggtggatttcacccatccgtcggtcgtctacgagcacacccgggcagcttttgcctacggcgtgcacccagtgattggcaccacaggcctctccccggaacaattgagtgatctttgtaagttcgctgccaaggcctccatcggaggagccgtgattccaaatttttccgtcggcatggtcctgttgcagcaggccgcagcagcagcagcacgcttttacgaccacgctgagctcaccgaactgcatcacaaccgcaaggcggatgcccccagtggcacctgcatcaaaaccgccgaactgatggaggagctcggcaagagcttcaaccctgccgaagtggatgagcatgaatcgctggcaggctcccgaggtggtcgtcgtgagagcgggcttcggctccattccctgcgcttaccgggcctggtggcccatcaggaagtgatgttcggtgcaccgggcgagacctacacgctgcgccacgacacgattgatcgttccgcctacatgccgggtgtccttctcaccgtgcgcaaggtgcgttcactgcaaacgttggtctacggccttgaacggctgatctgaa

SEQ ID NO: 217614 - DNA, 805 bp, Unknown
  Bacterial polypeptide expressing nucleotide sequence isolated from the Sargasso Sea
aatgaaagtaggattatttggcgccaacgggcgtatgggacgggttttagttgaagcgctagatttaagtgacgatgcacaacttagcgtggcaacggtacgcgatgattcaccttgggttggactaaatgtgggcgaacttgcgggcattggcaaaaaagacgttgattgtactgcgctatcagatttaagtggtaatgatgcagatgtaatgatcgatttcaccctgccttcggttattgaaagtaatcttacgtggtgcgttaaaaataaaatgcctgttgttattggaactactggattaaacgattcacagttagcggcactcgacgaagcagcaaagcatatacctatcgtatttgcggctaattacagtgtgggcgtaaatttaatgctttccctagttcgacaagctgcaagtgtgctgggtgaaacggctgacatcgaaataacagaagcacatcacagatttaaacaagacgcgccttctggtacagccatggccattggtgaagccattgctgacgaattgggccgtgatttaaaaacctgcgctgtatacggcagagaaggaaaagagcctgaacgcgaccaaggtactattggcttcgcaacaattcgagccggagacatcgtcggtgaacacacagccttatttgcagatattggtgagcgcctagagattacgcacaaggcatcaagtcgacttacttttgcgaaaggcgcagtgcatgcagcgaagtggttgtatggaaaagaacctggtctatactccatggttgatgtacttgatttaaagctatag

SEQ ID NO: 217615 - DNA, 736 bp, Unknown
  Bacterial polypeptide expressing nucleotide sequence isolated from the Sargasso Sea
ttgaataacattaaaattttagtaaatggatcccaaggtaggatgggcattgaaaccctaaaagctatagaggatgatcctgaactggttttggtgggtcagactgatttgggagatgatcttgaatcggcaatacgacaaaccgaggccgatgcggtggttgatttcaccacagcttctgcagcgttttcaaactgtaaagctatcattcaagcatcatctagaccggtgattggaaccagcggactgcttccggaacaagtcaaggaactccaggatttagcacatcagaaaaacataggcggaatcatagccccgaattttgccattggtgcagttttaatgatgaaattcgcgtctgaggcagccaaatttatgccggatgttgaaattttagaactgcatcatgaaaaaaaagcggatgctccatccggaacggcaataaaaaccgcagcattgattgctgaatcacgtaacagcgttcctgaagcaatcgaggaaaaagaaatccttacgggtgcgcgcggtggaagggccaacgaggttccggttcattcaatccgactcccaggaaaagttgctcatcaggaagtgattttcggcggaaaaagtcaaaccctcacgatccgtcacgattccatccacagggattccttcatgccgggagtttgcctggcctgtaaaaaggtcatggacttagacgagctggtttatggattagagcatgttttatgaa

SEQ ID NO: 217616 - DNA, 575 bp, Unknown
  Bacterial polypeptide expressing nucleotide sequence isolated from the Sargasso Sea
aaacggggtggtgattcttgggacggtcacagccaactccaaggaactggggggcaagattccgatcccagcaccggctgatctcggtgatctttccggttttgaggccggcttcaaggagcccgtggcgatggccagtggaaagcccttcaagcccggtaaggcctacaaagacagcaagctctgcaacatgatcaccacccaggagttgcaccgtcgcctgcatggggacacgggaatcactttcgcgtcgctgtatcccggttgcgttgccgatacaccattgttccgcaacaccccaaaagcgtttcaaacgatcttcccctggttccagaagaacatcaccggtggttatgtgacgcaggccttagcaggtgagcgggtggcgctcgtggtgtcggatccggattttgctgaatccggtgtgcactggagttggggcaaccgtcaaaaaaaggacggccagcagttcagccaggaattgtccgataaggccaccgacccagacacggcaagccgcgtctgggaactgtcgttgcagttggttggtctttcgtcagtcgaaacccagtaga

SEQ ID NO: 217617 - DNA, 728 bp, Unknown
  Bacterial polypeptide expressing nucleotide sequence isolated from the Sargasso Sea
gatgggaactccgggcaccgttctgatcaccggcaccacctctggggtcggtctcaacgccaccaaggccctcgtggaacggggctggacggtgatcaccgccaaccgcagtccccagagagcggctggtgctgccgatgaaatggagattcccaaggaccgtctccagcatgtgctgatggatctgggtgatctggacagcgtccgttcggcggtggagaagctccccggtggagtggatgcgctggtctgcaatgccgcggtgtacaagccgaagctgaagcagccggagcgttctccgcagggctatgagatctcgatggccaccaatcacttcggccatttcctgttggttcagttgctgctggatcggatcagggcctcgagccacccgtccaggcgcgttgtgatcctcggcacggtgacggccaactccaaggagctgggtggcaagatcccgatccctgccccggcggatctcggtgatctctccggctttgaggcgggcttcctcgagccgatcagcatggccagcggcaaaccgttcaagccaggcaaggcctacaaggacagcaagctctgcaacatgatcaccacccaggagctgcatcggcgcctgcacggggagacgggcatcaccttcacgtcgctgtatccgggctgtgttgccgacacgccgttgttccgcaacaccccgaaggcctttcagacgatcttcccgtggtttc

SEQ ID NO: 217618 - DNA, 690 bp, Unknown
  Bacterial polypeptide expressing nucleotide sequence isolated from the Sargasso Sea
gctttctggcacgaccgggacgggctcccttgaggccgttgggatagacctcgcggacttatcttcgatcaagaaattcgtggatgacgtcgcgtacgagtccttttcagctatcgtgctcaacgcgggggttgctcctgacagagccgccatgggtatggccgccgggcctcaaacagccaagcgtaccaagcaggggttcgaagagaccatcggagtgaaccatctcggccactttctcctctgccaagggctcttgcccaaacttctttcaacagctggggctcgaaagcgaattgtcatcacaagtggagagatacacaatgccgagagcccggacggcaggaacggcgcggtcccgaccctcggtgatctttctggtcttgaattaggcccagatttcgagatgtgcgacggcggcgacttcgacggcaacaaggcgtacaaggacagcaagctatgcggtgtcctgtttgcaagggaactggcgaggcggctccgagagtcactcggagacgacgcagatgtggtctgcaacgtgttcagcccggggttcgtcccgacatctggtttattccggaatcagagcgcacccgttcaagcgctgcttaagttcgccttcaactaccctccgcttgcaacgtcgctggagactgcgggaatgttcaccactcatatggtactcggcag

SEQ ID NO: 217619 - DNA, 952 bp, Unknown
  Bacterial polypeptide expressing nucleotide sequence isolated from the Sargasso Sea
gatgtccacgcccggcaccgctctgatcaccggcaccacctcaggtgtgggcctgaatgccacctgtgccttggtgaagaggggctggacggtgatcaccgccaaccgcagcccccagcgggccgccgccgcggctgacgagatggacctgcccaaggagcggctacagcacgtgttgatggatctgggcgacctcgacagtgtgcgtcgtgctgttgatgccttgcccgatcgtttggatgccgtggtttgcaatgccgcggtgtacaagccaaagctgaagcagccggagcgttcgccccagggctatgagatctcgatggccaccaaccacttcggccatttcctgctggtgcagctgctgttggggcgcctgcagaactccagccacctctccagacgggtggtgatcctcggcacggtcacggcgaactccaaggaactggggggcaagattcccattccggcgccggcggatctgggggatctctctggttttgaggccgggttcaaagagcccatagccatggccagcggcaagccgttcaagcccggcaaggcctacaaagacagcaagctctgcaacatgatcaccacacaggagctgcaccgccgcctgcacggagagtcggggatcaccttcacctcgctctacccgggctgtgtggccgacacgccgttgttccgcaacactcccaaggcgttccagacgatttttccctggttccagaagaacatcaccggcggttacgtctcccaggccttagctggagaacgggtggcggatgtggtggcccatccagacttcgccgaatccggcgtccattggagctggggcaaccgccagaagaaggatggccagcagttcagccaggagctgtcggacaaggccaccgacccggacaccgctcgacgggtctgggacctgtcgatgcagctggtcggcctctga

SEQ ID NO: 217620 - DNA, 511 bp, Unknown
  Bacterial polypeptide expressing nucleotide sequence isolated from the Sargasso Sea
atgtccgcgcccggcaccgttctgatcaccggcaccacatcgggtgtgggcctgaatgccacctgcgccttggtgaagcggggctggacggtgatcaccgcgaaccgcagccaggagcgtgccgcggctgcggccgatgcgctcgatctccccaaagaccggctccagcacgtgttgatggatctgggcgatctcgacggtgtgcgtcgagctgttgatgcgttaccggatcgattggatgcggtggtctgcaatgccgcggtgtacaaaccgaagctgaaacagcccgagcgttcaccgcagggctatgagatctcgatggccaccaaccacttgggccatttcctcctagtgcagttgctgatgggccgcttgcagaactccagccacccctccaggcgggtggtgatcctgggcaccgtgacggccaactccaaggagctgggaggcaagatccccatccccgctcccgcagatctgggcgacctgtctgggtttgaggccggtttcc

SEQ ID NO: 217621 - DNA, 1089 bp, Unknown
  Bacterial polypeptide expressing nucleotide sequence isolated from the Sargasso Sea
gctggaaatatttattgggtcgaacgtgaattggaataaatgctggggagaattgattattgaggaactggtgcggcatgatacagaatgtttttgtatctccccaggatcacgctccacccctcttacttacgctgtagctactaatcctaaggcaaatgcagttgtatgttacgatgaacgtgcagctgcttattatgcccttgggcatgcacgtgctacgggacttccggctgtattaatatgcacttccggaactgctacggcaaattatttgccagcagttatagaagcttctgttgaacaaatcccgctgcttctgatgactgcagaccgtccacctgaacttacagatacaggggcaaatcaggcagttaaccagacaaatctttttggtaagtatgcccgctggttttttgatccaggctgcccagggccggaatattccgcagaagctttacttaccacaattaaccatgcaatatttaaaacacatttcccattgtctggaccggtacatttaaatttcccattccgtgaacctttcttagatgataacagtggggagaaaatccaatacaagacttcaattgaaaaaattccctatgttcgcaattctattccccgaaaaatactgccagataatgaaataaaagaactaataaataaccgcccggaaacaggcatattgagcatagggagagtccctcgtgattcacttgattccgtaagaattcttgctgatgaacttgactggcctgtatttgcagatattacttcaggccttcgactaggaaaaaattgtccaaacagaattacatattatgatcagttgctgcatgaagaactggaaacagcaaattgggcaacagaagcaatttggcacattgggttcccgcctacttccaaacgctggctaactttctgggaacaaaaacctgtccctcaaatggtttggatagctgataattctgaacgtcaagaccagtcaaaccaatttcgctgtaaaatcgaaatgaatattgatgagttttgtaacaaagcagtaaacgctttaaagtttggaaaaataaatctcaaagagcatca

SEQ ID NO: 217622 - DNA, 786 bp, Unknown
  Bacterial polypeptide expressing nucleotide sequence isolated from the Sargasso Sea
atctggcagatctcgaatcggtcaggcgttttgttgaagtctttcgaggcttgcagcgtccactgagtgccttggtgattaatgcagcggtctataagcccctgctaaagcaacccgagcgcagtcctcagggttatgagctctcgatggccaccaaccatctgggccattttctgcttgctcgacttctgatgcaggatctgcaggcgtcctcgcatcaggacaagcgcctgatcactcttggcacggtgactgcaaattccaaggaactgggagggaagattcctattcctgctcccgctgacctcggcgatctctccggctttgctgctggcttccaggcaccgatcagcatggctaacggcaagccctttaagccgggcaaggcctataaggacagcaagctctgcaacatgatcaccagcctcgagctgcatcggcgtttccacagctcaactgggatttgctttagttcgctctaccccggttgcgttgcggacacccccttgttccgcaacagccttcctgccttccagcgaatcttcccctggttccagaaaaacttgactgggggttatgtctcccagcctctcgctggtgaacgtgtggcccaggtggttgccgattcgcagttcaagacctcaggcgctcactggagttggggtaaccgtcagcgcaaggatgggcgcgagttccagcaggagctatcggacaaggtgaccgatccggctacagccctgcgcatgtgggaactctctagccagttggtgtccttacccgcctgag

SEQ ID NO: 217623 - DNA, 715 bp, Unknown
  Bacterial polypeptide expressing nucleotide sequence isolated from the Sargasso Sea
gatgcacctgctttgcaatgccgctgtatacaagccgaagttgaagcaaccggagcgctcaccgcagggttacgagatctcgatggcgaccaatcacctcggtcatttcctgctgattcagctgctcatggatcggatcaaggtttccagccacccctccagacgtgtcgtgatccttggcacggtgacggccaattccaaggagctgggcggcaagatcccgatccctgcgccggctgacctcggagacctctccggatttgaagcgggctttcaggatccgatcagcatggccagcggtaaggggttcaagcccggcaaggcttacaaagacagcaagctgtgcaacatgatcaccacccaggaactgcacaggcgtctgcatacggagacggggatctcattcacctctctctatccgggctgtgttgccgatacgccgttgttccgcaacacgccaaaggcgtttcaaaccatcttcccctggttccagaagaacatcacaggtggctatgtctctcaggccctggctggcgagcgcgtggcccaggtggttgctgatccggatttcgcggagtccggagtccactggagctggggcaatcgccagaccaaggatggtctgcaattcagccaagaactctcagagaaagccaccgatcctgagacggcccaacgggtgtgggacctctcgcttcggctggtgggcctttaa

SEQ ID NO: 217624 - DNA, 955 bp, Unknown
  Bacterial polypeptide expressing nucleotide sequence isolated from the Sargasso Sea
actggccatcgtcacgggcgcttcctctggggttgggttgtggaccaccaaagccttgattgaccagggttggacggtggtgatggcttgccgcgatagcgccaaagctcagcaagccctggtggaactgggttttggccgtcctgctgaggcgatcatcttgccgcttgatctctcggatctggactcggtcaaggcgtttgttgagaggttccgtggtctgaatcggcctctgacggcgttggtgatcaatgcagctgtctacaagcccctgctgaaagaacccgagtggagtgcccagggctatgagctcagcatggccactaatcatctgggccatttcttgctggcaaggttgctactcgaggacctcaaggcttcaccagcttccgacaagcgtctgatcaccctgggcacggtcacagcgaattccaaggagctaggcggcaagatcccgatccctgctcctgccgatttgggtgatctttctggctttgccaaaggattcaaggcgccgatcaccatggccagcggcaagaagtttaagcctggtaaggcctacaaggacagcaagctctgcaacatgatcaccagcttggagttgcaccgacgcttccatgattcaaccggcatcagcttcagttcgctctatcccggttgtgttgccgatacacccctatttcgcaacagtctcccggctttccaaaagatcttcccttggttccaaaagaacatcactggtggttatgtcagccaagccctggccggcgagcgtgttgctcaggtcgttgccgatccagcgttccgcagttctggagcccattggagctggggcaatcgccagaaaaaagacggcaagcagttcaatcaggagctttccgataaagccagtgacccagccacggccctgcgggtgtgggatctctccagcgagttggtgggcttgaacccttaa

SEQ ID NO: 217625 - DNA, 778 bp, Unknown
  Bacterial polypeptide expressing nucleotide sequence isolated from the Sargasso Sea
aatgaaaggcaaaaaaggtcttataatgggtgttgccaatgaaagatctattgcttggggtatttctcaaaaacttgctggggcaggtgcagaacttgcctttacttacttaggggatgcactaaaaaaaagagttgtgcctttagctgaaaaattaaattccaatgctacatttagctgtgatgtagaaaagaaagaggaagtaataaaactttttgaagatataaaatcaaaatggggtcagattgactttgttgttcatgcggttgcattttcggacaaatcagaattatcaggagaatatttaaatacaacaagagaaaattttataaaaagtatgttaatttcatgtttttcattcactgaagttgcaaaagaagcttccaaaataatgaataaagacgggagcatgcttacattaacttacgagtctaataaagctatcccaaactataatgtaatgggtgtttgtaaatcagcacttgaagcaagtgtaaaatatttggctagagatttgggttcaaaaggaattagagtaaacgcaataagtgctgggccaattaaaactttagcagcatcagcaattggtgatgcaaaatttctatataagtggaacgaagatcattcttttttaaaaaaaaatgtagatattcacgatgttggtaattcagctttatatttattgagtgatcttggaggtggagttactggtgaaattcactatgttgatgcgggatacaacaaagtagggatgccagaccctaaaaatattacataa

SEQ ID NO: 217626 - DNA, 478 bp, Unknown
  Bacterial polypeptide expressing nucleotide sequence isolated from the Sargasso Sea
atatttaaatacaactagagaaaattttttaagaagtatgttaatatcttgtttttcatttactgaagttgctagagaggcatctaaaataatgaagcaaggcagtagtatgattactttgagttatgaggcaaataaagccatacctaattataatgtgatgggagtttgtaaagctgctctagagtctagtgtaaaatatattgcaagagatttgggagtgaagaatataagagtaaatgcaataagtgctggtccaatcaaaacactggctgcatcagccattggggacgctaaatttctttacaagtggaatgccgatcattctttcttaaaaagaaatgttgataatcttgatgttggaaattcagcactatatcttttaagtgatatggcagccggcgttactggtgaaatacattatgttgatgcaggttataacaaagtaggaatgccagatccaaaaaactttagttaa

SEQ ID NO: 217627 - DNA, 722 bp, Unknown
  Bacterial polypeptide expressing nucleotide sequence isolated from the Sargasso Sea
gggaatatctcaaaaacttgcagaagctggtgctgagctagcttttacgtatttaggagatgcgttaaaaaaaagagttatacctttagctgaaaagcttaattcaaagattgctttaagttgtgatgttgaaaaaaaagataatgttagaaaactatttgaagatttaaaatctaaatggggtaaaatcgatttcgtagtccatgcagttgccttctcagataaatcagagttatctggtgagtatttaagtacaacaagagaaaattttcttaagagtatgcttatctcatgtttttcttttacagaagtatccaaagaagcctccaaaataatgaaagaagggggaagtatgctaactcttacgtatgaatctactaaagcaattccaaattataatgttatgggagtttgtaaatctgccttggaggctagcgtaaaatatcttgcaagagaccttggtcaaaaaaaaataagggtgaatgctataagcgctgggccaattaaaactttagcagcatctgcaataggagatgcaaaatttctttacaagtggaatgaagatcattctttccttaaaaggaacgttgatatttacgatgtgggcaattcagcactctacttattaagtgatttggctagcggtgttactggagaaatacattatgttgatgccggatacaataaagtaggaatgccagatccaaaaaatatatcttaac

SEQ ID NO: 217628 - DNA, 773 bp, Unknown
  Bacterial polypeptide expressing nucleotide sequence isolated from the Sargasso Sea
aatgaaaggaaaaaaaggattaattatgggcgttgctaacgaaagatcaattgcctggggtatttctcaaaaattagctgaagctggagcagaattagcatttacatatcttggggatgctcttaagaaaagagttattcctttagcagagaaagtaaattcaaatatcacatttagctgtgacgttgaaaaaaaagatgaaataataaaactttttaaagatataaaatcaaaatgggatcagattgattttgttgttcatgcagttgccttttcagacaaatcagaattatcgggagagtatttaaatactactagagaaaattttttaaaaagtatgttaatttcatgcttttcatttacagaagttgcaaaagaagcatctaagataatgaatgaaggtggaagcatgctcactttaacttacgaatctaataaagccattccaaattacaatgtaatgggtgtttgtaaatctgcacttgaagcaagtgttaaatacttagctagggatttaggattaaaaggaatcagggtaaatgcaataagcgcaggaccaataaaaactctagcagcttcagctattggagatgcaaagtttttatacaaatggaatgaagaccattcttttttgaaaagaaatgtagatatccacgatgttggaaactcagctttatatcttttaagtgatcttggaggtgctgttactggtgaaattcattatgtagatgcaggatataacaaagtagggatgccagatcctaaaaatatac

SEQ ID NO: 217629 - DNA, 661 bp, Unknown
  Bacterial polypeptide expressing nucleotide sequence isolated from the Sargasso Sea
tatgagtctattaaagggaaaaaaaggtctgataatgggtgttgcaaatgatcgctcaattgcgtggggtatagcaaaaaaattatcagagaatggggcagaacttgcttttacctatttaggtgacgctttaaaaaaaagagttgtgccacttgctgaatctttaaaatcaaactttactttaagttgcgatgttgaaaaaaaggatgacgtaattaaaacatttgaagaaattaaaaaaaaatggggaaatttagactttgtggttcatgctattgctttttcagatagatcagaactttccggcgaatatttaaatacatctagagaaaattttttaaaaagtatgttaatatcttgtttttcactaacagaaatagctaaagaggctgcaaaaataatgaaaaagggttcaagtttattgacccttacctatgaatcttcaaaagtaattccaaattataatgtaatgggagtctgtaaatctgctcttgaaacaagcgtaaaatatcttgcaagagacctgggcacaaaaggtattagagttaatgcaattagtgccggtccaattaaaactttagcagcttcagcaataggagatgcaaaatttttatataaatggaatgaagatcattccttgcttaaaagaaatgtagatata

SEQ ID NO: 217630 - DNA, 730 bp, Unknown
  Bacterial polypeptide expressing nucleotide sequence isolated from the Sargasso Sea
attgcatgggggtatttcacaaaaactatctgaagcgggagccgagcttgcatttacttatctaggtgatgctttgaaaaaaagggtaatacctcttgcagaaaaactaaattcaaatatgacttttagttgtgatgtagagaacaaagacgacatagttaaattatttgaagatgtaaaatccaactggggtgagattgattttgttgttcatgcaatagcattttcagataaatctgagctttctggtgaatatttgaatacaacaagagaaaactttcaaagaagcatgcttatttcatgcttctcttttactgaggtagctagagaagcatcaaagataatgaaaccaaatggaagtatgatcaccttaagttacgaagcaaataaagctattcctaattataatgttatgggggtttgcaaagcagcactagaatctagtgtaaaatacttagcaagagatttgggtgctaaacaaataagagtaaatgcaattagcgcaggacctattaaaacattagctgcatcagctatcggggatgcaaaattcttatataaatggaatgaagaccattcatttcttaaaagaaacgttgatattcatgatgtgggaaattctgcattatacttactaagtaatctagcaggtggtgttactggtgaaattcactatgtagatgccgggtacaataaagtaggtatgccagatcccaaaaatatttcctaa

SEQ ID NO: 217631 - DNA, 583 bp, Unknown
  Bacterial polypeptide expressing nucleotide sequence isolated from the Sargasso Sea
tatgagcttattaaagggaaaaaaaggcttaataatgggtgtagcaaatgagcgctctattgcatggggaatagcaaaaaaattgtctgagcacggcgcagaacttgcttttacttatttgggtgattcattgaaaaaaagagtagtacctttagctgagtcattaaaatcaaattttacgctaagctgtgatgttgagaaaaaagaagatgtaataagaacatttgaagatattaaaaaaaagtgggaaaatttggactttgttgttcatgcaatagctttctctgatagatctgaactttctggtgaatatcttgatacatcgagagaaaattttttaaaaagtatgttgatctcgtgcttttcattcacagaaattgcaaaagagtcttctaaaattatgaaaaaaggatcaagtatgttaacgctaacatatgaatcttctaaagtaattccaaattataatgttatgggagtttgtaaagcagctttggaatctagtgttaaatatcttgcaagagatttgggttccagaggaatacgagtaaatgcaattagcgcaggtccaattaaaactttagca

SEQ ID NO: 217632 - DNA, 723 bp, Unknown
  Bacterial polypeptide expressing nucleotide sequence isolated from the Sargasso Sea
ggggtatatctcaaaaacttgcagaggctggtgcggaattagcatttacttatttaggtgatgctttaaaaaaaagagttgttcctttagcagaaaaattaaattcgaaggttacatttagttgtgatgttgaaaaaaaagaagaagtagttaaattatttgaggacatcaaatctcaatggggtgaaatcgattttgtcgttcatgcagttgctttctctgataaatcagagttatcaggtgaatatttaaatacgacaagagaaaactttttaagaagtatgttaatttcttgtttttcatttactgaagtagcaaaagaagcttcaaaggtaatgaaacaaggtggaagtttattaactttaacctacgagtctactaaagcaattccaaattataacgtaatgggtgtttgtaaatcagcattagaagcaagtgtaaaatacttagcaagagatttaggagccaaaggtatgagagtaaatgctataagtgctggacctatcaagacattggctgcctctgcaattggagacgcaaaattcttatataaatggaatgaagaccattctttccttaagagaaatgtagatatccatgatgttggaaattcagcgttatatctattaagcgaccttgcaaacggagttactggtgaaatccactacgtagatgctggatataataaggttgggatgccagatcctaaaaatatttcttaat

SEQ ID NO: 217633 - DNA, 569 bp, Unknown
  Bacterial polypeptide expressing nucleotide sequence isolated from the Sargasso Sea
aatggaaggtaaaaaaggattaatcatgggtgttgccaatgaaagatcaattgcctggggtatagcacaaaaactttcagaagctggagctgaattagcatttacatatcttggtgatgcattaaaaaaaagagtagttcctttagcagaaaaattgaaatcaaatgttactttcagttgtgatgttgaaaaaaaagaagatgttataaaattatttgaagatatcaaatctagttggggtgagatagattttgttgttcatgcaattgcattttcagacaaatcagaattatctggaaaatatttaaatacaactagagaaaattttttgagaagtatgttaatttcatgcttttcattcactgaagttgcaagagaagcatcaaaaataatgtcatctagtgggagtatgattactttaagctatgaagctaataaggctattccaaattataatgtaatgggtgtttgtaaagcagcattagagtctagtgttaaatatttagccagagatttgggtgctagaggaataagagtaaatgctataagtgctggtcctattaaaacat

SEQ ID NO: 217634 - DNA, 352 bp, Unknown
  Bacterial polypeptide expressing nucleotide sequence isolated from the Sargasso Sea
gagtctactaaagctattccaaattataatgtaatgggtgtctttaaatcagctcttgaagcaagtgtaaaatatttggccagggacctaggtagtaaaggtgtgagagtaaatgcaataagtgctggacctattaagacattggcagcttctgctataggagatgcaaaatttctctataaatggaatgaagatcactcattcttaaaaaggaatgtcgatattcttgatgttggtaattcagctttatatttattgagcaaccttgcaaatggtgtaacaggcgaaattcattatgtggatgcagggtataataaagttggaatgcctgaccctaaaaatataaaatagt

SEQ ID NO: 217635 - DNA, 515 bp, Unknown
  Bacterial polypeptide expressing nucleotide sequence isolated from the Sargasso Sea
tgcaccagcaaatgaacttgatggaaattttgttgatgttgcaactcgagaaggttttcaaattgcgcatgatattagctcgttcagctttaccgcgcttgccaagggagcaaagccatttctaaataaaaaaagtgctcttttaactctaacctaccttggggcaatgcagtctcttcctaactacaacgtcatgggtctggctaaagcgagtctagaagcaaacgtaagatttatggcttcctcgcttgggaaggatgaaattagagtcaacggtatttctgcaggccctattaagaccttggcagcatcgggagtaaagaacttcagaaaaatgctttcgagttatgcaaaaagagctccattaggaagaacggttacaactgacgaagtgggaaacgtggctgcttttttgtgctctgacttagcgagcggaattactggtgagattacttatgtcgatgggggattcaacacctctgccctatcaatagatgaatacttagaatcttaat

SEQ ID NO: 217636 - DNA, 442 bp, Unknown
  Bacterial polypeptide expressing nucleotide sequence isolated from the Sargasso Sea
tatgttgatatcatgtttttcatttacagaagtcgcaaaagaagcagccaaaataatgaatccaaatggaagcatgattactcttacatacgagtctactaaagctattcctaattacaatgtcatgggagtttgcaaatcagctttagaagctagtgttaaatatttagcaagagacttgggtacaaaacaaattagagtaaatgcaataagtgctggaccaattaaaaccttagctgcatcagctattggagatgcaaaatttttatataaatggaacgaagatcattctttcttaaagagaaatgttgatattcatgacgtcggaaactctgctttatacctattaagcgatcttgcaggtggagtaacaggtgaaattcattacgtggatgctggatataataaagttggaatgccagatccaaaaaacatatcttaa

SEQ ID NO: 217637 - DNA, 784 bp, Unknown
  Bacterial polypeptide expressing nucleotide sequence isolated from the Sargasso Sea
atgcttttaaatctaactggtaaaaaaattcttgttacaggaattgccaacaatcgttcaatagcatggggtatcgctcagcaactttcaaaagctggcgcagaacttggaatcacatatttgcctgatgataagggaagattcgaatctaaagttagagaactaactgaacctttaaacccatcgttatttttgcctctcgatgttcaaaatccagctcaaattgaagaaatctttaataatataagagaaaattgggggcaaattgacggattagttcactgcctagcatttgcaggacgcgatgaattgattggagattatagtgctacctcttcagaaggttttgatagggcacttaatataagtgcgtattcgttagcacctttatgtaaagcagcaaaaccactttttagtgatggtgcaggagttgtttcattaacttatttaggatcagaaagggcgattcctaactataacgtgatgggagttgctaaagcagctttagaagcttcagtaagatatctttctgcagaacttgggcccgaaaaacaagtcagagttaatgcaataagtgctgggcctataagaacacttgctagttctgctataggtggcattttagatatgattcacaatgttgaagaaaaggctcctttacgcagaacagtcactcaaaaagaagtaggcaatactgctgcttttttattaagtgatctctctagcggcatttcaggccaaacaatttatgttgatgcgggttactgcattaatggaatgtaaa

SEQ ID NO: 217638 - DNA, 406 bp, Unknown
  Bacterial polypeptide expressing nucleotide sequence isolated from the Sargasso Sea
aaagaagcttccaaagtaatgaacaagggtggaagtatgcttacattaacctacgaatctaataaagctattccaaattataatgtaatgggagtttgtaaatctgctctcgaagctagtgtaaaatacttggctagagatctgggtgtgaaaggaattagagtaaacgcaataagcgctggaccaattaaaactttagctgcatctgcaattggagatgcaaaatttctttataaatggaatgaggatcattctttcttaaaaagaaatgtagacattcatgatgttgggaactctgcttattatttattaagcgatcttggaggtggtgttactggcgaaattcattatgtagatgctggttacaataaagtaggaatgcctgatccaaaaaatataacttaat

SEQ ID NO: 217639 - DNA, 589 bp, Unknown
  Bacterial polypeptide expressing nucleotide sequence isolated from the Sargasso Sea
aaaaaagaagaggttgtaaaactttttgaagatgtaaaaagtaaatggggagaaatcgattttgtagtgcatgcaattgcattttcagataagtcagagttatcaggagaatatctaaatactactcgtgaaaactttttaagaagtatgttaatatcttgtttttcatttactgaggttgctagagaagcatctaaaataatgaagcaaggtggtagtatgattactttgagttatgaagcaaataaagccatacctaattataatgtgatgggagtatgtaaagctgcactagagtctagtgttaaatatcttgcaagagatcttggatcaaaaggaattagagtaaatgcaataagtgcgggaccaattaaaactctagcagcttctgctattggggatgctaaatttctttacaagtggaatgccgatcattcatttttgaaaagaaatgttgataatcttgatgttggaaattcagcattatatcttttaagtgatatggctggtggtgtcactggtgaaattcattatgtagatgctggttacaataaagttggaatgccagatcctaagaacgttacctgaa

SEQ ID NO: 217640 - DNA, 771 bp, Unknown
  Bacterial polypeptide expressing nucleotide sequence isolated from the Sargasso Sea
taactggcaaaaaaattcttgttactgggattgccaacaatcgttcaatagcatggggtatcgctcaacaactttcaaaagcaggcgcggaacttggaatcacatatttacctgatgataagggaagattcgagtctaaagttagagaactaactgaacctttaaacccatcgttatttttacctcttgatgttcaaaatccagctcaaattgaagaaatctttaaaaatataaaagacaattgggggcaaattgacggattagttcactgcttagcatttgcaggacgcgatgaattgattggagattatagtgctaccacttcagagggttttgatagggctcttaatataagtgcgtattcgttagcacctttatgtaaagcagcaaaaccactttttagtgatggtgctggagttgtctcattaacttatttaggttcagaaagggcgattcctaactataacgtgatgggagttgctaaagcagctttagaagcttcagtaagatatctttctgcagaacttggtcccgaaaaacaagtcagagttaacgcaataagtgctgggcctataagaacacttgctagttctgctataggtggcattttagatatgattcacaatgttgaagaaaaggctcctttacgcagaacagtcacccaaacagaagtaggtaatacagctgcttttttattaagtgatctctctagcggcatttcaggccaaacaatttatgttgatgcgggttactgcattaatggaatgtaaa

SEQ ID NO: 217641 - DNA, 718 bp, Unknown
  Bacterial polypeptide expressing nucleotide sequence isolated from the Sargasso Sea
gtatttctcaaaattagcagaagcaggagctgaactagcattcacatacttaggtgatgctttaagaaaaagagtagtaccattagctgaaaaactaaattcaaaaacaacattcagctgtgatgtagaaaaaaaagaagatgttattaaattatttgaagatattaaatctagttggggtgaaatagattttgttgttcatgcaatcgcattttcagacaaatctgaactttcaggtgaatatctaaatacgactagagaaaactttttaagaagtatgctcatttcatgcttttcatttactgaggtagcaagggaggcagctaaaattataaaaaaaaatggaagtatgattacgcttacttatgaatctacaaaagccatacctaattataatgtaatgggagtttgtaaatctgctctagaagcaagtgtaaaatatcttgcaagagatttgggagcaaaacagattagagtaaatgcaataagtgcaggaccaattaaaacattagcagcatcagcaattggagatgcaaaatttttatataaatggaatgaagatcattctttcttaaaaagaaatgtagatataaatgatgttgggaattcagctttataccttctaagtgatttggcaggaggggttactggagaaatacattatgtagacgctggctataataaggttggtatgccagacccaaaaaatataacttga

SEQ ID NO: 217642 - DNA, 642 bp, Unknown
  Bacterial polypeptide expressing nucleotide sequence isolated from the Sargasso Sea
aatgtctttaatgaagggaaaaaaaggactgataatgggtgttgccaatgaaaggtctattgcatggggcatttctcaaaaacttgcagaagcaggtgcagaattagctttcacatatcttggtgatgcacttaaaaaaagagttgtacctttagcagaaaaactcaattcaaatgttacatttagttgtgatgtagaaaaaaaagaggaagtagtaaaactatttgaagatattaaatcccaatggggcgagatagactttgttgtccatgcaatcgcattttcagataaatctgaattatctggagaatatttaaatactactagagaaaattttcaaagaagtatgcttatttcatgcttttctttcacagaggttgcaagagaaggttcaaaaatcatgaaggaaggtggtagcatgatcactctaagttatgaagctaataaagctattccaaattataatgtcatgggtgtttgcaaagcagctttggagtctagtgtaaaatatttagcacgtgatctaggagcaaaaggaataagagttaatgctattagcgcaggtccaattaaaactttagcagcatcagcaattggagatgcaaattttttatataatggaatgctgatcactcattttta

SEQ ID NO: 217643 - DNA, 655 bp, Unknown
  Bacterial polypeptide expressing nucleotide sequence isolated from the Sargasso Sea
aatgagtttagttaagggaaaaaaaggattaattatgggcgtcgctaatgaacgatctattgcatgggggatatctcaaaaacttgctgaggcaggagccgaattagctttcacgtatcttggagacgctttaaaaaaaagggtaataccgctagcaaaatcattaaattcagattttacaattagttgtgatgtagaaaagaaagaggaaataattaaactttttgaaaatattaaagcaaaatggggacaaatagattttgttgttcatgctattgccttttcagataaatcagaattatcaggagagtacttaaatacatctagagaaaattttttaaaaagtatgttaatttcatgtttttcttttactgaggtagcgaaagaagcatcgaaaattatgaaagagaatggaagcatgcttactttaacatatgagtcttcaaaagctataccaaattacaatgtaatgggtgtttgtaaatcagctctagaagctagtgttaaatatttagcaagagatctaggttcaaaaaaaattcgagtaaatgcaataagcgccggtcctattaaaacacttgcagcttcagctattggtgatgcaaaatttttatataaatggaatgaagatcactcttttttgaaagaaatgtag

SEQ ID NO: 217644 - DNA, 496 bp, Unknown
  Bacterial polypeptide expressing nucleotide sequence isolated from the Sargasso Sea
atctgaattatcaggagaatatctaaatacaacaagagaaaactttttaagaagtatgttaatttcatgcttttcatttacagaagttgcaaaagaagcatcaaaaataatgaagcaaggcggaagtatgataactttgagttatgaagcaaataaagctatacctaattataatgtaatgggtgtttgcaaagctgctttagaggcaagtgtaaaatatctagcaagagatcttggatctaaaggagtaagagtaaatgctataagcgcaggtccaattaaaaccttggcagcatctgcaatcggcgatgcgaaatttttatataagtggaatgctgatcactcttttttaaagagaaatgttgataatctggatgttggaaattcagctttatatttgttaagtgatatggctggtggagttacaggtgaaattcattacgtagatgctggatataataaagtcggaatgcctgacccaaaaaatataacataa

SEQ ID NO: 217645 - DNA, 514 bp, Unknown
  Bacterial polypeptide expressing nucleotide sequence isolated from the Sargasso Sea
gttgctttttccgataaatcagaattggtcgggtgaatatttaaatactacaagagagaattttttaagaagcatgttaatttcatgcttttcatttaccgaagtcgcaaaagaagcatccaaaataatgaataaaaatggaagtatgcttactttgacctatgagtctaacaaagctattccaaattataatgtgatgggtgtttgtaaatcagcgttagaggcaagtgttaaatacttagcgagagatttgggagtaaaaggaattagagttaatgcaataagtgctggaccaattaaaactttggcggcttcagcaattggggacgcaaagttcttatataagtggaatgaggatcattcgtttttaaaaagaaatgtagatattcatgatgttggaaactctgcattatatctattaagtgatcttggaggtggtgtaactggtgaaattcactatgtagatgctggttataacaaagtaggtatgccagatccaaaaaatattacctaa

SEQ ID NO: 217646 - DNA, 778 bp, Unknown
  Bacterial polypeptide expressing nucleotide sequence isolated from the Sargasso Sea
gatgaagggtaaaaaaggtttaattatgggagttgctaatgagagatccattgcttggggtatttctcaaaagttggcagagtcaggtgctgagctagcatttacttatcttggagatgctttaaaaaaaagagtaattcctttggcagaaaaacttaattcaaatgttacattcagttgtgacgttgaaaagaaggaggaaatagtaaaactttttgaggatataaaatctaaatggggtcaagttgactttgtagttcacgctgtagccttttcagataaatcagagttatcaggagagtatctaaataccactagagaaaattttttaagaagtatgcttatttcgtgcttttcatttactgaggttgcgaaagaagcatcaaaaataatgtcaaaaaatggaagcatgctgactttaacttatgagtctaataaagctataccaaattataatgttatgggtgtttgtaaatctgcgcttgaggcaagtgttaaatatttagcaagagatcttggagcaaaagggattagagtgaacgcaataagtgcgggacccattaagaccctagctgcctcagctattggagatgctaaatttttatataaatggaatgaagatcactcctttttgaaaagaaacgttgatatacatgatgttggcaattcagctttatacttattaagtgatcttggtgctggcgtaacgggtgaaattcattatgttgatgccgggtacaataaagttggaatgccagatcctaaaaatatttcataa

SEQ ID NO: 217647 - DNA, 442 bp, Unknown
  Bacterial polypeptide expressing nucleotide sequence isolated from the Sargasso Sea
catgctaatttcatgtttttcatttactgaagtatcgaaagaggcctcaaagataatgagaaatggagggagtttgctgactcttacatacgaatctactaatgctattcccaattataatgttatgggagtttgtaaatctgccttggaggcaagtgtaaaatatctggcaagagatctaggctcaaaaaaaataagagtaaacgctattagtgctggtcctataaaaactcttgctgcatctgctattggagatgcaaaatttttatacaaatggaatgaggaccattcatttttaaaaagaaatgtagatatccacgatgttgggaattcaaccttatacttattaagtaatttacctgcaggtgtgacaggtgaaatacactatgtacatgctggttataataaaatgggaatgcccgatccgaagaacatagtctag

SEQ ID NO: 217648 - DNA, 604 bp, Unknown
  Bacterial polypeptide expressing nucleotide sequence isolated from the Sargasso Sea
agttgtgatgttgagaaaaaagaagaagtggtaaaactatttgaggatattaaatctcaatggggtgaaattgattttgtagttcatgcggttgctttttctgataaatcagagttatcaggtgaatatttaaatacgactagagagaattttttaagaagtatgttaatttcttgtttttcatttactgaagtagcaaaggaagcttcaaaggtaatgaaacaaggtggaagtttattaactttaacttatgagtctacgaaagcaattccaaattataacgtaatgggtgtttgtaaatcagctcttgaggcaagtgttaagtatttagcaagagatttgggagctaaaggtattagagtaaatgctataagtgcaggacctatcaagacattggctgcctctgcaattggagatgcaaaattcctatataaatggaatgaagatcattcttttcttaagagaaatgtagatatccatgatgttggaaattcagcattatatctactaagtgaacttgcaaacggagttactggtgaaattcactacgtagatgctggatacaacaaggtaggaatgccagatcctaaaaatattacctaaa

SEQ ID NO: 217649 - DNA, 443 bp, Unknown
  Bacterial polypeptide expressing nucleotide sequence isolated from the Sargasso Sea
tgatataagttcttatagttttacagcgctagcaaaagcttcaaaaccttatttaaatgacagttctgcccttcttactctaacttaccatggatctactcaaacattaccaaattacaatgttatgggccttgcaaaagctagtctggaagcaaatacaaggtttttggctgcgtcattaggaaaggaaaatataagagtaaatgctatatctgcagggccaataaagactcttgcagcatctggagttaaaaatttcagaaaaatgctaaaccatcattcgaacattgcacctttaggaagaaccgtaacatcagaagaagttggaaatgttgcagcttttctatgttctgattttgcaagtggtataactggcgaaattacttatgttgatgcagggtttaatattgcagcaatgccccttcaggaagttgaagattgat

SEQ ID NO: 217650 - DNA, 400 bp, Unknown
  Bacterial polypeptide expressing nucleotide sequence isolated from the Sargasso Sea
agcatcaaagataatgaatgaaggtggaagtatgctaactcttacttatgagtctaccaaagctattccaaattataatgttatgggtgtttgtaaatctgcactcgaagcaagtgttaaatatttagcaagagatttgggaagcaaaggaattagagtaaatgctataagtgcagggcctattaaaactttagctgcttctgcgattggggatgctaaatttctctataagtggaatgaagatcattcatttttaaaaagaaatgtggatattttagatgtaggaaattctgcagtttatcttctaagtaaattatcaagtggtgtaactggagaaattcattatgttgatgctggatataataaagttggtatgcctgatccaaaaaatatttcttaa

SEQ ID NO: 217651 - DNA, 754 bp, Unknown
  Bacterial polypeptide expressing nucleotide sequence isolated from the Sargasso Sea
atgggtgtggcaaatgaaagatccatcgcctggggaatatctcaaaaattatttgaagctggtgcagagttggcttttacatatctgggggaagcattaaaaaaaagagtagttcctcttgcagaaaaactaaattctaatgtcacatttagctgtgatgttgaaaataaagatgaagtaataaaactttttgaagatataaaatcaaaatggggtcaaattgattttgtagtgcatgcagttgcattttcagataaatcagaattatcaggagaatatttaaatacaactagagaaaattttttaagaagtatgttaatttcatgcttttcttttactgaagttgcaaaagaagcttcaaaaataatgaataaaggaggaagcatgcttactttaacttatgaatctaataaagctattccaaattataatgtaatgggtgtttgtaaatctgctcttgaagcaagtgttaaatatttagcaagagatcttggagctaaaggaattagaataaatgcaataagtgcaggaccaataaaaactcttgcagcctcagctattggagacgcaaaatttctatataaatggaacgaagatcattcgtttttaaaaagaaatgtggatattcatgatgttggaaattctgccttgtatctattaagtgatcttggaggtggagttactggagaaattcattacgtagatgctggatataataaagtaggaatgccagatcctaaaaatatgctttaaa

SEQ ID NO: 217652 - DNA, 691 bp, Unknown
  Bacterial polypeptide expressing nucleotide sequence isolated from the Sargasso Sea
aatgaaaggtaaaaaaggattgataatgggtgttgcaaatgagagatctatcgcttggggcatttctcaaaaactatctgaagcaggagctgaactagcatttacatatttaggagatgctttaaaaaaaagagtagttcccttagcagaaaaattaaactcaaatataacttttagttgtgatgttgaaaaaaaagaagacgtaataaaattatttgaggatataaaatcaaaatggagtgaaatagattttgtagttcacgcagttgctttttcagataaatcagaactatcaggtgaatatttaaataccactagagaaaactttttaagaagtatgttaatatcgtgtttctcttttactgaagtagcaaaagaagcatctaaagtaatgaaaaaaggtggtagtatgctaactttaacttacgagtcgactaaagctattccaaattataatgtaatgggtgtttgtaaatcagctttagaggctagtgtaaaataccttgctagagacctaggtagtaaaggtatgagagtaaatgctataagtgctgggcctattaaaactttggcggcttcagctataggagatgcaaaattcttatataaatggaatgaagatcattctttcctaaaaagaaacgtagatatccatgacgttggaaattcagcattatatctattaagtgat

SEQ ID NO: 217653 - DNA, 427 bp, Unknown
  Bacterial polypeptide expressing nucleotide sequence isolated from the Sargasso Sea
cttttcatttactgaagtagctaaagaagcatcaaaagtaatgaagcaaggtggcagtttactcacattaacttatgaatctactaaggctattccaaactataatgttatgggagtgtgtaaatctgcgctagaagcgagtgtgaaatacctagctagagatttaggtgctaaaggtatgagagttaatgcaattagtgcaggacctatcaaaacattggccgcgtctgccattggagatgcaaagttcttgtataaatggaatgaagaccactctttccttaaaagaaatgtagatattcatgatgttggaaattctgcattatatttattaagtgatcttgcaaatggcgttacaggtgaaattcactacgtagatgctggatataacaaagttggaatgccagatcctaaaaatattagttaa

SEQ ID NO: 217654 - DNA, 502 bp, Unknown
  Bacterial polypeptide expressing nucleotide sequence isolated from the Sargasso Sea
gataaatcagagttatcaggtgaatatttaaatacaactagagaaaactttttaaggagtatgttaatctcatgcttttcattcactgaagtagcaaaagaagcttcaaaggtaatgaaacaagatggaagtttattaactttaacttacgaatctaccaaagcaatcccaaattataatgtaatgggtgtttgcaaatctgctcttgaagctagtgttaagtatctagcacgagatttgggtaacaagggcataagagtgaatgcgataagtgcaggacctataaaaacgttagctgcatctgcaattggagatgcgaaattcctatacaaatggaatgaagatcattcttttctaaagagaaatgtggatattcatgatgttggaaattcagcattatacctacttagtgatcttgcaaacggagttactggtgaaattcactacgtagatgctggatataacaaggttgggatgccagatccaaaaaatataacctaaa

SEQ ID NO: 217655 - DNA, 715 bp, Unknown
  Bacterial polypeptide expressing nucleotide sequence isolated from the Sargasso Sea
aaaattgcatgaaaataatgctgatttagcaattacttatcaaaatgaaagtctgcttaaaagagtaaaaccactagctgaaaaagtcaattcagacttactaatagaatgtgattttagtaatgaaaaatctttagaaaatacaataaaaactgttaagaataaatggggcaaaatagattttgtaatacatgctgttgctttttcagataaaaacgaattaaatggaaggtatatcgacacttccaagaataattttattaatagcttaaatatatcttgttattcttttacaaacctagctaaactttcagaaccaatattaaatgaaggcgggagtcttttaacactaagtttttatggatcaaaaaaggtaatgcccaattataatgttatgggtgttgctaaagcagcattagaaacaagtgtcaaatatcttagtgttgatctaggttctaaaaatattagagtaaatgcaatatctgctggtcctatgagaactttggcaggtgctgctattgctaatgctagacaagtctataaatttactgaagaaaactcgtcattaaaaagaaatgttttattagaagaaattggtaattcagctttatattttgtaagtaatctttcatctgctgtaacaggtgaaatacattatgttgattgtggttataatataattggaatgccaaaaaaatattcagaaattatttag

SEQ ID NO: 217656 - DNA, 405 bp, Unknown
  Bacterial polypeptide expressing nucleotide sequence isolated from the Sargasso Sea
aagagtcatcaaaaataatgaaagagggtggaagtatgattactctaagttatgaggcaaataaagctattccaaattataatgttatgggcgtctgcaaggctgcattggagtctagcgttaaatatctagctagagatttgggtgccaaaggaataagagtaaatgccatcagtgctggccctattaaaactttagcagcttctgctatcggagacgctaaatttctatacaaatggaatgcagatcactcatttttaaagagaaatgtagataatttagatattggaaactcagcattatatcttttaagcgatatggcaggcggtgttactggagaaattcattatgtagatgcaggatataataaagtaggtatgccagaccccaaaaatattacataaa

SEQ ID NO: 217657 - DNA, 745 bp, Unknown
  Bacterial polypeptide expressing nucleotide sequence isolated from the Sargasso Sea
aatgaaaggtaaaaaaggattaatcatgggtgttgctaatgaaagatctattgcctggggtatttctcaaaaacttgtaggggccggagccgagctagcatttacatatttaggtgacgctcttaaaaaaagagtagttcctttagcagaaaaattaaattcaaacgttacatttagttgtgatgttgaaaaaaaagaagaagttgtaaaattatttgaagatatcaaatcccattggggtgaaattgattttatcgttcatgcagttgctttttcagataaatcagagttatcaggtgagtacttaaatacgacaagagaaaattttttaagaagtatgttaatttcttgtttttcatttactgaagtagcaaaagaagcttcaaaggtaatgaaacaaggtggaagtttattaactttaacttacgagtctactaaagcaattccaaattataacgtaatgggtgtttgtaaatcagctcttgaggcaagtgttaagtatttagcaagagatttgggagccaaaggtatgagagtaaatgcaataagtgcaggccctatcaaaacattagctgcatctgcaattggtgatgcaaaattcctatacaaatggaatgaagatcattcttttctaaagagaaatgtagatatccatgatgttggaaattcagcattatacctacttagtgatcttgcaaacggagttactggtgaaattcactacgtagatgctggatataacaag

SEQ ID NO: 217658 - DNA, 781 bp, Unknown
  Bacterial polypeptide expressing nucleotide sequence isolated from the Sargasso Sea
atgaaaggcaaaaaaggattaatcatgggtgttgccaatgagagatctattgcttggggaatatcacaaaaattagcagaggctggagctgaattagcttttacatatttaggagatgctcttaaaaaaagagtagttccattgtcagaaaaattaaattcaaatttaacttttagttgtgatgttgaaaagaaagaggaagttgtaaaactttttgaggatgtaaagtctaaatggggagagattgattttgtggtacatgctatagcattttcagataaatctgaattatcaggagaatatctaaatacaacaagagaaaactttttaagaagtatgttaatttcatgtttttcatttacagaggttgcaaaagaagcatcaagaataatgaagcagggtggaagcatgattaccctaagttacgaagcaaataaagctatacctaattataatgtaatgggtgtttgtaaagcagctttagaggcaagcgtaaaatatctagcaagagatcttggatctagaggagtaagagtaaatgcaattagcgcaggtccgataaagaccttggcagcttccgcaattggtgatgctaaatttttatataaatggaatgctgatcattcatttcttaaaaggaatgtagacaatcttgatgttggaaattcagctttatatttattaagtgatatggcaagtggggttacaggtgaaattcattacgtagatgctggatacaataaagttggaatgcctgatccaaaaaatataagtgaataaa

SEQ ID NO: 217659 - DNA, 607 bp, Unknown
  Bacterial polypeptide expressing nucleotide sequence isolated from the Sargasso Sea
aatgaagggaaaaaagggtcttatcatgggcgttgccaatgagagatcaattgcatggggtatatctcaaaaacttgctgaagctggagcggagttagcttttacatatttgggtgatgctttaaaaaaaagagttgttccacttgcagaaaaactaaattcaaatgtaacatttagctgtgatgtagaaagaaaagaagaagttgtaaaactttttgaagatgtaaaaagtcaatggggagaaattgattttgttgtgcatgcaattgcattttcagataagtccgagttatcaggagaatatttaaatacaactagagaaaactttttaagaagtatgttgatatcttgtttttcatttactgaagttgctagagaggcatctaaaataatgaaacaaggtggtagtatgattactttgagttatgaggcaaataaagccatacctaattataatgtaatgggagtatgtaaagctgcactagaatctagtgttaaatatcttgcaagggatctaggagtaaagaatattagagttaatgcaataagtgcgggaccaattaaaactctagcagcttctgctattggggatgctaaatttctttac

SEQ ID NO: 217660 - DNA, 565 bp, Unknown
  Bacterial polypeptide expressing nucleotide sequence isolated from the Sargasso Sea
atgaagggaaaaaaaggattaatcatgggtgttgccaatgaaagatctattgcttggggtatttcacaaaaattagctgaagctggtgcagaacttgcgttcacttatttgggtgatgctttaaaaaaaagagttattcctttagcagaaaaactaaattctaaagttacatttagctgtgatgttgaaaaaaaagaagatgtaataaaattatttgatgatattaaatctcaatggggtgaaattgattttgtagttcacgcaattgctttttcagataaatcagaattgtcaggtgaatatttaaatacaactagagaaaactttttaagaagtatgttgatttcatgtttttcatttactgaggttgcgaaagaagcttctaaagtaatgaaaaagggtggaagtctaattactctaagctacgaagcaaacaaagctattccaaattacaatgttatgggtgtatgtaaagcagcactagagtctagtgttaagtatcttgcaagagacttgggtgcgaagggtatgagagtaaatgcaataagtgcaggacctattaaaa

SEQ ID NO: 217661 - DNA, 565 bp, Unknown
  Bacterial polypeptide expressing nucleotide sequence isolated from the Sargasso Sea
atgaagggtaaaaaaggactgataatgggtgttgctaatgaaagatctattgcttggggtatttctcaaaaactttcagaagcaggtgctgaattagcttttacgtatttaggtgatgctcttaaaaaaagagtagttcctcttgcagaaaaactgaattctaatgttacttttagctgtgatgttgaaaaaaaagaagatgtaataaaattatttgaagatgttaaatctcaatggggcgagatagactttgtggttcatgcaattgctttttcagataaatctgaactttcaggagaatatctgaatacaacaagagaaaattttttaagaagtatgctgatttcatgtttttcatttactgaagtagcaaaagaagcttcaaaagtgatgaaagagggtggtagtatgattacacttagctatgaggcgaataaagctattccaaattataatgtaatgggagtttgtaaggcagccttagagtctagtgttaaatacttagctagagatttaggggctaaaggaataagagtcaatgcaataagtgcaggtccaataaaaa

SEQ ID NO: 217662 - DNA, 526 bp, Unknown
  Bacterial polypeptide expressing nucleotide sequence isolated from the Sargasso Sea
tgttgttctgcggttgccttttcagataaatcagaattatcaggagagtatttaaataccagtagagaaaattttttaagaagtatgttgatttcatgtttttcatttacagaggtggcaaaagaggcttctaaaataatgaataaaggtggaagtatgcttactttgacttatgaatctaacaaagctattccaaattataatgtaatgggtgtttgtaaatccgcacttgaagcaagtgtaaaatatctagcaagagatttgggagcaaaaggaattagagttaacgcaataagtgcaggcccaattaaaactctagcggcctcagctataggtgatgcaaaatttttatataaatggaatgaagaccattcttttttaaaaagaaatgttgatattcacgacgtcggaaattcagctttatatttattaagtagccttggtggtggggttactggagaaattcactatgtagatgcgggatataataaagtagggatgccagatcctaaaaatattacttaat

SEQ ID NO: 217663 - DNA, 738 bp, Unknown
  Bacterial polypeptide expressing nucleotide sequence isolated from the Sargasso Sea
aatgaaaggcaaaaaaggattaatcatgggcgttgccaatgaaaggtctattgcttggggtatatcacaaaaattagctgaagctggagcagaattagcttttacatatttaggagatgctcttaaaaaaagagtaattccattagcagaaaagttaaattcaaaagtaacatttagttgtgatgttgaaaagaaagaggaagtagtaaaactatttgaagatataaagtctaaatggggtgagattgactttgtagttcatgctatagcattttctgataaatctgaattatcaggtgaatatttaaatacaacaagagataactttcaaaggagtatgttgatttcatgtttctcatttacagaagttgctaaagaagcatcaaaaataatgaaacagggcggaagtatgattaccctaagttatgaagcaaataaagctatacccaattacaatgtaatgggtgtttgtaaagctgctttagaagcaagtgtaaaatatcttgcaagagatcttggatctaaaggagtaagagtaaacgctataagtgcaggtccaattaaaactttagcagcttcagcaattggtgacgcaaaatttttatataagtggaatgctgatcactcttttttaaaaagaaatgtagataatcttgatgttggaaattcagccttatatttgttgagtgatatggctggaggtgttacaggtgaaattcattacgtagacgcaggata

SEQ ID NO: 217664 - DNA, 688 bp, Unknown
  Bacterial polypeptide expressing nucleotide sequence isolated from the Sargasso Sea
atgaaaggtaagagaggattaataatgggcgttgcaaatgagcggtctatagcctggggtatttctcaaaaactctcagaagctggtgctgaattagcatttacatatttgggtgatgctttaaaaaaaagagtagtacctttagctgaaaaattaaattcaaaattgacatttagttgtgatgttgaaaaaaaagaagaagtaataaaattatttgaagatgttaaatctcaatggggtgagattgattttgtagttcatgcagtcgctttttctgataaatcagaattatcaggtgagtatttaaacactactagagaaaactttctaagaagtatgttaatttcatgtttttcatttactgaagtagctaaagaagcctcaaaaataatcaaaaaaggtggaagtttgttaactttaacttatgagtcaacaaaagctataccaaattataatgtaatgggtgtttgtaaatctgcacttgaagcaagtgttaaatacttagcaagagatttgggtgctaaagatataagagtaaatgctatcagtgcaggacctattaaaacattagcagcatctgctattggagatgcaaaatttttatataaatggaatgaagatcactcatttttaaagagaaatgttgatatttatgatgttggtaattcagccctatatttattaagtc

SEQ ID NO: 217665 - DNA, 466 bp, Unknown
  Bacterial polypeptide expressing nucleotide sequence isolated from the Sargasso Sea
cacaagagagaactttcaaagaagtatgcttatctcatgcttctcatttacagaagtagctagagaagcatcaaagataatgaagcccaacagtagtatggtcacattaagctacgaggcaaataaagctattcctaactataatgttatgggagtttgtaaagctgcgcttgaatctagtgtaaaatacctagcaagagacttgggtgctaaacaaataagagttaatgcaattagtgcaggacctataaaaacattagctgcatcagcaattggtgatgcaaaattcttatataaatggaacgaagaccattcatttcttaaaagaaacgttgacatcaatgatgttgggaactcagctttatatctattaagtgatctagcaggtggtgttactggtgaaattcactatgtagatgctggatataataaagtaggtatgccagatcccaaaaatatttcttaa

SEQ ID NO: 217666 - DNA, 447 bp, Unknown
  Bacterial polypeptide expressing nucleotide sequence isolated from the Sargasso Sea
cccatgacataagttcgtacagtttcactgctatggccaaaggagcaaaacccatgctaaatgaaaatgcagctcttttaactctgacctatttgggatccatgcaatcccttccaaattacaatgtaatgggtcttgctaaagcaagtttagaggcaaatactaggtttcttgctgctgccatgggacctgatggtataagggtcaatgctatttcagcggggcctataaaaactcttgcagcaatgggcgtaaaaaatttcagaaaaatgttaactaattatgctaacagagcacctttaagaagagctgtcacaactctggaggtaggaaatgttgcagcattcttgtgctcagaccttgcaagcggagtcacgggtgaaattacttatgtagatggtggtttcaatactgccgccatgtccatagaagagtacgctgattaat

SEQ ID NO: 217667 - DNA, 661 bp, Unknown
  Bacterial polypeptide expressing nucleotide sequence isolated from the Sargasso Sea
atggatctggttaaaggtaaaaaaggcttaataatgggtgttgctaatgagcgatccatagcttggggtatagcaaaaaaactttcagagaatggagctgagcttgcttttacataccttggagatgcacttaaaaaaagagttgcacctctagctgattccgttaactcaaaattccttttagattgtaatgtagaaaacaaagatgatatcaaaaaaacatttgaggaaataaaaaaaaagtggggacaaattgattttgtagttcatgcaattgcattttcagatagagcagaactatcaggtcagtatattgacacctcaagagaaaattttacaaaaagcatgttagtatcttgtttttcattcactgaaatagctaaagaggcatcaaaaataatgaaaaacggatctagtatgctgactctgacttacgagtctactaaagtaatacccaactacaatgtaatgggtgtttgtaaagctgcactagagtcaagtgtaaaatatatttcaagagacttaggtataaaaggaattagagtaaatgcaataagtgctggaccaattaaaacattagcagcatcagcaataggtgatgctaaattcttgtacaaatggagttccgaccactcttttttaaaaagaaatgttgatattg

SEQ ID NO: 217668 - DNA, 574 bp, Unknown
  Bacterial polypeptide expressing nucleotide sequence isolated from the Sargasso Sea
aattaaattatttgaagttgttaaatctcaatggggtgagatagactttgttgttcacgcaatcgctttttctgataaaactgagctctcaggagaatatctaaatactacaagagaaaattttttaagaagtatgctaatttcctgtttttcatttaccgaagtagcaaaagaagcctcaaaagtgatgaaagagggtggtagtatgattacacttagctatgaagctaataaagctatcccaaattacaacgtgatgggagtttgtaaggcagcattagagtctagtgtaaagtatttagcaagagatttaggtgctaaaggaataagagttaatgcaataagtgcaggtccaataaaaacattagctgcgtcagcaattggagatgcaaaatttttgtataaatggaacgctgaccactcttttttaaaaagaaatgtagataacatcgatgttggaaactcagcattatatcttctaagtgatatggcaggcggtgttacgggtgaaattcactatgttgatgctggttataataaagtaggcatgcctgatccaaaaaatatatcttaa

SEQ ID NO: 217669 - DNA, 601 bp, Unknown
  Bacterial polypeptide expressing nucleotide sequence isolated from the Sargasso Sea
tgtgatgtagaaaaagaagatgaagttgtaaaattatttgaagatataaaatctaaatggggagaaattgattttgtagttcatgctgttgcattttctgataaatcagaactatctggtgaatatttaaatacaactagagaaaattttttgagaagtatgttgatttcatgcttctcttttactgaagttgcaaaagaagcctctaaaataatgaaaaaaggtggtagtatgattactctgacttatgagtctagtaaagctattcctaattataatgtgatgggtgtttgcaaatcagctcttgaagcaagtgttaagtacttggctagagatttaggtgctaaaggcataagagtaaatgcaatcagtgctggacccattaaaacattagctgcttctgcaattggagatgcaaaatttttgtataaatggaatgaagaccattctttcctaaaaagaaatgtagatatttacgatgttggaaattcagcactttatctgttaagtgatcttgctaatggtgttacaggcgaaattcactatgttgatgctggatataataaagttggcatgccagatccaaaaaacatatcttaaa

SEQ ID NO: 217670 - DNA, 598 bp, Unknown
  Bacterial polypeptide expressing nucleotide sequence isolated from the Sargasso Sea
tatgagtttaatgaaaggtaaaaaaggattaatcatgggtgttgctaatgagagatccattgcctggggaatctctcaaaaattagctgatgccggagcagaattagcatttacttatttaggtgatgctctaaaaaaaagagtaatacctttagcagaaaaattaaattcaaatattacatttagttgtgatgtcgaaaaaaaagaagagataataaaattatttgaagatattaaatcacaatggggagagattgattttgtagttcatgctgttgcgttttcagataaatcagaattgtctggtgaatatcttaacaccacaagagaaaattttttaagaagtatgttaatttcatgtttttcatttactgaagtgtctaaagaagcctcaaaaataatgaaagacggtggcagtatgttaactttgacctatgagtccactaaagcaataccaaattataatgtaatgggggtttgtaaatctgctcttgaggcaagcgtaaaatatcttgcaagagatttaggtgctaaaaatataagagtaaatgcaataagtgctgggcctataaagacgttagcagcgtctgctattggt

SEQ ID NO: 217671 - DNA, 387 bp, Unknown
  Bacterial polypeptide expressing nucleotide sequence isolated from the Sargasso Sea
cttatatggcatccagtgctagtttaattacacttagtttttatggctctacaaaagtaatgcctaattataatgtaatgggtgttgctaaagctgcacttgaaacaagtgtaaaatatttaagtgttgatttaggaacaaaaaatgtaagagtaaacgcaatatctgctggaccaatgcgtactcttgctggtgctgctatcgcaaatgctagagatgtttataaatatactgaagaaaattcttctttaaaaagaaatgttttattagatgaaataggtaactcagcattatatcttgtaagtgatttatcatcagcagtaacaggtgaaatacattatgttgattgtggttttaatatagttggaatgcccaaaataaaatagt

SEQ ID NO: 217672 - DNA, 562 bp, Unknown
  Bacterial polypeptide expressing nucleotide sequence isolated from the Sargasso Sea
gaagacattaaatctagtttggggtcaaattgattttgtagttcatgcaattgcattttctgataaatcagagttatctggggaatatttaaatacaactagagaaaattttttaagaagtatgttaatttcatgtttttcatttacagaggttgcaaaagaatcggctcaagtaattaaggaaggtggaagtttattaaccttaagctatgaagctaataaagcaattcctaactataatgtaatgggtgtttgtaaagcagcgctggagtccagtgttaaatatctagctagagatcttggtacaaaaggaataagagtaaacgcaattagtgctggtcctataaaaacattggcagcttcagctattggggatgctaaatttctttataaatggaatgcggaccactcttttttaaaaagaaatgttgataatttagatgttggaaattcagcattatatctattaagtgatatggctgggggtgttacaggtgaaattcattacgttgatgctggatataacaaaatgggaatgccagatccaaaaaatatatcttaa

SEQ ID NO: 217673 - DNA, 541 bp, Unknown
  Bacterial polypeptide expressing nucleotide sequence isolated from the Sargasso Sea
ggggtcaatcgattttgttgttcatgcggttgcattttcagacaaatctgaattatcaggcgaatatttaaatactactagagaaaattttttaagaagcatgttaatttcatgcttttcatttactgaggttgcaaaagaagcctctaaaattatgaataaaggtggaagtatgcttacattaacttacgagtctaataaagctattccaaattataacgtaatgggtgtatgcaaatctgcacttgaatcaagtgttaaatatatagctagagatttaggctctaaaggaattagagttaatgctataagtgcaggaccaattaaaactttggcagcatccgcaataggcgatgcaaaattcttatataaatggaatgaagatcattcctttttaaaaagaaacgtagatatccatgatgttggaaactcagctttatatctattgagcaaattagctggtggagttactggtgaaattcattatgtagatgctggatataataaagtagggatgccagaccctaaaaatattacttaa

SEQ ID NO: 217674 - DNA, 556 bp, Unknown
  Bacterial polypeptide expressing nucleotide sequence isolated from the Sargasso Sea
atgaagggaaaaaaaggattaataatgggcgttgctaatgaaagatctattgcatggggcatttctcaaaaattagctgaagcaggagctgaattagcatttacttatctaggtgacgccttaaagaaaagagttgttcctttagcagaaaaactaaattcaaacgtaacatttagttgtgatgtagaaaagaaagaagaagttattaaactttttgaagacataaaatcaaaatggggccaaattgactttgttgttcatgcagttgccttttctgataaatcagaattatcaggagaatatttgaacactactagagaaaattttttaagaagtatgttaatttcatgtttttcatttactgaggtttcaaaagaagcttcaaaaataatgaataaagatggaagtatgcttactttaacttatgagtctaataaagctattccaaattataatgtaatgggtgtttgcaaatctgcacttgaagcaagcgttaaatacttagctagagatttaggttcaaaaggaattagagtgaatgcaataagtgcgggac

SEQ ID NO: 217675 - DNA, 511 bp, Unknown
  Bacterial polypeptide expressing nucleotide sequence isolated from the Sargasso Sea
tgctttttcgataaatcagagttatccgggggagtacttgaatactacaagggaacattttcttagaagtatgcttatctcatgtttttctttcactgaagtatctaaagaagccgcaaagataataaaggaagaaggaagtttgctgactctcacttacgagtcgactaaagcaatacctaattataatgtcatgggagtatgtaaatctgctttagaggcaagtgtaaaatatctagccagagatcttggtaaaaagaaaattagagtaaacgcaatcagtgcaggacctatcaaaactttggcggcatctgcaattggagatgcaaaattcctatataaatggaatgaagaccattcctttttaaaaagaaatgtggatattcatgatgtcggtaattccgcattatacctgctaagtaatttagcagcaggtgtcactggcgaaattcattatgtggatgcaggatataataaagtaggaatgccagatcctaaaaatatgatttag

SEQ ID NO: 217676 - DNA, 601 bp, Unknown
  Bacterial polypeptide expressing nucleotide sequence isolated from the Sargasso Sea
tctgattgaatgtgatgttaataaagaagatgatttacaaaatacattacatcaaattaaaaaaaattttggtacaattgattttattattcatgctgtagcttattctgataaaaatgagttaaacggtcgatatttagatacttcgaaagataattttattaatagtctctctatatcctgctactcctttaccaggatagcaaagttgttccaacctataattaatgatggaggaagtttaattacattaagttttcatggagcaaataaagttatgccaaattataatgttatgggagttgctaaggctgctcttgaggcaagcgtaaaatatttaagtgttgatttaggtgatcaaaatgtaagagttaatgctatttcttcaggaccaatgagaacacttgctggcgcagcaattgctaatgcaagagatgtttttaactatacaagtgataattcttcattaaaaagaaatgtaaatcttgaagaactaggtaattcagcgctatatttggtaagtgacttgtcttcagcaataactggtgaaatccattatgtagattgtggctttaatattattggaatgccaaaaagttaa

SEQ ID NO: 217677 - DNA, 442 bp, Unknown
  Bacterial polypeptide expressing nucleotide sequence isolated from the Sargasso Sea
tatgttaatttcttgcttttcgtttactgaggttgcaaaagaagcatcaaaagtgatgaagcaaggtggaagtcttcttactttaacatacgagtctactaaagctattcctaactataatgttatgggtgtgtgtaaatcagctcttgaagcaagcgtaaaataccttgctagagatctgggtgctaaaggtatgagagtaaatgctataagtgctggacctattaaaacattagctgcttcggctattggagatgcaaaatttctatacaaatggaatgaagatcattctttcctaaaaagaaacgtagatattcatgacgttggaagttcagcactatacttgttaagtgacctagcaaacggtgttacaggtgaaatccactacgtagatgctggatataataaggttggaatgccagatcctaaaaatattagttaa

SEQ ID NO: 217678 - DNA, 685 bp, Unknown
  Bacterial polypeptide expressing nucleotide sequence isolated from the Sargasso Sea
atgaagggaaaaaagggtcttatcatgggcgttgccaatgagagatcaattgcatggggtatatctcaaaaacttgctgaagctggagcagagttagcttttacatatttaggtgatgctttaaaaaaaagagttgttccacttgcagaaaaactaaattcaaatgtaacatttagctgtgatgtagaaaaaaaagaagaagttgtaaaactttttgaagatgtaaaaagtaaatggggagaaattgattttgttgtgcatgcaattgcattttcagataagtccgagttatcaggagagtatttaaatacaactagagaaaactttttaagaagtatgttaatatcttgtttttcatttactgaaattgctagagaggcatctaaaataatgaagcaaggtggcagtatgattactttgagttatgaagcaaataaagccatacccaattataatgtaatgggagtatgtaaagctgcactagagtctagtgttaaatatcttgcaagagatctgggagcaaagaatattagagttaatgcaataagtgcgggtccaatcaaaacactagctgcatctgcaattggcgatgctaaatttctttacaagtggaatgctgatcattcgttcttaaaaagaaatgttgataatcttgatgttggaaattcagcattatatctttaag

SEQ ID NO: 217679 - DNA, 547 bp, Unknown
  Bacterial polypeptide expressing nucleotide sequence isolated from the Sargasso Sea
ccaatggggagaaattgattttgttgttcacgcaattgctttttctgataaatctgaactttcaggagaatatctaaatactacaagagaaaattttttaagaagtatgctaatttcatgtttttcatttactgaagttgcaaaagaagcttcaaaagttatgaaagagggtggtagcatgattacacttagctatgaggcgaataaagctattccaaattataatgtaatgggagtttgtaaggcagccttagagtctagtgttaaatacttagctagagatttaggggctaaaggaataagagtcaatgcaataagtgcaggtccaataaaaacattggctgcatcagctattggggatgctaaattcttgtataaatggaatgcagatcattcttttttaaagagaaatgtagataatattgatgttggaaactcagcattatatctcctaagtgatatggcaggcggagttacaggtgaaattcactatgttgatgctggttacaataaagtaggaatgccagatccaaaaaatatatcttaa

SEQ ID NO: 217680 - DNA, 601 bp, Unknown
  Bacterial polypeptide expressing nucleotide sequence isolated from the Sargasso Sea
tgtgatgttgaaaaaaaagatgatgtttccaaacttttcgatgatatcaaatctaaatggggtcaacttgattttgtagttcatgcagttgcattttctgacaaatcagagttgtcaggtgaatatttaaatactactagagataatttcttaaaaagtatgttaatttcatgcttttcatttaccgaggtttctaaagaagcttcaaatgttatgaaagagggtggaagtttgcttactcttacttatgagtccacaaaagcaattcctaattataatgtgatgggagtttgtaaatctgctttagaagcaagcgttaaatatttagcaagagacctgggtaaaaagaaaattcgtgtcaatgctattagcgcaggaccaattaaaaccttagccgcgtcagcaataggagatgcaaaatttttatataaatggaatgaagatcattcatttttaaaaagaaatgttgatattcatgacgtgggaaactcagcattatatcttttgagtgatcttgctgcaggagttactggagagatccattatgtcgatgctggatacaataaagttggaatgccagatcctaaaaatatttcctaga

SEQ ID NO: 217681 - DNA, 778 bp, Unknown
  Bacterial polypeptide expressing nucleotide sequence isolated from the Sargasso Sea
atgaagggcaaaaaaggactaataatgggtgttgctaacgaaagatctattgcttggggtatttctcaaaaactttcagaggcaggtgctgaattagcttttacatatctaggtgatgctcttaaaaaaagagtagttcctcttgcagaaaaactaaattctaatgttacttttagctgtgatgttgaaaaaaaagaagatgtaataaaattatttgaagatgttaaatctcaatggggcgaaatagactttgtagttcacgctatcgctttctctgacaaatctgaactttcaggagaatatctaaatacaacaagagaaaattttttaagaagtatgctgatttcatgcttttcatttactgaagtggcaaaagaagcttcaaaactgatgaaagagggtggtagtttgattactcttagctatgaagctaacaaagcaatccctaactataatgtaatgggtgtatgtaaagcagctttagagtctagtgttaaatacttagctagagatttaggagctaaaggaataagggtgaacgcaataagtgcaggaccaattaagacattagctgcgtcagctattggagatgcaaaatttttgtataaatggaacgctgaccactcttttttaaaaagaaatgtagataacatcgatgttggtaactcagcattgtatcttctaagtgatatggcaggcggtgttacgggtgaaattcactatgttgatgctggttataataaagtaggcatgcctgatccaaaaaatatatcttaaa

SEQ ID NO: 217682 - DNA, 714 bp, Unknown
  Bacterial polypeptide expressing nucleotide sequence isolated from the Sargasso Sea
aatgaaaggtaaaaaaggattgataatgggtgttgcgaacgaaagatcaattgcttggggtatttcacaaaaacttgctggggcaggtgcggaacttgcattcacttacttgggtgatgctctaaaaaaaagagtagttcctttagctgaaaaattaaattcaaaactaacatttagttgtgatgtagaaaaaaaagaagaagtaataaaattatttgaagatataaagactcaatggaaagaaattgattttgtagttcatgctgtagcattttcagacaaatcagaattatcaggagagtatctaaatactactagagagaactttttaagaagtatgttaatctcatgcttttcatttacagaagttgcaaaagaagcatctaaaataatgaagactggtggaagtttattaactttaacttatgaatctaataaggctattccaaattataacgtaatgggtatttgcaaatctgctcttgaatcaagtgtaaaatacttagctagagatttgggaacttatggcatgagagtaaatgcaatcagtgcagggcctattaaaacattagcagcttctgctattggtgatgcaaaattcttatataaatggaatgaggatcattctttcttaaaaagaaatgtagatatatacgatgtaggaaattctgcattatacttattaagcgaccttgctaacggagtaactggtga

SEQ ID NO: 217683 - DNA, 588 bp, Unknown
  Bacterial polypeptide expressing nucleotide sequence isolated from the Sargasso Sea
aaaaagaggatgtaattaaattatttgagaatgtaaaatccagctggggtgagattgattttgttgttcatgcaatagcattttcagataaatctgagctttctggagaatatttaaatacaacaagagaaaactttcaaagaagtatgcttatctcatgcttctcatttacagaagttgctagagaggcatcaaagattatgaaacccaatggaagcatgatcaccttaagttatgaagcaaataaagctattcctaactataatgttatgggagtttgtaaagctgcgctagaatctagtgtaaaatacttagcaagagatttaggtgctaaacaaataagagtaaatgcaattagcgcaggacctattaaaacattagctgcatccgcaattggagatgcaaaattcttatataaatggaatgaagaccattcatttcttaaaagaaacgttgatattcacgatgtcggaaattctgcgttatacttactaagtgatctagcaggtggtgttaccggtgaaattcactatgtagatgccggatataacaaagttggaatgcccgaccctaagaatattatataag

SEQ ID NO: 217684 - DNA, 374 bp, Unknown
  Bacterial polypeptide expressing nucleotide sequence isolated from the Sargasso Sea
aagcatgcttaccttaacttacgagtctactaaaacaattccaaactataatgttatgggtgtttgcaaatctgctcttgaagccagtgtaaagtatttagcaagagatttgggttcaaaaggaattagagtaaatgctattagcgcaggacctatcaaaactttagcagcttcagccataggtgatgcaaagtttttatacaaatggaatgagagtcactcatttttaaaaagaaatgtagatattaatgatgtaggaaactcagctttatatctcttaagtgatcttgcttctggtgttaccggagaaattcattatgttgatgcaggctataataaagtaggaatgcctaatcctaaaaatatttcctgat

SEQ ID NO: 217685 - DNA, 533 bp, Unknown
  Bacterial polypeptide expressing nucleotide sequence isolated from the Sargasso Sea
tgactttgtggttcatgcagttgcattttcagataaatcggaactgtctggcgagtatctcaatacgacaagagaaaactttttaagaagtatgttaatttcgtgtttttcatttactgaggttgcaaaagaagcgtctaagataatgaaagatggcggaagtatgctaacgttaacctatgagtctacaaaagcaattccaaattacaatgttatgggtgtttgtaagtctgcattagaggccagtgtaaaatatttagcaagagatttgggttctaagaaaattagagtaaatgcaattagtgctggtccaataaaaacgcttgctgcatctgcaattggtgatgctaagtttttatataagtggaatgaggatcattcttttttaaaaagaaatgttgatattcatgatgtaggaaattcagccctatatttattaagtgatcttggtgggggtgtgactggtgaaattcattatgttgacgctggttacaacaaagtcgggatgcctgatccaaaaaatatgtcataaa

SEQ ID NO: 217686 - DNA, 596 bp, Unknown
  Bacterial polypeptide expressing nucleotide sequence isolated from the Sargasso Sea
aatgaaaggtaaaaaaggattgatcatgggcgttgcaaacgaaagatctattgcatggggtatttctcaaaaactttctgaagaaggggctgaattagcatttacatacttaggagacgcccttaaaaaaagagtagttcctttagctgaaaaattaaattcaaatataacatttagttgtgatgttgaaaaaaaagaagaaataacaaaacttttcgaagatatcaaatcaaaatggggcgaaatcgattttgtagttcacgcagttgctttttcggataaatccgagctatcaggtgaatatttaaatactactagagaaaacttcttaagaagtatgttaatttcatgtttctcttttactgaagttgcaaaagaagcgtcaaaaataatgaagcaaggcggaagcttactaactttgacttatgagtcttccaaaactattccaaattataatgtaatgggtgtttgtaaatcagcattagaggctagtgttaaatatttagcaagagatcttggagctaaaagtatgagagtaaatgcaataagtgctggacctattaaaacattagctgcttctgctattggagatgcaa

SEQ ID NO: 217687 - DNA, 555 bp, Unknown
  Bacterial polypeptide expressing nucleotide sequence isolated from the Sargasso Sea
ttaaaaaggaatggggtcaaattgattttgttgttcatgcagtagcattttcagataaatcagaattatcaggtgaatatttaaatacaactagagaaaattttttgagaagtatgttaatttcatgcttttcgtttacagaggttgctaaagagttctcaaaaataatgaaagagggtggaagtatgattactttaagttatgaggcaaataaagcaattccaaattataatgtaatgggtgtatgtaaggcagcattagagtcgagtgttaaatacttggctagagatttaggtgcaaagggtatcagagtaaatgctataagtgctggaccaatcaaaacattggctgcatctgctataggagatgctaaatttctatataaatggaatgctgatcactcatttctaaaacgtaatgttgataatttagatgttggaaattcagctctttatttattaagcgatatggcaagtggtgtaacgggtgaaattcattatgtggatgcaggatataataaaatgggaatgccagatccaaaaaatataacttaaa

SEQ ID NO: 217688 - DNA, 468 bp, Unknown
  Bacterial polypeptide expressing nucleotide sequence isolated from the Sargasso Sea
actacgagagaaaatttttaagaagtatgttaatttcatgtttttcatttacagaggttgcaaaagaagcttctaaaataatgagcaaaggtgggagtatgcttactttaacttacgaatccaataaagctattccaaattataatgtaatgggtgtttgtaaatctgcacttgaggcaagtgttaaatacttagctagagatttagggtcaaaaggaataagagtaaatgcaataagtgcggggccaattaaaactttagctgcttctgctattggagatgcaaaattcttatataaatggaatgaggatcattcttttttaaaaagaaatgtagatatccatgatgttggaaattcagcgttatacctattgagcgaccttggcggtggagttacaggagaaattcactacgttgatgctggatataataaagtaggaatgcctgatccaaaaaatataacttaat

SEQ ID NO: 217689 - DNA, 362 bp, Unknown
  Bacterial polypeptide expressing nucleotide sequence isolated from the Sargasso Sea
tctcacttacgagtctactaaggcaataccaaattataatgttatgggggtttgcaaatctgctttagaggcaagcgtaaaatatttagctagggatcttggaaaaaaaaagttaagagtcaacgctattagcgcaggtcctataaaaactttagcagcttctgcaattggagatgcaaaatttttatataaatggaatgaagaccattcttttttaaaaagaaacgtagatattcatgatgtaggtaattcagcgttatacttacttagtaatttagcagcaggcgtaactggtgaaattcactatgtggatgctgggtataataaagttgggatgcctgatccaaaaaatatagtttaag

SEQ ID NO: 217690 - DNA, 778 bp, Unknown
  Bacterial polypeptide expressing nucleotide sequence isolated from the Sargasso Sea
aatgaatggtaaaaaaggattaatcatgggtgtagcaaatgatagatctattgcttggggaatttctcaaaagcttgctagtgcaggagctgagttagcattcacttatttgggtgatgctttaaaaaaaagagttgtcccattagctgaaaagttaaattcaaaaactacatttagctgcgatgtagaaaaaaaagaagatataataaaattatttgaaaatattaaatctatttggggagagattgattttgtagtacacgctatagctttttccgataagtcagaactgtcaggagaatatctaaatacaacaagagaaaactttttaagaagtatgcttatttcatgcttctcatttacagaggttgcgaaagaagcagcaaaaattatgagaccaaatggaagtttaattacacttacttacgagtcaactaagacaatacctaattataatgtcatgggtgtttgtaagtcagccttagaagcaagtgtgaaatatcttgcgagagatttaggttcaaaacaaattagagtaaatgcaataagcgcaggtcctattaagactttggcagcatctgcaataggagatgcaaaatttttatacaaatggaatgagaatcattctttcttaaagagaaatgttgatattcatgacgttggaaactctgctttgtacctgttaagtgaccttgcttgcggtgtcactggtgaaatacattatgtagacgcagggtataataaagttggtatgcctgatccaaaaaatataacttaa

SEQ ID NO: 217691 - DNA, 634 bp, Unknown
  Bacterial polypeptide expressing nucleotide sequence isolated from the Sargasso Sea
atgcttctaaatctaactggcaaaaaaattcttgttacgggaattgccaacaatcgttcaatagcatggggtatcgctcaacaactttcaaaagctggagcagaacttggaatcacatatttgcctgatgataaaggaagattcgagtctaaagttagagaactaactgaacctttaaacccatctttatttttgccgcttgatgttcaaaatccagctcaaattgaagaaatctttaaaaatataaaagaaaattgggggcaaattgacggattagttcactgcctagcatttgcaggacgcgatgaattgattggagattatagtgctacaacttcagagggttttgatagggctcttaatataagcgcatattccttagcacctttatgtaaagcagcaaaaccactttttagtgatggtgctggagttgtctcattaacttatttaggctcagaaagggcaatccctaactataacgtgatgggagttgctaaagcagctttagaagcttcagtaagatatctttctgcagaacttggtcccgaaaaacaagtaagagttaacgctataagtgctgggcctataagaacacttgccagttctgctataggtggcattttagatatgattc

SEQ ID NO: 217692 - DNA, 767 bp, Unknown
  Bacterial polypeptide expressing nucleotide sequence isolated from the Sargasso Sea
aatgaaaggtaaaaaaggattaataatgggcgttgccaatgaaagatctattgcctggggaattgcacagaaactttcggaagctggagctgagctagcatttacatatcttggtgatgcattaaaaaaaagagtggttccattagcagaaaaattaaattcaaatgttacttttagttgtgatgttgaaaaaaaagaagatgttataaaattattcgaggatgttaaatctagttggggtgaaattgattttgttgttcatgcgattgcattttcagataaatcggagttatctggagaatatttaaatacaactagagaaaattttttaagaagtatgttaatttcatgcttttcatttactgaagttgcaagagaagcttcaaaggtaatgaagtctgacggtagtatgattacacttagctacgaagctaataaagctatccccaattataatgttatgggtgtgtgcaaagcagcacttgaatctagtgttaaatatttggcaagagacttgggtgcaaaaggaattagaataaacgccataagtgctggacctatcaaaaccctagctgcatcagctataggagacgcaaaattcctttataaatggaacgcagatcattcatttttaaaaagaaatgtagataatttagacgttggaaattcagcattatacctattaagcgatatggcaagcggtgttactggagaaattcactacgtagatgcaggatataataaagtagggatgccagatcctaaga

SEQ ID NO: 217693 - DNA, 409 bp, Unknown
  Bacterial polypeptide expressing nucleotide sequence isolated from the Sargasso Sea
caagtcgattttgtagttcatgcgattgcattttcagataaatcagagttatctggagaatatttaaatacaactagagaaaattttttgagaagtatgttaatttcatgtttttcatttacagaggttgcaaaagaatcttctcgagtaatgaaagaaggtggaagtttattaaccttaagctatgaagctaataaagcaattcctaactataatgtaatgggcgtttgtaaagcagcactagagtccagtgttaaatatctagccagagatcttggaacaaaaggaataagagtaaacgcaattagtgctggtcctataaaaacactagcagcatcagctatcggagatgctaaatttctttataaatggaatgcagatcactcttttttaaaaagaaatgttgata

SEQ ID NO: 217694 - DNA, 604 bp, Unknown
  Bacterial polypeptide expressing nucleotide sequence isolated from the Sargasso Sea
atgagtttaatgaaaggtaaaaagggattaatcatgggagtagcaaatgaaagatccattgcctggggtatttctcaaaaattagctgaagcaggggccgaattagctttcacttatctgggtgatgccttaaaaaaaagagtaattcctttagctgaaaaattaaattcaaacgtaacatttagttgtgatgtagaaaacaaagaagaagttattaagctttttgaagatataaaatcaaaatggggccaaattgactttgttgttcatgcggttgcattttcggataaatcagaattatcaggagaatatttaaatacaactagagaaaattttttaagaagtatgttaatttcatgtttttcatttactgaagttgcaaaagaagcttctaaaataatgaataagggtgggagtatgcttacattaacttacgagtctaacaaagctatcccaaactataatgtaatgggtgtttgtaaatctgctcttgaagctagtgttaaatatctagctagagatttaggttcaaaaggaattagggtaaatgcaattagtgctggaccaattaaaactttggctgcatctgcaattggtgatgcaa

SEQ ID NO: 217695 - DNA, 742 bp, Unknown
  Bacterial polypeptide expressing nucleotide sequence isolated from the Sargasso Sea
atgaaagggaaaaaaggacttgttatgggtgttgcaaatgaacgttcaatagcctggggtatatcacaaaaattgtctgaagcaggtgctgaattggctttcacctacctaggtgaggccttaaaaaagagagtggttcctctagcagaaaaattaaaatctaacaaaacctttagttgtgatgttgaaaaaaaagaggaaattataaaactttttgaagatattaaatccgaatggggaaaaatagattttgtagtccatgcagtagcattttctgataaatctgaattaagtggtgaatatttaaaaactacgagagaaaatttcttaaggagtatgcttatttcatgtttctcctttaccgaagtaacgagagaagcatcgaaaataatgaacgaaggtggtagtttgattactctcacttatgagtccagcaaagccattcctaattataacgtgatgggcgtttgcaaatcagctttggaatcaagcgtcaaatatttagcaagagatctgggaaataaaaaaattcgtgttaatgctattagtgctggacctattaaaactttggccgcttcagctattggtgatgcaaaatttttatataaatggaatgaggatcattcatttttaaaaagaaatgttgatatacatgatgttggaaattcagctctttatttattgagtgatttagcctcaggagttaccggtgaaatacattatgttgatgcaaggttataat

SEQ ID NO: 217696 - DNA, 322 bp, Unknown
  Bacterial polypeptide expressing nucleotide sequence isolated from the Sargasso Sea
gccaaattataatgtgatgggagttgctaaagctgctcttgaaacaagtgtaaaatatttaagtgttgatttaggcgaccaagatgtaagagttaacgcaatttctgctggcccaatgagaacacttgcaggtgctgccattgctaatgcgagagatgtttttaattacacaagtgagaattcttctctaaaaagaaatgtaaatcttgaagaattaggtaattcagcgttatatttagtaagtgatttatcttccgcaataaccggagagattcattatgttgattgtggttttaatatcgttgggatgcctaaaagttag

SEQ ID NO: 217697 - DNA, 452 bp, Unknown
  Bacterial polypeptide expressing nucleotide sequence isolated from the Sargasso Sea
tttaaaaagtatgttaatttcatgtttttcttttacagaagtagcaaaagaagcatcaaagattatgagtgataatggaagcatgctcactcttacatatgagtcaacaaaagcaatacctaattataacgttatgggtgtttgtaaatctgcattagaagcaagtgtgaaatatttagctagagatttaggagctaaaaaaattagagtaaatgcaattagcgcaggacctataaaaacattagcagcttcagctattggagatgcaaaatttttatacaagtggaacgagagtcattcctttttaaaaagaaacgttgatattaatgatgttggtaattcagctctatatttagtaagcgatttagctgcaggtgttactggagaaatacattatgttgacgctggctataataaagtcgggatgcctaatccaaaaaatatatcctaac

SEQ ID NO: 217698 - DNA, 472 bp, Unknown
  Bacterial polypeptide expressing nucleotide sequence isolated from the Sargasso Sea
gtcactacaagagaaggttttcaaattgcccatgatattagttcttacagttttactgctatggcaaaagctgcaaagcctatgttaaatgaaggttctgcccttttaactcttacatacttaggatctaataaaactgtaccaaattacaatgtgatgggtcttgctaaggcaagtttggaggccaatactagatttcttgcagcatcaatgggtagagataacattagagttaatgctatatctgcaggaccaattaaaacattagcagcgtcgggtgtaaaaaactttaggaaaatgttaagtgaacattctaagatagcaccacttggaagaaccgtaacaactgatgaagttggaaatgtagcagcatttttatgctctgattacgcaagtggagttactggagaaataacgtatgttgatgcaggctttaatattgcagcaatgcccattgatgcatacgagtaat

SEQ ID NO: 217699 - DNA, 643 bp, Unknown
  Bacterial polypeptide expressing nucleotide sequence isolated from the Sargasso Sea
attcccttagcagaaaaattaaattcaaatgttacctttagctgtgatgttgaaaaaaaagaggaaataataaaattatttcaagacatcaaaacgaaatggggagagattgattttgtagtacatgcagttgctttttcagataaatcggagttgtctggtgaatatttaaacacaactagagaaaattttttaaggagtatgttaatttcttgtttttcatttacagaggtagctaaggaagcatctggaattatgaaagaagggggtagcatgcttaccttaacttacgagtctactaaagctatacctaattataatgtaatgggtgtttgtaaatcagctcttgaagctagtgtaaaatatcttgctagagatctgggtgtaaaaaagataagagtaaatgctataagtgcaggaccaattaaaactttagctgcatcagcaattggagatgctaaatttctttacaaatggaatgaggatcattcttttttaaaaaggaatgttgatattcatgatgtcggaaattctgctttgtatttattaagcaatttaagtgatggtgtaactggagaaattcattatgttgatggtggttataataaagttggtatgccagatccaaaaaatatgaaataaa

SEQ ID NO: 217700 - DNA, 631 bp, Unknown
  Bacterial polypeptide expressing nucleotide sequence isolated from the Sargasso Sea
gctgaaaaattaaattcaaaagtaacatttagttgtgatgttgaaaaaaaaaatgaagttataaaattatttgaagatattaaaactcaatggggggaaattgattttgtagttcatgctgttgctttttcagacaaatcagaattatcaggagaatatttaaataccagcagagaaaattttcttaaaagtatgttaatttcatgtttttcatttacagaagttgcaaaagaagcctcaaaaataatgaataaaggaggaagtttaattactctaacgtacgaatctaataaagctatcccaaattataacgtaatgggagtttgtaaatcagctcttgaagcaagtgtaaaatatcttgcaagagatttaggagtgagagggataagagtaaatgcaatcagtgcaggtccaattaaaacattagcagcctcagcaataggtgatgcaaaatttttatataagtggaatgaagatcactcctttttaaaaagaaatgtagacattcatgatgttggaaattcagcattatatcttttaagtgaccttgcaaatggagttaccggtgaaattcactatgttgatgcaggatataataaggtcggaatgccagatccaaaaaacttttaag

SEQ ID NO: 217701 - DNA, 358 bp, Unknown
  Bacterial polypeptide expressing nucleotide sequence isolated from the Sargasso Sea
acttacgaatcctctaaagtaattccaaattataatgtaatgggcgtgtgtaaggctgcgctagaaacaagtgtaaaatatcttgcaaaagacttaggttcaaaaggaataagggttaatgctattagtgctggacctattaaaactttagctgcatctgcaatcggagatgctaaatttttatataaatggaatgaggatcattctcttttaaaaagaaatgtagatattaatgatgtgggcggctcggctttatatttgttaagtgatttatcggcagctgtaacaggtgaaatacattatgtagatgctggatataataaagttgggatgcctaacccaaaagacatggcttaac

SEQ ID NO: 217702 - DNA, 508 bp, Unknown
  Bacterial polypeptide expressing nucleotide sequence isolated from the Sargasso Sea
attttcagataagtcagaactatctggagaatatttaaatacaacaagagaaaattttttaagaagtatgttaatttcttgcttttcttttacagaagttgctaaagagtcatctaaagtgatgaagtctgggggaagtatgattactctaagttatgaagctaacaaagctattccaaattataatgttatgggtgtatgcaaagcagcattagaatctagtgttaaatatctagctagagatctaggcgccaaaggcattagagtaaatgcaataagcgctggtcctattaaaacgttagcagcttctgctattggagacgctaaatttctttataaatggaattcagatcattcatttttaaaaagaaatgtagataatttagatgttggaaattcagctttgtatcttttaagcgatatggcaggtggtgttactggtgaaattcattatgtggatgcaggatacaataaagtaggaatgccagaccccaaaaatattacctaa

SEQ ID NO: 217703 - DNA, 630 bp, Unknown
  Bacterial polypeptide expressing nucleotide sequence isolated from the Sargasso Sea
aaaagttgaattcaaaagttacttttagctgcgatgtcgaaaaaaaagaggaagttgtaaaactatttgaagatgtaaagtcaaaatggggagaaattgactttgtagttcatgctgtagcattttcagacaaatcagaattaactggggaatatttgaacactacaagagaaaattttcttaaaagtatgctaatctcatgcttttcttttactgaagtatctaaagaggcgtctaaaataatgaaagatggtggaagtttacttacacttacttatgagtccactaaagctatacctaattataatgtaatgggaatttgtaaatcagctttggaagcaagtgtgaaatatttagcaagagatcttggtaaagataaaataagggtaaatgcgattagtgcaggtccaatcaaaactttagctgcttctgcaataggagatgcaaaatttttgtacaaatggaatgaagatcactcctttttaaaaagaaatgtagatattcacgatgttggtaattctgctctttatttattaagtaatttagctgcaggtgtaacaggagaaattcattatgtagacgctggatataacaaagttggaatgccagatcctaaaaatatgacttaag

SEQ ID NO: 217704 - DNA, 759 bp, Unknown
  Bacterial polypeptide expressing nucleotide sequence isolated from the Sargasso Sea
aatgaaaggtaaaaaaggcttgatcatgggtgttgctaatgagagatctattgcttggggaatttctcaaaaactttcagaagctggggcggaactagcatttacttatttgggtgacgctttaaaaaaaagagtagttcctttagcagaaaaattaaattcaaacgttacatttagttgtgatgttgaaaaaaaagaagaagttgtaaaattatttaaagatataaaatctaaatggggtgaaatcgattttgtcgttcatgcagttgctttctctgataaatcagaattatcaggtgagtacctaaatacgacaagagaaaactttttaagaagtatgttaatctcatgcttttcatttactgaagtagctaaagaagcttcaaatgtaatgaaaaaaggtggaagtttgttaactttaacttacgagtctactaaagcaatcccgaattataacgtaatgggtgtttgcaaatcagctcttgaggcaagtgttaagtatttagcaagagacttgggagccaaaggtataagagtaaatgctataagtgctggacctatcaagacattggctgcctctgcaattggagacgcaaaattcctatataaatggaatgaagaccattctttccttaaaagaaacgtagatatccatgatgttggaaattcagcgttatatctattaagtaaccttgcaaatggtgttactggtgaaattcactatgtagatgctggatataacaaggtaggaatgccaga

SEQ ID NO: 217705 - DNA, 663 bp, Unknown
  Bacterial polypeptide expressing nucleotide sequence isolated from the Sargasso Sea
atgctttaaaaaaaagagtagtaccgttagctgaaaagttaaattctaaagttacatttagttgcgatgtagagaaaaaagaagatgttattaaattatttgaagatgttaaatcaagctggggtgaaattgattttgttgttcacgctattgcattttcagacaaatcagaactttcaggtgaatatttaaatactacaagggaaaattttttaagaagtatgttaatttcatgtttttcatttactgaagttgcaagagaatcggcaaaaataatgaaaccaaatggaagtatgattacgcttacatatgaatcaacaaaagctattccaaactataatgtaatgggagtttgtaaatctgctttagaggcaagtgtaaaatatcttgcaagagatttaggttctaaacaaattagagtaaatgcaataagtgcaggaccaattaaaacattggctgcatcagcaattggagatgcaaagtttttatacaaatggaatgaggatcattccttcttaaaaagaaacgtagatatccacgatgttggaaattcagctttatatttattaagtgatctagcaggtggagttacaggagaaattcactatgtggatgctggatataataaagtaggaatgcctgatccaaaaaatatatcttaaa

SEQ ID NO: 217706 - DNA, 694 bp, Unknown
  Bacterial polypeptide expressing nucleotide sequence isolated from the Sargasso Sea
aaaggtcttatcatgggcgttgccaatgaaagatcaattgcatggggtatatctcaaaaacttgtagaagctggagcagagttagcttttacatatttaggtgacgctttaaaaaaaagagttgttccacttgcagaaaaattaaattcaaatgtaacatttagttgtgatgtggaaaaaaaagaggaagttgtaaaacttttcgaagatgtaaaaagtcaatggggagaaattgattttattgtgcatgcaattgcattttcagataagtcagagttatcaggagaatatttaaatacaactagagaaaactttttaagaagtatgttaatatcttgtttttcatttactgaagttgctagagaggcatctaaaataatgaagcaaggaggcagtatgattactttgagttatgaggcaaataaagccatacctaattataatgtaatgggagtttgtaaagctgccttagagtctagtgtaaaatatattgcaagggatttgggagtaaaaaatataagagtaaatgcaataagtgctggtccaatcaaaacactggctgcatctgccatcggcgatgctaaatttctatacaagtggaatgccgatcattcgttcttaaaaagaaatgttgataatcttgatgttggaaattcagcactatatcttttaagtgatatggcaagtggtgtta

SEQ ID NO: 217707 - DNA, 451 bp, Unknown
  Bacterial polypeptide expressing nucleotide sequence isolated from the Sargasso Sea
ttaaaaagtatgttaatttcatgtttttcatttactgaagtgcaaaaagaagcatctaaaataatgaaagaaggtggaagcatgttaactttaacttacgagtctacaaaagctattcctaattataatgttatgggagtttgtaaatctgctcttgaagcgagtgttaaatatcttgcaagagatttaggaacgaaaggtatgagagtaaatgcaatcagtgctggacccattaaaaccttggctgcttctgcaattggtgatgcaaagttcctatataaatggaatgaagaccattcattccttaaaagaaatgttgatatctatgatgtaggaaattcagcattatatctattaagtgatcttgctaatggtgttacaggtgaaattcactatgttgatgcgggatataataaagttggaatgccagatcctaagaatattagctaaa

SEQ ID NO: 217708 - DNA, 499 bp, Unknown
  Bacterial polypeptide expressing nucleotide sequence isolated from the Sargasso Sea
gatcattggaaggaattttgtagatgttacaactcgtgaaggatttaaaattgctcatgatattagttcatacagtttcacagctttagcgaaagcatccaaaccatacctaaatgagaatgctgcgctgttaactctaacgtatttaggctcaatgcagaccttgcctaattacaatgtcatgggcttagcaaaagcaagccttgaggctaatacaaggtttttagcggcttcaatgggtaaagataatataagggtaaatgctatttctgcaggtccaattaaaactttagcagcatctggagtgaaaaattttcgaaaaatgttgagtcaacattctaaaagagcgcctcttggcagaacagtgactgctgatgaagtaggaaatgtagctgcattcctttgctcagattatgcaagtggagtaacaggtgagataacatacgtagatgctggttttaatatctcagctatgcctttggatgaattagaagaatga

SEQ ID NO: 217709 - DNA, 589 bp, Unknown
  Bacterial polypeptide expressing nucleotide sequence isolated from the Sargasso Sea
aatgattaaaaacaaaaaaggtatagtatttgggattgcaaatgaccactcaatagcctgggggatagcaaaaaagttatccgaaaatggtgcagagctcgcaattacttatcaaaatgaaactcttttaaaaagagtcaaacctctagcaaatgaaataaattcaaaacttttgattgaatgtgattttggaaaacataattctattgaaagctcatttgaaattattaataagaattggggaaatatagattttataatacattcagctgcattttctgacaaaaatgagttgaatggtagatatattgatacctcaaaaaataattttattaatagtctgaatatatcttgtttttcttttactaaaattgcaaagatatatgaaccaattcttaataatggaagtagtttattaacactcagtttttatggatcaacaaaggtaatgcctaattacaatgtaatgggagtagcaaaggctgctttagaaactagtgttaaatatttaagtgtagacttgggttctaaaaatattagagtaaatgcaatctccgctggacctatgagaactttagctggtgcagct

SEQ ID NO: 217710 - DNA, 446 bp, Unknown
  Bacterial polypeptide expressing nucleotide sequence isolated from the Sargasso Sea
aagtatgttaatctcatgcttttcatttactgaagtagcaaaagaagcttcaaaggtaatgaaacaaggcggaagtttattaactttaacttacgagtctactaaagcaattccaaattataacgtaatgggtgtttgtaaatcagcacttgaagctagtgttaagtatctagctcgagatttaggcgccaagggcatgagagtaaatgcaataagtgcgggccctattaaaacattggcagcttctgcaattggagatgcaaaattcttatataaatggaatgaggatcattcttttcttaagagaaatgtagatattcatgatgttggaaactcagcactgtaccttctaagtcacctagcaaacggggttactggtgaaattcactacgtagatgcaggatataacaaagttggtatgccagatcctaaaaatattagctaaa

SEQ ID NO: 217711 - DNA, 556 bp, Unknown
  Bacterial polypeptide expressing nucleotide sequence isolated from the Sargasso Sea
ataaaatcaaaatggggtcaaattgattttgttgtacatgctgtagcattttctgacaaatcagaattatctggtgaatatttaaatactactagagaaaattttttgagaagtatgttgatttcatgtttttcctttacagaagttgcaaaggaagcttctaaaataatgaacataggtggaagcatgcttactttaacctacgagtctaataaagctattccaaattataatgtaatgggtgtttgtaaatctgcacttgaggcaagtgttaaatacctagcaagagatctaggttcaaaaggaattagagtcaatgcaataagtgctggacctattaaaactctagcggcttcagcaattggggatgcaaaattcttgtataaatggaatgaggatcactcatttttaaaaagaaatgtagatattaatgatgttggaaattcagctttatatttattgagtgaacttggaggcggtgtaactggtgaaattcactatgtagacgctggttataataaagttggaatgcctgacccaaaaaatataacttaat

SEQ ID NO: 217712 - DNA, 616 bp, Unknown
  Bacterial polypeptide expressing nucleotide sequence isolated from the Sargasso Sea
atgaaaattctaaatggtaaaaatgtgttgatagtaggtgttgcaaataaacactcaatagcagctggcattgctgaatcaatgtccgaaaatggtgcaaatatagctctgacttatcagaatgagcgtttaaaaagaaatgttgagaaacttggaagagaaatgggtatagagacctttatcccttgcgatgttacatctgatattgaaattaaagaaacgtttaaaaatctatcgtcacaatgggaaagtttagattcggtaattcatgcagtaggttttgctcctagagaggaattagatggaaacttcgtcgatgtaaccagtagagaaggtttccaaatagcacatgatataagtagttacagcttcatcgctcttgctaaagaagctaagaatatgatggaaggaaggaatggatctttactgactctgtcttatctaggttctcaaatgactctcccaaactacaatgtgatgggcttagcgaaagccagtttggaggcaagtgtaagatatttagctgtttcgatgggtacagaaggtcacagagtcaatgcaatatctgctgggccaattaaaactcttgctgcttcgggtgtaaaaaactttagaa

SEQ ID NO: 217713 - DNA, 694 bp, Unknown
  Bacterial polypeptide expressing nucleotide sequence isolated from the Sargasso Sea
atgagcttagttaaaggtaaaaaaggtttaataatgggagtggcaaatgagagatctattgcctggggaatttctcaaaaattatctgaagctggtgcagaattagcatttacatatcttggtgatgctttaaaaaaaagagtagtaccgttagctaaatctctaaattcagattttacattaagttgcaatgttgaaaacaaagaagaaatagtaaaactttttgaggacattaaaactaaatggggtcaaatagactttgtagttcatgctatagcattctctgctagatcagaactatcgggtgagtatttaaacacaaccagagaaaatttcttaaagagtatgttgatttcatgtttttcatttacagaagttgcaaaagaagcttcaaaaataatgaataaaggtggaagtatgctaactttgacttacgagtctacaaaaactattccaaattataatgtgatgggcgtttgtaaatcagcacttgaatcaagtgttaaatacttagcaagagatttaggagaaaaaggaattagagtaaatgcaataagtgcaggaccaattaaaacacttgcagcttcagctataggtgatgcaaaattcctttataaatggaatgaggatcattctttattaaaaagaaatgtagatattcatgatataggaaattcagctttatatctgctaa

SEQ ID NO: 217714 - DNA, 712 bp, Unknown
  Bacterial polypeptide expressing nucleotide sequence isolated from the Sargasso Sea
ctcaaaactttcagaagctggagctgagctagcatttacttatttaggtgacgctttaaaaaaaagagtagttcctctagcagaaaaattaaattcaaatgttacatttagttgtgatgttgagaaaaaagaagaagtagtaaaactatttgaggatattaaatctcaatggggtgaaattgattttgtagttcatgcagttgctttttcagataaatcagagttatcaggtgagtacctaaatacgacaagagaaaattttttaagaagtatgttaatttcttgtttttcatttactgaagtagcaaaagaagcttcaaaggtaatgaaacaaggtggaagtttattaactttaacctacgagtctactaaagcaattccaaattataacgtaatgggtgtttgtaaatcagctcttgaggcaagtgttaagtatttagcaagagatttaggagccaaaggtatgagagtaaatgctataagtgctggacctatcaagacattggctgcttctgcaattggagacgcaaaattcctatataaatggaatgaagaccattcttttctgaaaagaaatgtagatatccatgatgttggaaattcagcactatacctactaagcgaccttgcaaatggagttacaggtgaaattcactatgtagatgccggatataacaaagttggaatgcctgatccaaagaatattacctaa

SEQ ID NO: 217715 - DNA, 727 bp, Unknown
  Bacterial polypeptide expressing nucleotide sequence isolated from the Sargasso Sea
tgcctggggtatatctcaaaacttgctgaagcaggagctgaactagcatttacttatttgggtgacgctttaaaaaaaagagtagttcctttagcagaaaaattaaattcaaacgttacatttagttgtgatgttgaaaaaaaagaagaagttgtaaaattatttaaagatataaaatctaaatggggtgaaattgattttgtagttcatgcagttgctttctctgataaatcagaattatcaggtgaatatttaaatacgactagagaaaactttttaagaagtatgttaatctcatgcttttcatttactgaagtagcaaaagaagcttcaaatgtaatgaaaaaaggtggaagtttgttaactttgacttacgagtctactaaagcaattccaaattataacgtaatgggtgtttgtaaatcagctcttgaggcaagtgttaagtatttagcaagagacttaggagccaaaggtatgagagtaaatgctataagtgctggacctatcaagacattggctgcctctgcaattggagacgcaaaatttttatataaatggaatgaagaccattcattccttaagagaaatgtagatatccatgatgttggtaattcagcgttatatctattaagtgaccttgcaaatggtgttactggtgaaattcactatgtagatgctggatataacaaggttggggatgcagatcctaaaaatattacctaaa

SEQ ID NO: 217716 - DNA, 670 bp, Unknown
  Bacterial polypeptide expressing nucleotide sequence isolated from the Sargasso Sea
tatgttagaaaataaaaaaatacttattgctggccttgctaataagcactcaatagcagctggtatcgcaaaagcaatgcatgcacaaggtgctgaattagcattcacctatcaaaatgagagattaaaaaagaatgttgaaaaaatagccttggatcttaattcaaaacttttatttgaatgtgatgtttcctcagacaaaagcattgaaacaatgtaccaaaacctttctaaggattggaaaaaatttgatggttttgtccactctattggctttgctcctgcaaacgaactagaaggcaactttgtagatgctgccactagagagggtttcaaagttgctcatgatataagctcatatagttttactgcaatggcaaaagctgcaaaatcaatgttaaatcctggctctgctttattaactttgacctatttaggctcagtccaatctcttccaaactataatgttatgggcttggcaaaagccagcttagaagccaatacgcgctttcttgcagccgctatggggccagatgatattagggtaaatgctatatcagccggcccaatcaaaacattggcagcatctggagtaaagaactttagaaaaatgcttgtaaactacgcaaacagggctccgctaagaagagtagttactacgacagaggta

SEQ ID NO: 217717 - DNA, 649 bp, Unknown
  Bacterial polypeptide expressing nucleotide sequence isolated from the Sargasso Sea
aagagtagtaccattagcagaaaaattgaattctaatgttacttttagttgtgatgtagaaaaaaaagaagatgttataaaattatttgaaaatataaaatctagttggggcgaaattgattttgttgtacatgctatagcattttcagacaaatcagaactatcaggagaatatttaaatacatctagagaaaattttttaagaagtatgttgatttcatgcttttcatttactgaagttgcaagagaagcttctaaagtaatgaaagaaggtggaagtatgataacactaagttatgaggctaataaagccatcccaaattataatgttatgggtgtatgcaaagctgctcttgaatctagtgtgaaatatttagctagagaccttggaactaaaggaattagggtaaatgctatcagtgctggacctattaaaactctagctgcatcagctataggggatgctaaattcctatataaatggaacgcagatcattcctttttaaagagaaatgttgataatttagacgttggaaattcagcattatacctattaagtgatatggcaggtggtgttactggtgaaattcactacgtagatgcaggatataataaagtaggcatgccagatcctaagaatttcacctga

SEQ ID NO: 217718 - DNA, 619 bp, Unknown
  Bacterial polypeptide expressing nucleotide sequence isolated from the Sargasso Sea
atgaagggtaaaaaaggactgattatgggagttgcaaatgagagatccattgcatggggtatttctcaaaaactatctgaagctggtgctgaattagcttttacctacttaggcgatgcattaaaaaaaagagttatacctttagctgaaaagcttaattcaaaagttacatttagttgcgatgttgaaaaaaaagaagaagttaaaaaactttttgaagatataaagtccaaatggggtgagatagattttgttgttcatgcagttgctttctcggataaatcggaattatctggtgagtatttaaacaccactagagaaaattttgttaagagtatgctaatctcgtgcttttcttttacagaggtatcaaaagaggcatctaaaataatgaaagaagggggtagtttgttaactctcacatatgaatctactaaagcaatcccaaattataatgttatgggagtttgtaaatctgccctagaggctagtgtaaaatacttagctagagaccttgggcagaaaaagattagggttaatgctataagcgcaggaccaattaaaacattagcagcatctgctataggagatgcaaaatttctatataagtggaatgagg

SEQ ID NO: 217719 - DNA, 727 bp, Unknown
  Bacterial polypeptide expressing nucleotide sequence isolated from the Sargasso Sea
tgcatggggaatttcccaaaaacttgcagaagcgggtgctgaactagcttttacatatttaggtgatgcactaaaaaaaagagttttacctttagctgaaaagctgaattcaaaagttacttttagttgtgatgttgaaaaaaaagaagaagtaaaaaaactttttgaagatataaaatctaaatggggtgaaattgattttgtggttcacgcagtcgctttttctgataaatctgaattatctggtgaatatttaaatacaacaagagaaaattttcttagaagtatgcttatctcttgtttttcctttacagaaatttctaaagaagcctctaaaataatgaaaaatggtggtagtttattaactctcacttatgagtctaataaagcaattcctaactacaatgttatgggaatttgtaaatctgccttagaggctagtgtaaaatatttagctagagatctaggacaaaagaaaataagagtaaatgctataagtgctggaccaattaaaaccttagctgcatctgctattggtgatgcaaaatttttgtacaaatggaatgaggatcattcttttttaaaaagaaacgttgatattcatgatgtaggtaattcagcgttatacttgttaagtaatttggcaagcggagttactggagaaatacactatgttgatgctggatataacaaagtaggtatgccagatccaaaaaatataacttaa

SEQ ID NO: 217720 - DNA, 355 bp, Unknown
  Bacterial polypeptide expressing nucleotide sequence isolated from the Sargasso Sea
tatgagtctactaaagctattccaaattataatgtaatgggtgtttgcaaatctgctttagaagcaagtgtaaaatacctagctagagacttaggagttaaaggtgttagagtgaacgcaatcagtgccgggcctattaaaacgctggcagcttctgctattggagatgcaaaattcctttataagtggaatgaagaccattcttttcttaagagaaatgtagatattcacgatgtcggaaattcagcattatatttattaagcaaccttgcaaatggagttactggcgaaattcactatgtagatgccggatataacaaagttgggatgccagatcctaaaaatataagctaaa

SEQ ID NO: 217721 - DNA, 778 bp, Unknown
  Bacterial polypeptide expressing nucleotide sequence isolated from the Sargasso Sea
aatgagtggtaagaaagggttaatcatgggcgttgctaatgaaagatctattgcatggggtatctctcaaaaattagctgaagcaggtgctcaactagctttcacctacttgggtgatgccttaaaaaaaagagtagttcctttagcggagaaattaaattcaaacttaacatttagttgtgatgtagaaaaaaaagaacaagtaattaaactatttaaagacataaaatcaaaatggggtcaaattgactttgttgttcatgcagtcgccttctcagacaagtcagagttaagtggggagtatttaaatacaactagagaaaattttttaagaagtatgttaatttcatgtttttcatttactgaggtagcaagagaagcttctaaaataattaataaagatgggagtatgcttactttaacttatgagtctaataaagctattccaaattacaatgtaatgggtgtttgcaaatctgctcttgaagcaagtgttaaatacttagctagagatttgggatcaaagggaattagagtaaatgcaataagtgcaggaccaataaaaacacttgccgcctcggctattggagatgcaaaatttctttataaatggaatgaagatcattcttttttaaaaagaaacgttgatattcatgatgttggtaattcagctttgtaccttttaagtgatctcggaagtggagttactggtgaaattcactatgtagatgctggctataataaagtagggatgccagatcctaaaaatattacttag

SEQ ID NO: 217722 - DNA, 697 bp, Unknown
  Bacterial polypeptide expressing nucleotide sequence isolated from the Sargasso Sea
ggcaggagcagaattagcttttacatatttaggtgatgctcttaaaaaaagagtagttccgcttgcagaaaaactaaattctaatgttacttttagctgtgatgttgaaaaaaaagaagatgtaataaaattatttgaagatgttaaatctcaatggggcgagatagactttgtagttcacgcaatcgctttttctgataaatctgagctctcaggagaatatctaaatactactagagaaaattttttaaaaagtatgttaatttcgtgcttttcatttactgaagttgcaaaagaagcttcaaacgtcatgaaaaatggcggtagcatgattacacttagctatgaggctaataaagcaatccctaattacaatgtaatgggtgtttgtaaggcagcattagagtctagtgttaaatacttagctagagatttaggagcaaaaggaataagggtgaacgcaataagtgcaggaccaattaaaactttagcagcatcagcaattggagatgctaaatttttatataaatggaatgcagatcactcttttttaaaaagaaatgtagataacttggatgttggaaactcagctttatatcttttaagtgatatggcaggtggtgtaactggtgaaattcattatgtagatgctggctataataaagtgggaatgccagacccaaagaatatatcttaa

SEQ ID NO: 217723 - DNA, 778 bp, Unknown
  Bacterial polypeptide expressing nucleotide sequence isolated from the Sargasso Sea
atgaaaggtaaaaaaggactaatcatgggtgttgctaatgaaagatctattgcttggggtatttcacaaaaactagctgatgctggtgcagaacttgcatttacctatttaggagatgctttaaaaaaaagagttattcctttagctgaaaaattaaattcaaaggcaacattcagttgtgacgttgaaaaaaaagaagaagtaataaagttatttgaaaatattaaatctcaatggggtgaaattgattttgtggttcacgctgtggcattctctgataaatctgaattatcgggtgagtatttagatacgacaagagaaaattttttaaaaagtatgttaatttcatgcttttcatttacagaagttgcaaaagaagcatccaaagtaatgaaaaaaggtggcagtttgttgaccctaacttacgagtctacaaaggcaattccaaactataatgtaatgggtgtttgtaaatcagctcttgaagccagtgttaaatatttagctagagatttaggagctaaaggtgttagagtaaatgcgataagtgcagggcctattaagacactagcagcctcagcaattggagatgcaaaattcctttataaatggaatgaagatcattctttccttaaaagaaacgtagatatccatgatgttggaaattcagcattgtatctgctaagtaaccttgcaaatggagttactggtgaaattcattatgtagatgctggatataataaggttgggatgccagatcctaaaaatatttcctaat

SEQ ID NO: 217724 - DNA, 601 bp, Unknown
  Bacterial polypeptide expressing nucleotide sequence isolated from the Sargasso Sea
atgaaaggtaaaaaaggtttaataatgggggttgctaatgaaagatctattgcatggggcatatctcaaaaattagctggagcaggagcagaattagcatttacgtatcttggtgatgctctcaagaaaagagttattccattatcagaaaaattaaattcaaaattgacatttagctgtgatgttgaaaaaaaagaagaggtaataaaactctttgaagatattaaagctaactggggccaaattgattttgttgttcatgctattgccttttcagataaatcagaattatctggcgaatatttaaatactactagagaaaattttttaagaagcatgttaatttcgtgcttttcatttacagaggttgcaaaagaagcttctaaaataatgaataaaggtggaagcatgcttacgttaacttatgagtccaataaagctattccaaattataatgttatgggtgtttgtaaatctgcacttgaagcaagtgttaaatacttagctagagatttgggagcaaaaggaattagagttaacgctataagtgcaggcccaattaagactttagcagcttctgcaataggtgatgcaaaatttt

SEQ ID NO: 217725 - DNA, 461 bp, Unknown
  Bacterial polypeptide expressing nucleotide sequence isolated from the Sargasso Sea
agaaaattttttaagaagtatgttgatttcatgcttttcatttacagaggttgcaaaagaagcttctaaaataatgaataaaggcggaagtatgcttactttaacttacgagtctaataaagctattccaaattacaatgtgatgggagtttgtaaatctgcacttgaggcaagtgttaaatatctagctagagatttaggatcaaaaggaattagagtaaatgcaataagtgcaggaccaattaaaactttagctgcatctgctattggagatgcaaaatttctttataaatggaacgaggatcattctttcttaaaaagaaatgttgatattcatgatgttgggaactctgctttatatttattaagtgatcttggaggtggtgttactggtgaaattcattatgtagatgctggttataataaagtaggaatgcctgatccaaaaaatataacttaat

SEQ ID NO: 217726 - DNA, 601 bp, Unknown
  Bacterial polypeptide expressing nucleotide sequence isolated from the Sargasso Sea
tgtgatgttgaaaaaaaggaagaagtggtaaaattatttgaagatattaaatctcaatggggtgaaatcgattttgtagttcacgctgttgcattctcagataaatcagaattatccggcgaatatttaaataccactagagaaaactttttaagaagtatgttaatttcatgtttttcttttactgaggttgcaaaagaagcatctagggtaataaataaaggtgggagtatgttaaccttaacttatgaatccactaaggctattccaaattataatgtaatgggtgtttgtaagtctgctcttgaagctagtgttaaatacttagctagagatttaggtactaaaggcattagagtaaatgcaataagtgccggtcctattaaaacattagcagcttctgctataggagatgcaaaatttttatataaatggaatgaagatcattcttttcttaaaaggaatgtagatattcatgatgttggaaattcagctctatatctattaagtgacctagcaaacggtgtgactggtgaaattcactatgtagatgctggatataacaaagttgggatgccagatcctaagaatattacctaaa

SEQ ID NO: 217727 - DNA, 709 bp, Unknown
  Bacterial polypeptide expressing nucleotide sequence isolated from the Sargasso Sea
attagctgaagcaggtgcagagttagcgttcacttatcttggcgatgctttaaaaaaaagggttgttcctttagcagaaaaattaaattcgaaatttacgtttagttgtgatgttgaaaaaaaagaagaagtagtaaaattattcgaagatataaaaaaccaattgggtcaaattgacttcgtggttcatgcagttgcattttcagataagtcggagctgtctggtgagtatctcaatacaactagagaaaattttttgagaagtatgttaatttcatgtttttcatttacagaggttgcaaaagaagcgtctaaaataatgaaagatggaggaagtatgctaacgttaacctatgagtctacaaaggcaattccaaattataatgttatgggtgtttgtaaatctgcattagaagctagtgtaaaatatctagcaagggatttaggctcgaaaaaaattagagttaatgcaattagtgctggtccaattaaaacactcgctgcatctgcaattggtgatgctaaatttttatataaatggaatgaagatcattcttttttgaaaagaaacgtagatattcatgatgtaggaaattctgcactatatctattaagtgatctcggtagtggtgtgactggtgaaattcattatgtggacgctggttataataaagttggaatgccagacccaaaaaatatgaaaggataa

SEQ ID NO: 217728 - DNA, 370 bp, Unknown
  Bacterial polypeptide expressing nucleotide sequence isolated from the Sargasso Sea
catgttgactttaacttacgaatcaacaaaagtgattccaaattataatgtaatgggagtatgtaaggctgcattagagtcgagcgtaaagtatattgcaaaagacttgggttctaaaggtattagagttaatgcaataagtgctggaccaattaaaacattggcagcttctgctattggcgatgcaaaatttttatacaaatggagtgctgatcattcttttttaaaaagaaatgttgatataaatgatgtgggaaaatcagcattatatttattaagtaatttaagcgatggagtaactggagaaatacactatgtagatgcgggttacaacaaagctgggatgccagatccaaaaaatatcacttaa

SEQ ID NO: 217729 - DNA, 606 bp, Unknown
  Bacterial polypeptide expressing nucleotide sequence isolated from the Sargasso Sea
tatgagtttgatgaaaggtaaaaaaggattaatcatgggtgttgccaatgagagatctattgcttggggtatatctcaaaaacttgctgaagctggtgcagaacttgcgttcacttatttgggtgatgctttaaagaaaagagttgttcctttagctgaaaaattaaattcaaaagtaacatttagttgtgatgttgaaaaaaaagaggatgtaataaaattatttgaagatgttaaatcacaatgggatgagattgattttgtagttcatgctattgctttttcagataaatcagaattatctggtgagtatttaaacacaactagagaaaactttttaagaagtatgttaatttcatgtttttcattcaccgaagtagcaaaagaagcttcaaaggtaatgaaagaaggtggaagtttaattactttaagctacgaagcgaataaagctattccaaattataatgtaatgggtgtctgtaaagctgctttggagtgtagtgttaagtatcttgcaagagatctaggtgctagaggcatgagaataaatgcaatcagcgcaggacctatcaaaacattagccgcgtctgcaattggagatgcaaa

SEQ ID NO: 217730 - DNA, 459 bp, Unknown
  Bacterial polypeptide expressing nucleotide sequence isolated from the Sargasso Sea
tcagtgcctattcattattaccaatcacaaaatatgcaagtcaattaatgcctaatggcggctccattattacgctatcttacttaggtggcgaacgatctgtcccgaactacaatgttatgggtgttgcaaaagcagcattagaatgttctgttcgatatctcgctgcagaatatggcagtcaagatattcgtgtaaacgcaatatctgcaggaccgattcgaacattagctgcgaaagggatctcaggctttgatatgatctggaaagttaacgaactgcgatcaccgatgaaaaaaaatgttagtatcgatgatgttggcaattctggtctttatctatgctctgacctttcaaaaggtgtaacgggtgaaacacaccatgttgatgcagggtttcattcagttgctgtatcaaaagaagatgttaaattaattggcaaggaaattacggaataac

SEQ ID NO: 217731 - DNA, 718 bp, Unknown
  Bacterial polypeptide expressing nucleotide sequence isolated from the Sargasso Sea
atggaaggaaaaactggattaataatgggtgttgctaatgagagatccatagcatggggaatagcaaatcaactttttttaaataaagcaaatattgttttaacctaccaaaatgatagtttaaaaaaaagaattgaacccttatcagaaaaaataaaatgtaaaaatttatataaatgtgatgtttcattaaaccctgaagatgaatactctattgaaaatttaattaaaaatataaataaagatgttggaaatttagattttgttgtacatgccttggcatattctgacaaagaggaacttaaaggcaaatatgtagaaacttcaagacaaaattttttaagtacacttgatatctctacatacagttttactagagtttcaaaatctgcctcaaaaattatgaataatgggggatctttcttaactcttacttatgtagggtccaacaaaactactccaaattataacgttatgggagtggcaaaagcagcactggaaacatcagttaaatatctgtccgtagatttaggaaaacataatatcagagttaacgcaatttcagctggacctatgaaaacaatcgctggtgcagcaatatctggagcaagacacgtttacagatattctgaaaaaattgctcctttacaaaaaaatccagatcttaaacaagttggaaatgctgctttgtatctattgtcagatatatctagtggag

SEQ ID NO: 217732 - DNA, 490 bp, Unknown
  Bacterial polypeptide expressing nucleotide sequence isolated from the Sargasso Sea
gttgtcaggcgaatatataaatacttcgagagaacattttgctaaaagtatgttggtatcctgtttttcatttaccgaaatagcaaaagaagcttctaaaatcatggataatggctctagcatgttaactttaacctacgagtctactaaagttgtaccgaattataatgtaatgggtgtttgtaaggctgctttagaatcaagcgttaaatatatcgctaaagatttgggttccaaaggaattagagttaatgccataagtgctgggccaatcaaaaccttagcagcttccgcaataggcgatgctaaatttttatataaatggagtgcagaccattcattgctaaaaagaaatgttgacatagatgatgttggaaaatcagctttatatttgttaagtgatcttgcagcaggcgttacaggggaaatacactatgttgatgcaggttataataaagttggaatgcctaatcccaaaaatatctcataa

SEQ ID NO: 217733 - DNA, 679 bp, Unknown
  Bacterial polypeptide expressing nucleotide sequence isolated from the Sargasso Sea
tgatttagtaattacttatcaaaacaatacattatttaaaagagttaaacctcttgctgataaaatagattgtaattgtttaattgaatgtgatgtaaacaaagaagaagaaattaaaaatgcttttgatatagttaaagataaatttggaaaaattgattttattatacatgctatagcttattcagataaaaatgaattaaatggacgctacattgaaacttcaaaaaataattttatacatagtctatctatatcatgctattctttcacaaaaatagccaaagtttttcaaccaattataaatgcaaatggaagcttagtaacattaagcttttatggagcaaataaagtaatgccaaattacaatgttatgggagttgctaaagctgctcttgaaacaagtgtaaaatatttaagtgttgatttaggtgaacaaaatataagggtaaatgcaatatcggcaggacctatgaggacacttgctggagctgcaattgcaaatgcaagagaagtttttaaatacaccaatgacaattcatctttaaaaagaaatgtaaacttagaggaattagggaattctgctttatatttagtcagtgaaatgtcatccgcagtaactggggaaatacattatgttgactgtggttttaatattgttggaatgcctaaggtttaa

SEQ ID NO: 217734 - DNA, 553 bp, Unknown
  Bacterial polypeptide expressing nucleotide sequence isolated from the Sargasso Sea
aaatccagctggggtgagattgattttgttgttcatgcaatagcattttcagataaatctgagctttccggtgaatatttgaatacaacaagagaaaactttcaaagaagcatgcttatttcatgcttctcttttacagaggtagctagagaagcatcaaagattatgagaccaaatggaagtatgatcaccttaagttacgaagcaaataaagctattcctaattataatgttatgggagtttgcaaagcagcactagaatctagtgtaaaatacttagcaagagatttgggtgctaaacaaataagagtaaatgcaattagcgcaggacctattaaaacattagctgcatcagcaattggtgatgcaaaattcttatataaatggaatgaagaccattcatttcttaaaagaaacgttgatattcatgatgtaggaaattctgcattatacttactaagtgatctagcaggtggtgttactggtgaaattcactatgtagatgcggggtacaataaagtaggtatgccagatcccaaaaatatttcttaaa

SEQ ID NO: 217735 - DNA, 686 bp, Unknown
  Bacterial polypeptide expressing nucleotide sequence isolated from the Sargasso Sea
acttgcatttacttatttgggagacgctttaaaaaaaagagttgttccgttagctgaaaaactaaattcaaaaactacattcagctgcgacgttgaaaagaaagaagatgttattaaattatttgaagatattaaatcaagttggggtgatattgactttgtcgtccatgcaattgcattttctgataaatctgaactttcaggtgaatatctaaatacaactagagaaaactttttaagaagtatgctaatttcatgcttttcgtttactgaggttgcaagagaagcagctaaaataatgaaacctaatggaagcatgattacgctaacatatgagtcaacaaaagctataccaaactataatgttatgggagtttgtaaatctgccttggaagcaagtgtcaaatatctcgccagagatttaggtgcaaaagaaattagagtaaatgcaataagtgcgggaccaattaaaacgttagcagcatcagcaattggagatgcaaaattcttatataaatggaatgaagatcattccttcttaaaaagaaacgtagatataaatgatgttggaaactctgctctatacctattaagtgatcttgcaggtggtgtcacaggtgaaattcactacgtagatgctggatataataaagtaggaatgccagacccaaaaaatataacttaag

SEQ ID NO: 217736 - DNA, 541 bp, Unknown
  Bacterial polypeptide expressing nucleotide sequence isolated from the Sargasso Sea
ggagagatagattttgttgttcatgctatagcattttcagataaatctgaactttctggagaatatcttaatactacaagagagaattttttaagaagtatgttaatttcatgtttttcatttactgaggtagcaagagaagcagctaaaataattaaacctaatggaagcatgattacacttacttatgagtcaacaaaagcaattccaaactataatgtaatgggtgtgtgtaaatctgccttagaggcaagtgtaaaatatttggcaagagatttgggatcgaaacaaattagagtaaatgcaataagtgcggggcctattaaaactttagcagcttcggccattggagacgcaaagtttttatataagtggaatgaagatcattcattcttaaaaagaaatgttgatattcatgatgtaggaaattctgctttatatttattaagtgatcttgcaggaggtgttactggtgaaattcactatgtagatgctggatataataaagtaggtatgccagacccaaaaaatattacttaaa

SEQ ID NO: 217737 - DNA, 619 bp, Unknown
  Bacterial polypeptide expressing nucleotide sequence isolated from the Sargasso Sea
atgaaaggaaaaaaaggactaatcatgggagttgctaatgaaagatctatcgcatggggtatatctcaaaaacttgctgaagctggagctgaattagcatttacatatttaggtgatgcactaaaaaaaagagttatacctttggctgaaaaattaaattcaaaagtaacttttagttgcgacgtagaaaaaaaagatgaagttataaaattatttgaagatattaagacccagtggggagaaatcgattttatagttcatgctgttgctttttctgataaatcagaattatctggtgaatatttaaatacaactcgagaaaattttttaagaagtatgttgatctcgtgtttttcatttacagaagtagcaaaagaagcttcaaaagtaatgaagcaaggtggaagcttacttacattaacttatgagtcttctaaagctattccaaattataatgttatgggtgtttgtaaatcagctttagaagctagtgttaaatacttggctagagatttaggtgctaaaggtataagagtaaatgctattagtgctggacctattaaaacattagctgcttcggcaataggtgacgcaaaattcttatataaatggaatgaag

SEQ ID NO: 217738 - DNA, 439 bp, Unknown
  Bacterial polypeptide expressing nucleotide sequence isolated from the Sargasso Sea
gctaatttcatgtttttcattcactgaagtttctaaagaggcttcaaaaatcatgaaagaaaatggaagtttattaacgcttacttatgagtctacaaaggcaattcctaattataatgtaatgggtgtatgtaaatcagcacttgaagctagtgtaaaatatttagcaagagacttagggcaaaaaaaactaagggttaatgcaattagtgctggccctattaaaacattagctgcttcagctattggtgatgcaaaatttttgtataagtggaacgaggatcattcttttctaaaaagaaatgttgatatttatgatgttgggaactcagctttatacttattgagtgatttggctgccggagtaactggagaaattcactacgttgatgctggttataataaagtgggtatgcctgatcccaaaaatatgtcttaa

SEQ ID NO: 217739 - DNA, 475 bp, Unknown
  Bacterial polypeptide expressing nucleotide sequence isolated from the Sargasso Sea
aatgattaaaggtaaaaaaggattaatatttggtattgctaacgatcattcaatagcatggggtattgctgaaaaattacatttaaatggtgctcaattggcaattacttatcaaaattctacattattgaagagagttaagccacttgctgagaaagtaaactgtgattgcttaattgaatgtgatgttggcaaggaagaggatataaataacagtctaaaaattgttaaagataaatttgataagattgattttataatacacgctgtagcttattcagacaaaaacgaattaaatggacgatatatagaaacttcaaaaaataattttataaatagcttatctatatcatgtttttctttcacaaaaatagcaaaagtatttcaaccaattataaatgaaaatggaagcttgttgactttaagtttttatggagcaaataaagtaatgccaaattataatgttatgggtgta

SEQ ID NO: 217740 - DNA, 676 bp, Unknown
  Bacterial polypeptide expressing nucleotide sequence isolated from the Sargasso Sea
aatgaagggtaaaaaaggattaatcatgggtgttgctaatgaaagatctattgcctggggtatttctcaaaaattagctgatgcaggggctgaattagcattcacttatctaggtgatgctttaaaaaaaagagtagttcctttagcagaaaaattaaattcaaaagtaatattcagttgtgatgttgaaaagaaagaagaagtaataaaactatttgaggacataaaatcaaaatggggccagattgattttgttgttcatgcagttgcattttcagataaatctgaattatcaggagaatatttaaatactacaagagaaaattttttaagaagtatgctaatttcatgcttttcgtttactgaagttgcaaaagaagcttccaaagtaatgagtaaaggaggaagtatgcttacattaacctacgagtctaataaagctattccaaattacaatgtaatgggagtttgtaaatctgcacttgaggcaagtgttaaatatctagctagagatttaggatcaaaaggaattagagtgaatgcaataagtgctggaccaattaaaactttagctgcatctgcaattggagatgcaaaatttctttataaatggaacgaggatcattctttcttaaaaagaaatgtagacatacatgatgtggaaattcagctttat

SEQ ID NO: 217741 - DNA, 408 bp, Unknown
  Bacterial polypeptide expressing nucleotide sequence isolated from the Sargasso Sea
caaaagaagcttccaaaataatgaataaaaatggaagtatgctaactctgacatatgagtcaaacaaagctattccaaattataatgtaatgggtgtttgtaaatctgctcttgaggcaagcgttaaatatcttgcaagagacttgggcacaaaaggaataagagtaaatgcaataagcgctggacctattaagactttagcagcctctgcaataggtgatgcaaaattcttgtataaatggaatgaggatcattcctttttaaaaagaaatgttgatattcatgatgttggaaattcagctttatacttactaagtgatcttggaggtggagttactggtgaaattcactatgtagacgctgggtacaataaagttggaatgcctgatccaaaaaatataaaataat

SEQ ID NO: 217742 - DNA, 457 bp, Unknown
  Bacterial polypeptide expressing nucleotide sequence isolated from the Sargasso Sea
aaatttttaagaagcatgttaatttcgtgtttttcatttactgaagttgcaaaagaagcttccaaaataatgaataagggagggagtatgcttacattaacatatgagtctaataaagctattccaaattataatgtaatgggtgtttgcaaatctgctcttgaagctagtgttaaatacctggctagagatttaggatcaaaaggaattagagtaaatgcaatcagtgctggaccaattaaaactttagcagcatcagcaattggtgatgcaaaattcctctataagtggaacgaggatcattcttttttaaaaagaaatgtagatataaatgatgttggaaattcagctttatatttactaagcgatcttggaggtggtgttactggtgaaattcactatgtagatgctggttacaataaagtaggaatgcccgatccaaaaaatataacttaat

SEQ ID NO: 217743 - DNA, 492 bp, Unknown
  Bacterial polypeptide expressing nucleotide sequence isolated from the Sargasso Sea
aactgtcaggtcagtatattgacacctcaagagaaaattttacaaaaagtatgttggtatcatgtttttcattcactgaagtagctaaagaggcatctaaaataatgaaaagtggatcgagtatgctaactttgacttacgaatcgactaaagtaataccgaattacaatgtaatgggggtttgtaaagctgctttagagtctagtgtaaagtatatttctagagatttaggtactaaaggaattagagtaaatgcgattagtgctggaccaattaaaactttagcagcctcagcaattggtgatgcaaaatttttatacaaatggagttccgatcactcatttttaaaaagaaatgttgatattgatgatgtaggaaaatctgcgctttatttattaagtgatcttgctgctggtgtgactggcgaaatacattacgttgatgcaggttacaataaagcaggaatgccagatcccaaaaatattacttaat

SEQ ID NO: 217744 - DNA, 778 bp, Unknown
  Bacterial polypeptide expressing nucleotide sequence isolated from the Sargasso Sea
atgaaaggtaaaaaaggattggtgatgggagttgccaatgaaagatctattgcttggggcatttcacaaaaactttcagaagctggagctgaacttgcatttacatatttaggtgacgctttaaaaaaaagagtggttcctttagcagaaaaattaacttcaaaagttatatttagttgtgatgttgaaaaaaaagaagaagttgtaaaattatttgaagatataaaatctcaatggggtgaaattgattttgtagttcatgcagttgctttctctgataaatcagagttgtcaggtgaatatttaaatacgactagagaaaactttttaagaagtatgttaatctcatgcttttcatttactgaagtagctaaagaggcttcaaaggtaatgaaagaaggtggaagtttgttaactttaacttacgagtctactaaagcaattccaaattataacgtaatgggtgtttgtaaatcagctttagaagctagtgttaagtatctagctcgagatttaggtgccaagggcatgagagtaaatgctataagtgctggacctatcaagacattggctgcttctgctattggggatgcaaaattcctatttaaatggaatgaagaccattctttccttaaaagaaacgtagatattaatgatgttggaaattcagcattatatctattaagtgaccttgcaaacggtgttactggtgaaattcattacgtagatgctggatataacaaggttgggatgccagatcctaagaatattaggtaaa

SEQ ID NO: 217745 - DNA, 616 bp, Unknown
  Bacterial polypeptide expressing nucleotide sequence isolated from the Sargasso Sea
aatgaaaggcaaaaaaggtctgataatgggtgttgctaatgaaagatctattgcatggggtatttctcaaaaacttgctgatgcaggtgcagaacttgcctttacatacttgggtgatgcccttaaaaagagggtaattccattagctgaaaaattaaattcaagtgttattttaagttgtgatgttgaaaagaaagaggaaataataaaattatttcaagatatcaaaacaaaatggggggagattgattttgtagtgcacgcagtagctttttcagataagtcagaattatcaggtgaatatttaaatactacaagagaaaattttttaaggagtatgttgatttcttgtttctcttttacagaagtagctaaagaagcttctagtattatgaaagagggtggaagtatgcttaccttaacttacgaatctactaaagctatacctaattataatgttatgggtgtttgtaaatctgctcttgaagcaagtgtaaaatatcttgctagagatctgggtgcaaaaaagattagagtaaatgctataagcgcaggaccaattaaaactttagctgcatcagcaattggagatgctaaatttctttataaatggaat

SEQ ID NO: 217746 - DNA, 442 bp, Unknown
  Bacterial polypeptide expressing nucleotide sequence isolated from the Sargasso Sea
catgttgatttcatgcttttcatttactgaggttgcaaaagagtcatgtaaagtgatgacgtctggtggaagtatgcttaccttaagttatgaagctaacaaagctattccaaactacaatgttatgggtgtctgcaaggctgctttagagtctagtgttaaatatctagctagagatctaggcgccaaaggaattagagtaaatgcaataagcgctggccctattaaaacgttagcagcttctgctgtaggagatgccaaattcctatataaatggaatgcagatcattcttttttaaggagaaatgtagataatttagacgtaggtagttctgcattataccttttaagtgaaatggcaggtggtgttactggtgaaattcactatgtagatgcaggttataataaagtagggatgccggatcctaaaaatattacataa

SEQ ID NO: 217747 - DNA, 484 bp, Unknown
  Bacterial polypeptide expressing nucleotide sequence isolated from the Sargasso Sea
tttgttgatgtgaccacaagagatggctttaaaatagctcatgatataagttcttatagttttacagcgctagcaaaagcttcaaaaccttatttaaatgacagttctgcccttcttactctaacttaccatggatctactcaaacattaccaaattacaatgttatgggccttgcaaaagctagtctggaagcaaatacaaggtttttggctgcgtcattaggaaaggaaaatataagagtaaatgctatatctgcagggccaataaagactcttgcagcatctggagttaaaaatttcagaaaaatgctaaaccatcattcgaacattgcacctttaggaagaaccgtaacatcagaagaagttggaaatgttgcagcttttctatgttctgattttgcaagtggtataactggcgaaattacttatgttgatgcagggtttaatattgcagcaatgccccttcaggaagttgaagattgat

SEQ ID NO: 217748 - DNA, 607 bp, Unknown
  Bacterial polypeptide expressing nucleotide sequence isolated from the Sargasso Sea
aatgaagggaaaaaaaggactgataatgggtgttgcaaatgaaaggtctattgcatggggcatttctcaaaaacttgcagaagcaggtgcagagttagctttcacataccttggcgatgcacttaaaaaaagagtggtacctttagcagaaaaactcaattcaaatgttacatttagttgtgatgtagaaaaaaaagaggaagtagtaaaactatttgaagatattaaatcccaatggggcgagatagactttgttgtccatgcaatcgcattttcagataaatctgaattatctggagaatatttaaatactactagagaaaattttcaaagaagtatgcttatttcatgtttttctttcacagaagttgcaagggaagcttccaaagttatgaaagagggtggtagtatgatcactctaagttatgaggctaataaagctataccaaattataatgtcatgggagtttgtaaagctgctttggaatctagtgtaaaatatttagcgcgtgatttaggagctaaaggaataagagttaatgcaatcagcgcaggtccaattaaaactttagcagcttctgcaattggagatgctaaatttttatat

SEQ ID NO: 217749 - DNA, 461 bp, Unknown
  Bacterial polypeptide expressing nucleotide sequence isolated from the Sargasso Sea
agaaaattttttgagaagtatgttaatatcatgcttttcgttaacagaggttgctaaagagttctcaaaaataatgaaagagggtggaagtatgattactttaagttatgaggcaaataaagcaattccaaattataatgtaatgggtgtatgtaaggcagcattagagtcgagtgttaaatacttggctagagatttaggtgcaaagggtatcagagtaaatgctataagtgctggaccaatcaaaacattggctgcatctgctataggagatgctaaatttctatataaatggaatgctgatcactcatttctaaaacgtaatgttgataatttagatgttggaaattcagctctttatttattaagcgatatggcaagtggtgtaacgggtgaaattcattatgtggatgcaggatataataaaatgggaatgccagatccaaaaaatataacttaaa

SEQ ID NO: 217750 - DNA, 778 bp, Unknown
  Bacterial polypeptide expressing nucleotide sequence isolated from the Sargasso Sea
gatgaaaggtaaaaaaggattggtgatgggtgttgccaatgaaagatctattgcttggggtatttcacaaaaactttcggaagcaggagcagaactagcatttacctatttaggggatgctttaaaaaaaagagttattccattagcagaaaaattaaattcaaaagttacatttagctgtgatgtagaaaaaaaagaagatgtaacaaagttatttgaagatgttaaatcacaatggggtgagattgattttgtagttcatgcaattgctttttcagataaatcagaattatctggtgaatatttaaacacaactagagaaaactttttaagaagtatgttaatttcatgtttttcatttactgaggtggcaaaagaggcatccaaagtaatgaaagaaggcggaagtttaatcacattaagttatgaagcaaataaagctattccaaattataatgtaatgggtgtatgcaaggcagcgttagaggctagtgttaaatatttagcgagagatttaggtgctaaagggatgagggtaaacgccataagtgccggacctattaaaacgctggcagcatctgcaataggagatgcaaaattcctttataaatggaatgaagaccattctttactcaaaagaaacgttgatattcatgatgttggaaattcagcattatatctattaagtgaacttgcaaacggtgttactggtgaaattcactatgtagatgctggatacaataaagttgggatgccagatcctaagaatataacttaa

SEQ ID NO: 217751 - DNA, 523 bp, Unknown
  Bacterial polypeptide expressing nucleotide sequence isolated from the Sargasso Sea
tataggttatgcaccggcagaccaactaaaaggagattttttagaagctacaaatcgtgagggatttaaaatagctcatgatattagttcatatagctttactgctatggctaaagaagctaagtcaatgcttaatgagaattctgcacttttaactttgacttatttaggttctactcaaacagtaccaaattacaacgtaatgggtcttgccaaagcaagcttagaagctaatactagatttttggctgcatctttaggcaaagataatattcgtgtaaatgccatatctgctggtccaattaaaacactagctgcatcaggtgtgaaaaacttcagaaaaatgctctctcaacattctgatagatcgcctcttggaagaacagttactgctgaagaagtgggaaatgttgccgcttttttatgttctgattatgcaagtggaatcacaggagaaattacttatgtggatgctgggtttaatatagcagccatgccactgacagaatttaataatgattaa

SEQ ID NO: 217752 - DNA, 673 bp, Unknown
  Bacterial polypeptide expressing nucleotide sequence isolated from the Sargasso Sea
atgaaaggtaaaaaaggtctaattatgggtgttgcgaacgaacgctctatagcctggggtatatctcaaaaacttgctgacgctggtgcagaactagctttcacctatctcggtgatgcccttaagaaaagagtaattccacttgcagaaaagttaaattctaaaactacttttagctgtgatgttgaaaagaaagatgaagttacaaaattatttgaagatattaaatctcaatggggtcaaattgattttattgttcatgcggtggcattttctgataaatcagagttatctggagaatacttaaatactacaagagaaaattttcttcgaagtatgcttatttcatgcttttcatttacagaagtttcaaaggaagcttctaaaataatgaaagaaggcggaagtatgctaacactcacttatgagtccactaaagctattccgaattataatgtaatgggtgtttgcaaatcggctctagaggcaagtgtaaaatatttagctagggatttaggtcaaaaaaaaataagagtaaatgctattagtgcgggtccaataaaaaccttagctgcatctgcaataggagacgcaaaatttttatataagtggaatgaggatcactcttttttaaaaagaaacgttgatattcatgatgtaggaaattctgctt

SEQ ID NO: 217753 - DNA, 760 bp, Unknown
  Bacterial polypeptide expressing nucleotide sequence isolated from the Sargasso Sea
cttattatgggtgttgcaaatgaaagatcaattgcctggggtatttctcagaaacttgctgatgctggcgctgaacttgcttttacatatctaggagacgctttgaaaaaaagagtaattcctttagcagaaaaattaaactcaaaagtaacatttagctgtgatgtagaaaaaaaagaggatgtaacaaaattatttgataatattaaatcccaatggggtgaaattgactttgttgttcacgcaattgcattttcagataaatcagaattatcaggagaatatttaaatacaaccagagaaaactttttaagaagtatgctaatttcatgcttttcatttacagaagttgctaaagaagcatctaaagtaatgaaaaaaggtggaagcctgatcactttaagttatgaggcaaataaagctattccgaattataatgttatgggtgtatgtaaagcagcattagaatctagtgttaagtatttagcaagagatttgggtgcaaaaggtatgagggtaaatgctataagtgcaggacctattaaaacattagccgcgtctgctattggagatgcaaaattcctatataaatggaatgaagaccattcattattaaagagaaatgttgatattcatgatgttggaaattcagcattatacctattaagtgaccttgcaaatggtgttacaggtgaaattcactatgtagatgctggatataacaaggttggaatgccagaccctaagaatattacctaaa

SEQ ID NO: 217754 - DNA, 787 bp, Unknown
  Bacterial polypeptide expressing nucleotide sequence isolated from the Sargasso Sea
tatgaaaaataaaaaaggtttggttatgggtgttgccaaccaaaagtccattgcatggggaatagctgaagtattaagtgcagaaggagcatctttagcattaacttatcagggtgaaaactttaaaaagagagtagagccattggctgagggtatagactcaaagcttatatttgatgttgacgtcacagatgaaagttccatagataaatgttttaatcatttatcaaaggagtggggatcgctagattttgtagtacatgcgcttgctttttctgacaaatctgaactgtctggtaggtttatcaatacttcgaggcagaactttttaaactctctggatatatcttgttttagcctaattgatgtctcaaagagatgctcacctctcatgaaaaaaggtggagcgattttaacgctgagttatttaggttcgcaaagagttactccaaattataatgtgatgggagtagcaaaagccgctttggaatcatcggttagatatcttgcaagtgatttgggtgaagatgggattagagtgaatgctattagtgccgggccaatgaaaacacttgcgggagctgctataggtggagcgagaagagttttccgtctttccgagcaaaattctcccttgaagtcaaacccaacattaaaatcagtagggggcacagctgcgtttttactgagtgattatggactgcatgtttctggggaagtaatctttgtagatggcggttaccatgttatgggtatgcctaaattagataatattgagaaggcatga

SEQ ID NO: 217755 - DNA, 623 bp, Unknown
  Bacterial polypeptide expressing nucleotide sequence isolated from the Sargasso Sea
aaattcaaaagttacttttagttgtgatgtgaaaaagaaagaagaagtagtaaaattatttgaagatataaaatctaaatggggtgaaatagattttatagtccatgcaattgctttttcggataaatctgaattatctggagaatatttaaatacaactagagaaaactttttaagaagtatgttaatttcatgtttttcatttactgaagttgcaaaagaagcatcaaaaattatgaaaactggtggcagtatgattacactaagttatgaagccaataaagcaatccctaattacaacgttatgggagtttgtaaagctgcgcttgaagcaagcgtaaaatacttagcaagagatttgggttctaaaggtattagggttaatgcaattagcgcagggccaattaaaacattagcagcatcagcaattggagatgcaaaattcctatataagtggaatgctgatcattcttttttaaaaaggaatgttgataatcttgatgtaggtaattcggctttatatctactaagtgatatggctggaggagtgactggtgaaattcattacgtagatgctggttataacaaggttgggatgccagatcctaagaatataacctaaa

SEQ ID NO: 217756 - DNA, 388 bp, Unknown
  Bacterial polypeptide expressing nucleotide sequence isolated from the Sargasso Sea
aatgaaaaaaggtggaagcttgttaacattaacttacgaatctacgaaagcaattcccaactataatgtaatgggtgtttgtaaatcagccctagaggctagtgtaaaatatttagctagagatcttggatctaaagatattagagtaaatgctattagtgcagggcctatcaagactcttgctgcttctgctataggagatgcaaagtttctttacaaatggaatgaggatcactcttttttaaaaagaaacgtaaatataaatgatgtgggaaattctgctttatatttattaagtgatcttgcctctggagttacaggagaaattcactacgttgatgctggttataataaagtagggatgcctgaccctaagaatatctcataa

SEQ ID NO: 217757 - DNA, 592 bp, Unknown
  Bacterial polypeptide expressing nucleotide sequence isolated from the Sargasso Sea
tatgtctttaatgaagggtaaaaaaggactaataatgggtgttgctaatgaaagatctattgcttggggtatttctcaaaaactttcagaagcaggtgctgaattagctttcacatatttgggtgatgctctcaaaaaaagagtagttcctcttgcagaaaaactaaattctaatgttacttttagctgtgatgttgaaaaaaaagaagatgtaataaaattatttgaagatgttaaatctcaatggggcgagatagactttgtagttcacgcaatcgctttttctgacaaatctgaactctctggagaatatctaaatactactagagaaaattttttaagaagtatgctgatttcatgtttttcatttactgaagtggcaaaagaagcctcaaaagttatgaaagagggtggtagtatgattactcttagctatgaggctaacaaagctattccaaattataatgttatgggggtttgtaaggcagcgttagaatctagtgtaaaatatttagcaagagatttaggggctaaaggaataagagttaatgcaataagtgcaggtccaataaaaacattggctgcgtcagct

SEQ ID NO: 217758 - DNA, 427 bp, Unknown
  Bacterial polypeptide expressing nucleotide sequence isolated from the Sargasso Sea
cagttttactgcaatggcaaaagaagcaaaaccaatgcttaacgatgattctgcccttttaactctgacttatctaggatctgttcaaacagtgcctaactacaatgtaatgggtttagctaaagcaagtttagaggcaaatacaagatttttagctgcttcacttggaaaagataagatcagagttaatgcaatttcagcaggaccaataaaaacactagctgcatcaggagtaaaaaactttaggaaaatgctttcacagcactcaaacagagctccgataggaagaaccgtaacggctgaagaagttgggaacgtagctgcttttttatgttctgactatgccagtggcattactggtgaaattacatatgtagatggaggttttaatattgctgcaatgcctataaacgaatatgaatcatga

SEQ ID NO: 217759 - DNA, 544 bp, Unknown
  Bacterial polypeptide expressing nucleotide sequence isolated from the Sargasso Sea
gtggggtcaaatcgattttgttgttcatgctgtcgccttttcggataaatcagagttatcaggagagtatttaaatactactagagaaaattttttaagaagtatgttaatttcatgtttttcatttactgaagttgcaaaagaagcttccaaagtaatgaacaagggtggaagtatgcttacattaacctacgaatctaataaagctattccaaattataatgtaatgggagtttgtaaatctgctctcgaagctagtgtaaaatacttagctagagatctaggtgcaaaaggaattagagtgaacgcaataagcgctggaccaattaaaactttagctgcatctgcaattggagatgcaaaatttctttataaatggaatgaggatcattctttcttaaaaagaaatgtagacattcatgatgttgggaactctgcttattatttattaagcgatcttggaggtggtgttactggcgaaattcactatgtagatgctggttacaataaagtaggaatgcctgatccaaaaaatataacttaa

SEQ ID NO: 217760 - DNA, 787 bp, Unknown
  Bacterial polypeptide expressing nucleotide sequence isolated from the Sargasso Sea
tatgagtttaatgaaaggcaaaaaagggttgatcatgggtgttgctaatgaaagatctatcgcctggggtatatctcaaaaacttgcagagtctggagctgaattagcattcacatatttaggcgacgctcttaagaaaagagttgttcctttggctgagaaattgaactcaaaggtaacatttagttgcgatgttgaaaaaaaagaggaagttgttaaattatttgaggatatcaagtccaaatggggagaaatcgattttgtagtgcatgcagttgctttttcagataagtcagaattatcaggtgaatatttaaatacaactagggaaaactttttaaggagtatgttaatctcttgtttttcatttacagaagttgcaaaagaagcatcaaaagtaatgagacaaggtggaagtcttcttacgttaacttacgagtccactaaagctattccaaattataatgtaatgggcgtttgtaaatcagcattagaagccagcgtcaaatacttagctagagatttaggtgccaaaggtatgagagtaaatgcaataagtgcaggacctattaaaaccttagcagcttctgctattggtgatgcaaaattcttatataaatggaatgaagaccactcatttttaaaaagaaatgttgatattcatgatgttggaaattctgctctgtacttattgagcgatctagccgctggtgtaacaggcgaaattcattatgtggatgctggatataataagatgggaatgccggatccaaaaaacattaagtaa

SEQ ID NO: 217761 - DNA, 358 bp, Unknown
  Bacterial polypeptide expressing nucleotide sequence isolated from the Sargasso Sea
gacttatgagtctactaaagtaatacccaactacaatgtaatgggtgtttgtaaagctgctctagagtcaagtgtgaaatatatttcaagagatttaggcgtaaaaggaattagagtaaatgcgatcagtgctgggccaattaaaactttagcagcatcggcaattggtgatgcaaagtttttatacaaatggagttccgatcactcatttttaaaaagaaatgttgatattgatgatgtaggaaaatctgcactttacttattaagtgatcttgccgctggtgttactggtgaaatacattatgttgatgctggttacaataaagcagggatgcctgatcctaaaaacattacataa

SEQ ID NO: 217762 - DNA, 796 bp, Unknown
  Bacterial polypeptide expressing nucleotide sequence isolated from the Sargasso Sea
atgaaaggcaaaaaaggtctgataatgggtgttgctaatgaaagatctattgcatggggtatttctcaaaaacttgctgatgcaggtgcagaacttgcctttacatacttgggtgatgcccttaaaaaaagggtaattccattagctgaaaaattaaattcaagtgttattttaagttgtgatgttgaaaagaaagaggaaataataaaattattccaagatatcaaaacaaaatggggggagattgattttgtagtgcacgcagtagctttttcagataagtcagaattatcaggtgaatatttaaatactacaagagaaaattttttaaggagtatgttgatttcttgtttctcttttacagaagtagctaaagaagcttctagtattatgaaagagggtggaagtatgcttaccttaacttacgaatctactaaagctatacctaattataatgttatgggtgtttgtaaatctgctcttgaagcaagtgtaaaatatcttgctagagatctgggtgcaaaaaagattagagtaaatgctataagcgcaggaccaattaaaactttagctgcatcagcaattggagatgctaaatttctttataaatggaatgaggatcattcatttttaaaaagaaatgttgatatccatgacgttggaaattctgctttgtatttgttaagtaatttaagtgatggtgtaactggggaaattcactatgttgacggtggttataacaaagttggtatgccggatccaaaaaatagaaataaatgtctaaaagatatagcgg

SEQ ID NO: 217763 - DNA, 427 bp, Unknown
  Bacterial polypeptide expressing nucleotide sequence isolated from the Sargasso Sea
ctcttatataagtgcgtactcattagcacctttatgtaaagcagcaaaaccactttttagtgatggtgctggcgttgtatcactgacctatttagggtcagagagggctattccaaactacaacgttatgggcgttgctaaagcagctttagaagcttcagtaagatatctctctgcagaacttggtcccgaaaaacaagtcagagttaatgcaataagtgctggacctattagaacacttgcgagttctgctataggtggcattttagatatgattcacaatgttgaagaaaaggctcctttgcgcagaacagtcactcaaacagaagtaggtaatactgctgcttttttattaagtgatctctctagcggcatttctggccaaacaatttatgttgatgcaggttactgcattaatggaatgtaa

SEQ ID NO: 217764 - DNA, 487 bp, Unknown
  Bacterial polypeptide expressing nucleotide sequence isolated from the Sargasso Sea
tcaggagaatatttaaatacaacaagagaaaattttttaagaagtatgttgatttcctgtttttcatttactgaagttgcaaaagaagcttccaaaataatgaataaaggtgggagcatgcttacattaacatacgagtctaataaagctattccaaattataatgtaatgggtgtttgtaaatctgctcttgaagctagtgttaaatacctagctagagatttagggtcaaaaggaattagaataaatgcaattagtgccggaccaattaaaaccttagcagcatcagcaattggtgatgcaaaatttctttataagtggaatgaggatcattcttttttaaaaagaaatgtagatatacatgatgttggaaattcagctttatatttactaagtgatcttggaggtggtgttaccggtgaaattcattatgtagatgctggttataataaagtgggcatgcctgatccaaaaaatataacttaat

SEQ ID NO: 217765 - DNA, 373 bp, Unknown
  Bacterial polypeptide expressing nucleotide sequence isolated from the Sargasso Sea
aagtttattaactttaacttacgagtctaccaaagcaattccaaattataatgtaatgggtgtttgtaaatcggcccttgaagccagtgttaagtatttagctcgagatttaggtgcgaaagggatgagagtaaatgcaataagcgcaggacccataaaaacgttagctgcatctgcaattggagatgcaaaattcctatataaatggaacgaagaccattcttttctaaagagaaatgtggatatccatgatgttggaaattcagcattatatcttctaagtgaccttgcgaacggtgttactggtgaaattcactatgtagatgctggatataataaagttggaatgccagatccaaaaaatataaaataa

SEQ ID NO: 217766 - DNA, 696 bp, Unknown
  Bacterial polypeptide expressing nucleotide sequence isolated from the Sargasso Sea
aatgcttctaaatctatctggcaaaaaaattctggttacgggaattgccaataaccgttcaatagcatggggtattgctcaacaactttcaaaagctggcgcagaacttggaatcacatatttgcctgatgataagggaagattcgaatctaaagttagagaactaactgaacagttaaacccatccttatttttgcctcttgatgttcaaaatccagctcaaattgaagaaatctttaaaaatataaaagacaattggggtcaaattgacggattagttcactgcctagcatttgcaggacgcgatgaattgattggagattatagtgccaccacttcagagggttttgatagggctcttaatataagtgcgtattcgttagcacctttatgtaaagcagcaaaaccactttttagtgatggtgctggcgttgtctcattaacttatttaggatcagagagggcgatccctaactacaacgtgatgggagttgcaaaagcagctttagaagcttcagtaagatatctttctgcagaacttgggcccgaaaaacaagtcagagttaatgcaataagtgctggacctataagaacacttgctagttctgctataggtggcattttagatatgattcacaatgttgaagaaaaggctcctttacgcagaacagtcactcaaacggaagtaggtaatac

SEQ ID NO: 217767 - DNA, 585 bp, Unknown
  Bacterial polypeptide expressing nucleotide sequence isolated from the Sargasso Sea
gatgtttttagaggggaaaaaattcttaatttgcggattggcaaacaaacgttctattgctgctggaattgcaaaatcaatgaccgaacaaggcgcgcaacttgctttcagttatcaaagtgagagattgaagcgaaacgttgaatctattgctaacgagctaggacatgacatattgattgaatgtgatgttgcatctgatagcagcattaaggatatgtttaagatccttgaaaaagattggaataaaattgacggcataattcactcaattggatttgcaccagccaatgaattggaaggtgattatctcgaatctgcaacaagagaaggctttaaaattgctcatgatataagttcttacagctttactgcacttgctaaagaaggtgcccatatgttgaatgaaaattcagctcttctaacattgacttatcatggcagtactcaatctctaccaaattacaatgttatgggcctagcaaaagctagtttagaagctaatacaagatttcttgctgcctctcttggcaaacaatctataagagttaatgcaatatctgcaggtccaataaaaactcttgc

SEQ ID NO: 217768 - DNA, 704 bp, Unknown
  Bacterial polypeptide expressing nucleotide sequence isolated from the Sargasso Sea
aatgagcttggtcaaaggaaaaaaaggtttaataatgggtgttgcgaatgaaagatcaattgcttggggtatagctaaaaggctttctgagcatggtgctgaactagcttttacgtacttgggcgatgctctaaaaaaaagggtgacccctttagctgagtcattaaattcaaaatttacattaaattgcaatgtagaaaatagcgacgatgtcgtaaaaatatttcaagaaataaaaagtaaatggggtaaattagattttgttgtgcacgcggttgctttttcagatagagcagagttatctggagaatatataaatacatctagagaaaattttgctaaaagtatgttagtatcttgtttttcgtttacagaggtagcaaaagaagcatctaaaattatgggaagtggttccagtttgttaactttaacttatgagtcaacaaaagttgttccaaattacaatgtaatgggtgtatgtaaagctgctttagaatctagcgtgaaatatatcgctaaagatttaggttctaaaggtatcagggttaatgccataagtgctggacctatcaaaacattggctgcttctgcaataggcgatgcaaaatttttatacaaatggagcgcggaccattctttactaaaaagaaatgtagacatagatgatgttggaaaatcagctttatacttgttaagcgatcttg

SEQ ID NO: 217769 - DNA, 787 bp, Unknown
  Bacterial polypeptide expressing nucleotide sequence isolated from the Sargasso Sea
tatgagtttgatgaaaggtaaaaaaggattaatcatgggtgttgctaatgaaagatctattgcttggggaatttcacaaaaactatctgaagctggagctgaacttgcattcacatatttaggtgatgcgttaaaaaaaagagtaattcctttagctgaaaaattaaattcaaaaatcacatttagttgtgatgttgaaaaaaaagaggaagtggtaaaattatttgaagatattaaatctcaatggggtgaaatagactttgttgttcatgcagttgcgttttcagataaatcagaattatcaggtgaatacttgaatactactagagaaaactttttaagaagtatgttaatttcatgcttctcatttactgaagttgcaaaagaggcttctaaagtaatgaaaaagggtggcagcatgttaactttaacttacgaatctactaaagctatcccaaactataatgtaatgggtgtttgtaagtctgctcttgaagctagtgttaagtacttagctagagatttaggtgctaaaggtatgagggtaaatgcaattagtgcagggccaattaaaacattagctgcttcagctattggtgatgcaaaatttttatataaatggaatgaagaccattctttcttaaaaagaaatgtagatattcatgatgtaggaaattcagcattatatctactaagtgaccttgcaaatggagttactggagaaattcactatgtagatgctggatataataaagttggaatgccagatccaaaaaatataaaataa

SEQ ID NO: 217770 - DNA, 734 bp, Unknown
  Bacterial polypeptide expressing nucleotide sequence isolated from the Sargasso Sea
aatgaaaggtaaaaaaggtctgataatgggtgttgctaatgaaagatcaatagcttggggaatttctcaaaaactttcggaggcaggagcagagttagcttttacatatctaggtgatgctcttaaaaaaagggtagtaccattggcagaaaaattaaattcgaaagtgatcttaagctgcgatgtcgaaaaaaaagaagaagttgtaaaattatttgaagatattaaatcacaatggggtgaaatagactttgtagttcatgcagttgctttttcggataaatctgaactctctggagaatatttaaatactacaagagaaaatttcttaagaagtatgttaatttcatgcttttcatttacagaagtggcaaaagaggcttcaaaatttatgaaggaaggtagtagcatgattacacttagttatgaagcaaacaaagccatacctaattataacgttatgggtgtctgtaaagcagcattagagtctagtgttaaatatttagctagagatttaggttcaaaaggtatcagagttaacgctataagtgctggtccaattaaaactttagctgcgtcagctataggagatgctaaatttctatataaatggaacgcagatcattcatttttaaaaagaaatgttgataatttagacgttggaaattcagcattatacttattaagcgatatggcaagtggagttactggcgaaattcactatgtagatgctg

SEQ ID NO: 217771 - DNA, 511 bp, Unknown
  Bacterial polypeptide expressing nucleotide sequence isolated from the Sargasso Sea
gcattttctgatagagcagaattatcagggtgagtacataaatacttctagggaaaactttacaaaaagtatgttagtctcttgtttttcgtttactgaaatagcaaaagaagcttcaaaaataatgaaaagtggttccagcatgttaaccttaacttacgaatctactaaagtagtgcctaattataatgtcatgggagtatgtaaggcagccctagaatctagtgtaaaatatatagcgagagatttaggttcaaaaggaataagggtgaatgctataagcgctggaccaattaaaactttagctgcttcagctattggtgatgcaaaatttttatataaatggagtgcagaccattcaatgttaaaaagaaacgttgacatagatgatgtaggcaaatccgctttatatttgttaagtgatctttcaggtggcgttacaggtgaaattcattatgtcgatggcggatataataaaataggcatgcctgatcctaaaaatatggtgtga

SEQ ID NO: 217772 - DNA, 355 bp, Unknown
  Bacterial polypeptide expressing nucleotide sequence isolated from the Sargasso Sea
tacgagtccactaaagtaataccgaactacaatgtaatgggggtttgtaaagctgccttagagtcgagtgtgaagtatatttctagagacctgggtacaaaaggaattagagtaaacgctattagtgctggaccaattaaaactctagcagcatcagctattggtgatgcaaaatttttatacaaatggagttcagaccattcttttttaaaaagaaacgttgatatcgatgatgtaggaaaatctgcactatatttgttaagtgatctcgctgccggtgtaactggagaaatacattacgtcgatgctggatataataaagcaggaatgccagatccaaaaaatataacttaaa

SEQ ID NO: 217773 - DNA, 778 bp, Unknown
  Bacterial polypeptide expressing nucleotide sequence isolated from the Sargasso Sea
gatgaaaggtaaaaagggattaatcatgggtgtagccaacgaaagatctattgcctggggtatttctcaaaaacttgctgaggctggagcggagctagcatttacatatttgggtgacgctttaaaaaaaagagtggttccattagcagaaaaattaaattcaaacgttacatttagttgtgatgttgaaaaaaaagaagaagttgtaaaattatttgaagatatcaaatcccaatggggtgaaattgattttgtagttcatgcagttgctttctctgataaatcagagttatcaggtgaatatttaaatacgactagagaaaactttttaagaagtatgctaatttcatgcttttcatttactgaagtagcaaaagaagcttcaaaggtaatgaggcaagatggaagtttattaactttaacttacgaatctactaaagcaatcccaaattataatgtaatgggtgtttgtaaatctgctttagaggccagtgttaaatacttagctagagatttgggtgctaaaggcatgagagtaaatgctataagtgcaggacctatcaagacattggctgcctctgcaattggagacgcaaaattcctatataaatggaatgaggaccattcttttcttaagagaaatgtagatatccatgatgttggaaattcagcattatatctactaagtgaccttgcaaacggagttactggtgaaatccactacgtagatgctggatataataaagttggaatgccggatcctaaaaatatcagctaa

SEQ ID NO: 217774 - DNA, 754 bp, Unknown
  Bacterial polypeptide expressing nucleotide sequence isolated from the Sargasso Sea
catgggtgtcgccaatgaaagatccattgcctggggtatttctcaaaaacttgctgaagcaggtgctgaactagcatttacatatttaggtgacgctttaaaaaaaagagtagttcctttagcagaaaaattaaactcaaacgttacatttagttgtgatgttgaaaaaaaagaagaagttgtaaaattatttgaagatatcaaatcgcaatggggtgaaattgattttgtagttcatgcagttgcgttctctgataaatcagaattatcaggtgaatatttaaatacgactagagaaaactttttaagaagtatgttaatctcatgcttttcatttactgaagtagcaaaagaagcttcaaagataatgaaacaaggtggaagtttgttaactttaacttacgagtctactaaagctattccaaattataatgtaatgggtgtttgtaaatcagctcttgaagcaagtgttaagtatttagcaagagatttaggagccaaaggtatgagagtaaatgctataagtgctggacctatcaagacattggctgcatctgcaattggagacgcaaaattcttatataaatggaatgaagatcattctttccttaaaagaaacgtagatatcaatgatgttggaaattcagcattatatctattaagtgaccttgctaacggagttactggtgaaatccactacgtagatgctggatataataaagttgggatgccagatcctaaaaatattagctaa

SEQ ID NO: 217775 - DNA, 784 bp, Unknown
  Bacterial polypeptide expressing nucleotide sequence isolated from the Sargasso Sea
aatgcttctaaatctaactggcaaaaaaattcttgttacgggaattgccaacaatcgttcaatagcatggggtatcgctcaacaactttcaaaagctggcgcagaacttggaatcacatatttgcctgatgataagggaagattcgagtctaaagttagagaactaactgaacctttaaacccatcgttatttttgcctcttgatgttcaaaatccagctcaaattgaagaaatctttaaaaatataaaagacaattgggggcaaattgacggattagttcactgcctagcatttgcaggacgcgatgaattgattggagattatagtgctaccacttcagagggttttgatagggctcttaatataagtgcgtattcgttagcacctttatgtaaagcagcaaaaccactttttagtgatggtgctggagttgtctcattaacttatttaggttcagaaagggcgattcctaactataacgtgatgggagttgctaaagcagctttagaagcttcagtaagatatctttctgcagaacttggtcccgaaaaacaagtcagagttaacgcaataagtgctgggcctataagaacacttgcgagttctgctataggtggcattttagatatgattcacaatgttgaagaaaaggctcctttacgcagaacagtcactcaaacagaagtaggtaatacagctgcttttttattaagtgatctctctagcggcatttcaggccaaacaatttatgttgatgcgggttactgcattaatggaatgtaa

SEQ ID NO: 217776 - DNA, 778 bp, Unknown
  Bacterial polypeptide expressing nucleotide sequence isolated from the Sargasso Sea
aatgaaaggtaagaaaggattaataatgggtgttgccaatgagagatctattgcctggggtatttcacaaaaactagctgaagctggagctgaacttgcattcacttatttaggtgatgctttaaaaaaaagagttattccattagcagaaaaattaaattcaaaaaaaacttttagttgtgacgttgaaaaaaaagaggaagttataaaattatttaaagatattaaatctcaatggggtgagattgattttgtagttcatgcagtagcattttcagataaatctgaattatctggtgaatatttaaatacgactagagaaaattttttaagaagtatgttaatttcatgtttttcatttacggaggttgcaaaagaagcatctaaagtcatgaaagagggtggtagcatgttaactttaacttatgagtctactaaagctattccaaattataatgtaatgggtgtatgcaaatcagctcttgaagcaagcgttaaatatcttgcaagagatttaggttctaagggtatgagggtaaatgctattagtgctggacctattaaaaccttagcagcttcagctattggagatgcaaaattcttatacaaatggaatgaagatcactcatttcttaaaagaaacgtagatatccatgatgttgggaattcagcattatatctattaagtgacctcgcaaacggtgttactggtgaaattcattatgtagatgctgggtataacaaagttggaatgccagatcctaagaatttttcctaa

SEQ ID NO: 217777 - DNA, 790 bp, Unknown
  Bacterial polypeptide expressing nucleotide sequence isolated from the Sargasso Sea
atgctactaaaaaataagaaaattttaatatcaggattagctaacaagtattcaattgcagctggcatagcatacgcaatgcatcgtgaaggagctgaattagcctttacataccaaaatgaaagattattaaagaatcttaaaccaatagctgatgaatgtggttcaaatatcttaattgaatgtgatgtatcaaatgatgattcaattaaatcttcatttgtagaattatcaaaaaaatggaataagtttgatggctttgttcattccattggctttgctcctgctgatcagcttgaaggcgactttctcgaagtaactaatcgagaaggctttcaaattgcgcatgacataagttcatatagttttacagcaatggcaaaagaatctaagtctatgctcaatgaaaattcagctttacttacccttacctacttaggatcaacacaaacaatgcctaattacaacgttatgggtcttgctaaagctagtttagaagcaaatacaagattcttagctgcatcattaggaaaagataatattcgagtaaatgctatatcagcaggtccgattaaaactcttgcagcttctggtgttaaaaattttagaaaaatgctatcacaacattctaataaagctccgttaggtagaactgttactgctgaagaagttggaaatgttgctgcatttatgtgttcagactttgcaagtggtattacaggagagatcacatatgtcgatgctggatttaatatagctgctatgccactaaacgagcttaacaatgatt

SEQ ID NO: 217778 - DNA, 481 bp, Unknown
  Bacterial polypeptide expressing nucleotide sequence isolated from the Sargasso Sea
agaatatttaaatactacaagagaaaatttcttagaagtatgcttatctcatgtttttcgttcaccgaagtttcgaaagaagcttcaaagataatgaatgaagggggtagtttactaactcttacatacgaatccaccaaagcaataccaaattataatgttatgggtgtttgtaaatccgctttagaagcgagtgtaaaatatttagcgagagatctaggaaggaaaaaaataagagttaatgccataagtgctggaccaattaaaaccttggctgcttccgcaattggggatgcgaagtttttatataaatggaatgaagaccactcatttttaaaaagaaatgttgatatccatgatgtaggaaattctgctttatatttgctcagcaatctcgctgcgggcgttactggagaaattcattatgtagatgcaggatacaacaaagtaggtatgcctgatcctaaaaatatgaattaag

SEQ ID NO: 217779 - DNA, 754 bp, Unknown
  Bacterial polypeptide expressing nucleotide sequence isolated from the Sargasso Sea
catgggtgttgctaatgagagatctattgcctggggtatatcacaaaaattatcagaagctggtgcaaatttagcttttacatatctaggtgatgcattaaagaaaagggttattcctcttgcggaaagattaggttcaaaagttacgtttagttgtgatgttgaaaagaaagacgaaataataaaattatttgaaaatattaagtcagagtgggggaagatagattttgtggtacatgctattgccttttcagataaatctgagctatcaggagaatatttaaatactacaagagaaaactttttgagaagtatgttaatttcttgcttttcatttactgaaattgcaaaagaggcatcaaaaataatgaatgaaggtgctagcatgattacattaacatacgagtcaaataaaactattccaaactataatgtaatgggagtttgtaaatctgcactagaatccagtgtaaaatatattgctagagatcttggtgcaaaatcaattagagttaatgccataagtgcaggacccattaaaactctagctgcctctgcaattggagatgcaaaatttttgtacaagtggaatgaagatcattcttttttaaaaaggaatgtcgatattaacgatgttgggaactcagctttatatcttttaagcgatctatcagcaggagtaacaggcgaaatacattatgtagatgctggatataataaagtaggaatgcccaatcctaagaatattacataa

SEQ ID NO: 217780 - DNA, 691 bp, Unknown
  Bacterial polypeptide expressing nucleotide sequence isolated from the Sargasso Sea
aatgggcgtagctaatgatagatctatagcctggggtatagctaaaaaactttctgaaaatggagccgagctagcttttacttatttaggtgatgctcttaaaaaaagagttactcctctagctgaatctgtaaattctaaatttctattaaattgtaacgtagaaaacaaagacgatattataaaaacatttcaagaaattaaaaataaatggggtcagttggattttgtagtacacgccattgctttttctgatagagcagaattgtcaggtgagtacataaatacttctagggaaaactttgcaaaaagtatgttggtttcttgtttttcatttactgagatagcaaaagaagcttcaaaaatgatgaaagctggttctagcatgttaactttaacttacgagtctacgaaagtagttcctaactataatgtcatgggagtgtgtaaggcagctttagaatcgagcgtaaagtacatagctagagatctaggttccaagggaatcagagtaaatgctataagtgctggaccaattaaaactttagctgcttcagccataggtgatgcaaaatttctatataaatggagtgctgatcactcgttgttaaaaagaaatgtggatatagatgatgtgggtaaatctgctctgtatttactaagtgatcttgcagctggtgttactggagaa

SEQ ID NO: 217781 - DNA, 753 bp, Unknown
  Bacterial polypeptide expressing nucleotide sequence isolated from the Sargasso Sea
catgggcgttgcaaatgaaaggtcaatagcttggggcatttcaaaaaaattatcagaagcgggggcagatcttgcgtttacttatttaggtgatgctttaaaaaaaagagttgttcctttagctgaacaattaaattcaaaaataacatttagttgcgatgtagaaaaaaaagatgaaattatcaagctgtttgaaaacattaaatctcaatggggagaaattgattttgtagtacacgctgtagcattttcagataaatcagagttatcgggtgaatatttaaatacaactagagaaaattttttacgaagcatgttaatatcttgcttttcatttactgaggtttccaaagaagcatctaaattaatgaaaaatggaggaagtttaataactctgacctatgaatcaactaaagctatacctaattataatgtcatgggtgtttgtaaatctgcacttgaatctagtgtgaaatatttagcaagagatcttggaggaaaaggaattagggttaacgctataagtgcaggtccaattaaaactttagctgcctctgcaatcggagatgcaaaatttctctataaatggaatgaaagtcactcatttttaaaaaggaatgtagatataaatgatgtcggaaattcagctttatatcttttaagtgatttagcgtcaggagttacaggagaaattcattacgttgatgctggctataataaaatgggaatgccagatccaaaaaatatctctta

SEQ ID NO: 217782 - DNA, 728 bp, Unknown
  Bacterial polypeptide expressing nucleotide sequence isolated from the Sargasso Sea
tgcatggggcattgcacaaaaactttcagaagcaggtgctgagttagcttttacttatcttggtgatgcattaaaaaaaagagtagtaccattagcggaaaaattaaattcaaatgttacttttagctgtgatgttgaaaaaaaagaagatgttataaaattgtttgaagatgttaaatctacttggggagaaatcgattttgtcgtacatgcaattgcattttcagataaatcagagttatctggtgaatatttaaatacaactagagaaaattttttaagaagtatgttgatttcatgcttttcatttacagaagttgcaagagaggcttccaaaataatgaaaacagacggtagtatgatcactctaagttatgaagctaacaaagctataccaaattataatgttatgggtgtctgcaaggcagctttggagtctagtgtaaaatatctagctagagatctaggaacaaaaggaattagagtaaatgcgattagtgctggacctattaaaaccttagcagcatccgccataggagatgctaaattcctttataaatggaacgccgatcattcattcttaaaaagaaatgtagacaatttagatgtaggaaactcagcattataccttttaagcgatatggcaggaggtgtcacaggtgaaattcactacgtagatgccgggtataacaaagtagggatgccagatcctaagaatatttcctgat

SEQ ID NO: 217783 - DNA, 762 bp, Unknown
  Bacterial polypeptide expressing nucleotide sequence isolated from the Sargasso Sea
gattaattatgggagttgctaatgagagatctattgcttggggaatctctcaaaaattggcagaatctggtgcagaattagcatttacatacttgggtgatgctctaaaaaaaagagtaattcctcttgcagaaaaattaaattcaaaaattacatttagctgcgatgttgaaaaaaaagaagaagtaataaaactttttgaagatataaaatcaaaatggggtcaaatcgattttgttgttcatgcagttgcattttcagacaaatctgaattatcaggcgaatatttaaatactactagagaaaattttttaagaagtatgctaatttcatgcttttcatttactgaggttgcaaaagaagcttctaaaataatgagtaaaggtggaagtatgcttacattaacttatgagtctaacaaagctattccaaattataatgtaatgggtgtttgtaaatctgcacttgaggcaagtgttaaatatctagctagagatttaggatcaaaaggaattagagtaaatgcaataagcgcgggaccaattaaaactctagcagcttcagctattggagatgcaaaatttttatataaatggaacgaagatcactcatttttaaaaagaaatgtagatatccatgatgttggtaactcagctttatacctattgagtgatcttggaggtggtgttactggtgaaatccattatgtagatgcaggatataataaggtagggatgccagaccctaaaaatattgcttaaa

SEQ ID NO: 217784 - DNA, 784 bp, Unknown
  Bacterial polypeptide expressing nucleotide sequence isolated from the Sargasso Sea
atgcttctaaatctaactggcaaaaaaattcttgttactggaattgccaacaatcgttcaatagcatggggtattgctcaacaactttcaaaagctggcgcagaacttggaatcacatatttgcctgatgataagggaagattcgaatctaaagttagagaactaacggaacctttaaacccatcgttatttttgcctcttgatgttcaaaatccagctcaaatagaagaaatctttcaaaatataaaaaataattgggggcaaattgacggattagttcactgcttagcatttgcaggacgcgacgaattgattggagattatagtgctaccacttcagagggttttgatagggctcttaatataagtgcttattcattagcacctttatgtaaagcagcaaaaccactttttagtgatggtgctggcgttgtctcattaacttatttaggatcagaaagggcaattcctaactacaacgtgatgggagttgctaaagcagctttagaggcttctgtcagatatctttctgcagaacttggtccagaaaaacaagtcagagttaatgctataagtgctggacccataagaacacttgcgagttctgctataggtggcattttagatatgattcacaatgttgaagaaaaagctcctttgcgcagaacggtcacacaaacggaagtaggtaatactgctgcttttttattaagtgatctctctagcggcatttcaggccaaacaatttatgttgatgcgggttactgcattaatggaatgtaaa

SEQ ID NO: 217785 - DNA, 640 bp, Unknown
  Bacterial polypeptide expressing nucleotide sequence isolated from the Sargasso Sea
atgaagggaaaaaaaggtcttattatgggcgttgccaatgaaagatcaatagcttggggaattgcacaaaaactttcagaagctggagctgaactggcatttacttatcttggagaggctttaaaaaaaagagttatacccttagctgaaaaattaaattcaaaagtaacttttagctgtgatgttgaaaaaaaagaggaagtggtaaaattatttaaagatataaaatctacatggggagaaattgattttgtagtacatgcaattgcattctcagataaatctgaattatcaggcgaatatttaaatactacgcgagaaaattttttaagaagtatgttaatttcgtgcttctcttttactgaagttgcaaaagaggcatctacggtaatgaaggaaaatggaagtatggtaactctaagctatgaggcaaataaagccattcctaactataatgtaatgggtgtttgtaaagcggctttagaagcaagtgtaaagtatctagctagagatttaggatcaaagggaataagggtaaatgcaataagcgctggtcctattaaaacgctagcagcttcagctataggagacgccaaatttttgtataagtggaatgcagatcactcatttttaaaaagaa

SEQ ID NO: 217786 - DNA, 647 bp, Unknown
  Bacterial polypeptide expressing nucleotide sequence isolated from the Sargasso Sea
catgggtgttgcaaatgaaagatctattgcctgggggattgcacaaaaactttctgaagcaggagctgagctagcatttacatatcttggtgatgcattaaaaaaaagggtagtgcctttagcagaaaaattaaattcaaatgttacttttagttgtgatgttgaaaaaaaagaagatgttataaaattattcgaggatgttaaatctaattggggtgaaattgattttgtagtacatgcaattgcattttcagataaatctgaactttcaggagagtatttaaatacaactagagaaaattttttaagaagtatgttaatttcatgtttttcgtttactgaggttgcaaaagaagcatctaaagtgatgaaagaaggtggaagtatgattactctaagttatgaggctaataaagctatcccaaattataatgtaatgggtgtatgcaaagcggcactagaatctagtgttaaatatctagcaagagacttaggagctaaaggcattagagtaaacgccatcagcgctggacctattaaaacccttgcggcatcagcaataggagacgctaaattcctatataaatggaacgcagatcactcatttttaaagagaaatgtagataatttagatgttggaaactcag

SEQ ID NO: 217787 - DNA, 793 bp, Unknown
  Bacterial polypeptide expressing nucleotide sequence isolated from the Sargasso Sea
atgcttctagaaaataagaaatttttaatagctggaattgccaataaatattctatagcagctggaatagcgtatgcaatgcacaaagaaggagctgaattagctttttcttatcaaaatgagagattattaaaaaatattaggccaattgcagaggcatgtggttcaaaaatattaattgaatgcgatgtaagcgatgatgactcaataaaatcgtcttttaaagaacttaagcaatgttggagtacatttgatggttttgttcattcaattggttatgccccctctgatcaactcgagggtgattttgttgatgttactactagagaaggttttaaagtagcgcatgacataagctcgtatagctttactgctatggctaaagaatcaaaatccatgcttaatgaaaactctgcactgctaaccctttcatatcttggatccattcaaacaatgcctaattataatgttatgggtcttgcaaaagcttctcttgaggcaaatacaagatttctagctgcgtccttaggaagaaataatataagagtcaatgctatctcagctggtccgataaaaacacttgcagcctcaggcgttaaaaattttagaaaaatgctgagtcaacattcaaaaagagctcctttaggaagaacagtaactgctgaagaagttgggaatgctgctgcctttttatgctctgattatgcgagtggaataacaggcgaaattacctatgttgacgctggtttcaatattgctgcaatgcctctaaatgaaattgagcatgattaaa

SEQ ID NO: 217788 - DNA, 778 bp, Unknown
  Bacterial polypeptide expressing nucleotide sequence isolated from the Sargasso Sea
atgaaaggtaaaaaaggattaatcatgggtgttgccaatgaaagatctattgcttggggtatttctcaaaaacttgcagaggctggagctgagttagcatttacttatttgggtgatgctttaaaaaaaagagtagttcctttagcagaaaaattaaattcaaatgttacatttagttgtgatgttgaaaaaaaagaagaagttgtaaaattatttgaggatatcaaatcccaatggggtgaaattgattttgtagttcatgcagttgctttctctgataaatcagagttatcaggtgaatatttaaatacaactagagaaaactttttaagaagtatgttaatctcatgcttttcatttactgaagtagcaaaagaagcttcaaaggtaatgaaacaaggtggaagcttattaactttaacttatgagtctacgaaagcaattccaaattataacgtaatgggtgtttgcaaatcagctttagaggccagtgttaaatatttagctagagatttgggtgctaaaggcatgagagtaaatgctataagtgcaggacctatcaagacattggctgcctctgcaattggagacgcaaaatttctatataaatggaatgaagaccattcttttcttaagagaaatgtagatatccatgatgttggaaattcagcattatatctactaagtgaccttgcaaacggagttactggtgaaattcactacgtagatgctggatataataaggtaggaatgccagatcctaaaaatataacctaaa

SEQ ID NO: 217789 - DNA, 512 bp, Unknown
  Bacterial polypeptide expressing nucleotide sequence isolated from the Sargasso Sea
tgttattcatgctgcagcatattcagaaaaagatgaacttaatgggaggtatattgacacatctaaagataattttataaaaagcttaaatatatcttgtttttcttttactaaaattgcaaaacttgtagaaccaataatgaatgagggaggtagcttattgactctaagtttttatggagctaacaaagtaatgccaaattacaatgtcatgggtgttgctaaagctgctcttgaaacaagtgttaaataccttagtgtcgatttaggagaaaaaaatataagggttaacgccatttcagcaggacctatgaggaccttagcaggagcagcaatagcgaactcaagagaagtttttaagtacacacaagaaaactcagtactaaaaagaaatgttagtttagaagaattgggaaatacagcactttattttgttagtgatttgtcaaatgcagtaactggtgaaattcattatgttgattgtggttttaatatcaaaggtatgccataaa

SEQ ID NO: 217790 - DNA, 778 bp, Unknown
  Bacterial polypeptide expressing nucleotide sequence isolated from the Sargasso Sea
aatgaagggaaaaaaaggtcttatcatgggtgttgccaatgaaaggtcaattgcatggggtatatcgcaaaaattagcagaagctggagcagagttagcttttacatatttgggtgatgctttaaaaaaaagagttgttccacttgcagaaaaactaaattcaaatgtaacatttagctgtgatgtagaaaaaaaagaagaagttgtaaaactttttgaagatgtaaaaagtcaatggggagaaattgattttgttgtgcatgcaattgcattttcagataagtctgagttatcaggagaatatttaaatacaactagagaaaactttttaagaagtatgttgatatcttgtttttcatttactgaagttgctagagaggcatctaaaataatgaagcaaggtggtagtatgattactttgagttatgaagcaaataaagccatacccaattataatgtaatgggagtgtgtaaagctgcactagaatctagtgttaaatatcttgcgagggatctaggagcaaagaatattagagttaatgcaattagtgcgggaccaataaaaactttagcagcttctgctattggggatgctaaatttctttacaagtggaatgccgatcattcatttttgaaaagaaatgtagataatcttgacgtaggaaattcagcattatatcttttaagtgatatggctggtggtgttactggtgaaattcactatgtagatgctggttacaataaagttggaatgccagatcctaagaacattacctga

SEQ ID NO: 217791 - DNA, 754 bp, Unknown
  Bacterial polypeptide expressing nucleotide sequence isolated from the Sargasso Sea
atgggtgttgctaatgagcgatcaattgcttggggtatttctcaaaaacttgcagaagcaggagcagaacttgcatttacctatttaggtgatgcgctaaagaaaagagttgttcctttggcagaaaaattaaattcaaatgttacttttagttgtgatgttgagaaaaaagaagaagtaacaaaattatttgaagatataaaatctaaatggggcgagatagatttcgtagttcacgcgatagcattttcagataaatctgaattatcaggtgaatacctaaatacaactagagaaaattttttaagaagtatgttgatttcttgtttctcatttacagaagttgcaaaagaagcatctaaaattatgaaacaaggtgggagtatgattactttaagttatgaagccaataaagctattccaaattataacgtgatgggagtatgtaaagctgcacttgaagcaagtgttaaatatcttgcacgagacttaggttcaaaaggtataagaattaatgcaattagtgcaggacctataaaaactttagcagcatcagcaattggagatgcaaaatttttatataaatggaatgctgatcattcttttctgaaaagaaacgttgataatcttgatgtaggaaattctgctttatatttattaagtgatatggcaggtggcgtcactggtgaaatacactatgttgatgctggttataataaggtaggaatgccagatccaaaaaatattacttaaa

SEQ ID NO: 217792 - DNA, 778 bp, Unknown
  Bacterial polypeptide expressing nucleotide sequence isolated from the Sargasso Sea
atgaaaggtaaaaagggtttaattatgggggttgcaaatgaaagatcaattgcttggggtatatcacaaaaactatcagaggctggggcggatttagcatttacttacttaggagatgcacttaaaaaaagagttattcctttagcgaagaaattaaattcgaaaattactattagctgtgacgtagaaaaaaaagaggaaattataaaattattcgaggatataaaaacagaatggggaaaaatagattttgtagtccacgcagttgccttttcagataaatcagaattatctggagaatatattaacaccactagagaaaattttttaaggagtatgctaatttcatgtttttcgtttactgaggttgcaaaggaagcagcaaaaataatgaatgaaggtggaagcatgcttacactaacatatgaatcaaataaagctattccaaactataatgtaatgggtgtatgtaaatctgcactagaggctagtgttaagtatcttgcaagagaccttggaactaaatcaataagagtaaatgccattagtgcaggacctattaaaactctggcagcatccgcaataggagacgccaaatttttgtataagtggaatgaggatcactcttttttgcaaagaaatgttgatattaatgatgttggaaattcagcattatacttattaagcaatctagcagctggagttacaggtgaaatacactatgtggatgcaggatataataaggtagggatgccaaatcctaaaaatatttcttaaa

SEQ ID NO: 217793 - DNA, 778 bp, Unknown
  Bacterial polypeptide expressing nucleotide sequence isolated from the Sargasso Sea
atgaagggtaaaaaaggattgataatgggtgttgctaacgaaagatcaattgcttggggtatatctcaaaaactttcagaagcaggtgctgaattagcttttacatatctaggtgatgctcttaaaaaaagagtagttcctcttgcacaaaaactgaattctaatgtcacttttagctgtgatgttgaaaaaaaagaagatgtaataaaattatttgaagatgttaaatctcaatggggtgagatagactttgtagttcacgcaatcgctttttctgataaatctgagctctcaggggaatatctaaatactactagagaaaattttttaagaagtatgttgatttcgtgcttttcatttactgaagttgcaaaagaagcttcaaaagtcatgaaaaatggtggtagcatgattacacttagctatgaggctaataaagcaatccctaattacaatgtaatgggtgtttgtaaggcagcattagaatctagtgttaagtacttagctagagatttaggagctaaaggaatacgggtgaacgcaataagtgcaggtccaataaaaacattggctgcttcagctattggagatgcaaaatttttatataaatggaatgctgatcactctttcttaaaaaggaatgtagataacatcgatgttggaaactcagcattatatcttttaagcgatatggcaggtggtgttacaggtgaaattcactatgtcgatgctggttataataaagtaggtatgccagatccaaaaaatatatcttaaa

SEQ ID NO: 217794 - DNA, 778 bp, Unknown
  Bacterial polypeptide expressing nucleotide sequence isolated from the Sargasso Sea
atgaaaggtaagaaaggtctaatcatgggggttgctaatgaaagatctattgcctggggcatttcacaaaaattagctgaagctggagcggaattagcatttacttatctaggtgatgcattaaaaaaaagagttatccctcttgcagaaaaattaaattcaaaagttacatttagctgtgatgttgaaaaaaaagaagaagtaacgaaactttttgaagatataaaatcacaatggggtcaaatcgattttgttgttcatgcagttgcattttcagacaaatctgaattatcaggtgaatacttaaatactagtagagaaaattttttaagaagtatgttaatttcatgcttttcttttactgaggttgcaaaagaagcctctaaaattatgaataaaggtggaagtatgcttactttaacttatgagtctaataaagctattccaaattataatgtaatgggtgtttgtaaatctgcacttgaagcaagtgttaaatacctagcaagagacctagggacgaggggaataagagtaaatgcaataagcgcaggaccaattaaaactcttgcagcatctgcaattggagatgctaaatttctttataaatggaatgaagaccattcttttttaaaaagaaacgtagatatccatgatgttgggaattcagctttatatctattaagtagccttggaggtggtgttactggtgaaattcactatgtagatgccggatataataaagtagggatgccagatccaaaaaacataacttaat

SEQ ID NO: 217795 - DNA, 787 bp, Unknown
  Bacterial polypeptide expressing nucleotide sequence isolated from the Sargasso Sea
gatgagtttaatgaaggggaaaaaaggattaataatgggtgttgctaacgaaagatctattgcttggggtatttcacaaaagcttgctgaggctggagctgagcttgcattcacttatttaggtgatgctttaaaaaaaagagtaattcctttagcagaaaaattaaattcaaaaataacatttagttgtgatgttgagaaaaaagaggaaataataaaattatttgaagatataaaatctcaatggggtgaaattgattttgtagttcatgctgtagcattttcagataaatcagaattatctggagaatatttaaatactactagagaaaactttttaagaagtatgttaatctcctgcttttcttttactgaggttgcaaaagaagcatctaaaataatgaaaaaaagtgggagtttgttaactttaacttatgaatctactaaggccattccaaattataacgtaatgggtgtttgtaaatctgctcttgaggcaagtgtaaaatatctagcaagagatttaggagctaaaggcatgagagtaaacgcaatcagtgcaggacctattaaaacattggctgcttctgctattggggatgcaaaattcttatataaatggaatgaagatcattctttcctaaaaagaaacgtagatatccatgatgttggaaattctgcattatatctattaagtgaccttgcaaatggagttacaggtgaaattcactatgtagatgctggatataataaagtagggatgccaaaccctaaaaatattacataa

SEQ ID NO: 217796 - DNA, 778 bp, Unknown
  Bacterial polypeptide expressing nucleotide sequence isolated from the Sargasso Sea
atgaagggcaaaaaaggattaattatgggcgtagctaatgaaagatctattgcctggggaatatctcaaaaattatctgaggcaggtgctgagctcgcatttacatatcttggagatgcgcttaaaaaaagagttataccattagcagaaaagctaaattcaaaagtaacctttagctgtgatgttgaaaaaaaagaagaagtaataaaactttttgaagatataaaatcaaaatggggtcaaattgatttcgttgttcatgcagtagctttttcagacaaatcacaattatcaggagagtatctaaatactacgagagaaaattttttaagaagtatgctaatttcatgcttttcatttacagaagttgcaaaggaagcatctaaaataatgaataaaggtggaagtatgcttacattaacttatgaatctaataaagctattccaaactacaatgtaatgggagtttgtaaatctgcacttgaagcaagtgttaaatacttagctagggatttaggtgcaaaaggaataagagttaatgctataagtgcgggaccaattaaaactctcgcagcctccgcaattggagatgcaaaatttttatataagtggaatgaagatcattcttttttaaagagaaatgtagatatccatgatgttggtaactctgcattgtatttattaagtgatcttggcggtggtgttactggtgaaattcattatgtagatgctggttataataaagtagggatgcccgatccaaaaaatatttcataaa

SEQ ID NO: 217797 - DNA, 799 bp, Unknown
  Bacterial polypeptide expressing nucleotide sequence isolated from the Sargasso Sea
atgctgcttaaaaacaagaaaatcttaataacaggattagcaaataagtactcaattgcagctggtattgcatacgcaatgcatagagagggtgctaaattggcattcacatatcaaaacgaaaggcttttaaaaaatcttaaaccaattgctgatgaatgtggttcaaatatcttaattgaatgtgacgtttcaagtgatgattctattaggtcttcatttgctgaattatctaaaaaatggaaaaaatttgatggttttgttcattctattggttttgcacctgctgatcagcttgaaggagattttcttgaggtaactaatcgtgagggttttaaaatagctcatgacataagttcatatagttttacagcaatggcaaaagagtctaagtcaatgctcaacgaaaattctgctcttctaactcttacttatctaggatcaacacaaacaatgccaaattacaacgttatgggtcttgctaaggctagcttagaagcaaatacaagatttttagctgcatcattagggaaacataatatccgggtaaatgccatatctgcaggaccaattaaaactctagcagcatctggtgttaaaaattttagaaaaatgctttctcagcattctaataaatctcctttaggcaggactgtaactgcagaagaagttggaaatgttgcggcatttatgtgctcagactatgcaagtggtattacgggtgaaattacatacgttgatgctggatttaatattgcagctatgccacttacacttaatgagcttaaagatgattaaa

SEQ ID NO: 217798 - DNA, 778 bp, Unknown
  Bacterial polypeptide expressing nucleotide sequence isolated from the Sargasso Sea
atgaagggtaaaaaaggactgataatgggtgttgctaatgagagatctattgcatggggtatttctcagaaactttcagaggcaggtgctgaattggcttttacatatttaggtgatgctcttaaaaaaagagtagttcctcttgcggaaaaattaaattctaatgttacttttagctgtgatgttgaaaagaaagaagatgtaataaaattatttgaagatgttaaatctcaatggggacaaattgattttgttgttcacgcaatcgctttttcagataaatctgaactttcaggggaatatttaaatacttcaagagaaaattttttaagaagtatgctaatttcctgtttttcatttactgaagttgcaaaagaagcttcaaaagttatgaaagagggtagtagcatgataacactgagctatgaggcgaataaagcaatccctaattataatgtaatgggagtttgtaaggcagctttagagtctagtgtaaagtatttagcaagagatttgggagctaaaggtataagagttaacgcaataagtgccggtccaataaagactttggcggcatcagctattggagatgccaaattcttatacaaatggaatgctgatcattcatttttaaaaaggaatgtagataacattgatgttggaaactcagcattatatcttttaagtgatatggcaggtggtgttacaggtgaaattcactatgttgatgctggttataataaagtaggtatgccagatccaaaaaatatatcttaaa

SEQ ID NO: 217799 - DNA, 607 bp, Unknown
  Bacterial polypeptide expressing nucleotide sequence isolated from the Sargasso Sea
atttagttgtgatgtagaaaaaaaagaagaagtaattaaactttttgatgacataaaatcaaagtggaaacaaattgactttattgttcatgcggttgcattttcggataaatcagaattatcaggagaatatttaaacacaacaagagaaaattttttaagaagtatgttaatttcatgtttttcatttacagaagttgcaaaagaagcttccaaaataatgaataaaggtgggagtatgcttacattaacttatgagtctaataaagctatcccaaattataatgtaatgggtgtttgtaaatcagcacttgaggcaagtgtaaaatacttggctagagatttgggttcaaaaggaattagagtaaatgcaataagtgctggaccaattaaaactttagcagcatcagcaattggagatgcaaaatttctgtataagtggaacgaggatcattcttttttaaaaagaaatgtagatattcacgatgttggtaattcagcattatatttattaagtgatcttgggggtggagttactggtgaaattcactatgtagatgccggatacaataaagtaggaatgccagacccaaaaaatattagttaa

SEQ ID NO: 217800 - DNA, 787 bp, Unknown
  Bacterial polypeptide expressing nucleotide sequence isolated from the Sargasso Sea
aatggatctagttaaaggtaaaaaaggtttaataatgggtgtcgcaaacgatagatctatagcttggggcatagcaaagaggctttcagaaaatggagccgaacttgcttttacatatcttggagacgcacttaaaaaaagagttacacctctagccgactctcttaaatcgcaatttcttttaaattgtaatgtagaaaataaagatgatattaaaaaaacatttgaggaaataaaaaagaagtggggccaaattgattttgtagttcatgcaattgcattctcagatagagcagaattatcaggtcagtatattgatacctcaagagaaaattttataaaaagtatgttggtatcatgtttttcattcactgaaatagctaaagaagcgtcaaaaataatgaaagatggatcgagtatgctgactttgacttacgagtccactaaagtaatacccaactataatgtaatgggtgtttgtaaagctgccttggaatctagtgttaagtatatttctagggatttaggcacaaaaggaattagagtaaatgcaataagtgctggaccaattaaaactttagcagcatcagcaattggtgatgcaaaatttttatacaaatggagttccgaccactcttttttaaaaagaaatgttgatattgatgatgtgggaaaatctgcactttatttattaagtgatcttgctgctggtgtaactggtgaaattcattatgtcgatgctggttataataaagcaggaatgccagatcctaaaaatattacttaa

SEQ ID NO: 217801 - DNA, 496 bp, Unknown
  Bacterial polypeptide expressing nucleotide sequence isolated from the Sargasso Sea
tcggaattgtcaggtgaatatttaaatacttcgagggaaaattttttaaaaagtatgctcatttcatgtttttcctttactgaagtatcaaaagaggcctctaaaataatgaaaaatggaggaagtttgttgactcttagttatgagtcaaataaagcgattccaaactataatgttatgggagtttgtaaatctgctttagaagctagtgtaaaatatttagcaagagacctaggtcgaaaaaaaataagagtaaatgctataagtgcaggaccaattaaaactttggcagcgtcagcaataggagatgcaaaatttctgtataaatggaatgaagatcattcttttttaaaaagaaatgttgatattcacgacgtgggtaattcagcactttatttattaagtgatttggctaatggtgttaccggagaaatacattatgttgacgctggatataacaaagtaggaatgccagacccaaaaaacatatcttaac

SEQ ID NO: 217802 - DNA, 778 bp, Unknown
  Bacterial polypeptide expressing nucleotide sequence isolated from the Sargasso Sea
aatgaagggtaaaaaaggactgattatgggcgttgctaatgagagatctattgcttggggtatttctcaaaaactttccgaagcaggtgctgaattagcttttacatatctaggtgatgctcttaaaaaaagagtggttccacttgcagaaaaactgagttctaatgtcacttttagctgtgatgttgaaaaaaaagaggatgtaataaaattatttgaagatgttaaatctcaatggggagaaattgactttgttgttcacgcaatcgctttttctgataaatctgaactctcaggagaatatttaaatactactagagaaaactttttaagaagtatgctaatctcctgcttttcatttactgaagtggcaaaagaagcttcaaaagtgatgaaagagggtggtagtatgattacactaagctatgaagctaataaagcaattcctaattacaatgtaatgggtgtctgcaaagcagcgttagagtctagtgtaaaatacttagcaagagatttgggagctaagggaataagagttaacgcaataagtgcaggtccgattaagactttagcagcatcagcaattggagatgctaaattcttatacaaatggaatgctgatcactcttttttaaaaagaaatgttgataatattgatgttggaaactcagcattgtatcttctaagtgatatggcaggtggtgttacaggtgaaattcactatgttgatgctggttataataaagtaggtatgccagatccaaaaaatatatcttaa

SEQ ID NO: 217803 - DNA, 790 bp, Unknown
  Bacterial polypeptide expressing nucleotide sequence isolated from the Sargasso Sea
atgttactgaaaaacaaaaaaatactaatatgcggtcttgcaaataaatactcaatcgctgctggaattgctgaatctatgcatagagaaggtgctgaattagcatttacataccaaaatgagcgattattaaaaaatctaaaacctatagctgaatcatgtaattcaagcctattacttgaatgtgatgtctcaaatgatgattcaataaacaaagctattggtaaattatcgcaaaaatgggggaattttgatggatttgttcattctattggatttgcaccagccgaccaactagaaggtaattttgttgatgtaaccacaagagatggttttaaaatagctcatgatataagttcttatagttttacagcgctagcaaaagcttcaaaaccctatttaaatgataattctgcacttcttactctaacttaccatggatctactcaaacgttaccaaattacaatgttatgggccttgcaaaggctagtttggaagcaaatacaaggtttttggctgcgtcattaggaaaggaaaatataagagtaaatgctatatctgcagggccaataaagacccttgcagcatctggagttaaaaatttcagaaaaatgctaagccatcattcaaacattgcacctttaggaagaaccgtaacatcagaagaagttggaaatgttgcagcttttttatgttctgattttgcaagtggcataactggcgaaattacttatgttgatgcagggtttaatattgcagcaatgccccttcaggaagttgaagattgat

SEQ ID NO: 217804 - DNA, 778 bp, Unknown
  Bacterial polypeptide expressing nucleotide sequence isolated from the Sargasso Sea
aatgaaaggtaaaaagggattaatcatgggtgttgctaatgaaagatctattgcctggggtatttctcaaaaacttgcagatgctggagctgagctagcatttacatatttaggtgacgctcttaaaaaaagagtagttcctttagcagaaaaattaaattcaaatattacatttagttgtgatgttgaaaaaaaagaagaagtagtaaaactatttgaggatattaaatctcaatggggtgaaattgattttgtagttcatgcggttgctttttctgataaatcagagttatcaggtgaatatttaaatacgacaagagagaattttttaagaagtatgctaatttcttgtttttcgtttaccgaggtagcaaaagaagcttcaaaagtaatgaaacaaggtggcagtttattaactttaacttacgagtctactaaagcaattccaaattataatgtaatgggtgtttgtaaatcagctcttgaagctagtgttaagtatctagcaagagacctaggagctaaaggcatgagagtaaatgctataagtgctggacctattaagacattggctgcctctgcaattggggatgcaaaatttttatataaatggaatgaggatcattcttttctcaagagaaatgtggatattcatgatgttggaaattcagcattatacctcctaagtgacctggcaaatggtgttacaggtgaaattcattatgtagatgctggatataacaaggtaggtatgccagatcctaaaaatataacctaa

SEQ ID NO: 217805 - DNA, 778 bp, Unknown
  Bacterial polypeptide expressing nucleotide sequence isolated from the Sargasso Sea
aatgcaaggcaaaaaaggattagtcatgggagttgctaacgaaagatctattgcttggggtatttctcaaaaattagctgaagcaggtgctgaattggcatttacctatctgggtgatgccttaaaaaaaagagtagttcctttagctgagaaattaaattcaaatttaacatttagctgcgatgttgaaaaaaaagatgaagtaataaagctttttgaagacataaaatcaaaatggggtaaaattgattttgttgttcatgcagtcgccttttcagacaaatcagaattatcaggtgaatatttgaatactactagagaaaattttttaagaagtatgctaatttcatgcttttcatttactgaagttgcaaaggaagcttccaaagtaatgaataaaggaggaagtatgcttacattaacctatgagtcaaacaaagctattccaaattacaatgtgatgggagtttgtaaatctgcacttgaggcaagtgttaaatatctggctagagatttagggtcaaaaggaattagagtaaatgcaattagtgctgggccaattaaaactttagctgcatctgcaattggagatgcaaaatttttttataaatggaacgaagaccattcttttttaaaaagaaatgtagatattcatgatgtaggtaactctgcactttatttattgagcgaccttggtggtggtgtaactggtgaaattcattatgtagatgccggttataataaagtagggatgcctgatccaaaaaatatttcttaa

SEQ ID NO: 217806 - DNA, 778 bp, Unknown
  Bacterial polypeptide expressing nucleotide sequence isolated from the Sargasso Sea
atgaaaggtaaaaaaggtttaataatgggggttgctaacgaaagatctattgcttggggaatatctcaaaaattagctgaggcaggtgctgaacttgcatttacataccttggagatgcacttaaaaaaagagtaataccattagcagaaaaactgaattcaaaaataacatttagctgcgatgttgaaaaaaaagaagaaataacaaaactttttgaagatataaaatcaaaatggggacaaatagattttgttgttcatgcagtggcgttttcagataaatcagaattatcaggagagtatttaaatactactagagaaaattttttaagaagtatgttaatttcatgcttttcatttacagaagttgcaaaagaagcatctaaaataatgaataaggatggaagtatgcttactcttacctacgagtcaaataaagctataccaaattataatgtaatgggtgtttgtaagtctgctttagaagcaagtgttaagtatttagcacgtgatctaggagcaaaaggaataagagttaatgctatcagtgcaggaccaattaaaactttagcggcatctgcaataggtgacgcaaaattcttatataaatggaatgaagatcattcctttttaaaaagaaatgtagatatccatgatgttggaaattctgctttatacctattgagtactcttggaggcggtgttaccggtgaaattcactatgtagatgcgggttataataaagttggaatgccggatcccaaaaatattacttaat

SEQ ID NO: 217807 - DNA, 787 bp, Unknown
  Bacterial polypeptide expressing nucleotide sequence isolated from the Sargasso Sea
aatgaatttaatgaaaggtaaaaaaggattaattatgggtgttgctaatgaaagatctattgcttggggtatttctcaaaagcttgcagaagcaggtgcagaacttgcatttacttacttgggagatgctttaaagaaaagagtagtcccattagctgaaaagctaaattcaaaagcaacatttagttgtgatgttgaaaaaaaagaagatgttataaaactttttaaagatgttaaatcaagttgggatgaaatcgattttgtagttcacgcaatagcattttcagataagtctgaattaagtggagaatacttaaatacgactagagaaaacttcttaagaagtatgttaatttcatgcttttcttttactgaagttgcaagagaagcagctaaaattatgaaaccaaatggaagcatggttactcttacctatgaatcaaataaagcaatacctaattataatgttatgggaatttgtaagtctgcacttgaagcaagcgttaaatatttagcaagagatttaggagcaaaaaaaataagagttaatgcaataagcgcaggaccaattaaaacgttggctgcttcagctattggagatgcaaaatttttatacaaatggaatgaagatcactcgtttttaaaaagaaatgtcgatatccacgacgttggcaactcagcattatacttgttaagtgatttagctggaggtgttactggtgaaattcattatgtcgatgctggatataataaagtaggtatgccagacccgaaaaatattacctaa

SEQ ID NO: 217808 - DNA, 778 bp, Unknown
  Bacterial polypeptide expressing nucleotide sequence isolated from the Sargasso Sea
aatgaaaggcaaaaaaggattgatcatgggtgttgcaaatgagagatctattgcttggggtatttcacaaaaactagctgaagctggagcagagcttgcatttacctacttaggagatgcattaaagaaaagagtaatacctttagcagaaaaattgaattcaaaagtaacatttagttgtgatgtcgaaaaaaaagaggaaatagaaaaattatttgaaaatatcaaatctaattggggtgaaattgattttgtagtgcatgctgttgcgttttcagataaatcagaattgtctggggaatatctaaatactacaagagaaaactttttaagaagtatgttgatctcatgcttttcatttactgaggttgctaaagaagcttcaaaagttatgaaaagtaatgggagtatgttaacattaacttatgagtccaataaagctataccaaattataatgtaatgggtgtttgtaaatctgcacttgaggcgagtgtaaagtacctcgcaagagatttgggtaaaaaaaatataagagtgaacgcaattagtgctggcccaattaaaacattagctgcatcagcaattggagatgcaaaatttttatacaaatggaatgaggatcactcttttcttaaaagaaatgtggatatccatgatgttggtaattcggcattatacttacttagtgaccttgcaaatggtgtaacaggtgaaatccactacgtagatgctgggtataataaagtcggtatgccagatcccaaaaatattagttaa

SEQ ID NO: 217809 - DNA, 775 bp, Unknown
  Bacterial polypeptide expressing nucleotide sequence isolated from the Sargasso Sea
aatgcttaaaaataaaaaaggaattatttttggtattgctaatgatcattctatagcatggggtattgcaaaaaaaatgcatgaaaatggtgcaaaattagcaattacatatcaaaatgaaattttactaaaaagagttaaaccattatctgaacaaatagatgctgatcttttacttgagtgcgattttgataaaactaattctcttgaatttgtaattgatgaagttaaaaacaagtggggggaactggattttgtaatacatgcagctgcttattcagataagaatgaattgaatggaagatatatagaaacttctaaagataattttcttcgaagtttaagtgtttcatgcttctctttcactaaaatatcaaaattaactcagccaattatgaaaagtggtggtagccttttgacactaagtttttacggatcaacaaaagttatgccaaattataatgttatgggtgtagcaaaagcagctcttgaaacaagtgtaaagtatctaagcgttgatttaggagaaaataatataagagtaaatgcaatatcagctggacctatgagaactttagcaggtgctgctatagcaaatgcaagagaagtttataaatatactgaagaaaattcatctttaaaaagaaatgttaaattagatgaattaggtaatgccgcagtttattttgttagtgatttatctaaagctgtgacaggggaaattcattacgttgactgtggatttaatataaaaggaatgccaaaaaattattaa

SEQ ID NO: 217810 - DNA, 787 bp, Unknown
  Bacterial polypeptide expressing nucleotide sequence isolated from the Sargasso Sea
atgagtctagttaaaggtaaaaaaggactaattatgggtgttgcaaatgagcgatcgattgcttggggaatatctcaaaaactttctgggtctggagctgaattagcatttacatatcttggagatgccttgaaaaaaagagtgataccattggctaaatctttaaattctgaattcacactaagttgtaatgtagaaaataaagatgaagttattaaactttttgaagacatcaaagcaaagtggggacagattgattttgttgtccatgctatagctttctcagataaatcagaactttcaggagaatatttaaatacaacaagagaaaattttttaaaaagcatgttagtatcatgtttttcatttactgaaatcgctaaagaagcttcaaaaataatgaaaaaaggtggaagcatgcttactttaacttatgagtctaataaagctattccaaattataatgtaatgggtgtttgtaaatctgcgcttgaggcaagcgtaaagtacttagcgagagatcttggctcaaaaggaattagagtaaatgcaattagtgcagggcctattaaaacccttgctgcttctgctataggagacgcaaaatttttatacaaatggaacgaagatcattcttttttaaaaagaaatgtagacataaatgacgtaggaaattctgctctttacctattaagtgatcttgcgtctggagttacaggagaaattcattatgttgatgctggttataacaaagtaggaatgcctgatcctaaaaatatttcttagc

SEQ ID NO: 217811 - DNA, 778 bp, Unknown
  Bacterial polypeptide expressing nucleotide sequence isolated from the Sargasso Sea
atgaagggcaaaaaaggtctaataatgggtgttgccaatgaaagatctattgcttggggaattgcacaaaaactatcagaggcaggtgctgaactagcatttacttatctaggagatgcattaaaaaaaagagttattcctctagctgaaaaacttaaatctaaaataacttttaattgtgatgtagaaaataaagatgatgtgattgaattatttaaagatgttaaaaaggaatggggtcaaattgattttgttgttcatgcagtagcattttcagataaatcagaattatcaggtgaatatttaaatacaactagagaaaattttttgagaagtatgttaatttcatgcttttcgtttacagaggttgctaaagagtcctcaaaaataatgaaagagggtggaagtatgattactttaagttatgaggcaaacaaagcaattccaaattataatgtaatgggtgtatgcaaagcagcactagagtcgagtgttaaatacttggctagagatttaggtgctaaaagtattagagtgaatgctataagtgctggaccaatcaaaacattagctgcatctgctataggcgatgctaaatttctatataaatggaatgccgatcactcatttttaaaacgaaatgttgataatttagatgttggaaattcagctctttatttattaagcgatatggcaagtggtgtaacaggtgaaattcattatgtggatgctggatacaataaaatgggaatgccagatccaaaaaatataacttaaa

SEQ ID NO: 217812 - DNA, 790 bp, Unknown
  Bacterial polypeptide expressing nucleotide sequence isolated from the Sargasso Sea
aatgttgctaaaaaacaaaaaaatagtcatttttgggctggcaaataagtattctattgctaccggcattgctagatcaatgcatgaacaaggcgcagaacttgcttttgcttatcaaaatgaaaggcttttaaaaaatattaagcctattgcagaagaattagggtcagagattctgattgaatgtgatgtttcaaatgacaattcgatagatcaagcctttaaagatttaacaaatcaatggaataaatttgatggattagttcattcaatagggtttgcgccagctgatcaattggagggaaattttgtagatgttacaactcgtgaaggatttaaagttgctcatgatataagttcatacagtttcacagctttagcgaaagcatccaaaccatacctaaatgaaaatgctgcgctattaactttaacttatttaggctcaatacaaaccttacctaattacaatgtcatgggcttagcgaaagctagccttgaagctaatacaaggtttttagcggcttcaatgggtaaagataatattagggtaaatgctatttctgcaggtccaattaaaactttagcagcatctggagtgaaaaattttcgaaaaatgttgagtcagcattctaaaagagcgcctcttggtagaacagtgactgctgatgaagttggaaatgtagctgcattcctttgctcagattatgcaagtggagtaacaggtgaaataacatatgttgatgctggttttaatatctcagcgatgcctttggatgaattagaagaatga

SEQ ID NO: 217813 - DNA, 787 bp, Unknown
  Bacterial polypeptide expressing nucleotide sequence isolated from the Sargasso Sea
tatgagtttaatgaaaggtaaaaaaggattaatcatgggtgtagctaatgaaagatctattgcctggggtattgcccaaaaacttgcggaagctggtgcagaattatccttcacttatctaggtgatgcacttaagaaaagagttattcctttggcagaaaaattaaattcaaatgtaacttttagctgtgatgttgaaaataaagaagaagtagtaaaactttttgaagatgtaaaaaaaaaatggggtcaaattgattttgtagtccatgcaattgcattttcagataggtcagaattatcaggagaatatttaaatacaactagagaaaattttttaagaagtatgttaatttcatgtttttcgtttactgaggttgcaagagaagcttctaatattatgaaagaaggtggaagtatgctaactttaacttacgagtctacaaaagctataccaaattataacgttatgggtgtttgtaaatctgcacttgaatcaagtgttaagtatattgcaagagatttgggaactaaaggaattagagtaaatgcaattagtgctggaccaataaaaaccctagctgcttcagctattggagatgcaaaattcttatataaatggaatgaagatcattcatttttgaagagaaatgtagatattcacgatgttggaaattcagctttatatctattaagtgaccttggaggaggagttactggtgaaattcactacgtagatgctggatataataaagtagggatgcctgatcctaaaaatatcacataa

SEQ ID NO: 217814 - DNA, 778 bp, Unknown
  Bacterial polypeptide expressing nucleotide sequence isolated from the Sargasso Sea
atgaaaggaaaaaaaggattggtgatgggagttgccaatgaaagatctattgcttggggtatttcacaaaaacttgcagaagctggagctgaacttgcatttacatatttgggtgatgctttaaagaaaagagttattcctttagcagaaaaattaaattcaaaagttacatttagctgtgatgtagaaaaaaaagaagatgtaacaaagttatttgaagatattaaatcgcaatggggggaaattgattttgtagttcatgcaattgcattttcagataaatcagaattatctggtgaatatttaaatacgactagagaaaactttttaagaagtatgttaatttcatgtttttcatttacagaagttgcaaaagaggcaactaaagtaatgaaggagggtggaagcttaatcacattaagttatgaggcgaataaagctattccaaattataatgtaatgggtgtttgcaaagctgcactagaatctagcgttaagtatctagcaagagatttaggtgctaaaggcatgagagttaatgcaataagtgcaggaccaattaaaactttagcagcttctgcaatcggagatgcaaaattcttatataaatggaatgaagaccattctttactcaaaagaaacgttgatattcatgatgttggaaattcagcattatatttactaagtgaccttgcaaacggtgttactggtgaaattcattatgtagatgctggatataacaaggttgggatgccagatcctaagaatattagctaaa

SEQ ID NO: 217815 - DNA, 778 bp, Unknown
  Bacterial polypeptide expressing nucleotide sequence isolated from the Sargasso Sea
aatgaaaggcaaaaaagggttaattatgggagttgctaatgaaagatctattgcctggggtatttctcaaaaattggctgaggcaggggctgaattagcatttacctatctgggtgatgccttaaaaaaaagagtagttcctttagctgagaaattaaattcaaatgtaacatttagttgtgatgttgaaaaaaaagatgaagtgataaaactttttgaagacataaaatcaaaatggggtcaaattgattttgttgttcatgcagtagccttttcagacaaatcagaattatcgggtgaatatttgaatactactagagaaaattttttaagaagtatgctaatttcatgcttttcatttactgaagttgcaaaagaagcttcaaaagtaatgaataaggaaggaagtatgcttacattaacctacgagtctaataaagctattccaaattacaacgtgatgggagtttgtaaatccgcacttgaggcaagtgttaaatatctagctagagatctagggtcaaaaggaattagagtaaatgcaataagtgctgggccaattaaaactttagctgcatctgcaattggagatgcaaaatttctttataaatggaacgaggatcattctttcttaaaaagaaatgtagatatacatgatgttggtaactctgctttatatttattaagcggtcttggaggtggtgttactggtgaaattcactatgtagatgctggttacaataaagtaggaatgcctgatccaaaaaatataacttaa

SEQ ID NO: 217816 - DNA, 790 bp, Unknown
  Bacterial polypeptide expressing nucleotide sequence isolated from the Sargasso Sea
atgttactgaaaaacaaaaaaatactaatatgcggtcttgcaaataaatactcgattgctgctggaattgccgaatctatgcatagagaaggtgctgaattagcatttacataccaaaatgaacgattattaaagaatcttaagcctatagctaaatcatgcaattcaaccatattaattgaatgtgatgtctcagatgatgactcaataaacaaagctattggagaattatcgaaaaaatgggagaatttcgatggatttgttcattctattggatttgccccagccgaccaactagaaggcaattttgttgatgtgaccacaagagatggctttaaaatagctcatgatataagttcttatagttttacagcgctagcaaaagcttcaaaaccctatttaaatgacagttctgcccttcttactctaacttaccatggatctactcaaacattaccaaattacaatgttatgggccttgcaaaagctagtctagaagcaaatacaaggtttttggctgcgtcattaggaaaggaaaatataagagtaaatgctatatctgcagggccaataaagactcttgcagcatctggagttaaaaatttcagaaaaatgctaaaccatcattcaaacattgcacctttaggaagaaccgtaacatcagaagaagttggaaatgttgcagcttttctatgttctgattttgcaagtggtgtaactggtgaaattacttatgttgatgcagggtttaatattgctgcaatgccccttcaggaagttgaagattgat

SEQ ID NO: 217817 - DNA, 778 bp, Unknown
  Bacterial polypeptide expressing nucleotide sequence isolated from the Sargasso Sea
atgaaaggtaaaaaaggattgatcatgggtgttgctaatgagagatctatcgcctggggtatatctcaaaaacttgcagaggctggagcggagttagcatttacttatttaggtgatgctctaaaaaaaagagtagttcctttagcagaaaaattaaattcaaatgttacatttagttgtgatgttgaaaaaaaagaagaagttgtaaaactatttgaggatattaaatcacaatggggtaaaattgattttgttgctcatgcagttgctttttcagataaatcggaattatcaggtgaatatttaaacactactagagaaaactttttaagaagtatgttaatctcatgtttttcattcactgaagtagcaaaagaagcttcaaaggtaatgaaacaaggtggaagtttactcactttaacttacgagtctagtaaagcaattccaaattataacgtaatgggtgtttgtaaatcagctcttgaggcaagtgttaagtatttagcaagagatttaggagccaaaggtatgagagtaaatgctataagtgctggacctatcaagacattggctgcctctgcaattggagacgctaaattcttatataaatggaatgaagaccattctttccttaagagaaatgtagatatccatgatgttggaaattcagcattatatctcctaagtgaccttgcaaacggggttactggtgaaattcactacgtagatgctggatataacaaggtaggaatgccagatcctaaaaatataacctaaa

SEQ ID NO: 217818 - DNA, 269 bp, Unknown
  Bacterial polypeptide expressing nucleotide sequence isolated from the Sargasso Sea
tccattagggaaaaaaggaatcagagttaatgcaatctcagcaggaccaataaaaactctagcagcatccggtgttaagaattttagaagcatgcttaaagaatacgcaaatagagctcctctaggtagagcggttaccacagaggaagtcgggaatgtagctgcttttttatgctcagatctagctagcggaattactggtgagattacatacgttgatgcaggctttaatacttctgcaatgtccttaattccttcaaaagaataaa

SEQ ID NO: 217819 - DNA, 682 bp, Unknown
  Bacterial polypeptide expressing nucleotide sequence isolated from the Sargasso Sea
agcttttacatatttaggagatgctttaaaaaagagagttatacctttggctgaaaaacttaattcaaaagttacatttagttgtgatgttgaaaaaaaagatgaggttattaaacttttcgagaatgtaaagtctaaatggggtgaaattgacttcgtagttcacgcagttgctttttcagagaaatcggaattatcaggtgagtatttaaatacctcaagagaaaattttttaaaaagtatgcttatttcttgtttttcctttactgaagtatcgaaagaggcctctaaaataatgaaagatgggggaagtttgttgactcttacttatgaatcaaacaaggcgattccaaattataatgttatgggagtttgtaaatctgctttggaagctagtgtaaaatatttagcaagagatcttggtcaaaaaaaaataagagtgaatgctataagcgcaggaccaattaaaactttggcagcatctgcaataggagatgcaaaatttctatataaatggaatgaagatcattcttttttaaaaagaaacgttgatattcacgatgtgggtaattcagcgctttatttattaagtgatttggctaatggtgttacaggagaaatacattatgttgacgctgggtacaataaagtagggatgccagatccaaaaaatatatcttaa

SEQ ID NO: 217820 - DNA, 778 bp, Unknown
  Bacterial polypeptide expressing nucleotide sequence isolated from the Sargasso Sea
atgaaaggaaagaaaggattaataatgggcgttgcaaatgaacgttccatagcgtggggtatttctcaaaaacttgctgaagcaggggcagaactagcgtttacatacttaggtgatgctttaaaaaaaagagttatccctttagcggaaaaattaaattcaaaaataacttttagttgtgacgttgaaaaaaagaatgaggttattaaactatttgaagatataaaatctcaatggggcgatatagactttgttgttcacgcggtagcattttccgataaatcagaattgtctggtgaatatctaaatacatctagagaaaattttttaagaagcatgctaatctcatgtttttcatttactgaagtttcaaaagaagcttcaaaaatcatgaaaaaaggtggaagcatgataactcttacttatgaatctacaaaggctatccctaattataacgttatgggagtctgcaaatcagcgcttgaggcaagtgtaaaatacctagctagagatttaggagctaaaggaataagagtaaatgcaataagtgctggcccgataaaaactttagcagcttcagctataggggatgcaaaatttttgtataaatggaatgaaaaccattcctttttaaaaagaaatgtagatattcatgatgtaggtaattctgctttatacttactaagcgatcttgctgctggtgtcacaggggaaattcattatgttgacgctgggtataacaaagtaggaatgccagatcctaaaaatatttcttaac

SEQ ID NO: 217821 - DNA, 667 bp, Unknown
  Bacterial polypeptide expressing nucleotide sequence isolated from the Sargasso Sea
tggtgacgctttaaaaaaaagagtcattcctttagcagaaaaattaaattcaaaggtaacatttagttgtgatgttgaaaaaaaagacgaagttgtaaaattgtttgaagatattaaatctcagtggggtgaaattgattttgtagttcatgcagtagcgttttcagataaatctgaattatcaggtgaatatttaaatacttctagagaaaactttttaaaaagtatgttaatttcatgtttttcttttactgaagttgctaaagaagcttctaaaataatgaagaaagatggaagtttgttaactttaacatatgagtctaccaaagctattccaaattataatgtgatgggtgtttgtaaatctgctcttgaagcaagtgtcaaatatcttgcaagagatttaggtgctaaaagactcagagtaaacgccattagcgctggtcctattaaaactttagctgcttcggctattggagatgcaaaatttctgtataagtggaatgaggatcattccttcttaaaaaggaacgtagatattcatgatgttggaaattcagcattatatctattaagtgatcttgcaagcggggttaccggagaaattcactatgtggatgctggatataataaagttggaatgccagatcctaaaaatattacttaa

SEQ ID NO: 217822 - DNA, 376 bp, Unknown
  Bacterial polypeptide expressing nucleotide sequence isolated from the Sargasso Sea
gatgcagggtagaaatggagcaatgttaacgcttagttaccttggagcaattcgttcgatgcctaattacaatgtcatgggtcttgcaaaggcaagtctcgaagctaatgtacgatatatggctgctaatcttggtcctgagggaattcgggtcaatgcaatatcggcgggtcctattcgaacacttgccgcttccgggataagtggtatgcgcgatttcttaacacacgttgaaaatgtttcccctttgagacgaaatgttactattgaagaagtgggtaatgtagccgcctttctatgttctgattatgcatctgccgtaactggcgaaattacctatgtggactcgggatttagcacaatcggtatgtcctag

SEQ ID NO: 217823 - DNA, 778 bp, Unknown
  Bacterial polypeptide expressing nucleotide sequence isolated from the Sargasso Sea
aatgaaaggtaaaaaaggattaatcatgggagtagctaatgaaagatctattgcctggggtatttcacaaaagttatcagaagcaggagctgaattggcatttacttatctgggtgatgccttaaaaaaaagagtagttcctttagctgagaaattaaattcaaatataacatttagttgtgatgttgaaaaaaaagatgaagtaataaaactttttgaagatataaaatcaaaatggggtcaaattgattttgttgttcatgcagttgccttttcagataaatcagaattgtcaggtgaatatttaaagactactagagaaaattttttaagaagtatgctaatttcatgcttttcatttactgaagttgcaaaagaagcttccaaagtgatgaataaaggaggaagtatgcttacattgacctatgagtctaataaagctattccaaattacaatgtgatgggagtttgtaagtctgcacttgaggcaagtgttaaatatctagctagagatttaggatcacaaggaattagagttaatgcaataagtgctggaccaattaaaactttagcagcatctgcaattggagacgcaaaatttctttataaatggaacgaggatcattctttcttgaaaagaaatgtagacattcatgatgttggaaactctgctttatatttattaagtaatcttggaggtggtgtaactggtgaaattcactatgtagatgctggttataataaagttggcatgcctgatccaaaaaatataacgtaa

SEQ ID NO: 217824 - DNA, 778 bp, Unknown
  Bacterial polypeptide expressing nucleotide sequence isolated from the Sargasso Sea
atgaaaggtaaaaaaggattaatcatgggtgttgccaatgatagatctatcgcttggggtatttcacaaaaacttgctgaagctggtgcagaacttgcattcacttatttgggtgatgctttaaaaaaaagagttgttcctttagctgaaaaattaaattcaaaattaacattcagttgtgatgttgaaaaaaaagaagatgtaataaaattgtttgaagatgttaaatcacaatggggtgagattgattttgtagttcatgcaattgctttttcagataaatcagaattatctggtgagtatttaaacacaactagagaaaactttttaagaagtatgttaatttcatgtttttcatttactgaagttgcaaaagaagcatctaaagtaatgaaagatggtggtagcttaatcactttaagttatgaagcaaataaagctattccaaattataatgtaatgggtgtttgtaaagctgcattagagtctagtgttaagtatcttgcaagagatttgggtgctaaaggtatgagggttaatgctataagtgctggacctataaagacattagctgcttctgctattggagatgcaaaattcctttataaatggaatgaagaccattccttattaaagagaaatgtggatattcatgatgttggaaattcagcattatatctattaagtgaccttgcaaacggtgttacaggtgaaattcactacgtagatgctggatataacaaggttgggatgccagatcccaagaatattacttaaa

SEQ ID NO: 217825 - DNA, 778 bp, Unknown
  Bacterial polypeptide expressing nucleotide sequence isolated from the Sargasso Sea
aatgaaaggtaaaaagggattaataatgggtgttgccaatgagaggtctatcgcatggggtatctctcaaaaattagctgatgcaggagcggaattagcatttacttatttgggtgaagcacttaaaaaaagagtgatacctttagcagaaaaattaaattcaaaaatgacatttagctgtgatgtcgaaaaaaaagaggaaataataaaattatttgaggatattaagtcacaatggggagaaattgattttatagtccatgctgttgctttttctgataaatcagagttatctggtgaatatttaaatacgactagagaaaattttttgagaagtatgttaatttcttgcttttcgtttactgaagtcgctagagaggcatcaaaagtgatgaaaagtggtagcagtatgttaactttgacttacgagtcaactaaagctattccaaattataatgtgatgggcgtttgtaaatctgctcttgaagcgagtgttaaataccttgcaagagacttaggtgcaaaaggagtaagggtaaatgcaataagtgctgggcctatcaaaacactagcagcatcagcaataggagatgcaaaatttttatataaatggaacgaagatcactcttttttaaaaagaaatgtagatattcatgatgttggtaattcagcattatatttacttagtgaacttgcgaatggtgtaacaggtgaaatccactatgtagatgccggatataataaagttggaatgccagatcctaaaaatataagttaa

SEQ ID NO: 217826 - DNA, 784 bp, Unknown
  Bacterial polypeptide expressing nucleotide sequence isolated from the Sargasso Sea
atgaaaggtaaaaaaggattgattatgggcgtagccaacgaaagatcaattgcttggggtatttcaaaaaaattagctgaagctggggcagaattggcatttacttatcttggagatgctcttaaaaaaagagttattcctttagcggaaaaactaaattcaaatattacatttagctgtgatgttgaaaaaaaagaagaaataataaaactttttgaagatataaaatcaaagtggggtaaaattgatttcattgttcacgcagttgctttttctgataaatctgaattatcaggcgaatatttaaacactactagagaaaattttctaagaagtatgttgatttcatgtttttcattcacagaagttgcgcaagaagcctcaaaaataatgaataaggatgggagtatgcttactttgacctacgagtcaaataaggctattccaaactataatgtgatgggtgtttgtaaatctgcacttgaagcaagtgtaaagtatattgcaagagatttggggtctaagggtatcagagttaacgcaataagcgcaggaccaatcaaaaccttagcagcttcagcaattggcgatgcaaaatttctttataaatggaatgaagaccactcttttttaaaaagaaatgttgatataaatgatgttggaaattcagccttgtacttattgagtagtctaggtggtggtgttacaggtgaaattcattatgttgatgctggttataacaaagtaggaatgccagatcctaaaaatatatcagaaaattaga

SEQ ID NO: 217827 - DNA, 799 bp, Unknown
  Bacterial polypeptide expressing nucleotide sequence isolated from the Sargasso Sea
aatgttattaaaaaataagaaaatactcatttccgggcttgcaaataaatactcaattgctgcggggattgcatatgctatgtatagagaaggagctgagcttgctttcacatatcaaaacgaaaggcttttaaaaaatcttaaaccaattgctgatgagtgtggttcaaatatcttaattgaatgtgatgtatcaaatgatgattctattaagtcttcatttgctgaattatctaaaaaatggaaaaaatttgatggctttgtgcattctattggttttgcaccggctgatcagcttgaaggagattttcttgaggtaactaaccgtgaaggctttaagatagctcatgacataagttcatatagttttacagctatggctaaagaatcaaagtcaatgctcaacgagaattcagctcttctaacccttacctacttaggatcaacacaaacaatgccaaattacaacgttatgggtcttgctaaagctagtttagaggcaaatacaagatttttagctgcatcattagggaaatataatattcgtgtaaatgctatatcagcgggtccaattaaaactctagcagcatctggtgttaaaaattttagaaaaatgctatctcagcattctaataaagctcctttaggcagaactgtaactgctgaagaagttggaaatgttgctgcatttatgtgctcagactatgcaagtggtattacgggagaaattacatacgttgatgctggttttaatatcgcagccatgccacttacacttgacgggcataaagatgattaa

SEQ ID NO: 217828 - DNA, 778 bp, Unknown
  Bacterial polypeptide expressing nucleotide sequence isolated from the Sargasso Sea
atgaaaggtaaaaaaggtttgataatgggagtcgcaaacgaacgttcaattgcttggggtatatctcaaaaactatcagaagctggagctgaattagcttttacttatttgggtgaagctttaaaaaaaagagtggtacctttggctgaaaagttaaactctaaaattacattcagctgtgatgtggaaaaaaaaggagatattgttaaactttttgatgatgttaaatctaaatggggtgaaatagattttatagttcatgcggttgcattttcagataaatcggaattgtctggggagtatttaaacacgtctagggaaaattttctaagaagtatgcttatatcatgtttttcatttactgaggtatctaaggaagcttcaaagataatgagagaaggggggagtttgctcactctcacatatgagtctactaaagctattcctaattataatgtaatgggtgtttgtaaatctgctttagaagcaagtgtaaaatatttagcaagggatctaggattaaaaaaaataagagtgaacgcaatcagcgcaggtccaattaaaactttggctgcttcagcaattggagatgcaaaatttttatacaagtggaatgaagatcactctttcttaaaaagaaatgttgatattcatgatgttggaaattctgctttatatttacttagtaatttagctgcgggagttaccggcgaaattcattatgtagatgctggttataacaaagtaggaatgccggatcccaaaaatatgacttaag

SEQ ID NO: 217829 - DNA, 787 bp, Unknown
  Bacterial polypeptide expressing nucleotide sequence isolated from the Sargasso Sea
tatgtctttaatgaaaggtaaaaaaggactgataatgggtgttgctaatgaaagatctattgcatggggtatttctcaaaaactttcagaagcaggtgctgaattagcttttacatatttaggtgatgctcttaaaaaaagagtggttcctcttgcagaaaaactaaattctaatgttacttttagctgtgatgttgaaaaaaaagaagatgtaataaaattatttgaggatgttaaaacccaatggggagaaattgattttgttgttcacgcaattgctttttctgataaatctgaactttcaggagaatatctaaatactacaagagaaaattttttaagaagtatgctaatttcgtgtttttcatttactgaagttgcaaaagaagcttcaaaagttatgaaagagggtggtagcatgattacacttagttatgaagctaataaagcaatccctaattacaatgtaatgggtgtctgcaaagctgcattagaatctagtgttaaatacttagcaagagatttgggagctaaaggaataagagttaatgcaataagtgcgggtccaataaaaacattggctgcgtcagctattggagatgcaaaatttttatataaatggaatgcagatcattcttttttaaagagaaatgtagataatattgatgttggaaactcagcattatatctcctaagtgatatggcaggtggagttacaggtgaaattcactatgttgatgctggttacaataaagtaggtatgccagatccaaaaaatatatcctaa

SEQ ID NO: 217830 - DNA, 787 bp, Unknown
  Bacterial polypeptide expressing nucleotide sequence isolated from the Sargasso Sea
atgtctttattaaaaggtaaaaagggtctgattatgggagtggcaaacgaccgatcaatcgcttggggaatagccaaaaaattatctgaaaatggtgccgaactagcctttacctacttgggtgacacactaaaaaaaagggtaatacctttagcagaatctttaaaatctaattttactctaaattgcgatgttgaaaaaaaagaagatataataaaggtatttaaagatatacaaaataaatggggaagtttagattttattgtacatgcagttgctttttcagatagatctgaactttcgggagaatatctaaatacgtcgagggaaaattttttaagaagtatgttaatttcatgtttttcatttactgaggttgcgaaagaagcatctaaagtaatggaagagggtggaagcttgattactctaagttatgaggcaaataaagcaatcccaaattataatgtaatgggtgtttgtaaggcagcgttagagtctagtgtaaaatatttagcgagagatttaggtgcaaaaggtataagagttaatgccataagtgctggaccaattaaaactttagcagcttctgcaattggagacgctaaattcctatataaatggaacgaggaccactctttactcaagagaaacgtagatatccatgatgttggtaattcagcattatatctactgagtgatcttgcaaatggtgttactggagaaattcactatgttgacgctggatataacaaagtcgggatgcccgacccaaagaatattacctaaa

SEQ ID NO: 217831 - DNA, 778 bp, Unknown
  Bacterial polypeptide expressing nucleotide sequence isolated from the Sargasso Sea
aatgaagggtaaaaagggattaatcatgggcgttgctaatgaacgatccatagcttggggtatttcacaaaaattagctgaggcaggtgctgagcttgcatttacctatttaggggatgctttgaaaaaaagagttattccattagctgaaaaattaaattcaaaagttacatttagctgtgatgtagaaaaaaaagaggatgtaaaaaagttatttgaagatgttaaatcacaatggggcgaaatagattttgtagttcatgcaatagctttttctgataaatcagaattatcaggagaatatttaaatacaactagagaaaattttttaagaagtatgttaatttcttgtttttcgtttacggaagttgctagagaggcatctaaagtaatgaaggagggtggaagcttaatcacattaagttatgaagcaaataaagctattccaaattataatgtaatgggtgtatgtaaggcagctctagagtctagtgttaagtatctggctagagatttaggtgcaaaaggcatcagagtaaacgccataagtgctggacctattaaaacgctagcagcatctgcaatcggagatgcaaaattcctttataaatggaatgaagaccattctttactcaaaagaaacgttgatattcatgatgttggaaattcagcattgtatctattaagtgaacttgcaaacggtgtaactggtgaaattcactatgtagatgctggatataataaagttgggatgccagatcctaagaatataacttaa

SEQ ID NO: 217832 - DNA, 670 bp, Unknown
  Bacterial polypeptide expressing nucleotide sequence isolated from the Sargasso Sea
tttgggcgatgctttaaaaataagagtgattcctttagcagaaaaattaaattccaaaataacttttagctgtgatgttgaaaaaaaagaggatgttattaaattatttgaagatgtgaaatcaagctggggtgaaattgactttgtggtccatgcaatagcattttcagacaaatcagagctttcaggtgaatatttaaatacctcaagagaaaattttttaaggagcatgcttatttcttgtttctcatttactgaaattgcaagagaagcagcaaagattatgaaacaaaatgggagtatgattacacttacatatgaatcaacaaaaactatacctaactataatgttatgggggtttgtaaatcagctttagaggcaagtgtaaagtatctagcaagagatttaggatcaaaacaaattagagttaatgcaataagtgcaggacccattaaaacattggcagcttcagcaattggagatgcaaaatttttatataaatggaatgaagaccactcatttttaaaaagaaatgttgatatttatgatgtaggtaattctgctttatatctattaagtgacttagcaggtggtgttacaggcgaaatacattatgtagatgcgggctataataaggtaggaatgccagatcctaaaaatatgtcttaa

SEQ ID NO: 217833 - DNA, 778 bp, Unknown
  Bacterial polypeptide expressing nucleotide sequence isolated from the Sargasso Sea
atgaaaggtaaaaaaggattaatcatgggtgttgctaatgaaagatctattgcctggggtatatctcaaaaacttgctgaagcaggagctgagttagcatttacatatttaggcgacgctcttaaaaaaagagtaattcctttagcagaaaaattaaattcaaatgtcacatttagttgtgatgtcgaaaaaaaagaagaagtcgtaaaactatttgaaaatattaaatctcagtggggtgaaattgattttgtagttcatgcagttgctttttcagataaatcagaattatcaggtgaatatttaaatacctctagagaaaactttttaagaagtatgttaatttcttgtttttcatttactgaagtagcaaaagaagcttcaaaaataatgaaacaaggtggaagtttattaactttaacttacgagtcgactaaagcaattccaaattataatgtaatgggtgtttgtaaatcagcccttgaagctagtgttaaatatttagctcgagatttaggtgccaaaggtatgagggtaaatgcaataagcgcaggacctataaaaacattagctgcatctgcaatcggagatgcaaaattcctatataaatggaacgaagaccattctcttctaaagagaaatgtggatatccatgatgttggaaattcagcattatacctcttaagcgaccttgcaaatggtgttactggtgaaattcactatgtagatgctggatataacaaggttggaatgccagatcctaaaaatattacctaaa

SEQ ID NO: 217834 - DNA, 604 bp, Unknown
  Bacterial polypeptide expressing nucleotide sequence isolated from the Sargasso Sea
aatgaagggaaaaaaaggtcttatcatgggcgttgccaatgaaagatcaattgcgtggggtatatcacaaaaacttgcagaggctggagcagagttagcttttacatatttgggtgatgctttaaaaaaaagagttgttccacttgcggaaaaactaaattcaaatgtaacatttagctgtgatgtagaaaaaaaagaagaagttgtaaaactttttgaagatgtaaaaagtcaatggggagaaattgattttgttgtgcatgcaattgcattttcagataagtctgagttatcaggacaatatttaaatacaactagagaaaactttttaagaagtatgttgatatcctgtttttcatttactgaagttgctagagaggcatctaaaataatgaagcaaggtggaagtatgattactttgagttatgaagcaaataaagccatacctaattataatgtaatgggagtatgtaaagctgcactagaatctagtgttaaatatcttgcaagggatctgggagcaaagaatattagagttaatgcaataagtgctggtccaattaaaacactagctgcatctgccattggcgatgctaaatttctt

SEQ ID NO: 217835 - DNA, 755 bp, Unknown
  Bacterial polypeptide expressing nucleotide sequence isolated from the Sargasso Sea
ggttgctaataaatactcaatagctgcaggaattgcgcaatctatgcataaacaaggtgctgagcttgcttttacttatcaaaatgagagattattaaaaaatattaaagaaattgcagatgcttgtgattcaaatatattaattgaatgcgatgtcagtgatgatgaatcaataaaatcttcatttaaatctttaaaagaaaaatggagtagttttgatggttttgttcattcaattggttatgcgcccgcagatcaactggagggtgactttttagaagttactagtcgagaaggctttaagatcgctcacgatataagctcatacagctttacagcaatggcaaaagaatctaagcctatgcttaatgaaaactcagcactgctaactcttacctacctaggatcaagacaaacaatgccaaattacaacgttatgggacttgctaaagctagtttagaggcgaacactagatttttagcagcatcattaggcaaagataatattcgagtaaatgctatatcagcaggtcctataaaaacattagcagcttctggtgttaaaaatttcagaaaaatgttggcacaacattctaataaagcaccactaggcagaactgtatctgcagaggaagttggaaatgttgcagcatttatgtgctcagactatgcaagtggtattacaggagagatcacatatgttgatgctggttttaatattgcggctatgccactgaatcttcataatgattaag

SEQ ID NO: 217836 - DNA, 778 bp, Unknown
  Bacterial polypeptide expressing nucleotide sequence isolated from the Sargasso Sea
atgaaaagtaagaaaggattaatcatgggtgttgccaatgagagatcaatagcctggggaattgcgcaaaaactttcagaagctggagctgagttagcatttacatatcttggtgatgcattaaagaaaagagtagttccactagcagaaaaattaaattctaatgttacttttagttgtgatgttgaaaaaaaagaggatgtaataaagttgtttgaagatgtaaaatcgacctggggtgaaattgattttgttgtgcacgcgattgcattttcagataaatcagaattatctggagaatatttaaatacaactagagaaaattttttaagaagtatgttaatttcatgcttttcatttacagaaattgcaagagaagcatccaaagtaatgaaaggtggaggaagtatggttactttaagttatgaagccaataaagctatcccaaattataatgtaatgggtgtatgcaaagcagcattggagtctagtgttaaatatttagcaagagacttgggagctaaaggtattagagtaaatgcaatcagtgctggacctatcaaaaccctagctgcatcagctataggagatgcaaaattcctttataaatggaacgcagatcattcatttttaaagagaaatgtagataatttagacgttggaaactcagcattatacttattaagcgatatggctggaggtgttactggtgaaattcactacgtagatgctgggtataataaagtagggatgccagatcctaagaatatcacataaa

SEQ ID NO: 217837 - DNA, 778 bp, Unknown
  Bacterial polypeptide expressing nucleotide sequence isolated from the Sargasso Sea
aatgaaaggtaaaaagggattaataatgggtgttgccaatgaaagatctattgcctggggtatctctcaaaaattagctgaggcaggtgctgaattagcatttacatatttaggtgatgctcttaaaaaaagagtaatacctttagcagaaaaattaaattcaaaagtgacatttagttgtgatgttgaaaaaaaagaggaaatagaaaaattatttgaaaatatcaaatctaattggggtgaaattgattttgtagtacatgcagttgctttttcggataagtcagaattgtcaggtgaatatttaaatacaactagggaaaactttttaaggagtatgttaatctcttgtttttcatttactgaagtcgcaaaagaagcatcaaaagtaatgaaacaaggtggaagtttattaactttaacttacgagtctactaaagctattccaaattataacgtaatgggcgtttgtaaatcagcattagaagctagtgtcaaatatttagccagagatttgggtgccaaaggtataagagtaaatgcaataagtgcgggacctattaaaaccttagcagcttctgctattggtgatgcaaaattcttatataaatggaatgaagaccactcattcctaaaaagaaatgttgatattcatgatgttggaaattcagcattgtatcttttaagtgagcttgcaaatggtgttactggtgaaattcactacgtagatgctggctataataaagtaggtatgccagatcctaaaaatattacttaa

SEQ ID NO: 217838 - DNA, 360 bp, Unknown
  Bacterial polypeptide expressing nucleotide sequence isolated from the Sargasso Sea
ttacttacgagtccacaaaagctattccaaattataatgtaatgggtgtttgcaaatcagcattagaagcaagtgttaagtatcttgcaagagatttgggagctaaaggtatgagagtaaatgcaataagtgcaggacctattaaaacattagccgcttcagccattggagatgcaaaattcttatataaatggaatgaagaccattctttccttaaaagaaacgtagatatccatgatgttggaaattcagcattatatctactaagtgacctttcaaacggagttactggtgaaattcactacgtggatgctggatataacaaggttgggatgccagatccaaaaaatattacttaag

SEQ ID NO: 217839 - DNA, 742 bp, Unknown
  Bacterial polypeptide expressing nucleotide sequence isolated from the Sargasso Sea
aatgaaaggaaagaaaggtttaataatgggtgttgctaatgaaagatctattgcatggggtatatcccaaaaattagctgaagctggtgccgaactagcatttacttatctaggagatgccttaaaaaaaagagtaattcctttagcagaaaaattaaattcaaaagtaacatttaattgcgatgtagaaaaaaaagaggaagtgattaaactttttgaagacataaaatcaaaatggaacgaaattgactttgttgttcacgcggttgccttttcagataaatcagaattatcaggagaatatttaaataccactagagaaaattttttaagaagtatgttaatttcgtgtttttcatttaccgaagtcgcaaaagaagcttctaagataataaaaaaaggtgggagtatgcttaccttaacttacgagtctaataaagctattccaaattataatgtaatgggtgtttgtaaatcagcactagaggctagtgtcaaatacctggctagagatttaggatcaaaaggaattagagtaaacgcaataagtgcaggaccaattaaaaccttagcagcatcagctattggggatgcaaaatttctttataaatggaatgaagaccattcttttttaaaaagaaacgtagatatacatgatgttggaaattcagctttgtatttattaagtgatcttggaggtggcgttactggcgagattcactatgtagatgctggatattaa

SEQ ID NO: 217840 - DNA, 280 bp, Unknown
  Bacterial polypeptide expressing nucleotide sequence isolated from the Sargasso Sea
ttcttgctgcttcatttggggaaaaaaggaatcagagttaatgcaatctctgcaggcccaataaaaacacttgctgcatctggtgttaagaattttagaagtatgcttaaagagtatgcggatagagcacctttaggaagagctgttactacagaggaagtcgggaatgtcgctgctttcttatgctcagatctagcaagtggtatcacaggtgagattacatacgttgatgcaggctttaatacttctgcaatgtccttaattcattcaaaagaataaa

SEQ ID NO: 217841 - DNA, 778 bp, Unknown
  Bacterial polypeptide expressing nucleotide sequence isolated from the Sargasso Sea
atgaaaggtaaaaaaggtcttataatgggcgttgctaatgaaagatctattgcttggggtatatcgcaaaagcttgctgaagcaggtgcagatctcgcatttacttacttgggagatgcacttaaaaaaagagttattccattagccgaaaagttaaattcaaaactaacttttagttgtgatgttgaaaaaaaagaagaagttataaaattatttaaagatataaaatcgcaatggggagaaattgattttgtagtgcatgctattgctttttccgataaatccgaattatcaggtgaatatttaaatacaactagagaaaactttttaagaagtatgttaatttcttgtttctcatttacagaagttgcaaaggaagcttcaagtattatgaaagatggtggaagtatgctaactttaacttacgagtcaactaaagcaatacctaactataatgtaatgggcgtttgtaaatcagcgttagaagcaagtgtgaaatatcttgctagagacttaggtataaaaaaaattagggttaatgctattagcgcaggtcctattaaaactttagctgcttcagcaataggagatgctaaatttctttacaaatggaatgaggaccattcttttttaaaaagaaatgttgatattcatgatgtaggtaattctgcattatatttattaagtgatctaagtagtggtgtaactggtgaaattcattatgttgatgcaggttataataaagttggtatgccagatccaaaaaatattacataaa

SEQ ID NO: 217842 - DNA, 778 bp, Unknown
  Bacterial polypeptide expressing nucleotide sequence isolated from the Sargasso Sea
atgaaaggtaaaaaggggttaataatgggtgttgcaaatgagagatctatcgcttggggtatttctcaaaaactatctgaagcaggagctgaactagcatttacgtatttaggagatgctttaaaaaaaagagtagttcccttagcagaaaaattaaactcaaacataacttttagttgtgatgttgaaaaaaaagaagacgtaataaaattatttaaggatataaaatcaaaatggagtgagatagattttgtagttcacgcagttgctttttcggataaatcagaactatcaggtgagtatttaaataccactagagaaaactttttaagaagcatgttaatatcgtgtttctcttttactgaagttgcaaaagaagcatctaaagtaatgaagaaaggaggtagtatgctaactttaacttacgagtcaaccaaagctattccaaattacaatgtaatgggtgtttgtaaatcagctttagaggctagtgtaaaatacctcgctagagatctaggtagtaaaggtatgagagtaaatgctataagtgctgggcctattaaaactttggcggcttcagctataggagatgcaaaattcttatataaatggaatgaagatcattctttccttaaaagaaatgtagatatccatgatgttggaaattcagcattatatctattaagtgatcttgcaaacggtgtcactggtgaaattcactacgtagatgctggatataacaaagttggaatgcctgatcctaggaatattacttaat

SEQ ID NO: 217843 - DNA, 778 bp, Unknown
  Bacterial polypeptide expressing nucleotide sequence isolated from the Sargasso Sea
atgaaaggaaaaaaaggattaatcttgggcgttgctaatgaaaggtctatcgcgtggggtatctcacaaaaacttgctgaagctggagctgaacttgcatttacttatttaggtgatgctttaaaaaaaagagtgattcctttagctgaaaaattaaattcaaaagttacattcagttgtgatgtcgaaaaaaaagaagaagtggtaaaattatttgaagatataaaatctgagtggggacaaattgattttgtagtacatgcagttgctttttcagacaagtcagaattatcaggtgaatatttaaatactactagagaaaattttttacaaagtatgttaatttcatgcttttcatttactgaaattgcaaaagaagcatctaaagtaatgaaagaaggtgggagtatgctaactttaacttacgagtctactaaagctattccaaactataatgtaatgggcgtttgtaaatcagctcttgaagcaagtgttaagtatcttgctagagatttgggtgctagaggcatgagggtaaatgcgataagtgctggacctattaaaacattagccgcatctgctattggagatgcaaaatttttatataaatggaacgaagaccattcttttttaaaaagaaacgtagacatccatgatgttggaaattcagcgttatatttgctaagcgagcttgcaaacggtgttacaggtgaaattcactacgttgatgccggatataataaagttggtatgccagatcccaaaaatataacttaat

SEQ ID NO: 217844 - DNA, 778 bp, Unknown
  Bacterial polypeptide expressing nucleotide sequence isolated from the Sargasso Sea
aatgacaggaaaaaaaggattaattatgggtgttgctaatgagagatctattgcctggggaattgcacaaaaactctcagaagctggtgctgagttagcatttacatatcttggtgatgcattaaaaaaaagagtagttccactagcagagaaattgaattctaatgtcactttcagttgtgatgttgaaaaaaaagaagatgttgtaaaattatttgaagatgtaaaatctagctggggtgaaattgattttgtagtacatgctattgcattttcagataaatcagagttatctggagaatatttgaatacgactcgagaaaattttttaagaagtatgttaatttcatgcttttcatttacagaagttgcaaaagagtcatctaaagttatgaaatcaggagggagcatgatcaccctaagttatgaagctaacaaagctatcccgaattacaatgttatgggtgtctgcaaagcagcattagagtctagtgttaaatacctggctagagatcttggagctaaaggaataagagtaaatgcaataagcgcaggaccaattaaaactttagcagcttcagccattggtgatgctaaatttttgtacaaatggaatgcagatcattcttttttaaagagaaatgtagataacttagatgttggaaattcagcattatatctattaagcgatatggcaggtggtgtaactggtgaaatacattatgtagatgccggatataacaaagtaggaatgccagatccaaaaaatattacttaa

SEQ ID NO: 217845 - DNA, 787 bp, Unknown
  Bacterial polypeptide expressing nucleotide sequence isolated from the Sargasso Sea
atggatctagtaaaaggtaaaaaaggtttaataatgggtgttgctaatgaacgatccatagcttggggtatagcaaaaaaactttcagaaaatggggccgagcttgcttttacatatcttggagacgcactaaaaaaaagagttacgcctctagctgagtccgttaactcaaaattccttttagattgtaatgtagaaaacaaagatgatattaaaaaaacatttgaggaaataaaaaaaaagtggggacaaattgatttcgtagttcatgcaattgcattttcagataaagcagagctatcaggtcagtatattgacacctcaagagaaaattttacaaaaagtatgttggtatcatgtttttcattcactgaaatagctaaagaggcatctaaaataatgaaaagtggatcgagtatgctaactttgacttacgagtcgactaaggtaataccgaattacaatgtaatgggggtttgtaaagctgctctagagtcaagtgtcaaatatatttcaagagacttaggtgtaaaaggaattagagtaaatgcgatcagtgctggaccaattaaaactttagcagcatcagcaatcggtgatgcaaagtttttatacaaatggagttctgatcactcatttttaaaaagaaatgttgatattaatgatgtaggaaaatctgcactttacttattaagtgatcttgctgctggtgtaactggcgaaatacattatgttgatgccggttacaataaagcagggatgcctgatcctaaaaacattacataat

SEQ ID NO: 217846 - DNA, 652 bp, Unknown
  Bacterial polypeptide expressing nucleotide sequence isolated from the Sargasso Sea
aatgaaaggcaaaaaaggtcttataatgggtgttgctaatgaaagatcgatagcatggggcattgctcaaaaactttcagaagccggagctgaacttgctttcacttaccttggtgatgcattaaaaaagagagttatcccattagcagaaaaattaaattcgaatttaacatttagttgtgacgttgagaaaaaagaggaagttttaaaattattcaaagacataaaatcacactggggagaaattgattttgttgtgcatgctatcgcattttcagataaatcagaattatcaggagagtatcttaatacaacacgtgaaaactttttaagaagtatgttgatatcttgtttttctctcacagaagttgcaaaagaagcttctaaaataatgaagacgggtggtagcatagtaaccttgagttatgaggctaataaagcaataccaaattataatgtaatgggcgtttgtaaagccgcactagaatctagtgtaaaatatcttgcaagggatttaggatctaaaggaataagagtgaacgctataagtgctggaccaataaaaactttagctgcttcagcaatcggagatgctaagtttttgtacaaatggaatgctgatcactcatttttaaaaagaaacgttgataat

SEQ ID NO: 217847 - DNA, 685 bp, Unknown
  Bacterial polypeptide expressing nucleotide sequence isolated from the Sargasso Sea
aaatggagcagaattaatattaacttatcaaaatgaaacatttttaaaaagggttaagcctcttgcagaaaaattaaataatagttttttagtagaatgtgatttggataaaaaagaatctttgaagaaatgctttgaaattgttgaaaataaatttcaaaatattgatttcgttattcatgctgttgctttttctgataaatctgagttaaatggtagatatatatcaacttcaaaagaaaactttactaaaactcttaatatatcttgtttttctttcacagaaatttctaaatactcatctaaaataatgaatgaaggtggtagtttattaacattaactttttatggttcaaataaagttatgccaaattataatgtgatgggtatagcaaaagcagctttagaaaccagtgtaaaataccttagtgtagatttaggaaaacaaaaaataagagttaatgcaatatctgcaggtccaatgagaactcttgcaggagctgcaattgctaatgctagaaatgtatttaactatacgaagaaaaattctgcattaaaaagaaatgttgaattagaagaattaggaaatagtgctttattttttgttagcgatttatctaatgcagttacaggtgaaattcattatgttgattgtggttttaatatagttggaatgccaaaataa

SEQ ID NO: 217848 - DNA, 778 bp, Unknown
  Bacterial polypeptide expressing nucleotide sequence isolated from the Sargasso Sea
aatgaagggaaaaaaaggcttaatcatgggcgttgcaaatgagagatctatagcgtggggtatttctcaaaaattagctgaggcaggcgcagaattagcgttcacatatttaggagatgcacttaaaaaaagggttattcctttagcagaaaaattaaactcaaatgtaacatttagttgtgatgttgaaaaaaaagatgaagttttaaagctttttgaagatatcaacaaaaagtggggtaaaattgattttgtagttcatgcagtagcattttcagataaatcagaattatctggggaatacctaaatacttctagagaaaactttttaaggagcatgctaatttcgtgcttttcatttactgagattgcaaaagaggcctcaaaaataatggataagggtggtagtatgcttactttaacttacgaatctaataaagccattccaaactataatgtaatgggcgtttgcaaatctgcccttgaagcaagtgttaaatacctagcaagggatctgggaactaaaggaattagagttaacgcaataagcgcaggacctattaaaactttagctgcttctgctattggtgatgcaaaatttttgtataaatggaatgaagatcattcttttttgaaaagaaatgtggatatacatgatgttggaaattctgccctatacctattaagtgatcttggaggtggcgtgacaggtgaaattcattatgtagatgctggttacaacaaagttggtatgcctgatcctaaaaatataacttaa

SEQ ID NO: 217849 - DNA, 778 bp, Unknown
  Bacterial polypeptide expressing nucleotide sequence isolated from the Sargasso Sea
aatgggattactcgataataaacgtgctttagtggttggtgtggcaagcaaccgctcaatagcttgggggatagctcaagcaatgcaccgagagggtgcgcagattgcattgacatatcaaaatgaaaaattacagaagagagtcgaaaaatttgcctctgaacttgattcaaaaataaccctaccttgtgatgtgagcagtgacacgcaaattcaatctgtttttggtgatctatcaaaatactgggatagtttcgatattcttgtccattctatagcctttgctccaagagaactacttgatggagaatatctgaaaaatgttaccagagagggttttagaatagctcatgaaattagctcatatagcttttcggctctagctgaagcatcaagagaaatgatgaaaggaagaaaaggcgcgatgctaacacttagttatttaggcgcagttcgctctatgccgaattacaatgtaatgggtctcgcaaaagctagtctagaggctaatgtccgttatatggcctctagtctcggcccagaggggataagggttaatgcaatatcagcgggtccaatacgtactctcgctgcctcgggtatagcgggaatgcgcgattttttaactcatgtggaaagtacgtcgccactgagacgaaatgtaactatcgaggaagttggaaatgctgcgacatttttatgttcagactctgcatcggcaattacaggtgaaattacttatgttgattgtggatttaatacaatcggtatgtcctag

SEQ ID NO: 217850 - DNA, 649 bp, Unknown
  Bacterial polypeptide expressing nucleotide sequence isolated from the Sargasso Sea
agagttgaacctttagcacagtcagtaaattccaattttattctaagttgcaacgttgaaagcaaagaagaaatctccaaactttttgaggacattaaaaaaaaatggggaaaactagatttcgtagtccatgcaatagcattttctgacaaaaatgagctaaacggagaatatctcaatactactagagaaaattttcttaaaagtatgcaaatttcttgtttctcatttaccgagatagcaaaagaagcatctaaaattatggaagaaggttctagtatgcttacattaacttatgagtcaaacaaggtgattccaaattataatgttatgggagtgtgtaaggctgccttagagactagcactaaatatttagcaagggatctgggttccaaaggtattagagtaaatgcaataagcgcaggaccaatcaagactttagcagcttcagcaattggggatgcaaaatttttatataaatggaatgctgaccactctcttttaaaaagaaacgttgatattaatgatgttggaaacgcagctgtttatttattaagtgatctagctgcaggtgtaactggtgaaatccattatgttgatgctggttataataaagttggcatgcctaatcctaaaaatatttcctgat

SEQ ID NO: 217851 - DNA, 655 bp, Unknown
  Bacterial polypeptide expressing nucleotide sequence isolated from the Sargasso Sea
tgataagggaagattcgaatctaaagttagagaactaactgaaccgttaaacccatccttatttttgcctcttgatgttcaaaatccagctcaaattgaagaaatctttaaaaatataaaagacaattggggtcaaattgacggattagttcactgcctagcatttgcaggacgcgatgaattgattggagattatagtgccaccacttcagagggttttgatagggctcttaatataagtgcgtattcgttagcacctttatgtaaagcagcaaaaccactttttagtgatggtgctggcgttgtctcattaacttatttaggatcagagagggcgatccctaactacaacgtgatgggagttgcaaaagcagctttagaagcttcagtaagatatctttctgcagaacttgggcccgaaaaacaagtcagagttaatgcaataagtgctggacctataagaacacttgctagttctgctataggtggcattttagatatgattcacaatgttgaagaaaaggctcctttacgcagaacagtcactcaaacggaagtaggtaatactgctgcttttttattaagtgatctctctagcggcatttcaggccaaacaatttatgttgatgcgggttactgcattaatggaatgtaa

SEQ ID NO: 217852 - DNA, 778 bp, Unknown
  Bacterial polypeptide expressing nucleotide sequence isolated from the Sargasso Sea
atgaaaggtaaaaagggattaatcatgggagtagcaaatgaaagatccattgcctggggtatttctcaaaaattagtggaagcaggagcagaattagcgttcacttatctgggtgatgccttaaaaaaaagagtaattcctttagcagagaaattaaattcgaatgtaacatttagttgtgatgtagaaaacaaagaagaagttattaagctttttgaagacataaaattgaaatggggccaaattgactttgttgttcatgcagttgctttttcagataaatctgaattatcaggagaatatttaaatactacaagagaaaattttttaagaagtatgttaatttcgtgtttttcatttactgaggtttcaaaagaagcgtctaaaataatgaataagggtgggagtatgcttacattaacttacgagtctaacaaagctatcccaaactataatgtaatgggtgtttgtaaatctgctcttgaagctagtgttaaatatctagctagagatttaggttcaaaaggaattagagtaaatgcaattagtgctggaccaattaaaacattggctgcatctgcaattggtgatgcaaaatttctttataaatggaatgaggatcattcttttttaaaaagaaacgtagatatacatgatgtcggaaattcagctttatatttattaagcgatcttggaggtggtgttactggtgaaattcactatgtagatgctggttataacaaagtagggatgcctgatccaaaaaatataacttaat

SEQ ID NO: 217853 - DNA, 778 bp, Unknown
  Bacterial polypeptide expressing nucleotide sequence isolated from the Sargasso Sea
atgaaaggcaaaaaagggttgatcatgggagtagccaatgagagatctatagcttggggaatttctcaaaaactatcagaggccggagctgatttagcattcacttatttgggtgatgctcttaagaaaagagttgttccattagcagaaaaattaaattctaagacaacatttagttgcgatgtagaaaaaaaggatgaggtaatcaaactttttgaagatattaaatcacattggggaaaaattgattttgtagttcatgcagtggcattttcagataaatctgagttatctggggaatatctaaatactaccagggaaaattttttaagaagtatgctaatttcttgtttttcattcacagaagttgccaaagaagcttcaaaaataatggaagatggcggaagtatgttaacattaacctacgagtcaacaaaggcaattccaaattataacgttatgggagtttgtaaatctgccttggaggcaagtgtaaaatatcttgcacgagatcttggtaacaaaaaaataagagtaaatgcaataagtgccggtccaattaaaacccttgcagcttctgcaattggggacgctaaatttctttataagtggaatgaagaccactcctttttaaaaagaaacgtagatattcatgatgttggaaattctgcattgtacctattaagtaatcttagtggtggcgtgacaggtgaaattcattatgtcgatgcaggctataataaagttggtatgcctgacccaaaaaatataaagtaaa

SEQ ID NO: 217854 - DNA, 778 bp, Unknown
  Bacterial polypeptide expressing nucleotide sequence isolated from the Sargasso Sea
aatgaaaggaaaaaaaggactaataatgggtgttgccaacgaaagatccattgcgtggggtatttcgcaaaaacttgctgaggcaggtgcagaattagcttttacttatttgggtgatgctcttaaaaaaagagtggtacctttagcagaaaaactcaattcaaatgttacttttagctgcgatgttgaaaaaaaagaagatgtaataaaattatttgaggatgttaagtctcaatggggcgagatagactttgtagttcacgcaattgctttttctgataaatctgaactttcaggagaatatctaaatactacaagagaaaattttttaagaagtatgctgatttcgtgcttttcatttactgaagttgcaaaagaagctttaaaagtcatgaaaaatggtggtagcatgattacacttagctatgaggctaataaagcaatccctaattacaatgtaatgggtgtttgtaaggcagcattagaatctagtgttaagtacttagctagagatttaggagctaaaggaatacgggtgaatgcaataagtgcagggccaataaagacattggctgcttcagccattggagatgcaaaatttttatataaatggaatgctgatcactcttttttaaaaaggaatgtagataatatcgatgttggaaactcagcattatatcttttaagcgatatggcaggtggtgttacaggtgaaattcactatgttgatgctggttacaataaagtaggtatgccagatccaaaaaatatatcttaa

SEQ ID NO: 217855 - DNA, 787 bp, Unknown
  Bacterial polypeptide expressing nucleotide sequence isolated from the Sargasso Sea
atgtcattacttaaaaataaaaaaggtttgataatgggcgtagctaatgagagatctatagcatggggaatatcgaaaaaattggcgagtgaaggcgctgaattagcctttacttatgttggtgactctttaaaaaaaagagtgcttccactagcaagctctttaggctctaaattaacaattgattgtaatgttgaaaacgaacagcaaattaaagacacttttttacaaataaaaaataattggggaaatatagattttgttgttcactctgtagctttctctgataaatctgagctatctggtgaatatttatcaacatcgaggaataatttcttaaatagcatgttaatatcctgtttctctttcactgaaattgctcgtaatgcagcgccactaatgaaagagggtgcaagtatgctgactttaacatatgaatcatcgaaagttataccaaactataacgttatgggagtatgtaagtctgcactcgaaacaagtaccaaatacttagcaaaagatcttggaaaaaagggtattagagttaatgcaataagcgccggacctataaaaactttagctgcttcagctattggtgacgctaagtttttatataaatggaatgaagaccactctttactaaaaagaaatgttaatattgatgacgttggaaattccgctttatatcttataagtgaccttgctgcaggtgttacaggtgagatacattatgtagacgctgggtataacaaggttggaatgcctgatccgaaaaatataacctagt

SEQ ID NO: 217856 - DNA, 667 bp, Unknown
  Bacterial polypeptide expressing nucleotide sequence isolated from the Sargasso Sea
gggtgacgctttaaaaaaaagagtagttcctttagcagaaaaattaaattcaaacaccacattcagttgtgatgttgaaaaaaaagaagaagtagtaaaactatttgaggatatcaaatctcaatggggtgaaattgattttgtagtgcatgcagttgctttctctgataaatcagagttatcaggtgaatatttaaatacgactagagaaaactttttaagaagtatgttaatttcatgcttttcatttactgaagtcgtaaaagaagcttcaaaggtaatgagacaaggtggaagtttattaactttaacttacgaatctactaaagcaatcccaaattataatgtaatgggtgtttgtaaatctgctttagaggccagtgttaaatacttagctagagatttgggtgctaaaggcatgagagtaaatgctataagtgcaggacctatcaagacattggctgcctctgcaattggggacgcaaaattcctatataaatggaatgaagaccattcttttcttaagagaaatgtagatatccatgatgttggtaattcagcattatatctactaagtgaccttgcaaatggagttactggtgaaattcactacgtagatgctggatataacaaggttggaatgccagatcctaaaaatataacctaa

SEQ ID NO: 217857 - DNA, 787 bp, Unknown
  Bacterial polypeptide expressing nucleotide sequence isolated from the Sargasso Sea
atgagtttagttaaaggaaaaaaaggtttgataatgggtgtagctaatgagagatcaatagcatggggaatcgcaaagaaattatctgaaaatggagctgagttagcttttacctatttaggcgatgctcttaaaaaaagagttacaccgcttgctgaatctttaaactcaaaatttcttttagactgtaacgtagaaaataaagaagatataaaaaaaatatttcaagaaataaaaaataaatggggtcatctagattttgtagttcatgctatagcgttttctgatagatccgagttgtctggagaatatcttaatactactcgtgaaaattttttaaaaagcatgcttgtttcatgtttttcttttactgaagtagccaaagaagcatcacaaataatgaaagatggctcgagtatgctcacattgtcttacgagtctacaaaagtaattccaaattataatgtaatgggggtttgtaaagcagcattagagtcgagtgtaaagtatatagctcgtgacttaggttcaaaaggaattagggtaaatgcaattagtgctggaccaataaaaactcttgcggcatcagccataggtgatgcaaaatttctatataaatggagtgcggatcactcatttttaaaaagaaacgtagacattaatgatgttggaaaatctgctctatatctactaagtgatctttctgcaggcgtaactggagagattcattacgttgatgctggttataataaagtggccatgcctgatcccaaaaacatatcttagt

SEQ ID NO: 217858 - DNA, 595 bp, Unknown
  Bacterial polypeptide expressing nucleotide sequence isolated from the Sargasso Sea
gtagaaaaaaaagaagatgtaacaagattatttgaagatattaaatcgcaatggggtgaaattgattttgtagttcatgcaattgcattttctgataaatcagaattatctggtgaatatttaaatacaactagagaaaactttttaagaagtatgttaatttcatgtttttcatttacggaagttgcaaaagaggcatctaaagtaatgaaggagggtggaagcttaatcacattaagttatgaagcgaataaagctattccaaattataatgtaatgggtgtttgcaaagctgcactagaatctagtgttaagtatttagcaagagatttaggtgctagaggtatgagagtaaacgccataagtgcaggacctattaaaactttagcagcttcagcaatcggagacgcaaaattcctatataaatggaatgaagatcattcattactcaaaagaaacgttgatattcatgatgttgggaattcagcattatacctattaagtgaccttgcaaacggtgtcactggtgaaattcactatgtagatgcagggtataacaaggttgggatgccagatcctaagaatattagctaaa

SEQ ID NO: 217859 - DNA, 787 bp, Unknown
  Bacterial polypeptide expressing nucleotide sequence isolated from the Sargasso Sea
atgagtttgatgaaaggaaaaaaaggattggtgatgggagttgccaatgaaagatctattgcttggggtatttcacaaaaacttgcagaagctggtgcagagcttgcatttacttatttaggtgatgctctaaaaaaaagagtaattccactagctgaaaaattaaattcaaaagttacatttagctgtgatgtagaaaaaaaagaagatgtaacaaagttatttgaagatattaaatcgcaatggggggaaattgattttgtagttcatgcaattgcattttctgataaatcagaattgtctggtgaatatttaaatacgactagagaaaactttttaagaagtatgttaatttcatgtttttcatttacggaagttgcaaaagaggcaactaaagtaatgaaggagggtggaagcttaatcacattaagttatgaggcgaataaagctattccaaattataatgtaatgggtgtttgcaaagctgcactagaatctagtgttaagtatttagcaagagatttaggtgctaaaggcatgagagttaatgcaataagtgcaggacctattaaaactttagcagcttcagccattggagatgcaaaattcttatataaatggaatgaagaccattctttgcttaaaagaaatgtagatattcatgatgttggaaattcagcactatatctactaagtgatcttgcaaacggtgtcactggtgaaattcactatgtagatgctggatataataaggttgggatgccagatcctaagaatattagctaaa

SEQ ID NO: 217860 - DNA, 667 bp, Unknown
  Bacterial polypeptide expressing nucleotide sequence isolated from the Sargasso Sea
cgtttgttaaagaaaattaagcctattgctgatgatttaggcgtaaaaacgcttattgagtgcgatgttgcatgtgataaatccattgagcaaaccttttcacagctaaaagatgaatggggaactttggatggaattgtgcattcaatcggttttgcaccatcagatcagcttgatggagattttactgaagttacaaccagagaaggctttcaaatagctcatgatataagttcatatagttttactgctcttgcaaaaggagcattaccaattcttagtgaaaaggctgcccttcttaccttaacttacttagggtctatccaatcgcttccaaactacaatgttatgggtcttgctaaagctagccttgaggctaatacaaggtttcttgctgcttcgttggggaaaaaaggaatcagagttaatgcaatctccgcaggcccaataaaaactcttgctgcatctggtgttaagaattttagaagtatgctcaaagaatatgcggatagagcacctttaggaagagccgttactacagaggaagtcgggaatgtcgctgctttcttatgctcagatctagcaagcggtattactggtgagattacatacgtagatgcaggctttaatacttctgcaatgtccttaattccttcaaaagaataaa

SEQ ID NO: 217861 - DNA, 499 bp, Unknown
  Bacterial polypeptide expressing nucleotide sequence isolated from the Sargasso Sea
attagatggcaactttatcgatgcatctactagagaagggtttgcaattgctcacgatatcagcgtattcagctttattgctttagcaaaagctagcagagagttgatggcagatagatcatcgtctttattaactttatcctatcttggcgccctaagaactcttccaaattacaatgtgatgggcttagctaaagcgtctcttgaatcatcagttagatacctagcaaacagtctaggaaaggaaaatacaagagtaaatgctatctcagcaggcccggtaagaactttagcagcctctggagttaaaaatttcagaaagatgctttcctataatgctgaaagaactcctttgaaaagaaacataactgccagagaagttggtgatacagcttcatttttatgttctgatctcgcaagcgggataacaggggaaattacttatgttgatgctggtttcaatataacagctatgggtgatctagaggagatttcctag

SEQ ID NO: 217862 - DNA, 707 bp, Unknown
  Bacterial polypeptide expressing nucleotide sequence isolated from the Sargasso Sea
tcaaggggcaaacattattctttcctatcaatctgatagattaaagaagaaagttgagcaagttggaagtaaaattaattgtgaagcttacattgaatgcgacgtttccgatgacaaatccattgataatttaataaatgaagtagaatcaaaatggggttatttggatggtttagttcatgctgtgggatttgctcccgcaaatgaattagaaggagactttacagaggttgccaccagagaaggttttaaaatagctcatgacattagtgtctttagcttcactgctcttgcaaaagcctcaagaaatctcatgaaagatagaaatgctgccttactaacattatcttatcttggagcagtaaggaccttgccaaattataatgtcatgggtgttgcaaaagccggattagaatctactactagatatttagccaatagtttaggaaaagaaaacattagagtgaatgccatatctgcgggacctgttaaaactctggctgcttcaggaataaaaagctttagaaaaatgctctcttataatgcttcgagagctccattaatgagaaatattacaactgaggaagttggtaatgctgctgcctttctttgttctgatttagccagtggaattactggagagattttatatgtagacgctggattcaatattacggcgatgggagatctttcggaagtagattagt

SEQ ID NO: 217863 - DNA, 724 bp, Unknown
  Bacterial polypeptide expressing nucleotide sequence isolated from the Sargasso Sea
tcgcctggggggattgcccagcagctcaaggcggccggagccgagctcggcatcacctacctgcctgatgacaaaggccgctttgaggccaaggtgcgcgaactcaccgctcccctggagcccagcctgttcctgcctctgaatgttcaggacgccgaccagatggctgaggttttcggcgagatcaaggcgaagtggggcgttcttgatggtctggtgcactgcctggcctttgccggcaaggaggagttgatcggcgactacagcgccaccacggcggaaggttttgcccgctcactggatatcagcgcctattccctggcgccgctctgtgcccatgccaagccgctgttcagcgagaaggccggcgtgatcaccctctcgtacctcggcgctgagcgggcgattcccaactacaacgtgatgggcgtcgccaaggcggctcttgaggcttccgttcgctatctggccgcagagctgggtcccgagaagcaggtgcgcgtcaacgccataagcgccggcccgatccgcaccctggccagctctgccattggcggcattctcgacatgatccacaacgtggaggaaaaggctcccctgcgccgcaccgtgactcagatggaggtaggtggcaccgctgccttcctgctcagtgatctggccagcggcatctccggtcagaccatctacgtcgatgcgggctactgcgtcaccggcatgtgag

SEQ ID NO: 217864 - DNA, 700 bp, Unknown
  Bacterial polypeptide expressing nucleotide sequence isolated from the Sargasso Sea
taaattacatgaaaatggtgctgaattagcaattacttatcaaaatgctacattgttaaaaagagttaaacctcttgctattaaagtaaactctaattgtttaattgaatgtgatgtgagtaaagaagaagatataaataatgcttttgatatagttaaaaataaatttggaaatattgattttataattcacgctgtagcttattcagacaaaaatgaattaaatggacgttatattgaaacttcaaaaaataattttattaatagcctttctatatcatgctattctttcacaaaaatagcaaaagtatttcaaccagttataaataaaaatggaagtctggtaacgctaagtttttatggagcaaataaagtaatgccaaattacaatgttatgggagttgcaaaagctgctctagaaactagtgttaaatatttaagcgttgatttaggtgatcaaaatataagagttaatgcaatatcagcagggcccatgagaacccttgcaggagctgctatagcaaattcaagagaagtttttaaatatactaatgataattcatctttaaaaagaaatgtaaacttagaagaattaggaaattctgctttatatttagtaagtgacttatcctctgcagtaactggagaagttcactacgttgattgtggctttagtattattggtatgcccaaaacttaa

SEQ ID NO: 217865 - DNA, 763 bp, Unknown
  Bacterial polypeptide expressing nucleotide sequence isolated from the Sargasso Sea
ggtaaaaaaggtataatttttggtattgcaaatgatcattcaatagcttggggtattgctgaaaaatttcacgaacatggtgctgacttagccattacttatcaaaacagcatattattaaaaagggttaaacctcttgctgataaagtaaactgtgattgtttaattgaatgtgatgtaagtaaagaggaagatttaaataaaactctaaaagtaattaaagataaatttggaaatattgactttataattcatgctgtagcatattcagataaaaatgaattaaatggacgctatattgaaacttcaaaaaataattttattaatagtctttctatctcctgctattctttcacaaaaatagctaaagtttttcaacctattctcaataaaaatggaagtttagtaacattaagcttttatggagcaaacaaggtaatgccaaattacaatgttatgggagttgctaaagctgccttagaaactagtgtaaagtatttaagtgttgatttaggagatcaaaacataagggtaaatgccatatcggcgggtcccatgagaacattagctggagccgccatagcgaattctagagaagtttttaaatacactaatgataattcgtctttaaaaagaaatgtaaaccttgaagaattaggaaattctgctttatttttagttagcgaaatgtcatccgcagtaacgggggaaatacattatgttgactgtggttttaatattataggaatgcctaaagcttaaa

SEQ ID NO: 217866 - DNA, 642 bp, Unknown
  Bacterial polypeptide expressing nucleotide sequence isolated from the Sargasso Sea
ttgcagatgatcttggggtaaagacgcttattgaatgtgatgttgcatgcgataaatctattgagcaaaccttttcacagttaaaagatgaatggggaactttagacggaattgtacattcaataggttttgcgccatcagatcagcttgatggagattttactgaagttacaaccagagaaggttttcaaatagctcatgatataagctcatatagtttcactgctcttgcaaaaggagcattaccaattcttagtgaaaatgctgcccttcttaccttaacttacttaggatctattcaatcacttccaaactataatgttatgggtcttgcaaaggctagccttgaggctaatacaaggtttcttgctgcttcattggggaaaaaaggaatcagagttaatgcaatctctgcaggcccaataaaaacacttgctgcatctggtgttaagaattttagaagtatgcttaaagagtatgcggatagagcacctttaggaagagctgttactacagaggaagtcgggaatgtcgctgctttcttatgctcagatctagcaagtggtatcacaggtgagattacatacgttgatgcaggctttaatacttctgcaatgtccttaattcattcaaaagaataaa

SEQ ID NO: 217867 - DNA, 715 bp, Unknown
  Bacterial polypeptide expressing nucleotide sequence isolated from the Sargasso Sea
caggcaatgcaccgtgaaggcgcggaactggcattcacctatcagaacgaaaaactgaaaggtcgcgtagaggaatttgctgccgcgctgggttctgacattgtgttgccgtgcgacgttgctgaagatgagagcatcaccgcgctgttcaccgagctggaaaaagtctggccaaaattcgatggtttcgtccactctatcggttttgccccggctgaccagttagacggcgactacgttgacgttgtcactcgcgacggctttaaaatcgcgcacgacatcagcgcctacagctttgtggcgatggctaaagcctgccgtactatgctgaacccgggctcggctctgctgacgctctcctacctgggcgcagagcgcgcgatcccgaactacaacgtgatgggtctggccaaagcttctctggaagctaacgtccgctatatggctaacgccatgggtccggaaggcgttcgcgtcaacgccatctctgccggtccgatccgtacgctggccgcgtccggtatcaaagatttccgtaaaatgctggcccactgcgaagcggtcaccccgatccgtcgcactgtcaccattgaagatgtgggcaacagcgcagccttcctgtgctctaacctgtccgcgggtatctccggtgaagtcgttcacgttgacggcgggttcaatatcgccgccatgaacgagctggaactgaaataag

SEQ ID NO: 217868 - DNA, 553 bp, Unknown
  Bacterial polypeptide expressing nucleotide sequence isolated from the Sargasso Sea
gaatggggaactttggatggaattgtgcattcaatcggttttgcaccatcagatcagcttgatggagattttactgaagttacaaccagggaaggctttcaaatagctcatgatataagttcatatagttttactgctcttgcaaaaggagcattaccaatacttagtgaaaaggctgcccttcttaccttaacttacttagggtctatccaatcgcttccaaactacaatgtcatgggtcttgctaaagctagccttgaggctaatacaaggtttcttgctgcttcattggggaaaaaaggaatcagagttaatgcaatctctgcaggcccaataaaaacacttgctgcatctggtgttaagaattttagaagtatgcttaaagagtatgcggatagagcacctttaggaagagccgttactacagaggaagtcgggaatgtcgctgctttcttatgctcagatctagcaagtggtatcacaggtgagattacatacgttgatgcaggctttaatacttctgcaatgtccttaattccttctaaagaataaa

SEQ ID NO: 217869 - DNA, 654 bp, Unknown
  Bacterial polypeptide expressing nucleotide sequence isolated from the Sargasso Sea
aatgcttaaaggcaaaaaaggtataatttttggtattgcaaatgatcattcaatagcttggggtattgctaaaaaattgcatcaacatggtgctaatttagcaattgcttatcaaaacaacactttattaaaaagagttaaacctcttgctgataaggtaaactgtaattgtataattgaatgtgatgtaagcaaagaagaagatttaaataaagctctaaaagtaattaaagataaatttggaaatattgattttattattcatgctgtagcatattcagataaaaatgaattaaatggacgttatattgaaacttcaaaaaaaaattttatcaatagtctttctatctcgtgctattctttcacaaaaatagctaaagtttttcaacctattctgaataaaaatggaagtttagtaacattaagtttttatggagcaaacaaagtaatgccaaattacaatgttatgggagttgctaaagctgccttagaaactagtgtaaagtatttaagtgttgatttaggagatcaaaacataagggtaaatgccatatcggcgggtcctatgagaacattagctggagccgccatagcgaattctagagaagtttttaaatacactaatgataattcgtctttaaaaagaaatgtaaa

SEQ ID NO: 217870 - DNA, 529 bp, Unknown
  Bacterial polypeptide expressing nucleotide sequence isolated from the Sargasso Sea
tggggcgttcttgatggcctcgtgcactgcctggccttcgccggcaaggaggagctgatcggcgactacagcgccaccacggcggaaggctttgcccgctcccttgatatcagcgcttattccctggcccccctctgcgcccatgccaagccgctgttcagcgagaaggccggcgtgatcacgctctcgtacctcggcgcagagcgggccattcccaattacaacgtgatgggcgtggccaaggcggccctggaggcctccgtccgctacctggctgctgagctgggtccggagaagcaggtgcgcgtcaacgccatcagtgccggcccgatccgcaccctggccagctccgccatcggcggcatcctcgacatgatccacaacgtggaggagaaagctcccctgcgccgcaccgttacccagatggaggtgggcggcaccgcagccttcctgctcagcgatctggccagcggcatctccggacagaccatttacgtggatgcgggctactgcgtcaccggcatgtgag

SEQ ID NO: 217871 - DNA, 373 bp, Unknown
  Bacterial polypeptide expressing nucleotide sequence isolated from the Sargasso Sea
cttcttaccttaacttacttagggtctatccaatcgcttccaaactacaatgtcatgggtcttgctaaagctagccttgaggctaatacaaggtttcttgctgcttcattggcgaaaaaaggaatcagagttaatgcaatctctgcaggcccaataaaaacacttgctgcatctggtgttaagaattttagaagtatgctcaaagagtatgcggatagagcacctttaggaagagccgttactacagaggaagttggaaatgtcgctgctttcttatgctcagatctagcaagtggtatcacaggtgagattacatacgttgatgcaggctttaatacttctgcaatgtccttaattccttcaaaagaataaa

SEQ ID NO: 217872 - DNA, 328 bp, Unknown
  Bacterial polypeptide expressing nucleotide sequence isolated from the Sargasso Sea
tacaatgtgatggggctagctaaagcaagcctagaagccagtgtgaggtatttagcggtatcgctaggtgaagaaggtacgagagtaaatgctatttcagctggacctattaaaacattggctgctcaaggtgttaaaaatttcagaaaaatgcttacctataatgaatcaagagctcctctcaaaaagaatgtgactattaatgaagtaggaaatgctgcggcttttctagcttcagacttagccagcggaatcacaggtgaaactctttatgttgatgcaggttataacattactgcaatgggaagtttagaggaaactaattaat

SEQ ID NO: 217873 - DNA, 602 bp, Unknown
  Bacterial polypeptide expressing nucleotide sequence isolated from the Sargasso Sea
tttaattgaatgtgatgtaagcaaagaggaagatttaaataaagctctaaaagttattagagacaaattaggaaatattgattttattattcatgctgtagcatattcagataaaaatgaattgaatggacgttatattgaaacttcaaaaaataattttatcaacagtctatctatctcgtgctattctttcacaaaaatagctaaagtttttcaacctattctcaatgaaaatggaagcttagtaacattaagcttttatggtgcaaacaaagtaatgccaaattacaatgttatgggagttgctaaggctgccttagaaacaagtgtaaaatatttaagtgttgatttaggagagcaaaatataagggtaaatgccatatcggcgggtcccatgagaacattagctggagccgccatagcgaatgctagagaagtttttaaatacactaatgataattcgtctttaaaaagaaatgtaaaccttgaagaattaggaaattctgctttatatttagttagcgaaatgtcatccgcagtaacgggggaaatacattatgttgactgtggttttaatattgtaggaatgcctaaagcttaaa

SEQ ID NO: 217874 - DNA, 736 bp, Unknown
  Bacterial polypeptide expressing nucleotide sequence isolated from the Sargasso Sea
tgctgcaggaattgcagaatcaatgaacgattttggtgcagaaattgcactttcttatcaatctgaaaaacttaaatcgcgagttgaagccttagctgaaaattggaattgtagtttattaacagaatgcgacgttagtaatgattctgcaataaaagaaacgtttaaaaatataaaggataagtggggacatttagatggagttgttcatgccgttggttttgctccaggtaatgaattagatggaaactttgtcgatgcatctactagagaaggatttgcaattgctcatgatgtcagcgtatttagctttattgctctagcaaaagccagcagagagttgatgactgacagatcatcttctttattaactttatcttatcttggcgccttgagaacccttccaaattataatgttatgggattggcaaaagcttctctcgaatcatcagtgagatatctagcaaacagtctaggaaaggaaaatacaagagtaaatgctatctcagcaggaccggtgagaaccttggcagcttctggagttaaaaattttagaaaaatgctctcctacaatgctgaaagaactcctttgaaaaggaacataacagccagagaggttggtgatacagcttcattcttatgttccgatcttgcaagcgggataactggggaaatcacttatgtggacgccggttttaatattacagctatgggtgatctagaggagatttcctag

SEQ ID NO: 217875 - DNA, 733 bp, Unknown
  Bacterial polypeptide expressing nucleotide sequence isolated from the Sargasso Sea
gcggctggtatcgcgaaagcaatgcatgcacaaggtgcgcagctagcattcacctatcaaaatgagagattaaaaaagaatgttgaaaagatagccttggagcttaattcaaaacttttatttgaatgtgatgtttcctcagataaaagcattgaaacaatgtatcaaaacctttctgaggattggaaaaaatttgatggttttgttcattctattgggtttgctcctgcaaacgaactagaaggcaactttgtagatgcggcaacaagagagggcttcaaagttgcccatgatattagctcatatagttttactgcgatggcaaaagctgcaaaatcaatgttaaatcccggctctgctttattaactttgacatatttaggctcagtccaatcacttccaaactataatgttatgggcttagcaaaagccagcttagaggccaatacgcgctttcttgcagccgctttggggccagatgacatcagggtaaatgctatatcagctggcccaatcaaaacgttggctgcatctggagtaaagaactttagaaaaatgcttgttaactatgcaaacagggctccgctgagaagagtggttactacatcagaggtaggcaatgtggctgctttcttgtgctcagatttggcaagcggtattactggagagattacttacgttgatggcggttttaacactgctgcaatgtctatcgaagaatatacagattaat

SEQ ID NO: 217876 - DNA, 772 bp, Unknown
  Bacterial polypeptide expressing nucleotide sequence isolated from the Sargasso Sea
atgattaaaggtaaaaagggcctcattattggtatcgctaatgatcattcaattgcttggggtattgctaaacaattacatgcaaatggtgctgaactagctattacctatcaaaatgatacgttgttaaaaagagtaaagcctctagcagataaagtgaattcaaatattttgattgaatgcgatgtaaataaggaaaataatttacaaaatacagtcaatcaaattaaaaaagtatttggtaaaattgatttcattattcatgctgtcgcttattctgataaacatgaattaaatggtcggtatctagatacttctaaagataattttattaatagcttatctatatcttgctattccttcacaagaatagcaaaattattccaacctataataaatgatggagggagcttagttacattaagttttcatggagcaaataaagttatgccaaattataatgtgatgggagtagctaaggcagctcttgaagcaagtgttaaatatttaagtgttgacttaggcgatcaaaatgtaagagttaatgcaatttctgcaggaccaatgagaacacttgctggagcagcaattgctaatgcaagagatgtttttaattatacaagtgagaattcttccttaaaaagaaatgtaaatctagaagaattaggtaattcagcactttatttagttagtgatttatcttcggcgataactggggagattcattatgttgattgcggttttaatattgttggaatgccaaaaaattaaa

SEQ ID NO: 217877 - DNA, 790 bp, Unknown
  Bacterial polypeptide expressing nucleotide sequence isolated from the Sargasso Sea
tatgaatttcttatccggtaaaaaaatactgatattgggtgtcgcaagcaaattatctatagcttcaggaattgctgcggccatgcataaagccggagccgaacttgcattcacttaccaaagcgaaaaactgaaagatcgagtcactggctttgccgaaggctgggattccaataaggtctacccatgcgatgtgacagacgataaacagattagtgagctcttttcaaaactcagcgaccattgggatggattagatggcatagtccactgtttagcgtttgcccctactcatgaattgaatggtaattatgtcgatgttactacgagagagggctttataactgcgcatgaaattagttcttacagcctggtagcattagctcaaaaaggaagagatttaatggctggcagaaatggctccttactcactctgagttatctcggggcgctgagaagtcttcccaactataatgtcatggggctcgccaaagcaagtttagaggctaatgtaagatacatatctgctagcttaggtcctgaaggaactcgcgttaacgcgatctctgctggccccatcaagaccttggccgcagcgggtataaaaagtttcaggaaaatgcttgagcataacgcaaagcaaacccctcttagaagaaacgtaacgattgaggaagtcggaaatgccgcagctttcttatgctcagacttagcctctgggattactggcgaagtactgtatgtcgatggtgggtttaatacaaccgctatgggtactcttaatgattaa

SEQ ID NO: 217878 - DNA, 787 bp, Unknown
  Bacterial polypeptide expressing nucleotide sequence isolated from the Sargasso Sea
atgcttaataataaaaaaatcttaatcactggtattgcaaataaattctcaattgctcatggtattgcacaaagtatgagcaaaaatggtgctgagctagcttttgcataccaaaatgaacgtttactgaagaaaattaagcctattgcagatgatttaggagtaaaaacgctgattgaatgtgatgttgcatgcgataaatccattgagcaaaccttttcacaattagcagatgaatggggaactttagatggaattgtgcattcaataggttttgctccatcagatcagcttgatggagattttaccgaagttacaaccagagaaggcttccaaatagctcatgatataagttcatatagctttactgctcttgcaaaaggagcattacctattctgagtgaaaaagctgcccttcttaccttaacttatttaggatctatacaatcacttccaaactataatgttatgggtcttgcaaaggctagccttgaggctaatacaaggtttcttgccgcgtctttggggaaaaaaggaatcagagttaatgcaatctctgcaggcccaataaaaactctcgctgcatcaggtgttaagaattttagaagtatgctcaaagagtatgcggatagagcgcctttaggaagagccgttactacagaggaagtcgggaatgtcgctgctttcttatgctcagatctagctagcggtattactggtgaaattacctatgttgatgcaggatttaatacctctgcaatgtccctaattccttctaacgaataaa

SEQ ID NO: 217879 - DNA, 738 bp, Unknown
  Bacterial polypeptide expressing nucleotide sequence isolated from the Sargasso Sea
caattgctaatggaattgcccaaagtatgagcaaaaatggggctgagcttgcttttgcatatcaaaatgaacgtctgttaaagaaaataaagcctattgcagatgaacttggagttaaaactctcattgagtgtgatgttgcatgtgataaatccattgatagaaccttttctcagttagcagacgaatggggaactttagatggaattgtacattcaataggttttgcaccttcagatcagcttgatggagattttacagaagttacaaccagagaaggctttcaaatagctcatgatataagttcatacagctttactgcgcttgcaaaaggtgcattacctattctcagtgagaatgctgcccttcttacattaacttacctaggatctatccaatcgcttccgaactataatgttatgggtcttgcaaaggctagtcttgaggctaatactagatttcttgctgcatcattgggtaaaaaaggaattagagttaatgcaatctctgctggtccaataaaaactctggcagcatcgggtgtgaagaattttagaagcatgcttaaagaatatgcggatagagctcccttaggcagagcagtcaccacagaggaagttgggaatgtagctgcttttttatgttctgatttagctagcggaattactggtgagattacatatgttgatgcaggctttaacacttctgcaatgtccttaattccttcaaaagaataaa

SEQ ID NO: 217880 - DNA, 787 bp, Unknown
  Bacterial polypeptide expressing nucleotide sequence isolated from the Sargasso Sea
atgctaaaaaacaaaaaaatcttaattacaggaattgcaaataagttctctatagcaaatggtattgcgcagagtatgagcaaaaatggagctgagcttgcttttgcataccaaaatgaacgtctgttgaagaaaataaagcctattgcagatgatcttggggtaaagacgcttattgaatgtgatgttgcatgcgataaatctattgagcaaaccttttcacagttaaaagatgaatggggaactttagacggaattgtacattcaataggttttgcgccatcagatcagcttgatggagattttactgaagttacaaccagagaagggtttcaaatagctcatgatataagctcatatagtttcactgctcttgcaaaaggagcattaccaattcttagtgaaaatgctgcccttcttaccttaacgtacctaggatctattcaatcacttccaaactacaatgttatgggtcttgcaaaggctagtcttgaggctaatacaagatttcttgctgcatcattagggaaaaaaggaattagagttaatgcaatctcagcaggaccaataaaaactctagcagcatccggtgtcaagaattttagaagcatgcttaaagaatatacggatagagctccgctaggtagagcggttaccacggaggaagtcgggaatgtagctgcttttttatgctcagatctagcaagtggtattactggcgagattacatacgttgatgcaggctttaatacttctgcaatgtccttaattccctcaaaagaataaa

SEQ ID NO: 217881 - DNA, 561 bp, Unknown
  Bacterial polypeptide expressing nucleotide sequence isolated from the Sargasso Sea
aaactctaaaagtaattaaagataaatttggaaatattgactttataattcatgctgtagcatattcagataaaaatgaattaaatggacgctatattgaaacttcaaaaaataattttattaatagtctttctatctcctgctattctttcacaaaaatagctaaagtttttcaaccaattctcaatgaaaatggaagcttagtaactttaagcttttatggagcaaacaaagtaatgccaaattacaatgttatgggagttgcgaaagctgccctagaaactagtgtaaaatatttaagtgttgatttaggagaacaaaatataagagtaaatgcgatatcggcgggacctatgagaacattagctggagctgccattgcgaatgctagagaagtttttaaatatactaatgataattcatctttaaaaagaaatgtaaacctagaagagttaggaaattctgctttatatttagttagcgaaatgtcatctgcagtaacaggggaaatacattatgttgactgtggtttcaatatagtaggaatgcctaaagcttaaa

SEQ ID NO: 217882 - DNA, 784 bp, Unknown
  Bacterial polypeptide expressing nucleotide sequence isolated from the Sargasso Sea
atgctgcttgatctcaccggtaagaagattctcgtcaccggcatcgccaacaaccgttcgatcgcctggggtattgcccaacagctcaaggcggcaggtgccgaactcggcatcacctaccttccggacgacaagggccgcttcgaggccaaggtgcgcgaactcaccgctcccctggagcccagcctgtttctgcccctgaatgtgcaggacgccgaccagatggctgaggttttcggcgagatcaaggcgaagtggggcgttctcgatggtctggtgcactgcctggcgtttgccggcaaggaagagctgatcggtgattacagcgccaccaccgccgaaggatttgcccgctccctcgacatcagcgcctactccctggcgcctctttgtgcccacgccaagccgttgttcagcgagaaggccggagtgatcactttgtcgtacctcggtgctgagcgcgccatccccaactacaacgtgatgggtgtggccaaggccgctctggaggcatccgttcgttacctcgcggcagaactgggacctgaaaagcaggtgcgcgtcaacgccatcagcgccggcccgatccgcaccctggccagctctgccatcggcggcatcctcgacatgatccacaacgtggaggagaaggcacccctgcgtcgcaccgtgactcagatggaggtgggcggaaccgcagccttcctgctcagtgatctggccagcggcatctccgggcagaccatttacgtggatgcgggttactgcgtcaccggaatgtgag

SEQ ID NO: 217883 - DNA, 787 bp, Unknown
  Bacterial polypeptide expressing nucleotide sequence isolated from the Sargasso Sea
atgctaaaaaacaaaaaattcataatcaccggattggctaacaagttctcaattgcaagcggaatagctaaatctatggctgctcatggggcagaactattatttttgtatcaaaatgagagatttttaaaaaaaattaagccaattgctgatgagttaggagctgagttactaatagaatgtgatgtttcgtctgataaatccatagatagagcatttaaagaaataggatcaaagtgggagaatattgatggattagttcactcaatcggttttgctccatcagatcagcttgaaggagattttaccgaggtaacaacgcgggagggttttcagattgctcatgatgttagctcatacagctttactgctcttgcgaaagcatctcttcctcttttaaacaaaaatgctgcccttttgactctaacttatcttgggtcaattcaatcattgcctaactataatgtaatgggacttgctaaagcgagccttgaagcaaatacaagatttttagcagcctcacttggtaaaagaggaataagggtaaatgcaatttctgcaggtccaattaaaactctcgctgcatctggtgtaaaagattttagaagcatgctaacagaatacgcagacagagcaccgcttggaagaactgtaactactgaggaagttggaaatgttgcagcttttttatgttcagatttagcaagtggtattacaggtgaaataacatatgtagatgctggttttaacacttctgcgatgagtacaattcctaaaactgaataaa

SEQ ID NO: 217884 - DNA, 787 bp, Unknown
  Bacterial polypeptide expressing nucleotide sequence isolated from the Sargasso Sea
atgctaaataataaaaaaattttaattacaggaattgcgaacaaattctctatagctaatggaattgctcaaagtatgagcaaaaatggagctgaacttgcttttgcataccaaaatgaacgtttattaaaaaaaattaaacctattgcagacaatttaggagtaaaaacgctcattgaatgtgacgttgcatgcgataaatccattgagcaaaccttctcacagttaaaagatgagtggggaactttagatggaattgtgcattcaataggttttgcgccttcagatcaacttgacggagattttaccgaagttacaaccagagaaggttttcaaatagctcatgatataagctcttatagctttactgctctcgcaaagggagcattacctattcttagtgaaaatgctgcccttcttaccttaacttacttaggatcaatccagtcacttccaaactacaatgttatgggtcttgcaaaggctagcctagaggctaatacaagatttcttgctgcatcattaggaaaaaaaggaattagagttaatgctatttctgcaggcccaataaaaactcttgcagcatccggtgtaaagaattttagaagcatgcttaaagagtatgccgatagagctcctttaggtagagcagttactacagaggaagtcggaaatgtagctgcttttttatgttcagatctagcaagcggaataactggtgagattacatatgttgatgctggttttaatacttctgcaatgtccttaattccctcaaaagaataaa

SEQ ID NO: 217885 - DNA, 613 bp, Unknown
  Bacterial polypeptide expressing nucleotide sequence isolated from the Sargasso Sea
atgattaaaggtaaaaaaggactcattattggtatagcaaatgatcattcaattgcttggggtatcgctaagcaattaaatgcaaatggtgctgatttagctattacttatcaaaatactacattgttaaaaagagttaagcctctagcagagaaaattaattcaaatatattgattgaatgtgatgttaataatgaaaagcatttacaaaatttagtcaatcaaattaaaaaaaaattaggtaaaattgattttattattcatgctgttgcttattctgataaaaaggaattaaacggtcggtatctagatacttctagggataatttcattaacagcctatctatatcttgctattcctttacgagaatagcaaaattattccaacctataataaataaaggaggaagcttagttacattaagttttcatggtgcaaataaagttatgccaaattacaatgttatgggggtagctaaggcagctctagaggcaagtgttaaatatctaagtgttgatttaggtgaacagaatgtaagagttaatgcaatttctgcaggcccaatgagaacactggctggtgcagcaattgctaatgctagagatgttttta

SEQ ID NO: 217886 - DNA, 631 bp, Unknown
  Bacterial polypeptide expressing nucleotide sequence isolated from the Sargasso Sea
aaataaagatacagatagtatgtacaatgattttttgtcatgtgctaaaactttttttcctgtcggagactatattacaataaatatttcttctccaaatacagaaggattgagaaatttccatgaaaaagaaaatcttgaaaaactcctaattaaaataaatgaaattagaaaagaaagtgacttcaaaaaatcttttttattaaaagtttcacctgatcttgatgagggctctattaataatattgttgatttatcattaaaaaataatattaacggaataatattaacaaatacttctgacaaaaatagggataaattaatagataaccaaaaaaatgagaagggtggtctatcaggtcagcctataaaagatttatctacaaaaataattaaaaaattttacaaaaaacttaatggaaaaataccaataattggagttgggggagttgactcgggagaagccgcttttgaaaaaatagctgcaggagcttctgctattcaattatatactgggatgatttataaaggccctatgatagtaaaagagataaaaaaaggtttgattgcaaagttaaatgaaaaaggcttcaaaaatataagtcaagctgtaggatcaaactctaattag

SEQ ID NO: 217887 - DNA, 748 bp, Unknown
  Bacterial polypeptide expressing nucleotide sequence isolated from the Sargasso Sea
gactcgaagaaatgaagctctgattaatagactaggttttaacaattctggttcagaagaaattagcaagagaattaaggaaaataataaaaaaggttttttaggaataaatattggaccaaataaagattccacagatagagatgaggattatttaatttgttttcgtaaattttataatttagctgattatatcacaataaatatttcctctccaaacacagaaaatttaagggactttcataaccaggatgaactcaattcattgattagtaaattaaaaaatgaaaaaaaagagttaaattctaaagttccactagcaataaaagtttcacctgatttgaatgatgatcagattaatgaagtgtctaaaattattttagaacaagaaataggaatagttgttgtttctaatacaacagataagaatagagaaaatttaaaaaatataaataaactagaaaagggtggactgtcaggtaaaccaattgaaaaaatttcaaacgaggtaatttctaaattttataaaattttaaaagataagacaaaaataataggagtaggaggtgtgagcaatggacaagatgcttttgaaaaaatcacctctggcgcaacacttgtacaattatacactggaatggtttatagaggtcctcgtatagcttcaaaaataagtaaagaattaattaatttattaaaaaataaggggtttaaaaatgtttcagaggctattggaactaaaaattaa

SEQ ID NO: 217888 - DNA, 257 bp, Unknown
  Bacterial polypeptide expressing nucleotide sequence isolated from the Sargasso Sea
tttgagtttttttcttaaactatttaaattactcccaccagagctatcccattctttttcattaaattctttaaatattttatataaacttaaaatccttaaattttttattaaaagaccatcaaatgaagaaagctttgatttcgccggcttaagatttaaaaatagattaggaactgctgcgggacttgataaaaatggagattatatagattcattgggagagcttggatttggttttttggaagttgggacaa

SEQ ID NO: 217889 - DNA, 498 bp, Unknown
  Bacterial polypeptide expressing nucleotide sequence isolated from the Sargasso Sea
tttgaaaaattacttatataacattcttctagccaccttaagaattcttcccccagagatggctagcaaaattagcctgatctttttgaaagctttttttaaaattttgaatagacaagattcgaattctttcaaatattctggaactcagaaagtaaaattcaagcatttaaattttaataacccattgggtgtggctgcagggctagataaagagggtaaatacttccccgccttagcctctttaggtttttcctttgtggaggttggaacatttactcctaagaaacaaaaaggaaatgaacatccaagaataaagaggaatattcaagaaaaatctttgattaacagactcggctttaataatcctgggattatttgcggagttgataacataaaaaaaaataaaaggaactttagcggtgtgcttggtgtcagcatcggcaaaaataaaactacgtctctcgatagggcatttgaagattatttatattgcct

SEQ ID NO: 217890 - DNA, 628 bp, Unknown
  Bacterial polypeptide expressing nucleotide sequence isolated from the Sargasso Sea
aataaaaatagtgaaaatagattagaggattatattttgtgttttaaaaaatttcatattattgcagattatttaactataaatatttcttctccaaatactgaaaacttacgagattttcatgatcaaaatcaattgaatgagcttttatcagctatagttaatgaaaaaaataatttaaattctaaaactccgatagctgtaaaagtatctcctgatattgatgataacaacatagataagattgtggagacactaattaaatatcaaattgaattagttatagtttctaatacaactgatagaaatagaaaaaatttaattaacataaacaagttagagaagggtggtttatctggaaaaccaatagaagacttatcaaatttattaataaataaattctataaaaaattgaataacaaagttaaaataattggagtaggaggaatagactctgggaaaagtgcttacgacaaaattattaatggtgcatcgttaattcaactatataccggaatggtttaccaaggtccaaatatagttaataaaatcactaatgaattaattgatatattgaataataatggatttaaaaatatatcagacgcaattggttcaaaaaattgaa

SEQ ID NO: 217891 - DNA, 445 bp, Unknown
  Bacterial polypeptide expressing nucleotide sequence isolated from the Sargasso Sea
aagtaacaagccaatatttataaaaatttcacccgatttagaggatgagcaattgagagatattgcactaatgtcacttgccaataatgtcaatggtttaattatttcaaattcaactcttaaacgaccaaacacattgtcttctttatataaaaatgaaataggtggtttaagtggaaaacctctttttatagactctactataattttaaaaaaaatgtactcacttacaaatggtcaaattcctttaattggagtaggaggtattagtaatgctaacgagtgttatgagaagattaaagctggagcaagtcttgttcaattgtataccgctcttgtatatcagggcccaaaagtaattagtaaaattattaaagaacttaacggtctaattttaactgatggttataaaaatatatctgaagcagtaggtaggtcttcttaa

SEQ ID NO: 217892 - DNA, 715 bp, Unknown
  Bacterial polypeptide expressing nucleotide sequence isolated from the Sargasso Sea
aaccaatcatggagcaaaaattatttgtgatcgtataaaatcaaaagataaattgggattacttggtgttaatataggacccaacaaagactcaaatgataggttgaatgactatctaattggtttaaaaacttttcatgaagttgcagattatgtaacagttaatatttcgtctccaaatacagaaaatttaagaaattttcacgaagaaaataaattacaggaattactaaaatcaattctaaaagaaaaaaatgatttaaattcagacattccaatagcagtaaaaatttcaccagatatagatgaaagccaaattaacttaatttcagaaattcttttgcaaaataaaatagatgctattattatttctaatacatcggaatcttcaagagatatgctaagtaatattcaaagacatcaaaagggaggattatctggaaaacctattgagacaaaatcaaatattttaattaataaattttacaaattattgaaaggtaaaataaaaattataggagtaggtggtattgactctggacaggcagcgtacgataaatttattgctggcgcagatattattcagctgtacaccggaatggtttttaaaggtccaaatattgctggtattataaaaaaagatctaaaagatttgttattgagagatggagtcaaaaattttacagaaattataggaaataaaaccttatcttaa

SEQ ID NO: 217893 - DNA, 205 bp, Unknown
  Bacterial polypeptide expressing nucleotide sequence isolated from the Sargasso Sea
tattggtgtgggtggaattcattcagcaagagcggcatgggagagaattacagctggtgcatcactggttcagatttatactgggtggatatttgagggaccaaatttagttccagacatactagatggattaatccagcaaatggaaaaacatggattccgaaatattaaagaggccatcggttccgaagaaccatggaagtaa

SEQ ID NO: 217894 - DNA, 211 bp, Unknown
  Bacterial polypeptide expressing nucleotide sequence isolated from the Sargasso Sea
aatgagaagcacagaaattattagattaattcatgactattctaataaaaagcttccaattattggagttggagggattatgtcaactcaagatgctttagataaacttaaggctggcgcaagcttaatacaactatatactggctttatttataatgggccatcatttgctagagatattaataaagaaattattaaatctttaaattaa

SEQ ID NO: 217895 - DNA, 281 bp, Unknown
  Bacterial polypeptide expressing nucleotide sequence isolated from the Sargasso Sea
gatgttttctaaattaagaccttttatatttaagttagatccggaattagcacatactttagcaatcaaagctttaaaatttaattttaaatcgattaaaaatattaaaaaaaataactctatagaaaatactttacttggaaaaaaattttttaatccaattggtatagctgcaggttttgataaagatgcggaggtttataactctttatttaaattaggttttggtttcgtagaagttggaacaattacacctctaaaacagtacggaaatccaaaaa

SEQ ID NO: 217896 - DNA, 316 bp, Unknown
  Bacterial polypeptide expressing nucleotide sequence isolated from the Sargasso Sea
tatgagctttaaaacattatcttatgcgcttaattttttgcccccagaagttcttcacagtctctttataaaatttctgcagacaaggctttataataaaaaaccaaagtttaagaatttgaaaaccactgcatttggaaaagaaattaataatcctttaggtttggcagctggttttgataaaaatgccgaagtaattcagggggcactccaactgggctttggttttcttgaattaggaacagttacaccgatgccacaggtaggaaatccaaaacctagagtttttaaaatcccagagtttaatgctgttata

SEQ ID NO: 217897 - DNA, 646 bp, Unknown
  Bacterial polypeptide expressing nucleotide sequence isolated from the Sargasso Sea
atggactctagtctggaaaccactcttggttcactaacactaaaacgccccactgtcttagcatctggaattcttggtatttctttggatgttttcaatagattacatgatgcaggcgctggtgcagttgtaacaaaatcattgagtaaagagccctgggaaggatatccgaacccaaccattttcagtgtgaaaggtggagggtggataaatgcagttggattatcaaatcctggtgcagaaacttttgcaaaaatgattgaaccaaatgataatgtcccaatagttgtgagtcttgttggctctgttgaggatgattttgaatatatgataaaaaaatttgaaaattgtaaagttgcagcatatgaactaaatctttcatgcccccatgttgccaaagttggattagaagtcggtgatgatattgaacttgtctcaaaaattattaaaaaagtcaaatccattacaaattcacctattgtcgccaaagtaggtctaggaaaatctgattatcttgcaactgttgatgctgctgtgtctgcaggtgttgatgcaattactgctattaatacagttagagcaatggcaatagatgttgaaacacaaatgccaattctcagcaataagattggtggactgtctggta

SEQ ID NO: 217898 - DNA, 538 bp, Unknown
  Bacterial polypeptide expressing nucleotide sequence isolated from the Sargasso Sea
accattaaaacaatatggaaatgaaaaaccaagagtatttagattggtagaagatcaagcgttaattaataggctaggttttaacaaccatggatcagatataatattgaatagaataaaatctaataaaaaattaggtatgctaggtgtcaatgtaggtccaaacaaagattctaatgataggttgaatgattatttgattggattagaaaaattttctcaagttgcagactacattacaattaatatttcttcaccaaatactgaaaatcttagaaattttcatgatgaaaataaattaaaagaattactaaaatctatttttgagaaaaaaaaaaatttaaaaactgaaattcctatagcagtaaagatttcgcctgatataaacgaaaatcaaattgacttaatttcagaaatacttttaaaaaatgaaataagcgctataataatttcaaatacttccgaagcttctcgggaaacacttcaaaatatacagagacatcaaaaaggtggtttatccggaaaacctattgaaaaa

SEQ ID NO: 217899 - DNA, 214 bp, Unknown
  Bacterial polypeptide expressing nucleotide sequence isolated from the Sargasso Sea
atgtattcaatatttaaaccgtatatcttttcattagatcctgaaattgcacatgatttagcaattaaatctctgaaatttaatgttttacctaaaagtatttttaatgtgcaaggtgaagaacaactagaaacaaatttattaaatgaaaaaattcctaatccgattggtcttgctgctggatttgataagagcgcagaagtctataactctt

SEQ ID NO: 217900 - DNA, 598 bp, Unknown
  Bacterial polypeptide expressing nucleotide sequence isolated from the Sargasso Sea
atggactccagtctggaaactactctcggttcgctcaaattagagcgtccaacagtattggcctctggaattcttggaatttctttagatgtcttcaaacgtttgcatgatgctggcgcaggtgcagttgtaacaaaatcacttagtaaggaaccatgggagggttatcctaatccgaccatcttcagtgtaaaaggcggtggttggattaatgctgttggactctcaaatccaggtgctgaaacttttgcaaaaatgattgaaccgaacaaaaatgtcccaatcattgtaagtttagttggttcggtagaagatgattttgaatatatgattagaaaatttgaaaattgcaatgttactgcatatgaattaaatctgtcatgcccacacgttgcaaaagtaggattggaggttggagatgatactgaactggtatcaaaaattattaaaaaagtcaaatccattacaaatgctccaattcttgctaaagtaggacttggaaaatctaattatcttgatactgtagatgcagcagtatctggtggtgttgatgcaataactgcaattaatacagttagagcaatggcaattgatgttg

SEQ ID NO: 217901 - DNA, 434 bp, Unknown
  Bacterial polypeptide expressing nucleotide sequence isolated from the Sargasso Sea
tatgagtggcccccttgcgatggaattctgtgggctaaaattgtcctctcctgtgatacttctatcaggatgtgttgggtttggcgaagaatacacccgaatagagggtttctcgaaccttgatgttggagctatcgtattaaagggcacaacgctagagccgcgtttaggcaatcctgcccatcgcgtatgggaaacgccttctggcatgcttaatgctattggccttcaaaacccaggcgtaaaaaaagttattacagatattcttccaagcttaaattttgatgaaacacgcttcattgcaaatgtttgcggctccaccatcgaagaatatgcagaagttacgcgttattttgatgattctccgattgatgcaatggaaatcaacatttcatgtcctaatgtaaaagaaggtggcgttgcttttgggaatg

SEQ ID NO: 217902 - DNA, 456 bp, Unknown
  Bacterial polypeptide expressing nucleotide sequence isolated from the Sargasso Sea
aaatagcaccagatttaagccttaaagatattgacgatatttgccaattaataatagaggaaaacatcgatggaataattgctactaacaccagtattgatagattaggtcttgaaaatagaaaaataagtcaaaccggattattactatctgaagagaatggaggcttaagtggaaggcctctacaaaaaaaagcaaatcaaataataaaatatatacataatattgataaaaatattattttaattggcgttggtggaatcgatagtcctgagtcagcttgggaaagaatttgttctggagcatcattaattcaactttatacaggctggatatataagggtccacaattagtacccgatattcttgaaggaattataaagcaactcaataaccataaattatcaaatataaaagaggccattggatcagatttaaaatgggttgaagaataaa

SEQ ID NO: 217903 - DNA, 631 bp, Unknown
  Bacterial polypeptide expressing nucleotide sequence isolated from the Sargasso Sea
ccaaacaaagattctgaaaatagaatagaggattatgttaattgttttaataaatttcacagcttagctgattatataacaataaatatttcttcgcctaatacagaaaatctcagggattttcataaccaagatgagcttaattcattggtaaaagaactgaaaaataaaaaaaaaaaattaaattcaaaaattccaattgcagtaaaagtatctccagatttaaatgatgaacaaattgaaattgtttcaaatattttattagatcaggaaatagaaattatcattgtttcaaattcttctgataaaaatagagataaattgaataatattaataaattagaaaaaggaggtctttcaggaaaacctctatatgagatttcaaataatataattagtaaattttataagcttcttggtaataagataaaaataattggagtaggaggggtagattcaggtgaaactgcttttgaaaaaattattagaggagccagtctagttcagctttatactggcatggtttataaaggcccaggcatagcttcctcaattagttctgaattaattgatatattgaaaaataaaggttttaaaaatatttcagaggctgttggaacaaaatattgaa

SEQ ID NO: 217904 - DNA, 262 bp, Unknown
  Bacterial polypeptide expressing nucleotide sequence isolated from the Sargasso Sea
atgcttcagcttttgccaccagaaactgcccataacgtcacaataaaattaacaaaatatggaagtccattactaagtaaaggttttcaagatcaaagtttgcatactaatgttaaaggcctaagcttcagtaacccactgggaattgctgctggctttgataaaaacgctgaattaatagaccctctattaaaaattggatttggatttgtggaatgtggaaatgttacaccgaagccacaatatggaaacgcaaagccaa

SEQ ID NO: 217905 - DNA, 280 bp, Unknown
  Bacterial polypeptide expressing nucleotide sequence isolated from the Sargasso Sea
atgaacccatttttctttcttccgccagaaactgcgcataagcttgccttatggggcgtgaaaaacggccttgctgggcgcgccaaaaaacctgcgtctttgcgtaaaaaaattggcggcatgacattcacatcacctgttggattatccgctggcgcagataaagaaggcgttgcgctgcgcgggtggagcgcccttggctttggctttgtcgaggctggcacagtgaccatgcatccacgcgatggcaacccggcgccgcgcgtatggcgacaaccct

SEQ ID NO: 217906 - DNA, 868 bp, Unknown
  Bacterial polypeptide expressing nucleotide sequence isolated from the Sargasso Sea
tttgaatctaatggatacacctggacatgtagattttggttatgaggtttctaggtcgttagcggcgtgcgagggatcgctgttaattgtggatgctagtcagggggtagaagcacaaactttggcaaacgtatatcaagcgattgatgctgaccatgagatagtgcctgttttgaataagattgacttgcccgcagcagaacctgataaagtaaaaatacaaattgaagaagtcataggtttgcccgcagatgaagccattaccgcgtcagcaaaaaccggtcatggtatcaacgaaatcctcgaggcgcttgtcaaacgattaccatctcctcaagggagtgctgaagccccgctgcaggctttattagtcgatagctggtatgattcatatcttggtgttatgacgttggttcgggtgcggcatggtgttgttaaaaaagggttaaaaattcgaatgatggcgactggggctactcatgtcattgaacgtgttggagtttttgcaccaaagccagttgctcgggaaaagcttggtcctggtgaaattgggtttataaatgctggggtgaagcgcgttgctgatgcaaaggttggtgatacgattaccgacgaacgccggcaaactgagatagctttgcctggtttcaaaccatctattcctgttgtgttttgtggcttgttcccactggatacaaatgaattcagtggccttcgtgaagcgctggagaaactggcgcttaatgacgcatcgttttcgtttgaagcggaaacatccgctgctttaggtttcggctttcgatgtggatttttaggtttgttacatatggaggttattcgtgaacgactgagtcgtgagtttatctgg

SEQ ID NO: 217907 - DNA, 745 bp, Unknown
  Bacterial polypeptide expressing nucleotide sequence isolated from the Sargasso Sea
ccagaagatgatgccttgataaataggcttggcttcaacaacgatggaatggaaattatttatgataggctatccaaaactaaaaaaagaggtacagttggaataaatattggggcaaataaggatacgaaagatagattaagcgattatcagattggaattaaaaaattttccacaattgctgattatattacaattaatatctcatcaccaaatacaccaggtcttagggatcttcagtcaggtcaacatttccaagaattaataaaattaattaaagcccataagatagatggtctcaaaactccaattttgattaagttagcccctgacttaactaaaaaggagctagaaataattgtaaacctctcaatagatggtggcattgatggcttgatcctatcaaataccacagttgaacgaaaagatattatgaataaaaagttcatcaacgaagagggtggtctttcaggtagaccattgatgcaaaaatcaacaaaaatgttgagagatacctataaaatatcagagggaaagataccccttattggagttgggggtatattcacaggtcaggacattattgagaagatacggaatggcgcgtcactgatacagctttataccgcaattgtttatgagggaccaacgctgataaataaattaaaaaaagaattgataattgaggtcgagcgatatggagttaaatcgataagcgaacttattggctcagatataaaataat

SEQ ID NO: 217908 - DNA, 325 bp, Unknown
  Bacterial polypeptide expressing nucleotide sequence isolated from the Sargasso Sea
aatgcgatcaaagacaaagatatggctggacttgaaaatgtgactgaagaaaattgcaaacttatgcataaagtaatgaaaacctctaagccttctatttcatatatgacggatgtaacccatagttgcctttcagaaattgagaatcttcggtcattaggccatagtcttttctacacaatagatgctggaccccaggtaaaaatcatatgcgacccaaaatcaaccgagattattagggacacgatcattgataaaacaactgtaatggatgtcattcatgctggcttaggaggtccgccgagaatcatcgatgaagattgag

SEQ ID NO: 217909 - DNA, 475 bp, Unknown
  Bacterial polypeptide expressing nucleotide sequence isolated from the Sargasso Sea
atggccaacaaaaatacaataacaacagaattcttgggactcaatctagcctcgccaatcgttttgctttctggttgcgtgggttttggcgatgaatatacaagacttgagggcttttcaaatgctgatatcggtggagccgttctaaaaggcaccactctggaaccacgcttgggaaatgctcctcatcgtgtttatgaaacaccatcgggaatgttgaactctattggattgcaaaaccctggtgctcacgaagttgttgaaaatattctgccatcactcgagccttttgagactcatttcattgcgaatgtatcgggctcgaccattgatgaatacattgaggtctgcaggatatttgatcaatcaaacatacatgcaattgaattaaatatttcctgtcccaatgttaagaaaggcggcatggagtttgggaatgacccagaaattctgcgcaagttgtcgaggcattaaa

SEQ ID NO: 217910 - DNA, 358 bp, Unknown
  Bacterial polypeptide expressing nucleotide sequence isolated from the Sargasso Sea
cttgctgttataaacacaatcagtggtatggctatagatataaacaaaagagagttaatactgggtaaccatgcaggaggtctttcaggtcctgcgataaagcccatagcccttaaaaaggtttatgacgtctatcaggtttcaaaaaaacatgggattccaattatgggacagggtggcatttcttcgccagaagatgctattgaatttatcttggcgggggcgtcgaccataggtgttggcacagctttgttttttgaccctttggtttgtaaaaaaattaacaatggtcttgaaaaatacctaaagacatctggtcttaatgggactgaagaacttataggtggcctaatctagc

SEQ ID NO: 217911 - DNA, 382 bp, Unknown
  Bacterial polypeptide expressing nucleotide sequence isolated from the Sargasso Sea
gcaatagatacagaaattgatggaattatgcaaacgaatacgacaatcagtcgcaataatctaaaaagtagttatcagcatgaaaaaggcggtctttcgggggcgccaatatttgaaatgtcaacgcgtgtgcttgcgcagctttattctattacagaaggtaaaataccattaattggtgtcgggggcgtatttacaggtgaacaattatttcaaaagatccaagcaggggcgtctctagtacaaatatactctgccttaatttattcaggattttctgttactaacaaaattttaagagaattagatatttctttgagggaaaatggttttaaaaatgtggaagaggcagtcggaactggtgtagataaatggctttgaa

SEQ ID NO: 217912 - DNA, 583 bp, Unknown
  Bacterial polypeptide expressing nucleotide sequence isolated from the Sargasso Sea
tatggccaacaaaaatacaataacaacagaattcttgggactcaatctagcctcaccaatcgttttgctttctgggtgcgtgggttttggcgatgaatatacaagacttgagggcttttcaaatgctgatatcggtggagccgttctaaaaggcaccactctggaaccacgcttgggaaatgctcctcatcgtgtttatgaaacaccatcgggaatgttgaactctattggattgcaaaaccctggtgctcacgaagttgttgaaaacattctgccatcactcgagccttttgagactcatttcattgcgaatgtatcgggctcgaccattgatgaatacattgaggtctgcaggatatttgatcaatcaaacatacatgcaattgaattaaatatttcctgtcccaatgttaagaaaggcggcatggagtttgggaatgacccagaaatgtctgcgcaagttgtcgaggcatgtaaaggggtgacgtctaaaccaatcatcacgaaattatcgccaaaccaagccgatattaaggaaagcgccagaaaatgtattgatgccggaagcgatgcgctatcagta

SEQ ID NO: 217913 - DNA, 856 bp, Unknown
  Bacterial polypeptide expressing nucleotide sequence isolated from the Sargasso Sea
catggtatatttaaactggggattttcatctgttgaagtgggaactgttactccattttctcaagcaggaaataataaaccaagagttttcaggttatataaaaatagagccgtaataaacagctatggttttaataatgacggtatgcaaattgttaaaaatagactgaatgatggcaaaaaaagagaaggcgttttaggagtaaatattggcccaaataaaacatcaaaaaacccaatagaagattttaaagttacctcaaaaaatttatcaaaatattgtgattacataacaattaatatttctagccctaatactccaggtttaagaaacatgcacgataaaaatttattatgtgaagttataagagctactaaagaaggtatttccaaagcaggtagtcataaaccaatttttttgaaaatttcgcctgatgagaaattttctaaaattacagaaattataaatacttcaataaatgaaaatatagatgctcttgttatctcaaatacaacaattgagagacctgtatatttaaacagtaaatatcaatatattaaaggtggattatcaggaaaccctctatttaaaaaatccactaaactgctagaaaatatacataaaataacaaatggtaaaattgatcttgttggtgttggaggagttgaaagtgctaatcaagcatatgttaaaatattagttggtgctaagctagtacaattatatactggacttttgtttcaaggtcctaatattgtaaagattataacatctcaattaagtgaatttcttaaaagagacggttttaattcattagaagacgctgtaggttctctgtcatatgaagaggctgca

SEQ ID NO: 217914 - DNA, 367 bp, Unknown
  Bacterial polypeptide expressing nucleotide sequence isolated from the Sargasso Sea
aatgttttcaaatttaagatctttaatatttaaaatagacccagaaagagctcactttttagcaatacagtcactcaaactcaacctagtttcaaatatctttgatgagcataaaaatgatcctattttcaaaacaaaaatttttaacaaagagttaaacaatccgataggtatagcagcaggttttgataagaatgccgaagtctacaaccctttatttaagttgggatttggattagtagaagttggcactatcacacctttaaaacaatatgggaatagcaaacctagggtttttagattagtagaagaccaagcccttataaatagattgggatttaacaatcatggttcagatgttgtataa

SEQ ID NO: 217915 - DNA, 658 bp, Unknown
  Bacterial polypeptide expressing nucleotide sequence isolated from the Sargasso Sea
aaaggtatattaggagtaaatattggcccaaataaagaaagcaaggatcaaaaaaatgatttttgcctagggttaaaaaatttttttgatatagcagattatattactataaatatttcctctccaaataccgaaggtttaagagatttccatgatcagcaaaaacttgtagatctcattatttcgttaaataaaataaaagaagatcacgcaaccaatatcccgttattgttgaaaatttcaccagatattaataatagttatgttccagaaatagcggaaacagcaataaaaaataatatttctgcagtaatacttacaaatactacaaatggtaatagagataatttatcaagtgaatttaaaaatgaaaaaggaggtctgtccggcgatcccttgcgtcaaatatcaaccaatatgataaaaacattttataaagaattaaatggtaaaatacctattattggtgttggtggagttaactcaggaaggtctgcatacgaaaaaattattgcaggcgcctcattattacaactttatactagttttgtttatagaggaccttctgcagcaaaagatataaaaaaagaactaatacaaattttaaaagctgacgggataaagacaataaaagatattattggcaagggtatatagt

SEQ ID NO: 217916 - DNA, 388 bp, Unknown
  Bacterial polypeptide expressing nucleotide sequence isolated from the Sargasso Sea
ttgaaaattttatttaataaatttctattaaaattggcaaaactcatagatcccgaaagagcgcattttatttctttgctatatttaaaatttaattttttaaataagttattttttaaaaaaaactttaaaagtttaaatactactttctgtaacataaagctaaaaaatcctattggtgttgctgcaggattagacaaaaatgcagaagccattaaggggttatttaatcttggggtaagtttagttgagattggggctgttactccaaaaattcaatatgggaatagaaaaccaagagtttttagattaaatagcgattttgctataataaatagacttggctttaacaacctaggaatgaaaagggttaaaagtaatctaaaaa

SEQ ID NO: 217917 - DNA, 547 bp, Unknown
  Bacterial polypeptide expressing nucleotide sequence isolated from the Sargasso Sea
tatggccaacaaaaatacaataacaactgaattcttggggctcgacctagcttctcctattgttttactttcaggctgtgtgggctttggtgatgaatacacaagactagagggtttttcgaatgctgacattggtggagcagttctaaaaggcaccacattggagcctcgtctaggcaatgtcccacatcgggtttatgaaactccgtctggaatgcttaactcgattggcttacaaaatcctggtgcgcatgaggttgtagaaaacatcttgccatcactcgaaccttttgaaactcacttcattgcaaatgtatcaggctctaccattgatgaatatattgaggtctgcagaatatttgaccaatcaaacatcagcgcgatcgaattaaatatatcctgcccaaatgttaaaaaaggtggcatggagtttggaaatgatcctgaaatgtctgcacaagtcgttgaggcttgtaaggctgtaacatccaagccgatcattacaaaactttctcctaaccaggctgatataaaagaaagtgcctga

SEQ ID NO: 217918 - DNA, 239 bp, Unknown
  Bacterial polypeptide expressing nucleotide sequence isolated from the Sargasso Sea
taaaatcttttataaacagttgaaaggcaagataccaataatcggcgttggaggaattgactctggattaagtgcgtttgaaaaaatagaggcaggagcttcagctgtacagttatatactggcatgatttataagggccctacgattgtaaaagaaatcaaaaaaggactaataaatattttaaaagaaaaagggtttaataatattaatgaagcaataggatcatcttctaattaaa

SEQ ID NO: 217919 - DNA, 574 bp, Unknown
  Bacterial polypeptide expressing nucleotide sequence isolated from the Sargasso Sea
gatatagcagattatataactgtaaatatttcttcaccaaatacagtgggtttaagggattttcatgaacaagaaaagcttgaagatcttttaaatgctctaaataaaataaagaaagataagggaaccaaaattcccttattgttaaaaatttcaccagatattaaagaaagttatattcgggagattgctgaaatagcaataaaaaataaaatttctgcagttacagtgacaaatactacaaatgggaatagagacaatttgataagcgaattgaggaatgaagaaggggggctttcaggaaatcctttagatagaatatcaacaaatatgatcaaaaaattttataaagaactaaataataaagttccaatcattggagtaggtggaattagctcaggaaaatctgcctacgaaaaaattaccgcaggagcttctttacttcaactttatactggctttgtttataaaggcccttctacggcaaaaattatcaagaaagaattaattcaaattttaaagtcagaaggaatagaaaatataaaagatgctgttggtaaattagttaattagc

SEQ ID NO: 217920 - DNA, 505 bp, Unknown
  Bacterial polypeptide expressing nucleotide sequence isolated from the Sargasso Sea
taattataggtgcagccagattcttaaagagccagaatggccactggatgtacttatttgtattgtttcaaaagagccaaaaaaaattagctctagagagggtatggaaatttctaaaaaaacatcaccaatttatcaagattggctcgatgtcaatgagaagcatataaatctcgcactaaatgcgatcaaaggcaaagatatggctagacttcaaaatgttactgaagaaaattgcaaactgatgcataaagtaatgaaaacctcaaaaccttctatttcatatatgacagatgtaacgaatagttgccttgcagaaatcgagaaacttcggtcatcagggcacagtcttttcttcacaatagatgctggaccccaggtaaaaattatatgtgatccaaaatcaactgagattataagggaatcgataattgataagacaggtgtaatcgatgtcattgatgctggcttaggaggtccaccaaggatcatcgatgaaagttga

SEQ ID NO: 217921 - DNA, 745 bp, Unknown
  Bacterial polypeptide expressing nucleotide sequence isolated from the Sargasso Sea
gaaaaagatagagcattaattaacagattaggatttaacaacgatggattatatatggtattggaaagacttaaaagaaatgctccaaatggttttttgggggcgaatatcggcccaaataaagatagcattaatagaattgaagattatctaaattgtttgggaaaaattcactcactagtgaattatattacaataaatatatcttcacctaatacacctggacttagagaatttcatgatcaaaaaattttacaaaatcttctacaaaaactaactgagttctccaaaaaaaataaaatcaaaaaacctttagttttaaaagtttcacctgatataacggatgatgaggttagtaatgttattgaacttataaaaaaatttaaaattaatggagttataatttcaaacacaacagataagaatagagaaaaactgttaggaagcaataagaatgaggaggggggcttgtctggtgaaccaataaacaaattatctaacaatctaattaaaaaattttataaagaaattaaaaaggagattacaattattggagtaggcggtgtatgctcaggaataacggcttatgaaaaaatgacttctggggcgagtttattacaactatacactggtatggtttacgaaggaccaggaataatcaaaaagataaaatctgaattaattgatatattaaaaaaagaaaaaattaaaaatgttaatgatattgttggtactagatcataat

SEQ ID NO: 217922 - DNA, 469 bp, Unknown
  Bacterial polypeptide expressing nucleotide sequence isolated from the Sargasso Sea
ttgtcctcctttgcttgtgaaaattgctccagatctgtcaaatgaagaaattgatgacattgctagagtttcaattgataatggtattgatggaataattgcaatcaatacaagcttaaatagatttcacttaaaaaacttaagaatcaaaactggaaatactttagagcaagaaagtggaggcttaagtggactccctttagaaaaaagaggactggaagttatcagaaggcttaggattagcactaataaagctttaccgctcattggtgtaggtggaatcagttcagcacaaacagcatgggaaagaattgccgctggggcatcacttgttcagttgtatacaggttggatatttgaggggccaaatttagttccagaaattttagatggattaaccctgcaaatggacaaacacggattccgaaatattaaagaggtaatcggttcagaagaaccatggaaataa

SEQ ID NO: 217923 - DNA, 699 bp, Unknown
  Bacterial polypeptide expressing nucleotide sequence isolated from the Sargasso Sea
gctctgaaaaagttaaatcaaggattatttcaaattctcccaaaggcttatttggaataaacataggaccaaataaagatacaaataatagattggaagattatttaattggctttcgtacattttataatcttgcagattacttgaccataaatatatcttctccaaatactgaaaacttgagaagttttcataatgaagaagaacttagtgaactattgagtttaatagaaaaagaaaaaaaaatacttaaaacttcagtgcctattgctgtaaaaatatctccagatatagaagataaaaatattaatataatttcagatttacttttaaagtatagtgtcgaagcagtaataatttcaaatacaactgagaaaaatagagaaaatctatctaacattaataaattagaaaaaggaggtttgtcaggaaagcctttggaaaatagatcaaatgaactgattaataaattctacaaaattttaaaaaataaaataaaaatcattggtgtaggaggagttgattctggtcagagtgcttatcagaaaataattaatggagctagtttagtccaactttatactggaatgatttatcaaggccccaaaattgcatcaaaaattagtgaagaattaataaatattttagataaagagggagcaaaaaatatatctgatgtagtaggaagtaaaaattgat

SEQ ID NO: 217924 - DNA, 271 bp, Unknown
  Bacterial polypeptide expressing nucleotide sequence isolated from the Sargasso Sea
atgtatcctatctttcgatttttgctatttcttttgcccgcagaaagtgcccatgttgttgctcttaaaagcctcaagtggctacagcgctggcatctgttaaaatcagtgcctcaagatcctggctgtggttttagctatcaaggcctaagatttaaaaatcgtattggtcttgccgccggtcttgataaaaatggcgattatatcgatgcccttggcgctctaggctttggcgctatagaaattggaacttttatttctaggctgtaac

SEQ ID NO: 217925 - DNA, 324 bp, Unknown
  Bacterial polypeptide expressing nucleotide sequence isolated from the Sargasso Sea
aatgttaattaatttattaagattattgcctcctgaaactgctcatcaaataacaataaaattattgaaatataacttagacttatctagaaaaaaaaatttagaatttaatgcgttaaaacaaactattctaggtatagattttcaaaatcctttaggattagcagctggttttgataaaaatgccgagattattaaaccgatgttatcgtatggatttggttttattgaagttggaactatcacgcctaaaccccagagaggcaatcaaaaaccaagaatttttaggtttgtagaggatgaagcagtaattaaccacctaag

SEQ ID NO: 217926 - DNA, 274 bp, Unknown
  Bacterial polypeptide expressing nucleotide sequence isolated from the Sargasso Sea
aatgagttccgcagttgattttgtttttcacaaacttcgacctataattttttccagtgatgccgaaaccgcacatgatagaatgctgtcttcggttgagatgatttcaaaatttccaggtgtaatccattttttgagatggcaattccgggaagaatctcccgttctaaatacaaatctttttgggataaaggtaaataatccaataggccttgcggcaggatttgacaaagacggacgtatatatccatctttattcgctctaggttttggt

SEQ ID NO: 217927 - DNA, 670 bp, Unknown
  Bacterial polypeptide expressing nucleotide sequence isolated from the Sargasso Sea
agcaaacagggtactctaggagtaaatatcggacctaattatgatagcaaatcttatgaggctgacttttgtaagtgcgctaaacaacttattaaattttctttagcagattatatcactataaatatttcttcacctaatactgaaaatttaagagattttcatgaagaaaataaacttgagtctttaattgaagatttgaataaattaaaaaaagaatttaatagttctataccaatttttttaaaggtttctccagacataaaagattcttcaattgaaaatatatcgtcaataataattaaccaaaatataaatggaataatattgactaatactacgaatgaaaacagattatcattaaaaaattacaataaaaatcaagtcggaggtttatctggaaaaccaattagagatctatcaaatagaataataaaaaaattttataaaaaattaaaaggtaaagtttttattataggagtaggaggaatagactctggcaaaactgcttttgataaaattgtttcgggtgctaatgctgtacaattatatactggaatggtttataaaggaccaggtgtagtaaaagaaattaaaaaagatcttattgaaattttaaaaaaagagaaaattaaaaatatatctgaagctgttggaattaattcttagt

SEQ ID NO: 217928 - DNA, 614 bp, Unknown
  Bacterial polypeptide expressing nucleotide sequence isolated from the Sargasso Sea
cattgatgattatcttttaggtatggaaaaattgggcagcctatctagttatattacaattaacatatcctcacccaatactgaaggactaagagaattacagttaaaaggtaaaattgaaaaattgattaaaaaaattttacaaaaaagagaacaaattgaaagtattaataaaaaacctgttctaattaaaatatcgcctgatttaaatgaagatcaattgagggatatagcacttatttctcttgctaataacattgatggattaatattaacaaacacaactgcagaaagaacaaataaattgatatcaaattacaaaactaaagtaggagggttaagtggtaaaccattatatttaacatcaaacactattttaaaaaaaatgtataatcttacaaatggacaaattcctttaataggtgttgggggtatttcaagtggtagtgattgctacaataaaattaaatccggggcttctctaatacaattatataccgctttgatatattctggccctattttgataacaaatataaaaaatgaattaatagatttaattaaaactgacggttataaaaatataagcgacgtaataggtaaatcagtttaat

SEQ ID NO: 217929 - DNA, 652 bp, Unknown
  Bacterial polypeptide expressing nucleotide sequence isolated from the Sargasso Sea
tctggccgctaactctgatagcacagacccaagcaatgactttgaaggtttggtagataaatttgcttctcaaattgactttttaaccgtggacatatcttgtcctaattcaaaaaatggcctggtctttttgtctcctaaacctctaaaaaacttacttaataaactaattgaaataagagatcgaaaagacctacaaaaacctcccgctttattagtaaaattatctccagatattgaatatagagaactagatatacttgttgaggtaatcgtaaatgcgggcatagatggaattacaatttcaaacactacagtcaaacggcccaaagatctcacaagccccagaaaaaacgaggttggaggactatcgggtaaacccctgttcctaatttcaaccgagatgttacgatatgtgttcaagataacaggaggcaatattcccctggtgggagtgggggggatttcttctggtgctgacgcttatgaaaaaatctgtgctggggctagcctggttcaagtatatacagccttagtttacaatggccctaaacttatatttaacataaagaatgatttggccaagctactagaatcaaatggtttttcatcaatcaaagatgcaatcggcagtaaaaataagatagactaa

SEQ ID NO: 217930 - DNA, 307 bp, Unknown
  Bacterial polypeptide expressing nucleotide sequence isolated from the Sargasso Sea
atgcttcagcttttgccaccagagactgctcataacgtcacaatacaattaacaaaatatggaagttccttactaagtaaaagttttcaagatcaaactttgcatactaatgttaaaggtcttagcttcaataacccactgggtattgctgctggttttgataaaaatgctgaattaatagatcctttattaaagattggatttggatttgtggaatgcggaactgttacaccaatgccacaatttggaaatacaaagccacaaatttttagattaaaaaaggataatgcaataattaatagattag

SEQ ID NO: 217931 - DNA, 706 bp, Unknown
  Bacterial polypeptide expressing nucleotide sequence isolated from the Sargasso Sea
ggaagtaaaaaaataagtttaagaatagaaaaaaatagaccaagaggattattaggaataaatattggaccaaacaaagatacaattaatagaatcaatgactatgtggaatgttttaaaagatttcataatttagcagattacttaaccataaatatatcatcaccaaatactgagagtttgagggattttcacggtcaaaaagaactacaagatttactactagcaattaataacgaaaaaaataatcttgattcaaaaattcctatagcagtaaaattatcacctgacttaaatcaaaatcaaatcgagaatgtatccgaagttttaatagaaaataaaataagtatcgccattatttcaaattctacagataagaatagagaaaaattaatcaatataaataaactggaaaaaggtggattgtccggaaagccattagaaaatatctctaataatataatcaatagattttataaactaattgggaaaaatattaaaattataggagtaggtggtgctgactcagctgaaggggtatatgaaaaaattttaaatggagctagtctcgttcaattatacaccggaatggtatataaaggtcctcaaatagcagctcagataaataaaaaattagtaaaaattttagaaaaagatgggattaaaaatataggagaaatagttggatcaaaaaaatcatcttgac

SEQ ID NO: 217932 - DNA, 595 bp, Unknown
  Bacterial polypeptide expressing nucleotide sequence isolated from the Sargasso Sea
tatctagttggatttaataaattttataatttagcagactatataacaattaatatttcatcaccgaacacggaaaacttaagagattttcacaatttagatgaattaggaaatttattagataaaattttttctgaaaaaaaaaaattaaatagcgatattccaattgctttaaaggtttcgccagatattgataataatattgttaaagatatatctaaaatattaatacaatataaagtcaatgcgttaattgtttcaaatactaccgatcaaaatagagataaccttaaagaccatcaaaaatttcagaaaggtggcttatcgggcaaacctttgaacgatatatcaaataaattgataaataatttttttaaaaatctaaatggacaaataaaaattattggtgtggggggtgtggaatctggagaaacggcatacaaaaaatttttgagcggggctaattttgttcaactttatacaggcatggttttcagaggacctaaaattgcgataaaaattaatgaagaacttaaaaaaatattaaaggaaaaaaaaataaaaaattattctgatattattggtaaattataaa

SEQ ID NO: 217933 - DNA, 646 bp, Unknown
  Bacterial polypeptide expressing nucleotide sequence isolated from the Sargasso Sea
atgaataatattttagtaaatattcttaatcttttagatccagaaatggcacataaatttgcaatttatgcaatttcttctgaaatgattgagaataaaaatttatctaaaattccaataaaattaggaaatttaaaatttcaacatccaattggtttagcagcagggtttgacaaatctgctgagtgtttttctggagcatttaggctaggcttttccagtgttgaaatagggactgtaacacccttaccgcaatccgggaatgataaaccaaggatttttcgtttaaaggaatataatgctctaataaataggtatgggtttaataacgatggtatggcagttgtaattaatagaattaagaaaaaatctataagtcaaaagggaatattaggcgttaatattggacctaacaaaaatagtcaaaatccattaaaagattttaatattttatcttcaagactatgtaattatgttgactatctcgctataaatatttctagtcctaatactcctggattaagaagttttcatgaaaaaagttcgcttattgatgtgatagattcttgtattgatggaataaaaaaatctaaacatgataagcccaatatttttaaaaatttcaccctgatattacttctaagga

SEQ ID NO: 217934 - DNA, 409 bp, Unknown
  Bacterial polypeptide expressing nucleotide sequence isolated from the Sargasso Sea
ttaaattgtttaaggaaatttcatgatattgctgattatattacaataaacatttcatcaccaaatacggagaatttaagagattttcataacaatgaagaattaaaaaatttgttggaaagtattcataacgaaagagaaaagttgaaaagtaatattccgatagctattaaaatttcaccagatataaatcaaaaaaaagttgaggaaatctgtagaacaattttggattatgatattaaagctgtaattgtctcgaacacgacagatggtaaccgtgatagtttgaaaaatcacaagaaatttcaaaaagggggactttcaggaaaacctttgaatggaatatcaaataaattaataaacaatttttataaaatattaaatactaagattgatataataggtgtag

SEQ ID NO: 217935 - DNA, 526 bp, Unknown
  Bacterial polypeptide expressing nucleotide sequence isolated from the Sargasso Sea
atggactctagtctggaaaccactcttggttcactaacactaaaacgccccaccgtcttagcatctggaattcttggtatctctttggatgtttttaatagattacatgatgcaggcgctggcgcagttgtaacaaaatcattgagtaaagagccttgggaaggatatccaaacccaactattttcagtgtgaaaggtggagggtggataaatgcagttggattatcaaatcctggtgcagaaacttttgcaaaaatgattgaaccaaatgataatgtccctatagttgtgagtcttgttggctcggttgaggatgattttgaatatatgataaaaaaatttgaaaattgtaaagttgcagcatatgagctaaatctttcatgcccccatgttgccaaagttggactagaagtcggtgatgatattgaacttgtttcaaaaattattaaaaaagtcaaatctattacaaattcacctattgtcgccaaagtaggtctaggaaaatctgattatcttgcaactgttg

SEQ ID NO: 217936 - DNA, 743 bp, Unknown
  Bacterial polypeptide expressing nucleotide sequence isolated from the Sargasso Sea
tttgcataatgctggcgctggtgccgttgttacaaaatcacttagtaaggaaccgtgggagggctatccaaatccgaccatctttagtgtaaagggtggtggttggattaatgctgttggactttcaaatcccggtgctgaaaattttgcaaaaatgattgaaccaaacaagaatgtcccaatcattgtaagtctagttggttctgtagaagatgattttgaatatatgatcaaaaaatttgaaaattgtaatgttactgcatatgaactaaatttatcatgtccgcatgttgccaaagtaggattggaggttggtgatgataccgaattggtatcaaaaattattaaaaaaatcaaatctattacaaatgttccaattcttgccaaagtaggacttggaaaatctaattatctcgatactgtagatgcagcagtatctggtggtgttgatgctattactgcaattaataccgttagagcaatggcaattgatgttgaaacacaaatgccaattttaagtaataaaattggcggattatctggtactccgattaaacccattgcattaagatgcgtatatgaaatatcttcgaaatttgatattcctataatgggatgtggtggaatctctaattgggaagatgctgttgaattcatcttggcaggctcctctgcagttcaatttggtagtgtcatgggtgatcattgggttgaaacttttggagaaattaattctggaattc

SEQ ID NO: 217937 - DNA, 802 bp, Unknown
  Bacterial polypeptide expressing nucleotide sequence isolated from the Sargasso Sea
actgttacaccaatgccacaattctggaaatacaaagccaagagtttttagattaaaaaaggataatgcgataattaatagattaggttttaataataagggcgagaagagatttattaagaatcttatgtctgcaaaaaagacaggtattgtaggatcaaatattggaccaaataaagactctaaaaatttcattgatgattatttaaaaatttacagaaagatctcagtctcttgcgattatgttaccattaatgtttcatctccaaatactgaagccctacgtgaattgcaaagaaaagaatatcttgaagtacttttaagagaaatatctcaaattagggatgaggaaaaatataaaaagcctatcatgctaaaaattgatccagataatacaaatgaccactacagtatgattttgaatcttgtaaataaatataatatcgatggaattattgctacaaatacctcactttctagaccagaaattttacgagatctcaataagaaaagagaaggtggattatctggcaccccgataaaggatttatcagataaagttctaaaatttttataccgagagacaaatcaagaattaattttaattggtgctggtggagttggtagtgcattagacgtatataataaaatcaaattaggtgcatctttagtacaaatttatacctcactcacttatagtggtccgcaactgataaataagattttgattgatcttgttaaacttatcaaagatgatggatttgcaaacatttcagaagcagtgggtgtaaataataaatga

SEQ ID NO: 217938 - DNA, 913 bp, Unknown
  Bacterial polypeptide expressing nucleotide sequence isolated from the Sargasso Sea
atggactctagtctggaaaccactcttggttcactaacactaaaacgccctactgttttagcatctggaattcttggtatttctttagatgttttcaatagattacatgatgcaggcgctggtgcagttgtaacaaaatcattgagtaaagagccctgggaaggatatccgaacccaactattttcagtgtgaaaggtggagggtggataaatgcagttggattatcaaatcctggtgcagaaacttttgcaaaaatgattgaaccaaatgataatgtcccaatagttgtgagtcttgttggctctgttgaggatgattttgaatatatgataaaaaaatttgaaaattgtaaagttgcagcatatgaactaaatctttcatgcccccatgttgccaaagttggactagaagtcggtgatgatattgaacttgtttcaaaaattattaaaaaagtcaaatctattacaaattcacctattgtcgccaaagtaggtctgggaaaatctgattatcttgcaactgttgatgctgctgtatctgcaggtgttgatgcaattactgcaattaatacagttagagcaatggcaatagatgttgaaacacagatgccaattctcagcaataagatcggtggactatctggtactccaatcaaaccaattgctctaagatgtgtttatgaaattgcatcaaagtttgacattccgataatgggatgtggtggaatctcaaattgggaggatgcagttgaatttattttggcaggttcttctgtggtacaatttggaagtgttatgggtgatcactgggttgaaacatttagtgaaattaattctggtattcaaaaatatatggaaagaaagggttatgcaacaataggtgaaatgattggaaaagcaaagagacaataat

SEQ ID NO: 217939 - DNA, 613 bp, Unknown
  Bacterial polypeptide expressing nucleotide sequence isolated from the Sargasso Sea
attgaatgattatttaattggattagaaaaatttcatgaagttgctgattatattacaataaatatttcctctcctaatactgaaaatttaagaaattttcatgatgaaaataaattaaaagaattattaaagtcaattaaagataagaaaaatgaactgaaaacaaatattccaatcgtagttaaaatttctccagatattcatttaaagcaaatagaattaatatcagagattctttttgaaaatgatatatctgcaataattatttcaaatacatcagaaagcactagagatgatttaaaaaatattcaacgacatcaaaaaggaggcttgtcaggaaagccaattgaacaaaaatcaaatttacttattaatcaattctttaaactgctaaatggtagaattaaaataattggggtaggaggcattgactctggaaagtctgcacatgataaatttctgtcaggggcagattatattcagttatatactgggatggtatttcaaggacctaacattgctgcaaacattaaaaaagagctaaaagaattacttcttagagatggagtgaaaaatatttcagaaatcgttggaaataaaactctttcttaa

SEQ ID NO: 217940 - DNA, 913 bp, Unknown
  Bacterial polypeptide expressing nucleotide sequence isolated from the Sargasso Sea
gatggactccagtctacaaactactcttggttcactaacattagaacgtccaacagtcttagcctctggaattcttggaatttctttagatgtcttcaaacgtttgcataatgcaggtgctggagctgttgtaactaaatcacttagtaaggaaccatgggagggatatcctaatcctaccatattcagtgtaaagggcggcggttggattaatgcagttggactctcaaatcctggtgccgaaacatttgcaaaaatgattgaacctaacaaaaatgttccaatcattgtaagtttagttggttcagtagaagatgattttgaatacatgatcaaaaaatttgaaaattgtgatgttactgcatatgaactaaatttatcgtgtccacatgttgccaaagtaggattggaagttggagatgataccgaattggtatcaaaaattattaaaaaaaccaaatccattacaaacgttccaattctagctaaagttggacttggcaaatcaaattatcttgatactgtagatgcagccgtatctgcaggtgttgatgcaattactgcaattaacactgttagagcaatggccattgatgttgaaacacaaatgccaatcttaagtaataaaattggcggattatctggcactccaattaaaccaattgcattaagatgtgtttatgaaatttcttccaaatttgacattcctataatgggatgtggtggaatttctaattgggaggatgcagttgaattcattttggcaggttcttctgcagttcaatttggaagtgtaatgggtgatcattgggtcgaaacttttggagaaataaattctggaattcaaaattatatggaaaagaaaaattacaaaacaataggtgaaatggttggaagagcaaagagacaataa

SEQ ID NO: 217941 - DNA, 493 bp, Unknown
  Bacterial polypeptide expressing nucleotide sequence isolated from the Sargasso Sea
atggccaacaaaaatacaataacaacagaattcttggggctcaatctagcctcaccaatcgttttgctttctgggtgcgtgggttttggcgatgaatatacaagacttgagggcttttcaaatgctgatatcggtggagccgttctaaaaggcaccactctggaaccgcgcttgggaaatgctcctcatcgtgtttatgaaacaccatcgggaatgctgaactctattggattgcaaaaccctggtgctcacgaagttgttgaaaacattctgccatcactcgagccttttgagactcatttcattgcgaatgtatcgggctcgaccattaatgaatacattgaggtctgcagaatatttgatcaatcaaacatacatgcaattgaattaaatatttcctgtcccaatgttaagaaaggcggcatggagtttgggaatgacccagaaatgtctgcgcaagttgtcgaggcatgtaaaggggtgcacgtctaaa

SEQ ID NO: 217942 - DNA, 450 bp, Unknown
  Bacterial polypeptide expressing nucleotide sequence isolated from the Sargasso Sea
atataccgattgccttaaaaatttctccagatatcgaaaataaaagtatagatagaatatgtgaagttttaactaataataaaatcaaaacggtaatcatctcaaactcgactgatagaacaagagaaaatttaaaaaatattaataaattagaaaagggaggattatcaggcaaaccacttgaaaataaatcaaattttttaataaatgaattttttaaaaatttaaaatcagatattacaattattggggttggaggaattgatagcggtagatcagtttacgaaaaaataataaatggtgcaaaacttgttcaactttatactggaatggtttttaaaggtccaaatatagtatctaaaataaatgatgaattgatagaaataataaaaaaaacaggtgtaaataatatttctgaattagtaggttctaaaaataaacttgactgag

SEQ ID NO: 217943 - DNA, 961 bp, Unknown
  Bacterial polypeptide expressing nucleotide sequence isolated from the Sargasso Sea
attgaccaccgagtttctcggcaagcaactatcaggccctttcactgtcccctcgggtatcgtgacgaccgcccccgccatcattcagcgggtgatggataccatgcccgaggtcggcgtcatcaccacaaagagcattgggtttgaaccacgcctcggcaaccgggagcctgtttatagtcagtatgcgcctggctgcttcgtgaatgccgtaggcctgaccaaccccggggtcgaggaagcactgcagggtttacagcaactctccgtgccggctgatcgctttttgttggtatcaatttttggcggatccgtggacgagtttgtcgcgatagcgagacaacttgcccccgtcgccgatggcctagaactgaatctctcctgccctcacgccaagggctacggcatggccatgggtcaagatcccgaaatggtccgtgaggtcaccgccgcggtctgcgatgcagtcaagacacccgtcatccccaaactgacaccaaacgtcgatgacatcgcagtcattggccgagccgcgttggaagggggtgcggcggctttgtgcgccatcaacacggcggggcccggctacacagagagccacggccacccggtgctcagcaatggcatgggcggcatgtcgggcaaaggcgtgctccctaccacgctgaaggcactgaaagtgcttcgggccgagacggacgtcccgctcattggctgcggtggcctgtcttccgcagcagactgccgggacgccatccattgtggggccaacattctgggcattggctccggactgaccggcatgaacactgaggaagtgcagcactactttgccgacctggcccgagatctctcagaaggcggcgatgcggcagggcagcgggtccgcttcgatgcggacatgggctttaagccctatcgcgtcgttaccaacgatatcgtctgtgatgacattaccgtg

SEQ ID NO: 217944 - DNA, 442 bp, Unknown
  Bacterial polypeptide expressing nucleotide sequence isolated from the Sargasso Sea
atgttttcaaatttaagatctttaatatttaaaatagatcctgaacgagctcactttttagcaatacagtcactcaaactcaacctagtttccaatatctttgatgaccataaaaacgaccctattttcaagacaaaaatttttaacaaagaattaaacaatcccatcgggatagcggcaggttttgataagaatgctgaggtctacaactctttatttaagttagggtttggattggtagaagttggtacaattacacctttaaaacaatatgggaatagtaaacctagagtttttagattagtggaagaccaagcgctaataaatagattgggctttaataatgatggttcagacatcatattaaataggattaaatcaagtaataaactgggtgtattagggaataacgttggtcctaataaagactctgataatcgaa

SEQ ID NO: 217945 - DNA, 913 bp, Unknown
  Bacterial polypeptide expressing nucleotide sequence isolated from the Sargasso Sea
gatggactctagtctggaaaccactcttggttcactaacgctaaaacgccctactgtcttagcatctggaattcttggtatctctttggatgttttcaatagattacatgacgcaggcgctggtgcagttgtaacaaaatcattgagtaaagagccttgggaaggatatccgaacccaactattttcagtgtgaaaggtggagggtggataaatgcagttggattatcaaatcctggtgcagaaacttttgcaaaaatgattgaaccaaatgatgatgttcctatagttgtgagtcttgttggctctgttgaggatgattttgagtatatgataaaaaaatttgaaaattgtaaagttgcagcatatgagctaaatctttcatgtccccatgttgccaaagttggactagaggtcggtgatgatattgaacttgtttcaaaaattattaaaaaagtcaaatctattacaaattcacctattgtcgccaaagtaggtctaggaaaatctgattatcttgcaactgttgatgctgctgtatcagcaggtgttgatgcaattactgcaattaatacagttagagcaatggcaatagatgttgaaacacagatgccaattctcagcaataagattggtggactatctggcactccaatcaaaccaattgctctaagatgtgtttacgaaattgcatcaaagtttgatattcctataatgggatgtggtggaatctcaaattgggaggatgcagtcgaattcattttggcaggttcttctgtggtacaatttggaagtgttatgggtgatcactgggttgaaacatttagtgaaattaattctggtattcaaaaatatatggaaagaaagggatatgcaacaataggtgaaatgattggaaaagcaaagagacaataa

SEQ ID NO: 217946 - DNA, 967 bp, Unknown
  Bacterial polypeptide expressing nucleotide sequence isolated from the Sargasso Sea
ttgaaagagacagtagccatcgctcacccaaactttgctttggtaaagtattggggtaaaaaagacagcaataaaaatagacctgcaatgagctctatttcagtgactgttgattcaatgatttcaaaaaccaagattttcaagaatcctcaatcaaatcatcatcaattattcataaatggaatagaggaatctgatctctcaaaaattcttccaccattagagtatttgtctgaattttctgggactgaagaatatctagttatcgaatctcaaaataactttccgacatcatcgggcctcgcttcatctgcctccggtatcgcatctttcgtgactgcttacgaggctcattatgatttgtgccttgatattaatcataaagtggaggcctctatgcttggctctggttctgctcctaggtctttgatcgggggctttgttttgatgaaccacaaagataactataggtgcagccagattcttaaagaatcagattggccacttgatgtgctcatttgcattgcctcaaaggagccaaaaaaaataagctcaagggacggcatggaaatttctaaaaaaacatcacccatttatcaagattggctcgatgtcaatgacaagcatattaatctcgcactaaatgcaatcaaaaaaaaagatatggctgcacttgaaaatgtgactgaagaaaactgcaaactcatgcataaagtaatgaaaacctcaaagccttctatttcatatatgacggatgtaacccatagctgccttgctgaaatcgaaaaccttaggtcatcaggacacagtcttttcttcactatagatgctggaccccaggtaaaaatcatatgcgaaccaaaatcaaccgaaattattagggacacgatcattgataaaacaactgtaatggatgtcattcatgctggcttaggaggtccgccgagaatcatcgatgaatattgaa

SEQ ID NO: 217947 - DNA, 307 bp, Unknown
  Bacterial polypeptide expressing nucleotide sequence isolated from the Sargasso Sea
atgaatgaacagaatggggtatttaaaaatctttataaaaacttgattacccctgtattaaaaagagactctggaattgatgcagaaaacttaactaatttatctcttagccttttatcattcagttcaagaaaatataattggcctgtagtttcatctatcttaaaaaatctaaatgaagaattttctatagttgataaaaggttaactcagagcatatgtggtataaatttttgtaatccaattggtttagctgcgggtttcgacaaaaatggaaatgctgcaaatgtatggaaagattttggtt

SEQ ID NO: 217948 - DNA, 585 bp, Unknown
  Bacterial polypeptide expressing nucleotide sequence isolated from the Sargasso Sea
gtaaatatagggggcaaataaacattcaattgggtgatcaaaggattaatgattatatagtttgtctcgagaaggttaacaagtatgctgactatattactatcaacatatcctctccaaatacaccaaatttaagagatctgcataatagagaaaacttgactttgttaattgatgcaattgataagagtataaaagatttgaatataatcaaacctatttttttaaagatttctccagatgaatcagacaaaacaataattaatataattacgcatatagaaaattcttcactatcaggaatcattgcaacaaatacaacaattgataaatcaatgcttgtgaatgaaaaaattaaatcaattgatggaggtttatccggagaaccaataatggataaatcgactcaacgcttgtcttttattaaatctaaatcaaaagatttaccgctaattggggtgggaggcgttctatcaaaagaagactttaatgaaaaaattaatgctggtgcaagcctagttcaaatttatacaggctttattataaaaggaccaaatttaataaccgaagttttaaataattagt

SEQ ID NO: 217949 - DNA, 241 bp, Unknown
  Bacterial polypeptide expressing nucleotide sequence isolated from the Sargasso Sea
atgtataataaaatacgatctcttatatttaaattagatccagagacagcacataatttggctattcagactctcaaattaaacaagtttaataaaagaaaaaaagaatataacaaaaaattatcttctgaaatttttggtaaacaagttgataatccaataggattagcagcaggctttgataaaaatgctgaagtatacaattctatatttaatttaggtttcggttttgagaagtagg

SEQ ID NO: 217950 - DNA, 754 bp, Unknown
  Bacterial polypeptide expressing nucleotide sequence isolated from the Sargasso Sea
ttgcaagaaagatttggtaatcctagaccaagacttcatcatgttcctaaggaaaaatcaataataaattcacttggttttccaagtcaaggtttggaaaaaataaataaaaaattattagaaaatcctcagaatggaatttttttatcagtttcaggtataaatgaagacgaaataatatcttgtattgagacattagaagataaaactaaagtatttgaggtcaatatttctagtcctaatacttcgggtttaagattatttcataacccttcagaattgtctaaattactagaaaaaataaaatcagtttcaaaaaataagattttagtaaaattaccaccttggttagaatctaataagaatgaatatcttgatttaggtaaaattgcaatcatgtcaggagcagatggtttagttatagccaacagtttacctgtaaattctgaaaaattagctgttggtaagggcggtaaatcaggaagagttttgacaaataatactcctagaatgatagcagaagtaagatcttatgttggacctgatccagtcatagtagcatgtggtgggatttttgatgctaatgatgtatggaattctttggctatgggtgcagatttatgtcaaggatatacagggtttatatatgaaggattattttatgcatacaacataaataaaggtttgttaagattgatgaaagaaaataatattgattctatagagaaaattaaaggaaaatcaattctataag

SEQ ID NO: 217951 - DNA, 622 bp, Unknown
  Bacterial polypeptide expressing nucleotide sequence isolated from the Sargasso Sea
atggcagacttaagttgcaacgttgcaggcattaaagctccaaatccattttggttagcttctgctcccccgacagataagttgtataacgttgaacgtgcttttcgagctggatggggaggagttgtatggaaaacattgggaattgatcctcccattgtaaatgttagctcacgttatggggctgtacattacaatgggcaccgtatgatggggttgaacaatcttgagcttatcacagatcgcccacttgaagacaatctcaaggagattaagcagataaaaaaggaatggccggaccgcgcggttgtagtttctttgatggttccatgtaacgaaaaagactggaagtttattttgaagaaaatagaagatactggatgtgatggagttgaacttaactttggatgtccgcacggaatgtctgaaaggggaatgggctctgccgtcggacaggtaccggaatatatagaaatggttactcgctgggtgaaagaatcttcagacctaccatgtcttgtaaaacttacaccaaacgttacagatatctgtcatgccgcgcgagcggctaatgcaggaggcgctgatggtgtttcccttataaacactgtcaattcaattg

SEQ ID NO: 217952 - DNA, 564 bp, Unknown
  Bacterial polypeptide expressing nucleotide sequence isolated from the Sargasso Sea
ttgctggttatattacaataaatatttcatcaccaaatacggagaatttaagagattttcataacaatgaagaattaaaaaatttgttggaaagtattcataacgaaagagaaaaattgaaaagtgatattccgatagctataaaaatatcacctgatattaatcaaaaaaaagttgaggaaatctgtagatcaattttggattatggtattaaagccgtaattgtctctaacactacagatggtaatcgtgatagtttgaaaaaccacaagaaatttcaaaaaggaggtctttcaggaaaacctttgaatgaaatatctaataaattgataaacaatttttataaaatattaaataataagatagatataattggtgtaggaggagtggactctggtgagacagcttatcaaaagtttatgcatggtgcaaagtttgtgcaactttatacaggtatggtttttcatggtccaaaaattgttaacaagatttcagaagagttaaataatattcttgaaactaataatgtaaaaaaattaagcgatattattggaaaaatttaaa

SEQ ID NO: 217953 - DNA, 714 bp, Unknown
  Bacterial polypeptide expressing nucleotide sequence isolated from the Sargasso Sea
ttaataacaagggagaaaagaggtttgtaaagaatcttatgtctgcaaaagggacaggtattgtcggatcaaatattggaccaaataaagacactaaaaatttcattgatgattatctaaaaatttacagaaagatttcagtctcttgtgattacgtaaccattaatgtttcatctccaaatactgaatccttacgggaattacaaagaaaagaatatcttgaagtacttttaagagacatttctcaaattagggatgaggagacaaatagaaaactaatcatgctaaaaattgatccagataatacaaatgatcactacagcatgatacttaatcttgtaaataaatataatatcgatggaattattgccacaaatacttcactttcaagaccagaaattttacaagatctcaataagaaaagagacggtggattatctggcgctccgataaaagatttatcagacaaagttttaaaatttttatatcgagagactaatcaagaattaattttaattggtgttggtggagttggcagtgcattagatgtatataataaaatcaaactaggtgcatcattagtacaaatgtatacctctctcacttacggaggcccccaactaataaataagattttgattgatcttgttaaacttatcaaagatgatggatttgcaaatatttcagaagcagtcggtgtaaataataaatgaa

SEQ ID NO: 217954 - DNA, 225 bp, Unknown
  Bacterial polypeptide expressing nucleotide sequence isolated from the Sargasso Sea
gcggcctgtcgggcaagccggtattcgacgcgtccaacgaagtgatccgcaagttgcgcgccgaagtcggcgagacggtgccgatcatcggcgtgggcgggattttctcgggcgaggacgcgcgcgccaagttggccgcgggcgcttcgctggtccagctctataccggcttcatctatcgcggcccggcgctggtagccgagtgcgcgcaggcactgcgctaaa

SEQ ID NO: 217955 - DNA, 642 bp, Unknown
  Bacterial polypeptide expressing nucleotide sequence isolated from the Sargasso Sea
cttggggctcgacctagcctctcctattgttttactttcaggctgtgtgggctttggtgatgaatacacaagactagagggtttttcgaatgctgacattggtggagcagttctaaaaggcaccacattggagcctcgtctaggcaatgtcccacatcgggtttatgaaactccgtctggaatgcttaactcgattggcttacaaaatcctggtgcgcatgaggttgtagaaaacatcttgccatcactcgaaccttttgaaactcacttcattgcaaatgtatcaggctctaccattgatgaatatattgaggtctgcagaatatttgaccaatcaaacatcagcgcgatcgaattaaatatatcctgcccaaatgttaaaaaaggtggcatggagtttggaaatgatcctgaaatgtctgcacaagtcgttgaggcttgtaaggctgtaacatccaagccgatcattacaaaactttctcctaaccaggctgatataaaagaaagtgccagaaaatgcattgatgctggaagcgatgccttatcagtgattaacaccattactggaatggccattgacattgaaagcaaacgtcctgttttaggcaatacatcgggaggcctctcagggcccgccatcaa

SEQ ID NO: 217956 - DNA, 601 bp, Unknown
  Bacterial polypeptide expressing nucleotide sequence isolated from the Sargasso Sea
ttggaaaaaataaagaatacttctaatgatgatgcttggaaagattatttattttgttttaaaaaacttttccatttagtagattattttgttattaatgtcagttctcctaatactccggggctaagaaaattacaaaataaaaatttattatttgatttattaaataaattacaaaaggaaaataaaaagtataaaattagaaaaccaattttattaaaaatttctccagatagttcactaaatgaaattgatgatattataaccgttgttgaaaaatcaaaaattgatggaattatagctactaatacttcaattgataaaagtattctcccaaatacgaaagattatgaggagggaggcattagtggtaaaagcttacataaaaaatctacagatataattaaatatatttcaaaaaaaacaaaatataaattattaattattggtgtaggtggtatttatgatcataaaactatgattgataaatttaatgcaggggcttctttagttcaaatttatacaggttggatttatgaaggaccaggtttaattaaaaaaatgaataaaattatggtaaatgaattatcaaaaaattaat

SEQ ID NO: 217957 - DNA, 460 bp, Unknown
  Bacterial polypeptide expressing nucleotide sequence isolated from the Sargasso Sea
atgtataagttggttattagacctttgctctttttatttcctcctgaatttatccataatatatcatttattatgatcaagataatatgtatggttccttttatgacttctattttaagaatttatttttcaaaaaattacaaagttttaaataaaaaaattttcaatttaaatttcaaaaatagtattggtttagcagctggattcgataaaaatgcaattttaattaaagaactttcattatttggttttggtcatattgaaattggtacaattacccctaaacctcaatatggaaataaaaagccaaggttatttagattaaacagtgaaaaatcgttgattaaccgaatgggctttaataatgatggggttgaaataatatctaaacgattagaaaatttaaatgtagattgtattattggtgctaatattggaaaaaataaagaatacttctaat

SEQ ID NO: 217958 - DNA, 967 bp, Unknown
  Bacterial polypeptide expressing nucleotide sequence isolated from the Sargasso Sea
tttgaaagagacagtagcaatcgcccacccaaactttgctttggtaaagtattggggcaaaaaagacagcaatcaaaacagacctgcgatgagctctatttcagtgactgttgattcgatgatttcaaaaaccaagattttcaagaattatcaatcaaatcatcatcaattattcttaaatggaaaagaggaatctgatctctcaaaaattctacctccattagagtatttatcagaattttctaggaccgacgaatatctagttatcgaatctcaaaataactttccaacatcatcaggtctcgcttcatctgcctctggtattgcatctttcgtgactgcttatgaggctcattataatttatgccttgatatcaatcataaagtgaaggcctgtatgctgggttctggttctgctcctaggtctttgattgggggctttgttttaatggatcacaaagataattataggtgtagccagattcttaaagaaccagaatggccacttgatgtgctcatttgtattgcctcaaaagagccaaaaaaaattagctcaagaaagggcatggaaatttctaaaaaaacatcacccatttatcaagattggctcgatgtcaatgacaagcatataaatctcgcactaaatgcaatcaaagacaaagatatggcagcacttgaaattgtgactgaagaaaattgcaaactgatgcataaagtaatgaaaacctcaaagccttctatttcatatatgacggatgtaacccatagttgccttgcagaaatcgagaaccttcggtcatcaggacatagtcttttctacacaatagacgctggacctcaggtaaaaatcatttgtgacccaaaatcaaccgagattattagagacacgatcattgataaaacaagtgtaatcgatgttgtttatgctggcttaggaggcccgccgagaatcatcgatgaagattga

SEQ ID NO: 217959 - DNA, 478 bp, Unknown
  Bacterial polypeptide expressing nucleotide sequence isolated from the Sargasso Sea
atttcagaaaagaaaaaaaatttaaagacaaatataccgatagtagtaaaaatttcgcctgatataagtgaaacacaaataaacttaatttccgaaattctcttagaaaacgatataagtggaataatcatttcaaatacatcagagtcatcaagagaggtgttgaaagatattcaaaaacatcaaaaaggaggattgtctggaaaacctattgagaaaaaatcaaatattttaataaataagttttataatttatttaaaggaaaaattaagattattggggtaggaggaatagactctggccaatcggcttatgaaaaatttttattaggtgcagattatatacaattatatactggtatggtatttcaaggtccaaatatagctggtagtattaaaaaagagctaaaagaattattgatcagagatggagttaagaattttaccgaaattataggaaataaaactctttcttaaa

SEQ ID NO: 217960 - DNA, 752 bp, Unknown
  Bacterial polypeptide expressing nucleotide sequence isolated from the Sargasso Sea
agtagaagatcaagctttgataaatagattaggctttaacaatcagggttcagatgctgtattaaataggattaaatcaaacaataaactgggagtgctgggaattaacgttggtcccaataaaaactctgataatagaataaatgattatttaataggaattgaaaaattccatgaagttgcagattatattactattaacatttcatcacctaatactgaaaacttaagaagttttcacgatgaaagaaaattgcaagatttacttaaatctgtttcagagaagaaaaaaaatttagaaacaaatattccaatagtagtaaaaatttcacctgatatagacgaaaatcaaataaatctcatttcagaaattcttttagaaaatgatataagtggaataatcatttcaaatacctcagagacatctagagaaattttaaaaaatattcaaagacaccaaaaaggaggattatctggaaaacctattgagaaaaaatcaaatatcttaataaataagttctataatttgttaaaaggtaaaattaagatcattggcgtaggaggggtagactcaggtcaatcagcctatgaaaagtttttactgggtgcggattatattcaactatatacaggcatggtgtttcaaggtccaaatatagcgagtattattaaaaaagacctaaaagaattattgactagagatggtattaagaattttagcgaaattataggaaataaaactctttcttaat

SEQ ID NO: 217961 - DNA, 151 bp, Unknown
  Bacterial polypeptide expressing nucleotide sequence isolated from the Sargasso Sea
tacacaatagatgctggaccgcaggtaaaaatcatttgcgatccaaaatcaacggagattattagggacacgatcattgataaaacaagtgtaattgatgtcgtttatgctggcttaggaggcccgtcgagaatcatagatgaagattgaa

SEQ ID NO: 217962 - DNA, 340 bp, Unknown
  Bacterial polypeptide expressing nucleotide sequence isolated from the Sargasso Sea
atgtttaatattttaagaccactaatttttaaatttagtcctgaagtagctcattctttagcaataaaagcactaaagttaaataatatttcttactcaaaacctaaagaaaatcatattttagaaacaactttttgtgaaaaaaaattatcttcaccaattggtgttgctgctggttttgataaaaatgctgaagtatacaatccactgtttaatcttggatttggttttgttgaagtagggacaattactccaaagcctcaatttggcaaccctaaaccaagagtttttagacttgaagaagacgaagcactttataatagattaggtttttacaatt

SEQ ID NO: 217963 - DNA, 359 bp, Unknown
  Bacterial polypeptide expressing nucleotide sequence isolated from the Sargasso Sea
tttgtataatagtgcattaaaaatattaagattgtttccgcctgaaatggcccatgatttaactttaaatatattgaaatataaaaaatttatttcaaaaaattttgaagatccaattttatcacaacatcttatggggcttgattttccaaatccaataggactagctgcaggatttgataaaaatgcagaagtaattcaatctatgttttcttttggtttcggttttatagaaattggaacagttactccaaaaccacaaaaaggtaatataaaaccgagagtattcagacttcaagaagatagagcaataatcaatagcttaggatttaataataaaggtgtaactaaagtaaaaa

SEQ ID NO: 217964 - DNA, 505 bp, Unknown
  Bacterial polypeptide expressing nucleotide sequence isolated from the Sargasso Sea
aatgtttgaaaaaattagatctttaatttttaaatttgatccagaaacagcacatgatttagcaatcaaagcacttaaaactaatataattccattaaaagtaaaaaaatttaattctttaaaagttaagcttttggatagagaaatttcaaatcctattggtattgccgcaggatttgacaaaaatgctgaagtatataattcattatttaagttgggatttggatttgttgaagtgggaactgtcacaccaaagcctcaatttggcaattcaaaaccaagagtatttagacttgaagaggataaagctttaattaacagacttggatttaataacataggatcaaaaaaagcttctctaaatattaaaaataatactccaaaaggactactccgagtaaatattggtccaaataaagataccaaaaatagaatagaagactatttaagatgttttaagactttttataatttagctgattatataactataaatatttcatcc

SEQ ID NO: 217965 - DNA, 304 bp, Unknown
  Bacterial polypeptide expressing nucleotide sequence isolated from the Sargasso Sea
attgtttgaaaaattatataaaaaaatatttcctattataaagtttattcctcctgaaatagcacacaatctagctataaaattcttttcaaattttaaaaaagaaattaaacctgatgatcctatacttaatacaagagtatgcaatttacagtttactaatcctataggactagcagctggttttgacaaaaatggagaggctttcgaaggtctaacatgcttaggatttggatttgttgaagtaggcactattacaataaatccacaatatggtaacaaaaaaccaagaatttttagatta

SEQ ID NO: 217966 - DNA, 763 bp, Unknown
  Bacterial polypeptide expressing nucleotide sequence isolated from the Sargasso Sea
aatgttaattaatttattaagattattaccccctgaaactgctcatgaattaactataaaactacttagatcaaatcttaatttaaagaggaatcatgcaaaattatttaagagtcttaaacaaaaaatactaggtataaattttaaaaacccaataggattggcagctggctttgataagaatgccgaggtaatgagtcaaatgttttcttatggttttgggtttgtggaaattggaacagtaactccaaagatacagctaggtaatgaaaaaccaagaatctttcgtttaatagaagacgaagctataattaatcatttaggttttaataatgaaggaagtgaaaaagttttatcaaatataaaatctttttataaaaataaagacattaacgagataattggtgttaatattggaaaaaataaatcaacacaaagcgatatagatgattacttatattgtgttgaaaaacttggtatgtatagcgattacataacaatcaatatctcatctccgaatacacctggacttagagacttgcaattgcgtggcagaatagagctattagttaaaaaaattcaaacaaagcaatcagaaattgaaggactgataaaaaaaccaatttttattaaaatctcacctgatttaaatgatgaacaattaagagatattgctttaatgtcacttgctaataatgttaatggtttaatcatttcaaattcaacgattcaacgtccagatagtttaatttctagttataaa

SEQ ID NO: 217967 - DNA, 369 bp, Unknown
  Bacterial polypeptide expressing nucleotide sequence isolated from the Sargasso Sea
catggcgagcggtgcggaggggactgggtcgacgtcgacgatggtgcgcgtcgccgtcggcgtcgtgggcgggttcgcggcgctgcgctgggcggagggacgatgggcggaggatgtggaattcgcggcgtacggcgcggcgacgccggcgatgcgaatgttggacgcggagacggcgcataccgtcggtatcgcggcgttggcgatgggaatggggccgagacaacgcgtggaggatgggaaatcgctcgaggtggaggcgttcgggatgaagttgtcgaatcccgtcgggctcgccgccggtttcgataaggacgccaaggcgttcgaggcgttgatcaagatgggtttcggattcgtggagatcgg

SEQ ID NO: 217968 - DNA, 403 bp, Unknown
  Bacterial polypeptide expressing nucleotide sequence isolated from the Sargasso Sea
agtaaagatttcacctgacctcgatgatgaatcgatagcacgcgtcgccgaggtgctcacgctgcggggcatagacggaattgttgcaaccaacactaccgtcagccggccgctgaatacagaggtccatccgcacgtgtcgcagacgggtggcctcagcggcgcgccattggcgaccctttcgcatcgtgtgatcactgaactcaggcagcacaccccatctgaatttccagtgatcggtgtgggaggcataatggacgccgcctcggcccaggccgcattctccgcaggagccaccctcgttcagctgtacagcggactgatctaccggggacccgccctggtgagggaaattctcggcgcgctgcaagccgctcaaaccgctaaagcccccacttcctaa

SEQ ID NO: 217969 - DNA, 829 bp, Unknown
  Bacterial polypeptide expressing nucleotide sequence isolated from the Sargasso Sea
tttggatttatcgaagtaggagcggttactccattacctcagccaggaaatcctaaacctcgcctatttagggttgtcaaagatgaagcaataattaatcagtttggttttaataatcagggaatgcatatcattaatggaagattaaaaaaggttagaacatctgcaatagttggaataaacattggagccaacaaaaataaggctaacgatcccagcgaattttctaaggtactgggtgtttgttatgaaaatattgacttcgccaccatcaatatttcttctccaaacactgcaaatttaagagcacttcagggaaaatcctcactaagtgagacattaagcgaagtgacaaacaccaatttaaatttagctacgccaaagcccctatttttaaaaatatctccagatctaaattataaacaactcgaaggaatcgttgaggtcgcattgaaatttaaaatatcaggtattatcgcaacaaatacttcttccaattttgcaagtattaataattcgcatttgactcaaggtggtggtttgtctggaaaacctctattcacaaactctactaaaattttagcactgctttctaaaataagtgatggagaaataccacttatcggagtaggaggcataagtactgcacaagacgcctacgttaaaatattagcgggagctagtgcagttcagctgtactcagcattaacatttaaaggtccaagcttaatctccaatattataactggtttggatagaatattagaaaaagaaggttatgcaaatatatcagaggccgtaggtctcaaaaagcaagatttttgttagt

SEQ ID NO: 217970 - DNA, 394 bp, Unknown
  Bacterial polypeptide expressing nucleotide sequence isolated from the Sargasso Sea
atgttagttgctttattgaggttattgccacctgagattgcacatgaactaacaataacacttttaaaatctaaattatctataaacactataaaaacaaataattatcaaacattaaagcaaaatatacttggtatagattttcctaacccaatagggcttgccgcaggttttgataaaaatgctgaggtaataagatcaatgctcaactatggttttggatttgttgaaataggtactgtaactcccaagcctcaattaggtaattcaaaaccaagaatttttagattattagaagatgaagcaataataaatcatcttggttttaacaataaaggaacagaaaaaattttaaaaaatttacaagatatttacaagtctgatacattttctg

SEQ ID NO: 217971 - DNA, 914 bp, Unknown
  Bacterial polypeptide expressing nucleotide sequence isolated from the Sargasso Sea
gatgggaatagcgtggagtcttttgggaagtcctgcactgaggctcattgactccgagactgcccattctatttctatgagagtaatgaggggttttggcgaaactagtgcgggtcagaacatgctgaacgccctttacagacctccagaagttccaattgaagtctttggaaagatgttccaccaccccctaggtttagcggctggtttcgataaaggtgcagaggcgctcatggcctggtctgctatgggattctcatggacagagtatggcggagttacaagatacccgcaggatgggaatccaaagcctcgcatgttccgtgccaataggcataaggcactagtgaataagatgggtttcaacaatcccggtgcatctgaaattcggaagaggttgatttcacgaaagtccgaagataaatggccaaagacaccagttgctgctaatattggtaggtctaagaaggtcccaaatgaacatgcagcagacgattatgcttctacacttgatattctatgggatcatgccgacatgttcgtactcaatatctcttcacccaatactccaggccttagagaacttcaaggtcaagagcacttatcttcgattctaagatcatgtaataaggtacgggaaatgaagggagcaagcaaaccaatattgctgaagctttcgccggataatggtgatgatgagatactggaaaccgtttctctttgtttatcatctggtgttgatggcattgttgccacaaatacgacgataaagaggccagcaccactatccactcagtccagaaaggctttctcaagtgacggcgggttgtctggacgccctctgaattcacgctctcttgaagtgataaatttggcctatggtgaaactcagggcaaaattcctattgttggag

SEQ ID NO: 217972 - DNA, 688 bp, Unknown
  Bacterial polypeptide expressing nucleotide sequence isolated from the Sargasso Sea
attgataggtttaacgattataaacttcttgctgaaaatttatcagagtttgctgactatatttccattaatgtatcttcaccgaacactccaaacttaagagattttcaaaaaaaagggaatttagaaaaagttataaaagttgtaaaggacggtatttctatctctaaaactttgaataaaaaattgccaatttttttgaaaattgccccagatataaataagcagacattaaactcaattattgaaatagctcagttacaaaaaatttgtggattgatcatttctaatactacattagatagagacactaatcttaaatcaaaaaaatcaagtgagttaggaggtttgtcaggtaagccattatttaaaaaatcaacagctattttgtcagaagcaaacaaaataatcaaaaacaaaaattacaaattatttttaattgcagctggtggtgtaacagactcccagactgcatacgtaaaaattttatgtggggcgcacttagttcaattatattcttctttaacatttgaaggaccattagttgcaaataaaattataagtggcatgttgaaattaatgaaaagagacaatataaaaaatatttttgacacagtaggtataattgataatcctagggaagccatgaatattagtattcatggttataaaaaatataaaaattaga

SEQ ID NO: 217973 - DNA, 675 bp, Unknown
  Bacterial polypeptide expressing nucleotide sequence isolated from the Sargasso Sea
tttgatcaaaaaaattaacaaatttttgataatgatcgcaaagttttttgaaccggaaagggctcatttttttgctttaattcttttaaagtataattttttttccaaagttttttccaaaaaaaaatttgaatttttaaatacctctttttttaacgtaaagattaaaaatccaattggagtagccgctggatttgataaaaatggtgaagccattaggggaatattcaatttaggagttggtatagtagaaattggtgcagttacacccaaacctcaatatggtaatgaaaagcctagaatttttaggttaaatgaagataatgcacttatcaatagacttggttttaataatcaaggtatgataaaaattaaaaaaaatattaagagatataatcatggagtattaggaataaatgtaggggcaaataaagacagtaaagataaagtcactgattttattgaggtaatttcttacttttcaaaagaagttgattacttcacaattaatatatctagccctaatactcatatgctaagatccttacaaaagaaagaaaacctagataaattacttaaaagaattacttcaaacaacgaagaaaaaaaaattaataagccaattttaataaaaatatctcctgatttggacaatgaagaattaaaaacaatagt

SEQ ID NO: 217974 - DNA, 769 bp, Unknown
  Bacterial polypeptide expressing nucleotide sequence isolated from the Sargasso Sea
atgtccttaacgacccttggcatgaaaatctttgcaaaaatggatccagaagctgcgcatcgcctcgctatcaatcttttacggtttgggctgtttcctagcagtaaattattatccaaagacccaatacttgaacagaacgtttttggtatcaatttctcaaatcctattggtctcgctgctggttttgataaaaatgctgaggcgtttgagccaattctcgcgctaggatgcgggtttgtcgaggttggttcatttacgctaagaccacaattcggcaatccaaaacctcgagcttttcggttattggaagatgaggctgcaattagtagacacggctttaacaatgatggtcttgcaaaaggcctagagcgattagcacttagaaaaaagagatcgggcttagttggcatcaatcttggcatcaataaggactctaaagcgccaatggctgattatgtagattctattgttcgcgcatcagcttacggtgattatatcactgtaaatatttcctcaccgaatactgaagggcttagagaacttcaaaatgcagataatctggattgcttattaaaagaaatttacaaagtaaaaagctcaccattaaacgaaaaaaaagtacctcctatattattgaaagtggcacctgatataaccaataaaatggtagaagatattatcaatctcgcattaaaatataagattgacggtttaattgttggaaacacccactatttcaagaccctccagccttcaacatcatagt

SEQ ID NO: 217975 - DNA, 103 bp, Unknown
  Bacterial polypeptide expressing nucleotide sequence isolated from the Sargasso Sea
ttggaaacacccactatttcaagaccctccagccttcaacatcatagtaaaaatgaggctgggggattaagtggaaaaccacttttcgaactttccacaaaaa

SEQ ID NO: 217976 - DNA, 442 bp, Unknown
  Bacterial polypeptide expressing nucleotide sequence isolated from the Sargasso Sea
ttgtcaaacttatttctaaaattaattaaattttttcctccagagttagctcataatataactataaaattattaaagttttcttttaaaaaaaaaatattaattgataatccgattctaaatcaacatttattaggtttagatttttctaatccaataggattagcagcaggatttgataaaaatgctgaagtagtcaatccaatgcttaatttaggttttggtttcgtagaagttggaacaattactgccaaacctcaatatggaaatgagaaaccaagaatttttagactaagtgaggatatggctattattaatcatttaggatttaataatgcaggtagtgataaggttttacagaatcttcaaaaattaaaattgtctaacttaagttctggaatagttgggattaatataggaaaaaataaaaattcagaagatg

SEQ ID NO: 217977 - DNA, 796 bp, Unknown
  Bacterial polypeptide expressing nucleotide sequence isolated from the Sargasso Sea
atgatctggaaatttattactttttttgtcagaaaacttgaaccagaaattgctcatcaaatatctttaattgcgttaaagttaggattgcatccaagattaaagcgaatagaaattccagttaaaattaataatttacattttagtaattttcttggagttgcagcaggttttgataaaaatgcacaggtaattgaaaaaattcatcatttgaattttggattaactgaagttggaaccattaccccattaccacagtatggaaaccccaaaccaagagtattcagattagaaaaagatcaagcaataataaatagaaatggatttaataacttgggaatggctcaggctataataaaattaaaacattacagaaaaaaatttccagttggtagcgactttgttttaggtattaatatagggccaaacaaagatagcaataatagatttaaagattatgaaatactttctaaagacctatcagagtttgctgattatcttactataaatatatcttcccctaacacaccaaatttaagagattttcatgaaactgaaaatttagaaaaagtccttatatctgtaaaaaatggtattgccaaatctaaaaaattggagttacacttaccaatatttttaaaaatttctcctgatataactgaaaataatttgaatctaataattgaaactgctaataaaaataatattgcaggtttaataatttccaatacaactgtggatagatacaaagatcttcatctggataatttgcatgaagagggggggctttctggga

SEQ ID NO: 217978 - DNA, 778 bp, Unknown
  Bacterial polypeptide expressing nucleotide sequence isolated from the Sargasso Sea
atgtacctatttacgatcataacaaagttatttcattttcttcctgaagaaatagctcaccgcttggccttgagtggtctaaaaatcctttattttagtggcctactgaaaattttgcttagaaataaatctatgaatggtaaaattcagactaattcttctttcagatgcacttatagaaacaaattaggaatcgcggccggtttagataaagatggagaatacattgactgtctgtcagctctaggagttggatttatagaggttggtactgtaacaccgcttccccaaccaggaaatccaaagccaaggttgtttaggaataggacagaaaaatcgctattaaatagactaggttttaacaataaaggtgttgaagctttagtggaaaatttaaaaaatagaaaatcaacaatacctattggagtcagtataggtaagaattttgatacttcaaatgtcgaggcttacaaggattatttattttgcatggaaaaggtttacgaattctcaagctatattgcaataaatatttcatcacctaatactaaaggcttgagagaattgagtaataataaatttttaggagatcttctaggcatcatcaaggataaacaaaataagctttccgaatctttcgattatgtccctatttatatcaaaataagtccagatgaaaaacctgaagatcttgaaaagatatgtaaatctattgcagataatggaatagatggaattattgctagcaatacaaccgctgtgcacaatgataaaaatg

SEQ ID NO: 217979 - DNA, 519 bp, Unknown
  Bacterial polypeptide expressing nucleotide sequence isolated from the Sargasso Sea
tagaaaaagtttataattatgctgattacataactattaatatctcttccccaaacactcccaacttaagagatttacataataaagatcatctaaatgacttgattggttctatagataaaaaagtcaacgaaataaatataaaaatacctatttttttaaaaatatcaccagatgaatctgatgagattttaaataatattattgaattaattgaacactcatcaatctcaggaattgttgctacaaataccaccgttgataaaagcaatattagcaatgaaaaattaagaaaaattgaaggcgggctttctggaaaacctttaaaggagatatctacttcaaagatttcatatcttaaaactaaaaacaaagatttaaatttgataggagttggtggagtaatgaataaagaagattatcaatccaaaattgattcgggagcaagtttagttcaaatttatacaggatttattattaacggccctggagtagttcacaaaatcctgcaagattaaa

SEQ ID NO: 217980 - DNA, 871 bp, Unknown
  Bacterial polypeptide expressing nucleotide sequence isolated from the Sargasso Sea
gaggaccctattcttgctcaacatttaatcggtttagattttccaaatcctataggacttgctgcaggttttgataaaaatgctgaagtgatgcattcaatgttttcatttggttttggttttcttgaagttggcacaattactccacaacctcaaagtggtaattctaaacctagagtatttagattaagtgaagataaagctataattaatagtttaggttttaataataagggtattaaaaaagtaaaaaaaaatttaattaaataccaaaaatcatacttaagtaataaaattgtaggagttaatattggaaaaaataaaaattcaagtgaagctattgatgattatctaattggtttagaagagttaggtgatttggcaagctatataactataaacatatcatcaccaaatactgaagggttgagggatttacaattaagaggaaatatagaaaaattaataaaaaaaattataaacaaaagagatgaaataaaaaatattaataccaagccaatattaattaaaatttcacctgatttaaatgaagaccaacttagagacatagcattaatttctttggctaataacattgatggtttaatacttacaaatagtactatcaacagagagatcaatttaatttcaatcaataaaggacaaaaaggaggcttaagtggcagaccattatatgataactcaaatattattttgaaaaaaatgtatcaattaacaaatggtcaaataccattaataggtgtaggcggtatatcaagcggaagggactgttatgaaaaaattaaatccggtgcttccttagttcagctatatactgctctggtttattctggcccaaaatttaattaat

SEQ ID NO: 217981 - DNA, 286 bp, Unknown
  Bacterial polypeptide expressing nucleotide sequence isolated from the Sargasso Sea
aatgtttaatattttaagaccactaatttttaaatttagccctgaagtagctcattctttagcgataaaagcacttaagttaaataatatttcttactcaaaacctatagataatcatattttagaaacaaccttttgtgaaaaaaaattatcttcaccaattggtgttgctgctgggtttgataaaaatgctgaagtatataatccactgtttaatcttggatttggttttgttgaagtaggcacaattactccaaagcctcaatttggtaaccctaaaccaaga

SEQ ID NO: 217982 - DNA, 289 bp, Unknown
  Bacterial polypeptide expressing nucleotide sequence isolated from the Sargasso Sea
atgttttctttcctaagaccatttatttttaatttagaccctgagaccgcgcatgatctagcaattaaatcattaaaatataatgttcttccaaaaagcttattttctgttgaaaatgaggaaattttaaatataaaactatttggcaaaattattgataatccaattggtctagcagcaggttttgataaaagtgctgaggtttacaatgaaatttttaaaattggttttggttttgttgaggttgggacagtcaccccaaaaaaacaatatggcaatcaaaaaccga

SEQ ID NO: 217983 - DNA, 468 bp, Unknown
  Bacterial polypeptide expressing nucleotide sequence isolated from the Sargasso Sea
gatgtttaatttttttagaccatttatatttaaatttagtccagaagttgcccattccttagcgattaaagctttaagattaaataatctaacttttaaaaaatctaaagatagtaaatttttggaaattgaattctgtggacaaaaactatcttgcccaattggtgttgcggcaggatttgataaaaatgctgaggtgtacaatcccttatttaacttaggttttggctttgttgaggtgggtacaattactccgaaacctcaatacggcaaccctaaacctagggtatttagactagaagaagacgaagcgctaattaatagacttggatttaataatgcaggttcagatgaaataagcttaagaattaaaaaagaaattaaaaaaggttttttaggaattaatattggtcccaataaagatactaaaaatagaattggagactacttaatatgttttagaaaatt

SEQ ID NO: 217984 - DNA, 499 bp, Unknown
  Bacterial polypeptide expressing nucleotide sequence isolated from the Sargasso Sea
ctgccgcccgaggctgcgcattgggccgctgtcgagaccttgcgccgccgcatcgggccgtcgcccgaccttgatgatataccggtagatgtcgccggactttccttccgtaatccgctcggcctcgccgccggtttcgacaaggacgccgcctgtccggacggggcgctcaggctcgggttcggtcatgccgagcttggcaccatcaccccgcttgcgcagcccggcaatccgcggccgcgggtctttcggctgccgcaggatcgggccgtcatcaatcgctacgggttcaacagcagcggcatggagccggccgccgccaggcttgccgcgcgccgcagcggcacgtccaggcaggccggcatcgtcgggatcaatgtcggcgctaacaagaccagcgacgtgccgacggatgattaccgcaccgcggtggcgcggcttgcgccctatgccgactacatcacgctgaatatctcctcgccgaacacccgggggcttc

SEQ ID NO: 217985 - DNA, 727 bp, Unknown
  Bacterial polypeptide expressing nucleotide sequence isolated from the Sargasso Sea
cttaattaatagacttggttttaataatgttggatccgaaaaagctgcaagtactattcttagtgactccccaaaaggtttattaggaattaatattggtcccaataaagacacaaaaaatagagtagatgattatttaaaatgttttaataattttaataatttatgtgattatattacaataaatatatcatctccaaatactgaaaatttaagaagttttcataatcctaaagaattagaagaattgttaaatgcaataaatgaggaaaaaattaaaataaattcttgcacaaatattgcagtaaaaattgcaccagatctacaactgaaagatttagattttataggaaatacccttttaaataataatataaaaattgttataatttcaaatacatcagataaaactagagatagtttaaaaaatatcagcaaatttgaaaaaggtggattatctggcaagccaatagaacaaaaatcaaatttaataataaaagaattttataaaatttttaaaaataaaattaagataataggagtgggaggagttgactcaggaaaaagcgcatacgaaaagtttatttcaggagcaagctatattcaattatatactggcatggtttatcagggaccaaatatagtaaataaaatttctgaagaattaaatgctattttaagttcagaaggggttaaaaatattgatgaaatagtggggtcaaattaa

SEQ ID NO: 217986 - DNA, 592 bp, Unknown
  Bacterial polypeptide expressing nucleotide sequence isolated from the Sargasso Sea
ggaagatgaggcattaattaatagattgggatttaataattctggggcagatatagtagcatctagaattaaaactaatttaccaaatggtttattaggaattaacattggaccaaataaagatacaaaaaatagattagaagattacttaatttgtattaaaaaatttcatgatatatgtgattacctaacaataaatatttcatccccaaatactgaaaacctaagaagttttcataatcaaaatgagttagatgaactattaaatgcaatcaaagatgaaaagcaaaaactaaattcaaaaataccaatagcagtaaaaatttcaccagatattgaagaagcaaatgttgaaaaaatttctgagttacttataaaatacaatatttctttagctataatctctaacacctccgacaaaaacagagaaaatttaaaaaatattaataaattagaaaaagggggtttgtctggaaaacccttggaaaaaaaatctaatgaactaattaatagattttataaaattataaaaggcaaagtaaaaataataggtgtagggggtgtagactctggaaaaagtgcctacgaaaaa

SEQ ID NO: 217987 - DNA, 397 bp, Unknown
  Bacterial polypeptide expressing nucleotide sequence isolated from the Sargasso Sea
caaatcaaatctattgttgatactgctaggggtttaggttgtgcgggaattattgcaacgaatacaacgatttctcgtcctgatgattcactgataatgtctgaaactggtggactttctggaagacctttgaaatcccgttcaaccgaagtcattaggttaattgccgaccatacagatggaaattggccaataattggagttggaggtatagccgacgcagatgatgcttgggaaaaaatcactaacggagcaagcctcatccaaatttattcgtcaatggtgtttaatggtgcatcagtaatcaaaggaattgtaaatggcctagatagaaaactgaagtctaaaggcttagataatttagaccaagcagttggcttagctagaggtgattgat

SEQ ID NO: 217988 - DNA, 669 bp, Unknown
  Bacterial polypeptide expressing nucleotide sequence isolated from the Sargasso Sea
ttattaatcgactggggtttaataacaaaggcgttgatcatttagttaaaaatttaaagaacagatcatatgagggtattcttggagttaatattggagccaataaagaatctgtaggtcctgaaagaatcaatgattatttgatatgtttagagaaagtttataaacactcagattacatcacaataaatatatcttcaccaaatactccaaatttaagagaacttcataataaggatgagcttaaaaatttaattgaagctatagactcaaaagtaatcgagctagatattgccacgcctatttttttaaaaatttcaccagatgaatcagatcaggtaattgatatggtaattgaaatcttggatagctctcaaatttcaggaatcattgctacaaatacaacaatagataaatcaaatattataaacaaagaatttagatctattgatggtggtttgtcaggtgcgccattgatgggtaaagctactgataaactttcctatatatatactagatcaaatcatttacctcttattggtgtgggaggtgttacatctaagaaagattatgagatgaagttacaagcgggcgctcaactagtacaaatttatacaggctttataatcaaaggcccaaaaatagttaatgaaatattaagtaactaag

SEQ ID NO: 217989 - DNA, 736 bp, Unknown
  Bacterial polypeptide expressing nucleotide sequence isolated from the Sargasso Sea
ggattggataaggaaggaaagtacgttgaatctcttggaaatttgggatttggcttcattgaagttggtacttttactcccttaccgcaaaaaggtaatgaatatcctagggttaaaagattaagctctgaaaattctttgattaataggttgggatttaacaatccaggaatagacgtcggactagaaaatttgagaagaaataaaagtaaatttgatggaattgttggagtaagcattggaaaaaataaaaagacgtctcttgaatcagcttatcaggattatatttactgtcttcaaaaagcttatcctgttgcagattacattgctttaaacatatcctcgccaaatacagagggactcagagagctttttagagaaaattattttgataatctaatggtacaaattaattctgaagctaaaaaacttcaaaaggaacttcaaaagtttacaccactttttttaaaaatatctccagatgaaaatgaagagagaattgaagaaatcattgaatgttctttgaaaaataacatttgtgggtttattgtttcaaatacttctctaggagaatttcaaaatatttccggaggaattagcggagaattactaaaaaataaatcaataaaaatacttaatactgtcaatagaattaatgccaaaaggggattaatcatctcatcagggggaatttcaactaaagaagatatcgaacaaagacgagccttaggtgcag

SEQ ID NO: 217990 - DNA, 504 bp, Unknown
  Bacterial polypeptide expressing nucleotide sequence isolated from the Sargasso Sea
gctgaacgccctttacaggcctccggaagttccaatagaagtctttggaaagatgttccaccaccccctaggtttagcagccggtttcgataaaggtgcagaggcgctcatggcttggtcagctatgggattctcatggacagagtacggtggagttaccagatatccgcaggatggaaatccaaagcctcgaatgtttcgtgccaatcgacatagagcgctagtgaataagatgggtttcaacaatcccggtgcttcggaaattcggaagaggttgatttcacgtaaatccgaagataaatggccgaagacaccggttgcagctaacattggtagatcgaagaaggttccaaatgaccatgcggctgacgattacgcctctactctggatatactatgggatcacgcagacatgttcgtactcaatatctcttcacccaatactcctggtcttagagatcttcaaggtcaagagcatctatcttcgattctaagatcatgcaa

SEQ ID NO: 217991 - DNA, 483 bp, Unknown
  Bacterial polypeptide expressing nucleotide sequence isolated from the Sargasso Sea
aatgtttaatattttaagaccattaatttttaaatttagccctgaagtagctcactctttagcaataaaagcactaaagttaaataatattccttactcaaaacctaaagataatcatattttagaaacaactttttgtaaaaaaaaattatcttcaccaattggtgttgctgctgggtttgataaaaatgctgaagtatataatccactgtttaatcttggatttggttttgttgaagtagggacaattactccaaagcctcaatttggtaaccctaaaccaagagtttttagacttgaggaagatgaagctcttataaatagattaggttttaacaattctggttcagaacaaattagtcagacaattaaggaaaataataaaaagggttttttaggaataaatattggaccaaacaaagactctactaatagaattgatgattatttaatttgttttcgtaaattttataatttagctga

SEQ ID NO: 217992 - DNA, 826 bp, Unknown
  Bacterial polypeptide expressing nucleotide sequence isolated from the Sargasso Sea
tttgttgaagtaggtacaattacaccaaagcctcaatttggcaatcctaaaccaagagtttttagacttgaagaagatgaggctcttataaatagattaggttttaataattctggctctgaagaaatcagcaaaaggattaaggaaaataatagaaaaggttttttaggaatcaatattggaccaaataaagactccacaaatagagttgatgattatttaatttgttttcgtaaattttataatttagctgattacataactataaacatctcctcaccaaatacagaaaatttaagagattttcataaccgggatgaactaaatttattgattgacaaactaaaaaaagaaaaaaaagaattaaattcgaacattcctctagcaataaaagtctcacctgatcttaatgatgatcaaattaatgaagtatccaagatcataatggaacaagatataggtatcattattgtctccaatactacagataagaatagagaaaatttaaaaaatataaataaactagaaaagggcggactgtcaggcaaaccaattgcaaagatttcaaacgaagcaatttctaagttttataaaattctaaaaaataaaacaaaaataataggagtgggaggcgttagcaatggacaagatgcttttgaaaaaatcatttctggtgcaacactggttcaattatacactggaatggtttatagaggtcctcgtatagcttcaaaaataagtaaagaattaattgatttgttaaaaaataaagggtttaaaaatgtttcagaggctatggaactaaaaattaatcttgacgcgataa

SEQ ID NO: 217993 - DNA, 296 bp, Unknown
  Bacterial polypeptide expressing nucleotide sequence isolated from the Sargasso Sea
tttgtataatactgcattaaaaatattaagattgtttccacctgaagtggctcacgatttaactttaaatatattgaaatataaaaaatttgtttcaaaaggttttgaagatccaattttatcacaacatttaatgggacttgattttccaaatccaataggtcttgctgcaggatttgataaaaatgcagaagtaattcaatctatgttttcttttggttttggttttatagaaattggaactgttactccaaaaccacaaaaaggtaatataaaacccagagtatttagactta

SEQ ID NO: 217994 - DNA, 699 bp, Unknown
  Bacterial polypeptide expressing nucleotide sequence isolated from the Sargasso Sea
agaaaaaagttatttttctaattagatcaaatcctccaaaaggtttactaggcataaatatcggtcccaataaagatactaaagacaaaataaatgactatctaatttgtttgagaacatttcatgatatagcagattatattactataaatatttcatccccaaatacagaacacctcagagattttcatgatcaaaataaattccaaaatttaattatagctattgaaaaagagatgattaagttaaaatctaatacaccaatagtaattaaaatttcgccagatattttgaatgaagaagcaaaaaaaataagtgaagtattattaaatcatagtatccaagctgtaataatctcaaattctacagataaaaacaggggacaattaaataaccatcaaaaatatcaaaaaggtggtttgtctggaaaacctttagagactagatcaaatgaattaataaaaatattttataacttactcaaaggaaaaatccccattattggagtaggaggagttgattctggtcaaagtgcttatgataagtttttagcaggggcaagttttatccagttatatactggcatggtttatcaaggtccaaatattatcaaaaaaattaaaaacgaacttaaaataatattaactaaaaaaagaataactaattttgaacaaattataggaaaaaataataattaat

SEQ ID NO: 217995 - DNA, 493 bp, Unknown
  Bacterial polypeptide expressing nucleotide sequence isolated from the Sargasso Sea
atgttttcaaatttaagatctttaattttcaaattagatccggagatagcacataatttagcaatcaaatcattaaaatttaactttgttccaaatattatagatgaagagaaagataatcctttattcaaaactaaattatttaataaagatttagaaaacccaattggtatggctgcaggatttgacaaaaatgccgaaatatataattcattatttaaactaggctttggctttgtagaagttggtacaattacacctttaaaacaatatggaaatcctaagcctagagttttcagattagttgaagatgaggcattaataaacagacttggtttcaataatcatggagctaagagtgtctttgatcggattaaattcaatactcaaattggtttacttggaataaatattggtccaaataaagatacagaaaatagacttggcgattatgttaaatgtttgaaaacttttgatgaggttgctgattata

SEQ ID NO: 217996 - DNA, 766 bp, Unknown
  Bacterial polypeptide expressing nucleotide sequence isolated from the Sargasso Sea
attcgaacctagagtttttagattagaagaagatgaagctttaataaataggcttggttttaacaattctggcgcagataaagtaagttatagaattaaatcacatcccccaaaaggtttattaggaataaatattggaccaaataaggatgctttaaatagagttaaggattacataatttgtttaaataaattttacaagttagcagactatctaactataaatatctcatcaccaaatactgaaaatttgagaagcttgcataatgagaacgaattagacgaacttttaagcgaaataaaaattgaaaaaaaaaaattaaaaacagatatacctatagctatcaaaatttctcccgatctcgaaaatgaaaaaattgaaaaattatcggaattactaatcaaatatcatgtttcaactataataatttcaaattcgactgacagtaatagagaaaagttaaaaaatattaataaattagaaaagggaggtctatcaggaaaacctctagagttaaaatctaacttacttataaataaattttataattttttaaataacaaagttaatattattggggtaggaggtgttgattctggttatggtgtatatgaaaaaattataaatggagcaagtttagtacaattatatactggaatggtttataaaggcccaggaataatatctaaaattaataatgaattaattcaaattgctaaaaaaaacggagtaaaaaacattttagaactcaaaggtactaaataa

SEQ ID NO: 217997 - DNA, 189 bp, Unknown
  Bacterial polypeptide expressing nucleotide sequence isolated from the Sargasso Sea
acggtctggcggcgctcggcttcggcttctcgaggtcggcacggtcacgccgcgcgcacagccgggcaatccgcgcccgcgcatgttccgcctgccgcaggcgaatgctgtgatcaaccggatgggcttcaacaacgcgggcgtcgaccagttcgtcaagaacgtgcaggccgcgcgctatcgcggcat

SEQ ID NO: 217998 - DNA, 836 bp, Unknown
  Bacterial polypeptide expressing nucleotide sequence isolated from the Sargasso Sea
agcaggttttgacaaaaatgcggaggtttataattcaatatttaagttaggttttggattttcagaagtcggaacaattacgccagagccacaaaatggaaacccaaaaccaagggtgtttagattaaatgctgaccaagcaattataaatagcctaggttttccaaatgatggaatgaacaaagtttacgaaagaattaaaaataatccgaagaaaagtattttaggaataaatattggaccaaataaggaaaatgcaactaaagaggatgattatttgagatgtatagaaaagttttatccgttggctgattatattactatcaatatttcttcaccaaatacgccaaatctgagaaacttacacgataaaaaaaaaatattagatttaattaatattcttcaaaaatttaaaaataattttaaagaaaaaaaggcaataatatttaaactttcgcccaatttaaataattcagaaattaatgatttatcagaaatatttttagaaaaaaaaatagatggcatagttttgactaataccactattgaagggaaggaattgctagaagacgaaaataaaaataaagagggcggattatcaggctacccattaaatcaagtctcaaatcaaataataaaaaaattttatataaattttaaaaagaccataccaataattggcgttggtggtgtgagcgatggcgttacagcctatgagaaaataaagtgtggagcaagtttgcttcagttatatactgcgatggtttttaaaggtccttatgttgcatcaaaaattaataaagaattatcaaatttgattaaaaaagatggttaaa

SEQ ID NO: 217999 - DNA, 777 bp, Unknown
  Bacterial polypeptide expressing nucleotide sequence isolated from the Sargasso Sea
gatgtacaacttatttaaagctttcctatttctttttgatcctgagataatccatagattaacaattttatttctaaaatttattccattaaataaaacttttattcccaaagaattaaatacaaaaattcttggtatgaatttttcaagtcctataggccttgctgcagggtttgataaaaatgctgaggtctatagtaaaatgtttaatcttggttttggctttgttgaagttggcactgttacacctaagcctcaagaaggtaactcaaagccaaggattcatagaattaagaaagaaagagtaataattaatagccttggattcaatagtattggttttgaaaaggtaaaagttaatctattgaataaaaaaactgaaggtattattggcgtcaatataggtgcgaataaagatagtaaaatttttatagacgattatatttctgggataaaatttttttcaaatcatgtttcatatataactatcaatatttcttctccaaatacacctggcttaagagaattacatatagagaaaaatttgaaagatttgcttgaaaaaattaaaaacctaaaaacaaataacgaaatagtagaagtccctctgttaataaaaatatcacccgatctaaataatgaggatcttagtattatgtgtgatatatttttagaatttaatgttgatggaattataatatctaatactactcttgaaaggccttttaagggttttggtgaaaatctgaaaggaggtttatctggagagttattata

SEQ ID NO: 218000 - DNA, 631 bp, Unknown
  Bacterial polypeptide expressing nucleotide sequence isolated from the Sargasso Sea
atgtctctaacaacccttggcatgaaaatctttgcaaaaatggatccagaagctgcgcatcgcctcgccattaatcttttacggtttgggctgtttcctagcagtaaattattattcaaagacccaatacttgaacagaacgtttttggtatcaatttctcaaatcctattggtctcgctgctggttttgataaaaatgctgaggcgtttgagccaattctcgcgctaggatgcgggtttgtcgaggttggttcatttacgccaagaccacaattaggcaatccaaaacctcgagcttttcggttattggaagatgaggctgcaatcagtagacacggctttaacaatgatggtcttgcaaaaggcctcgagcgattagcacttagaaaaaagagatcgggattagttggcatcaatcttggtatcaataaggactctaaagcgccaattgctgattatgtagattctattattcgcgcatcagcttacggtgattatatcactgtaaatatttcctcaccgaatactgaagggcttagagaacttcaaaatgcagataatctggattgcttattaaaagaaatttacaaagtaaaaagctcacaattaaacgataaaaaagtacctcctt

SEQ ID NO: 218001 - DNA, 268 bp, Unknown
  Bacterial polypeptide expressing nucleotide sequence isolated from the Sargasso Sea
attgttagataaaactataaaaattttaaaatttttaccaccagaattagcacattctattagtataaatgcacttaaatatcttaaatttaattttgaaaatttagacaacgaaatattgtatcagcatcttattggtttagacttcccaaatccaattggccttgcggctggatttgataagaatgctgaagtagttagatccatgttctcaattggattcggatttatagaagttggtacaataactcccctaccacaaaaagga

SEQ ID NO: 218002 - DNA, 474 bp, Unknown
  Bacterial polypeptide expressing nucleotide sequence isolated from the Sargasso Sea
aatgttttcaaatttaagatctttaatttttaaattagatcctgaaacagcacataatttggcaattaagtctttaaaatttaactttgttccgaatatcttagatgaagacaaagataatccattatttacaactaaattatttaataaaaatttagacaatccaattggaatggctgcagggtttgataaaaatgcagaggtctataattcattatttaagctgggttttggttttgtagaagtaggtacaattacacctttaaaacaatatggaaatcctaaacccagagtttttagattggttgaagacgaagcactaataaacagacttggttttaacaacctgggagctacaaacgttttaaaccgaatcaaatcaaaccgacaattaggtttattagggattaacattgggcccaataaagatacagaagataaacttagtgattatatcaaaggtttaaaaaattt

SEQ ID NO: 218003 - DNA, 613 bp, Unknown
  Bacterial polypeptide expressing nucleotide sequence isolated from the Sargasso Sea
atgttaaacgattttttattatgcgccaaaattttctttcctattggtgactatattactataaatatatcttctccaaatacagaaggattaagaagttttcataataaagaaaatcttgaaaagctacttttaaagataaacgaaataagagaaaaaagtaattttaaaaaatcttttcttctaaaaatctcacctgatcttgatgatcaatcaataaataatattgtagatttatctttgaaaactaacataaatggaataatcctaacaaacacttctgataaaaatagagacaaactacaagatattaaaaaaagtgaaaaaggtggtctctctggtcaacctataaaagatttgtccacgaaaatgatcaaaaagttttataaaaaactcaatggtaaaataccaataatcggtgttgggggcattgactctggagaagctgcttttgaaaaaataacagcaggcgcttcagctatacaattatatacgggaatggtttacaaaggaccaatgatagtaaaagaaattaaaaaagatttgatacaaaaattaaatgaaaaaggttttaaaaatattacagaggccgttgggtctaattctaattagt

SEQ ID NO: 218004 - DNA, 805 bp, Unknown
  Bacterial polypeptide expressing nucleotide sequence isolated from the Sargasso Sea
taccctcagtatggaaatgagaagcctagagttttccgtttaaaagaagacttggcattaataaatcatttgggatttaataataaaggtactgattatgtaaaaaataaactaaaaaaactaaaacttaattctctatcgaaaggtatagttggggttaatattggaaaaaataaaaatagtgaaaattatattaaagattatgagtattgtttagaacaattaggacatttggctcattatgtaacaattaatatatcttcccccaatacaccaggtctaagaaacttacaaaatagggggcaaattgaaaatttagttattgcattaaaaaagaaaaagaaaagtatcccaaatcttgaaacaactccaatttttctaaaaatagctccagatattaatgaagaacaaatgagggatattgccctgataagtttagcaaataacatagatggattaattattagtaattctacgactgaaagatcttcttcattaaaatcatttgctaaaaatgaaattggaggtcttagtggaaaacctttgttcttagaatctaccttaattttaaaaaaaatgttttcattaacaaatggacaaattcttttaattggagtaggtggcgtaagtagtggttcagaatgttatgaaaagatcaaatctggagcttctttaatacagttatatacagctttgacttaccaaggacctaaaattattgataaaattttaaatgatttaattaatttattgaaatctgatggatataaaaatatcaaagaagccattggaaaggacgtgtgaa

SEQ ID NO: 218005 - DNA, 315 bp, Unknown
  Bacterial polypeptide expressing nucleotide sequence isolated from the Sargasso Sea
aaaatgtaataagtagtaacaaatccgagttaggaggtctttctggcaaacctttaaaaagtatttcaacaaaattaattaaaagattctataaagacttaaaaaataaagttcctataattggggtaggaggaatagactctggaaaatctgcttttgaaaaaatatccgctggagcatctgcattacaactttataccggaatgatttatgagggacctatgatggtaaaaaaaataaaaaaagatttaataaagatacttaaagaacaagggtatgaaaatatcaaacaagctattggttcctactcctagt

SEQ ID NO: 218006 - DNA, 766 bp, Unknown
  Bacterial polypeptide expressing nucleotide sequence isolated from the Sargasso Sea
caaacctagagtatttagattagaagaagatgaagctttaataaatagacttgtatttaataactctggatctgaaaaaattagttcaagaatatctaaagtaactaaaaaaggaattcttggaataaatataggacctaacaaggacgcagaaaatagaattgaggattatttaaattgttttaaaaaatttcatagtttagccgattacataacaataaatatttcctcaccaaatacagaaaatcttagagatttccataatcatgaggaacttaattctttgataaaagaattaaaaaatgaaaaaggaaaattaaattcaaaagttccaattgcagtaaaagtatccccagatttaaatgacgaacaaattgaagttgtctcaaatgttttattagatcaggaaatagaaattattattgtatcaaatacaactgataaaaatagagataaattgaataatattaataaattagaaaaaggaggtctttcaggtaaacctctatatgagatttcaaataaaataattagcaaattttataaacttctaggtaataagataaaaataattggagtaggagggatagattctggcgaggctgcttttgaaaaaattgtaagaggagctagtcttgttcagctttacacaggcatggtttacaaaggcccaggaatagcctcttcaattagttctgaattaattgatatattgaaaaataaaggatttaaaaatgtttccgaagctgttggaacaaaaaattga

SEQ ID NO: 218007 - DNA, 460 bp, Unknown
  Bacterial polypeptide expressing nucleotide sequence isolated from the Sargasso Sea
aatgtattcaaatttaagatctttaatatttaaaatagatcccgaaagagcacattttttagcaatccaatctctcaaacttaatttagtttcaaatatttttgatgaaaataaaaatgatccaatattaaaaacaaaactatttaaccaaaatcttgataatcctataggtattgcggcaggttttgataaaaatgccgaggtatataatcctttatttaaattgggatttggatttgttgaggtgggcacagtaactccattaaaacaatatggaaatgagaaaccaagggtatttagattagttgaagatcaagctttaataaataggttaggttttaataatcatggatcggatataatattaaatagaataaaatctaataaaaaaataggtgtgctaggggtaaatattggtccaaataaagactcaaatgatagactaaaagattatttgatt

SEQ ID NO: 218008 - DNA, 307 bp, Unknown
  Bacterial polypeptide expressing nucleotide sequence isolated from the Sargasso Sea
aatgtttaattttataagaccactaatttttaaatttagccccgaagtagctcattctttagcaataaaagcacttaagttaaataatattccttactcaaaacccaaagatagtcatattttagagataactttttgtgaaaaaaaattatcatcaccaattggtattgctgctggatttgataaaaatgctgaagtatataatcccctttttaatcttggatttggttttgttgaagtgggaacaattaccccaaagcctcaatttggtaaccctaaaccaagagtttttagacttgaggaagat

SEQ ID NO: 218009 - DNA, 667 bp, Unknown
  Bacterial polypeptide expressing nucleotide sequence isolated from the Sargasso Sea
gatgttttcaaaaataagatctttaatttttaaattagatcctgaattagcacattctttagcaattaaagctttaaaatttaattattttccatttcaagataataaaaaatataattctcttgaaatagatatttttaagaaaaaaatacctaatcctataggtattgccgcaggatttgacaaagatgctgaagtgtacaattcattatttagattaggttttggattagtagaagttggaactataacaccgatcaaacaatatggaaatcctaaaccaagagtatttcgattagaagaagatgaagctttaattaacaggctaggttttaatagttcagggtcagacattgttagttcaagaattaaatcgaatccacctagtggattatttggaattaatatagggccaaataaagattcaaaaaatatgctagaagattatctaattggtttacgcatatttcataaacttgctgattatttaacaataaatatttcatcgccaaatactgaaaatttaagaagttttcatggtcataatgaattaaacgagctgttaaatgcaattaatctagaaaaacaaaaactaaaaagtaatatttttatcgcagttaaaatctcacctgatattgaagacaataatattgaaaaaatttgcgaa

SEQ ID NO: 218010 - DNA, 514 bp, Unknown
  Bacterial polypeptide expressing nucleotide sequence isolated from the Sargasso Sea
ttgaatttttttcttaaaatttttaaattattaccaccagaattagctcatacgatttcgttaaattctttaaatatattgtataacataggccttgtaaggttattttcaaaacaaatcctaacaaatgatgattttaattttttaggaatgaattttaaaaacagactaggcactgcagctggcctagataaaaacggagattttatcaattcattaggagaattaggatttggtttcttagaggttggcacagttactccaattgctcaaaaaggtaattcaaaaccaagagtatttagagcatatgaggatcaagctatcatcaaccgtcttggctttaataataaagggattgattatttagtagataacttaaaaaaaagaaagtacaaaggcattgtcggtgtaaatatcggcgcaaataaatcctcaaaaggaacagaaagaattaatgattatttgatatgtttagagaaagttcataaatatgctgactacattacccattaat

SEQ ID NO: 218011 - DNA, 855 bp, Unknown
  Bacterial polypeptide expressing nucleotide sequence isolated from the Sargasso Sea
taaagcagaacattcttggtatagattttgaaaatcccttaggtcttgctgctggttttgataaaaatgctgaagttatactaccaatgattcgttatggttttggatttgttgaagttggaacagtaacccctaatccacaaaaaggtaatcaaaaaccaagaatttttagattattagaagatgaagccgttattaaccatctaggttttaataataaagggagtgatagaatattaaacaatcttatagaattttatcaaaataaagaaattaatagcgttgtaggtgttaatattggtaaaaataaatctactaaaaatgatttcgatgattatttgtattgcattgaaaaacttggtgaatatgggaattatataactattaatatttcgtctcctaacacaccaggattaagagatttgcaattgcggggtagaattgaggctttagtaaaaaaaatacaaagtaaacaatttgaaatcaaagaattaaataataagcctatatttataaaaatttctccagatcttgatgatgaacaattaagagacattgctttaatggcactggcaaacaatattaacggtttaatcatttctaactcaagtattaagcgtcctaaatcattaatttcgtattataaaaatgaattaggtggattaagcggtaaacctatttttattgattcaactataattttaaaaaaaatgtactctcttactaatggtcaaattcctttaataggtgtaggaggagtctcgaatggttatgaatgttatgagaaaattaaagcaggggcttgtttagttcaattgtataccgctcttacttttcatggaccgaaaaaataat

SEQ ID NO: 218012 - DNA, 655 bp, Unknown
  Bacterial polypeptide expressing nucleotide sequence isolated from the Sargasso Sea
cgaaccttttgaaactcatttcattgcgaatgtctcgggttcaacaattgatgaatacgttgaggtctgtagaatatttgaccaatcaaacatacatgcgattgaattaaatatttcctgtcccaatgttaagaagggcggcatggagtttgggaatgatccagaaatgtctgctcaagttgtcgaggcctgtaagggtgcaacctctaaaccaatcatcactaaactatcgcccaatcaagcggatataaaggaaagtgccaggaaatgtattgatgccggaagtgatgcgctttcagtgattaatacgattaccggtatggccatcgatatcgatactaagcgccctgtattgggcaatacctcaggcggtctctcaggaccagcgattaagccaattgccctacaaaaagttatgcaggtgtatgaagttgctggccctcaaaatattccgatcatgggccaaggcggaattagctctgttaaggatgcgcttgaatttatcatcgcaggtgcttcgaccataggcattggaactgcattattcattgacccgcttgtttgcaataaaattaatgggggaatagaaaaatatttaagcgctcaaggtttagatggagttgaaagcctggtggggagccttataagagattaa

SEQ ID NO: 218013 - DNA, 472 bp, Unknown
  Bacterial polypeptide expressing nucleotide sequence isolated from the Sargasso Sea
ttgaacttttttttaaatatatttaaattattaccaccagaggtagcacataccttggctttaaaatcattgaatattctatacagaactagtttattaaaacttttttataaaccagttaaaactcgtgattttaatttattaggattaaattttaagaacaaacttggagtggcagcaggtttagacaaaaatggagactatattgatagtcttggcagcttgggttttggttttcttgaggttggaacagttacgccattaccacaagctggcaattctaaacctcgtatgtttagagcttttgaagacgatgcaattataaataaactgggattcaataataacggggtagattatttagttaatagattaaaaaaaagaaactataaaggtattattggcgtaaacattggtgcaaataaatcatcgactggagacaaaagaattgaggactatcttatttgttaag

SEQ ID NO: 218014 - DNA, 781 bp, Unknown
  Bacterial polypeptide expressing nucleotide sequence isolated from the Sargasso Sea
taatcccaaacctaggctatttcgattgccaaaagataaggcggttataaatagatttggctttaataatttaggaatgcatatcgtatctgcgagattagcgaaacgttcagaaaaaggaattgttggggtaaacctaggggcaaataaagatagtgacgatagaataaaagactatgttaaagttttgaaatgttgtgggccttttgtcgattttgcgacagttaatgtaagtagcccaaatacggagaatttacgaaatctacaggaaaaaagttccttaaataatttactttatcaagttatgtccagccgtgaaaatttaataaataaggtgccaattttcttgaagattgctccagatttatctttaaatcaaattgatgatatttctgaaattgcattaaaaatgcaaattgatgcagtcgtagctacaaatacgacgttagatcatcaaggactgaaaagttatgtaaaaaataaacagggtgggttgtctggtagaccgctgttttcaaagtctacatgggtgcttgccaatttgtcgaggcgtttagaaaaaagagtaccgctaataggtgttggcggcatcgcttctgctcaagatgcttacataaagttacttgctggagcctcagccgtccaactctacactggcttagtttacaatggaatgggtttagtgacaaagataaataccgggctcagcgaaattttatcacagcaaaataaaactcatatatctgacatagttgggtctgaagcagaggaatttttgtag

SEQ ID NO: 218015 - DNA, 781 bp, Unknown
  Bacterial polypeptide expressing nucleotide sequence isolated from the Sargasso Sea
gactatgttgaggagcttgaatcacttggatttggatttattgagcttggaactgttacaccaagacctcaagaaggaaatcaaaaacctagagtatttagatatataaatcagcgagcagtagttaataggctaggttttaataataaaggtgtagattatttagtttctcaaataaaaaacaaaaaatatgatgcagtaattggcgtaaatattggagctaacaaagagagcaagaatgatcaaagagttgaggattatgtttactgctttgaaaaagttcataaatattgtgattatgttactgttaatatttcctcgccaaatactcccgaattaagaaaacttcataatccagatgagcttgaaaagatttttaaaagaattaatgaaattaaatctattaatcagactgatattccaattcttttaaaaatatctccagatgaaaatcaagaaacaattcttaatatattaaaaatacatgagactttaaaaattaatggattaatagtttcaaatacttcaattgataaaggcattcttgagaattgctctcatgaaggcggaatttctggaaaacctttatttgaaaaatctaatcaactaattcaaagggtacatgaatttgataatgagattttcttaattggcgtgggtggagttttctcaaaagaggattatgaaagtaagataaaattaggtgctagtttggtacagatctataccgggtttatttttgagggacctgcaattgtaaaaaatatcttatctagatgaa

SEQ ID NO: 218016 - DNA, 766 bp, Unknown
  Bacterial polypeptide expressing nucleotide sequence isolated from the Sargasso Sea
aatccccggccccggatgttccgactgacctcagcgcaggcgctggtcaaccgcatgggatttaatagcgggggtctcaacctgttcctcgccagactcgggcagcaacatcagcaaacgatcatcggcattaatctcggccgtaatgcgacaacttccaataatgaagcctggcgcgactacctgactgggctgcgggcggtgtaccgtgtggccgactacgtgacgatcaacatctcatcacccaacacagaggggcttcgcgatcttcaggagcacgacgccctggatagcctgatccagtacctgaaagacgagcaaaccagacttgccgacctgcacgagaagtacacgcccattgcggtgaagatttcacctgatctcgatgccgaatcgatcgcacgcgtcgccgaggtgctcattcggcgaggcatagacgggattgttgcaaccaataccacaatcagccggcccctgaatacggatgcccatccgcatgcgttgcaagcgggcggcctgagcggcgcgccattggcgaccctttcacatcgcgtgatcactgaactcaggcagcataccccatctgagtttccggtgatcggggtcggcggcataatggatgccgcttcagcccaggccgcgttttcagcaggcgcgaccctgatccagctttacagtggactgatctaccggggacccgctctggtgccggagattctgaaggggctgcaaactgctaaaacggccgtttctgagttaacctgat

SEQ ID NO: 218017 - DNA, 871 bp, Unknown
  Bacterial polypeptide expressing nucleotide sequence isolated from the Sargasso Sea
cacaaaaatagctaatttagaatttaaaaatcctataggccttgctgcaggatttgataaatcaggtcaatgttttcatggtatatttaaactgggattttcatctgttgaagtcggaacggttactccattttctcaagcgggtaataataaaccaagagttttcaggttatataaagatagggccgtaataaacagctatggttttaataatgatggtatggaaattgttaaaaatagactgaatgatggcaaaaaaagagatggcgttttaggagtaaatattggcccaaataaaaaatcaaaaaacccaatagaagattttaaagttacctcaaaaaatttatcaaaatattgtgattacattacaattaatatttctagccctaataccccaggtttaagaaacatgcacgataaaaatttattaagtgaagttataaaagctactaaagaaggtatttctgaagtaggtagtcataaaccaatttttttgaaaatttcgcctgatgagaaaatttctaccattacacaaattataaatacttcaataaatgaaaatatagatgctcttgttatctcaaatacaacaattgaaagacctgtatatttaaacagcaaatatcaatatattaaaggtggattatcaggaaatcctctatttaaaaaatccactaaacttctagaaaatatacataaaataacaaatggtaaaattgaccttgttggtgttggaggagttgaaagtgctaatcaagcatatgttaaaatattagttggtgctaagctagtacaattatatactggacttttgtttcaaggacctaatattgtaaagattataacatctcaattaagcgaattttcttaa

SEQ ID NO: 218018 - DNA, 655 bp, Unknown
  Bacterial polypeptide expressing nucleotide sequence isolated from the Sargasso Sea
aatgttttcaaaccttagatctttaatatttaaaatagatcctgaaagagctcattttttagcaatccaatcacttaaacttaatttagtttcaaatatatttgatgagcataaaaatgaccctatttttaaaactaaaatttttaataaagagttaaataatccaattggtatagcagcaggctttgacaagaacgctgaggtttacaaccctttatttaagttaggatttgggttggtagaggttggtacaattacacctttaaaacaatatgggaacagcaaacctagagtttttagactagtagaagaccaagcgttgataaacagattgggtttcaacaatcatggttcagacgtggtattaaataggattaaatcaaataataaactgggagtgttaggaattaacgttggtcctaataaagattctgataatcgaataaatgattatttaataggaattgaaaaattttatgatgttgcagattatattactattaatatttcgtcacctaatactgaaaatttaagaaattttcatgaccaagaaaaattgcaagacttattaaaaactatttcagaaaagaaaaaaaatttaaagacaaatatacctatagtagtaaaaatttcacctgatataagtgaaacacaa

SEQ ID NO: 218019 - DNA, 500 bp, Unknown
  Bacterial polypeptide expressing nucleotide sequence isolated from the Sargasso Sea
aatgtttgaaaaaattagatctttaatatttaaatttaatcctgagacagcacacgatttagcgatcaaagcactcaaaaccaatgtaattccagttaaagcaaaaagttttgattgcttaaaagttaagtttttaaacaaagaaattccaaatcctattggcattgctgcaggttttgataaaaatgcagaagtatataactctttgtttcagctagggtttggatttgttgaagtaggaactattacgccagaacctcaatttggtaatccaaaaccaagagtatttagacttgaagaggatgaagcattaattaacagacttggatttaataacataggatcaaaaaaagttactttaaatattaaaaataattctccaaaaggaatattgggagttaacattgggccaaataaagatacgaaaaatagaatagatgattacttaaaatgttttagaacttttaaacatctaggagaatatataccaataaatattt

SEQ ID NO: 218020 - DNA, 806 bp, Unknown
  Bacterial polypeptide expressing nucleotide sequence isolated from the Sargasso Sea
taaagaattgtcaaattttgtttttggatttatagaagttggaacagttacacctttaaaacaagatggaaatccaaaaaaaagactatttagattagaagttgatgatgcattaataaatagaatgggctttaataatgaaggagttgaatctttaatttccagattaaagaaaaaaaaggatatagttgttggagtgaatattggaaaaaataaaaatactaaaattgaaaattcaattgatgattacgagttttgttttaacaagttacatcgatatgttgattatttcgcaataaatgtaagttcgccaaacacaccgaatttaagattgttgcaaaaaaaagattcattattaaaaattttaaatagattaacatttttgaataataataaatccaaacaaaaaccaattttccttaaaatctctcccgatttaaatgaaaaacaacttgaagatgtaattgactcagtaattaaaacaaaattatctggaataattgccactaacacaactttaaatagagaaaacttaaattcaaatattaatcttataaacgagtcagggggtttgagtggtaaacctcttaatgaaagaagtaatgaaataataagttttatatctaaaaagtcaaaaaaatcctttgttataattggagtaggaggaattcaaagttctcaggatgcaattgataaaattaaagccggtgctgatttaattcaaatatatactggttttatatataaaggaccaggcttaattaaaaaaataaataaatctctgttatctcttaataataagtgaa

SEQ ID NO: 218021 - DNA, 405 bp, Unknown
  Bacterial polypeptide expressing nucleotide sequence isolated from the Sargasso Sea
aatgtttgaaaaaataagatcgttaatttttaaatttgatccagaaacagcacacgatttagcaattaaagccttaaaaactaacgtagtaccagtaaaagcaaaaagttatgattgtttaaaagttaagtttttagaaaaagaaatcacaaaccccataggtatagcggctggttttgataaaaatgcagaagtatataactctttattcaagttgggatttggatttgttgaagtaggaactataacaccccagcctcaatttggaaatccaaaaccaagagtatttaggttagaagaggatgaagctttaattaatagacttggatttaataatataggatctgaaaaagcagcaaataatttaaagaataactctccaagaggactgcttggaattaatat

SEQ ID NO: 218022 - DNA, 427 bp, Unknown
  Bacterial polypeptide expressing nucleotide sequence isolated from the Sargasso Sea
gaaaattgcgccggatctggacgatgccgaacgggccgatattgccgccgtcattatggactccgatgtcgacgggttgaccgtggcgaatactaccgtcaagcggccggaccacatgaccgacccgcaaacccctgaagacggcggcttaagcggtgcgcccctgtttccctttgccctggcaatcgtccgcgatatgtatcgccgcacggagggcaagctgccgatcatcggttgcggtggtgtcgccagcggggcggacgcctacgctatgatccgggccggcgcatcgctggtacagctttataccgcgctggtatttcacggcccggccctgatcccccggatcaaacgggatttgaccctacttctgaaaaacgacggtttcgtgtctgtttccgacgctgttggcgccgatcacagttga

SEQ ID NO: 218023 - DNA, 800 bp, Unknown
  Bacterial polypeptide expressing nucleotide sequence isolated from the Sargasso Sea
aacagttacttttaaagcacagtatggaaatccaaaaccaagagtttttaggcttgaaaaagatcgagctcttatcaatagactaggttttaataatgacggtgtacagaaagtttcacaaagacttcaaaaaaatcctcctactggttttttaggaattaatattggccccaataaagatagtgaaaatagaattgatgattacttaaaatgtataaaagaaattaatacatttgctcattatataactattaatatttcatcacctaataccccaggtttaagagattttcatgatcatagtactttacaaaatctattaggcgaaataactgaattcataaaaaaaaataaaattaacaaacctttagctcttaaagtatctcctgatatagctgataaagaaataggttttattattgagtctattaaaaaatttaaaataagtgcgattattatttcaaatacaacagacaaaaatcgagaaagtttaataggaattcataaaagtgaagtaggaggtttatccggagaaccattgagtaagatttcaaatgatttaataaaaaaattttacagagaaactaaaggaaaaattataattattggagtaggcggtatcagctcaggattaacagcttatgaaaaacttaaatctggtgctaatttattacaattatacactggaatggtttatgaggggcctggaatagtaaaaaaaattaaaggtgaactaatagacatatttaaaaaagagaaaattaaaaatgtgagtgaaatagtaggaactggttcataat

SEQ ID NO: 218024 - DNA, 328 bp, Unknown
  Bacterial polypeptide expressing nucleotide sequence isolated from the Sargasso Sea
atgttttcaattttaagaccttacattttttcattagatccagaagtagctcatgacttggctattaaatcattaaaagcaaacattcttccaaaaagtttttttaaagttgaaagcgaggaaatgcttgagacaaatctttttggaaaaacgatttcaaacccaataggcttagcggcaggttttgataaaagtgctgaggtttataattctctttttaaatttggctttggttttattgaagttggcactattactccgaaacaacaattgggaaatccaaaaccaagaatatttagattagagaaagatcaagcacttattaatc

SEQ ID NO: 218025 - DNA, 964 bp, Unknown
  Bacterial polypeptide expressing nucleotide sequence isolated from the Sargasso Sea
tctattctttcacaacatttaatgggtttagattttgtaaatcctataggacttgctgcgggttttgataaaaatgctgaagtgatgaattcaatgttttcgtttggttttggttttcttgaagttggcacaatcactcctcaacctcaaaagggtaattcaaaacctagagtatttagattaagtgaagataaagcaatcatcaatagtttaggatttaataataagggaattataaaagtaaaaaaaaatttaattaaatatcaaaaatcatatttaaataataagattgtaggagttaatattggaaaaaataaaaattccagtgaagctattgatgattatctaagaggtttagaagagttaggtgatttagcaagctatataactataaacatatcttcgccaaatactgaagggctgagagatctgcaattgagaggaaagatagaaaaattaattaaaaaaattatagacaaaagagatgaaataaaaaaaattaataccaagccaatattaattaaaatttcacctgatttaaatgaagatcaattaagagatatagctttaatttcattagctaacaacatagatggattgatacttacaaatagtaccataaaaagaaatgataatttaatttctataaataaagaaaaaaaaggaggcctaagtggtaaacctttatatgacaattcaaatttagttttaaaaaaaatgtatgaattaacaaatggtcagataccattaattggagtaggaggcatatcaagtggaagagattgttatgaaaaaattaaatccggtgcttctttagttcagctgtatactgctttggtttattctggtccaaatttaattaatagtatgaaaggtgatttgattgatctgattaaaactgatggatataaaaatgtgtctgaagttgttggtaaatcgggtataaaagtgaaaaaaaaataaa

SEQ ID NO: 218026 - DNA, 525 bp, Unknown
  Bacterial polypeptide expressing nucleotide sequence isolated from the Sargasso Sea
attgaaagcttttataaagatttttagattcttcccaccggaaaacgctcaccatttagctttattaagtttaaaaattttaaataaggttagaattttgaagcttttctttcctgacaataaagattttgataatcctaaaaaatattttaatcttaaatttagaaacacgctgggcgtagcagctggtcttgataaaaatggcgattatgttgatgagcttgaatcacttggatttggatttgttgagcttggaacagttacaccaaaaccccaagagggaaatcaaaaacctagggtatttagatatttaaaccagcaagcagttgtcaataggcttggatttaataataaaggagttaattatttagtttctaaaataaaaaataaaaaatatgatgcagtaattggagttaatattggagctaataaagaaagtacaaatgatcaaaggatagaggattatgtcttctgctttgaaaaagtttacaaatattgtgattacatcacatttaacatctcctc

SEQ ID NO: 218027 - DNA, 741 bp, Unknown
  Bacterial polypeptide expressing nucleotide sequence isolated from the Sargasso Sea
gattgttccgactgatgaaagatggcggaattatcaacagaatgggcttcaacaatgatggtcttgaagcggcgatcgaaaaacttaaaggcaacaaaggcaaaattattatcggtggaaacatcggaaaaaacacgaacacaacacctgaaaattatactcaggattatttggattgttttgaaggtcttcatccttacgtagattattttgtactgaatgtaagctgcccgaatgttggaagtcacgcaaaactggaagatgttgagtatttgagagagctgattacagctgtaaaagaaattaatcaaaccaaagtaaatccaaaaccaattcttctaaaaatagctccggatctgaataatcagcaattggacgaaattatagaactgattgcagaaacaaagatcgacggaattgtggtttctaatacttctgtgaacagagaaggtctgaaaacttcaccggaagttttagcagaaatcggaaatggtggtttgagcggaaaaccaattcgtgaacgcagcacaaaaatgattaaatatctttcaaataaaagcaacagagctttcccgatcatcggagttggtggaattcattctgcaaaagatgccattgaaaaactggatgcgggagcaactttagttcagttgtacacaggttttatttacgaaggtccgcaattgattaacgatattaatcaggaaattttgacgagagcgggtagaatttcgaggtaat

SEQ ID NO: 218028 - DNA, 532 bp, Unknown
  Bacterial polypeptide expressing nucleotide sequence isolated from the Sargasso Sea
atgttttcaatttttaaaccttatatattttctttggatccagaagttgcacatgatctggcgattaaatcattaaaatttaatttattacctaaaagtattttcaatgttagggatgaagaatgtctagaaacccatttacttaatgaaaaaatacctaatccaatcggtcttgccgcaggttttgacaaaagtgctgaagtttataactctttattcaaattaggttatggttttgttgaggttggaaccgttacaccaaaaagacaacttggcaatattaagccaagagtgtttagattagaaaaagatcaggcattaataaatcgtctaggttttaataatcacggctctgaaatagtttttcaaagaattgctgaaaatttgccaagtggttttttgggaatcaatgttggtcctaataaagacacaaaaaataaagaggaagactattatttatgtctatcaaaactatcatctatcgctggctacataacaataaatattcttctccaaatactgaaggattaag

SEQ ID NO: 218029 - DNA, 739 bp, Unknown
  Bacterial polypeptide expressing nucleotide sequence isolated from the Sargasso Sea
atgtctctaacgacccttggcatgaaaatctttgcaaaaatggatccagaagctgcgcatcgcttcgccattaatcttttacggtttgggctatttcctagcaggaaactattattcaaagacccaatacttgaacagaacgtttttggtatcaatttctcaaatcctattggtctcgctgctggttttgataaaaatgctgaggcgtttgagccaattcttgcgctaggatgcggatttgtggaagttggttcatttacgccaagaccacaattcggcaatccaaaacctcgagcttttcgcttattggaagacgaggccgcaattagtagacatggctttaacaatgatggtcttgctaaaggcctcgagcgattagcatttagaaaaaagaaattgggattagttggcatcaatctaggtattaataaggcttctaaaacgccaattgttgattatgtcgattctattatccgagcatcagcttacggtgattatatcactgtaaatatttcttcaccgaatactgaggggcttagagaacttcaaaatgcaaataatctggattgcttattaaaagaaatttacaaagtaaaaagctcaatattaaacgataaaaaagtacctcctatattattgaaagtggcacctgacataaccaatagaatggtagaagatattatcaatctcgcattaaaatataagattgacggattaattgtggcaacaccactattca

SEQ ID NO: 218030 - DNA, 457 bp, Unknown
  Bacterial polypeptide expressing nucleotide sequence isolated from the Sargasso Sea
aatgaatccgcctatcggctttttgggaataaatattggcccaaataaagatactgataataaagaggaagattattacttgtgtatggaaaaactctcttctctaggaaattatatcacaataaatatatcttcgcctaatacagaaggtcttagagatttccacgatcaaaaagaattagacaaacttttaagtggtataaataaaattaagaaagagaaaaatatttcaaaaccaatttttgttaaactttcaccagatattgccgatagtgagataagtaaaataatagaacttattatgaaatataaaatagctggtattatagtttcaaatactactgacggtaatcgtaaagctttatctgatactaaaaaaaatgaagctggaggattgtcaggaaaaccattgaaaagcctttctactaaattgatacaaaaattttcaaagaaacca

SEQ ID NO: 218031 - DNA, 504 bp, Unknown
  Bacterial polypeptide expressing nucleotide sequence isolated from the Sargasso Sea
aatgttttcaaatttaagatctttaatttttaaactagatccagagatagcgcatagtttagcaataaaatcgttaaaattgaattttgttccaaatattttaaattcgaataaagataatgatttatttaaaaccaaattattcaataaagacatagctaatccaattggagtagcagctggatttgataaaaatgctgaagtttataattcattgtttaagcttggatttggttttgtagaagctggtaccgttacacctttaagacaatacggcaatcctaaacctagagtttttagactagtagaggatgaagccttaataaatagattaggttttaataacttaggtgcaaaaaatattgctgataggattttatcaaataaacagatcggcttacttggaattaatattggtcctaataaagatacaaataatagacacaacgactatgtcgaatgtttaaaagcctttcatagaattgctgattatattacaatcaa

SEQ ID NO: 218032 - DNA, 669 bp, Unknown
  Bacterial polypeptide expressing nucleotide sequence isolated from the Sargasso Sea
tatgaattttaatagtcctatcggtttagcagctggatttgataaaaatgcagagatctataatcaaatcattgatttaggttttagttttactgaagtgggaacaataacccctcttccccaagagggtaatccaaaacctagagtttttagattaattgaagataaagccatcatcaatagattaggttttcctaatgatggtatgtcaatcatttgtaagagaattaaaaataatcctgctaaggggatttgcggtgtaaacattggaccaaataaagaaaatgcaacttctattgaagattacttatcatgctttgatcaattctttaattatgcgtcttatataacaataaatatatcctcgccaaatacaccaaatcttcgttcacaacatgatgatgataaaatcagccaattaattgattcaattcaatggaaaaggagtgaaaataagtcaaaaattccaatactattaaaaatatcgccagatatagatgacaataaaataaaaaatctatgtaatatatttattaagaaaaaaattgatggaataattttaacaaatacaacaattaaaaatagggataatttatttaataaaaataaattcgaaaaaggcggtctttcaggagcaccattgaatgatttatctaatgatgtaattaa

SEQ ID NO: 218033 - DNA, 664 bp, Unknown
  Bacterial polypeptide expressing nucleotide sequence isolated from the Sargasso Sea
aattttggtaagtctaaaattacagatttatctcaagcaaaagatgattatttaacttctctaaaattattaattccatattgtgattatgcagcaataaacgtaagttctccaaatactgcaggactaagaaagttacaagatccaattctgctaaaagaacttattaaagaaattaaaaacttacccagttgtccaccattatttgtcaaaattgcaccagatctaagctttaaagatattgaagatatttgccaattaataatcgaggaaaacatcgatggaataattgctactaacaccagcatagatagattaggtcttgaaaatagaaagatcatgcaaaccggattattactttctgaagaaaatggaggattaagtggaaggcctctacaaaaaaaagcaaatcaaataataaaacatattcataatattgataaaaagattattttaattggcgttggtggaattgatagtcctgagtcagcatgggaaagaatttgttctggagcatcattaattcaactttatacaggatggatatataagggtccacaattagtacccgatatacttcaaggaattataaagcaactcaatatccataaattatcaaatataaaagaggccattggatcagatctaaaatggattgaataaa

SEQ ID NO: 218034 - DNA, 345 bp, Unknown
  Bacterial polypeptide expressing nucleotide sequence isolated from the Sargasso Sea
aatgttttcaaatttaagatctttaattttcaaattagatcccgagacggctcatagtttagcgataaagtcactaaaatttaattttattccaaatattttagatgaagaaaaaaataatcctctttttaagactaaattatttaataaagaaatagaaaatccaattggtatggcagcaggatttgataagaatgccgaggtatataattcattgttcaatttagggtttggtttcgtcgaagtaggaactgttacaccatttgaacaatacggaaatcccaaacctagagtttttagactagtagaagatgaggccctgataaatagacttggtttcaataa

SEQ ID NO: 218035 - DNA, 289 bp, Unknown
  Bacterial polypeptide expressing nucleotide sequence isolated from the Sargasso Sea
atgttttcttttctaagacctttcatatttaatttagatcctgaaaaagcacatgatttagcaattaaatctttaaaatataactttttacctgaaaaattgttttatgttgaaaatgaggagattcttaagacgaacttatttggaaaggaaatcaaaaatccaattggtttagcagctggatttgataaaagtgctgaagtttacaatgaaatattcaaactgggatttggttttgttgaagttggaacagtaactccaaaacagcaatatggaaatgaaaaaccaa

SEQ ID NO: 218036 - DNA, 296 bp, Unknown
  Bacterial polypeptide expressing nucleotide sequence isolated from the Sargasso Sea
aatgtttaatattttaagaccactaatttttaaatttagccctgaagtagcccattctctagcaataaaagcactaaagttaaataatattccttactcaaaacccaaagataatcatattttagaaacaactttttgtggaaaaaaattatcttcaccaattggtgttgctgctgggtttgataaaaatgctgaagtatataatcctctcttcaatcttggatttggttttgttgaagtagggacaatcactccaaagcctcaatttggcaaccctaaaccaagagtttttagac

SEQ ID NO: 218037 - DNA, 277 bp, Unknown
  Bacterial polypeptide expressing nucleotide sequence isolated from the Sargasso Sea
ttgccaactgaattatcacatacattagccctgaaaggtctaaagctagttacttcgatggggtatagaataaatcaatcaaaagacgaaaaagaactgcatttatttaattcttattttcggaaccctctaggattggctgcaggattagataaaaatggtgactatatagatgtttttgcagctcttggatttggttttctagagataggaaccgttacaccaaaaccccaatacggaaataaaaaacctagattgtatagagataaatcttctc

SEQ ID NO: 218038 - DNA, 892 bp, Unknown
  Bacterial polypeptide expressing nucleotide sequence isolated from the Sargasso Sea
aaaacttaatttttatcctagaacaaaaacactaaatatttcaattaaggttgataagatgttagtaaaaaatccaatagggttggctgcaggctttgataaaaatggtgtaataattaaacaaacttctaatctgggatttggttttacagagataggaaccattactccaaattaccaatatggaaataaaaaacctagagtttttcgtctgttagatgaaaaaggtattataaacagaaatggttttaacaatgaaggtattgttaaagttaagcaaagactaaaaaaatataggaattcttttaattttaacaattcttttaaagtaggtgttaattttggagcaaacaaagattcacttgatagaataaatgattataaattattagcctctaatttatcagaatatgctgactttatttcaataaatgtttcttcacctaatacacctggattaagaagccttcagtctgaaaagtctttaattgaagtaatagattctgtttataacgggttaaagaatgaaaaagctaaaagaattaatattccaatttttataaaaatatctccagaccttgaaattcatgatttagaaaatatgattaatgttgctattaaaaaaaatataacagggttaataatttcaaacactacagttgacagagatttgagcttaaaaacaatccataaaaaacaatctggaggtttgtctggaagaccattatttaaaaaatctactgaaattttgataaaagcaaataaaatttcaaaaaaatacaattcaaaactttattttatagctgctggagggatagaggattctatatctgcatatataaaaatactttgtggagctcatttattgcaattgtacacatctttaacattt

SEQ ID NO: 218039 - DNA, 702 bp, Unknown
  Bacterial polypeptide expressing nucleotide sequence isolated from the Sargasso Sea
tatctaatttaaaatctttctatgctcataaagatattaatgaagttattggaattaatattggaaaaaataagtcaactaaaaacgacatagatgattacctttacagtattgaaaaacttggaaattatggtgattatataactatcaatatttcatcaccaaatacacctggtctaagagacttgcaattacgcggaaggatagaagcattggtaaaaaaaattcaaaaaaaacaatctgaagtagaccatttacaaaaaaaaccaatttttataaaaatttctcctgatctcaatgatgagcaactaagagatattgctttaatgtctcttgctaacaatgttgacggtttaattatttctaattccactatccaccgtcctgatactttaatttcaaattataaaaatgaggtaggtggactaagtggtaaaccaatatttttaaattcaactattcttcttaaaaaaatgtactctttaactaacggtcaaattacacttataggagttggtggtatatccagtggttatgagtgttatgaaaaaataaaagcaggtgctagtttggttcaattatataccgctttagtttatcagggtccaaaaattattaatcaaattttaaaagaacttgatgaattaattactatcgatggatacaataatatttctgaagctattggtaaatctatctaat

SEQ ID NO: 218040 - DNA, 835 bp, Unknown
  Bacterial polypeptide expressing nucleotide sequence isolated from the Sargasso Sea
gttgggttttggatttgttgaagtaggtacggttacaccattaaaacaatatgggaatgaaaaaccaagagtgtttagattggtagaagatcaagcattaattaataggttaggttttaacaaccatggatcagatacaatattaaacagaataaaatctaataaaaaactaggtgtactaggtgtaaacgtaggtccaaacaaagattctaataatagactgaatgattatctaattggattagaaaaattttctgaagttgcagattatattacaattaatatttcttcaccaaatactgaaaatcttagaaattttcatgaagagaataaattgaaagagttattaaaatctgtctcagagaaaaaaaaacaattaaaatctgaaattcctgtagctgtaaagatttcacctgatataagtgaaaatcaaattgacttaatttcagaaatacttttagaaaatgaaataagcgcaataataatttcaaatacttctgaagcttctcgggaaacacttcaaaatatacagagatatcaaaaaggtggtttatctggaaaacctattgaaaaaaaatcaaatcttttaataagtaagttctacaatttaattaaaggtaaaattaaaataattggagtgggcggcgttgactcaggtaaagcagcctatgataagtttttattaggagcagattatgttcagttgtataccggcatggtatttcaaggacccaatattgctggcatgattaaaaaagacctaaaagaattactaataagagatggtgtcaaaaatttctcagaaattgtggaaataaaactgtttcttaaatgt

SEQ ID NO: 218041 - DNA, 266 bp, Unknown
  Bacterial polypeptide expressing nucleotide sequence isolated from the Sargasso Sea
aatgttttctgttttaagaccttttttatttaacctggatccagaaacggctcatgatttagccattaaatcacttaagtttaattttttcccaagaagcatgtttgaagttgaagatgaagaaatgctaaaaattgaacttttaggaaaaatttttcctaatcccataggtttggccgcaggttttgataaaagtgccgaagcctataattcattgctaaaattaggatttggttttgttgaagttggaacagttactcctttaa

SEQ ID NO: 218042 - DNA, 764 bp, Unknown
  Bacterial polypeptide expressing nucleotide sequence isolated from the Sargasso Sea
acccagagtatttagattagaagaagatgaggctttaattaatagactaggatttaataacactggatctgaagaaattagttctagaatgtttaaagaacctaaaaaaggaatcctcggaataaatataggacccaacaaagatactgataatagaactgaggattatattaattgttttaagaaatttcatagtttagctgattatataacaataaatatttcttcaccaaacacagaaaatctcagagattttcataaaaaagatgaacttaattttttgataaaagaattgaaaaatgaaaaagaaaaattaagttcaaaagttccaattgcggtaaaagtatctccagatttaaataatgaacaaattgaaatcgtttcaaaaattctattagaacaggaaatagaaattatcgttgtttcaaatacctctgataaaaatagagataaattaaaaaatattaataaattagaaaaaggaggtctttcaggcaagcctctatatcatgtttcaaataatacaattagtaaattttataaacttcttggtaatagggtaaaaataattggggtaggaggagtagattctggcgaggctgcttttgaaaaaataatcagaggagctagtcttgtccaactttatactggaatggtttataaaggtccaggtatagcttcgttaattgcatctgaattaattgatatattgaaaaataaaggttttaaaaatatatcagaggctgttggaacaaaatattgaa

SEQ ID NO: 218043 - DNA, 514 bp, Unknown
  Bacterial polypeptide expressing nucleotide sequence isolated from the Sargasso Sea
aaaaaagaaattttaaaagaacttttgtctaaagttaaccaaataagagaaagaagtaattttaaaaaagcatttttattaaaaatttctcccgatatagaagaagaaaatattggtgaagttataagcttaattttagagtataaaattgatggagttattttaacaaatactacagacagaaacagagaaagcctaatcagcagtaataaattagaaacaggaggtttatcaggccaacctttaagaaacttttcaactaagctaattaaaagattctacaaggatttaaaagacagagttccaatcataggtgttggaggtgttgactctggaaaatcagcttttgaaaaaatagctgctggtgcttcagcattacaactttataccggcatgatttataagggcccgacgattgtcaaaaaaataaaaagcgatttaataaagatacttaatgaacaaggttttaaaaacattaaagaagcggttggatcctattcttataaagcttaac

SEQ ID NO: 218044 - DNA, 725 bp, Unknown
  Bacterial polypeptide expressing nucleotide sequence isolated from the Sargasso Sea
attgtataattacccaataaaattcctaagattattacctccagaattagctcatattttaacagttaaaactttgaaatacctctacttaaaaaatagaagtgttgaagatcctatactttctcaacatttattagggttagattttccaaatcctataggattagctgcaggttttgataaaaatgcagaggtcatgcgctccatgttttcttttggatttggatttgttgaaataggaactgtaactcccaaacctcaaaaaggaaattcaaaaccgagagtgtttagactcaaagaagatgaagctattattaatagtttaggttttaataatatgggtgaaaaaaaaattaggaaaaatttaatgaaagtaagaaattcatttttaaaaaacaaaattattggtgtaaatattggtaaaaatagagactcacttgatgcaatcgaagattatttatatttagttgaaaatcttggaaattttgcgagttacataactataaatatttcctcaccaaacactgaaggtttaagggatttacaacttagaggaaatatagaaaaattggtaaaaaaaatactattgaagagagatcaaatcgaaactattaatacaaaaccgattttaataaaaatatctcctgacctaaatgacgatcagttaagagatatagctcttttatcacttgctaataatatagatggattagttttaacaaata

SEQ ID NO: 218045 - DNA, 778 bp, Unknown
  Bacterial polypeptide expressing nucleotide sequence isolated from the Sargasso Sea
tctgtttaatcttggatttggttttgtcgaagtagggacaattactccaaaaccccaatttggtaaccctaaaccaagagtttttagacttgaagaagatgaagctcttataaatagattaggttttaataattctggttcagaacgaattagtcagacaataaaggaaaataataaaaagggttttttaggaataaatattggaccaaataaagactcgaaggacagagttgaggattatttaatttgttttcgtaaattttataatttagctgattatataactataaatatctcctcaccaaatacagaaaatttaagagactttcataaccaagatgaattaaattcattgattgacaaactaaaaaatgaaaaaaaagagttaaattcaaacattccattagcaataaaagtttcacctgatctaaatgatgatcaaattaatgaagtatccaagatcattatagaacaagaaataggaattattattgtttccaataccacagataagaatagagaaaatttaaaaaatataaataaattagaaaagggtggactgtcaggtaaaccaattgaaaagatttcaaacgaggcaatttctaaattttataaaattctaaaagataaaacaaaaataataggagtgggtggtgttagcaatggacaagatgcttttgaaaaaataacttctggtgcaacactcgttcaattatatactggaatggtttatagaggtcctcgtatagcttcaaaaataagtacagaattaatttga

SEQ ID NO: 218046 - DNA, 379 bp, Unknown
  Bacterial polypeptide expressing nucleotide sequence isolated from the Sargasso Sea
cctgcagcaacctcatcactcaacatcggacgcctcatcgtcgaaaaactcgaggcacatttttaaacactctcatccggagaaccggatgctctatcgtttgctgcgaccgcttctctttcgcggagatcctgaacaaacccatgaacgggttcttgcaacagtagacggtctttcctccatcaagggtttcaattcaatttcagaaaagattttccgatgggaatcccctttattggaaacccaattgtgggatcgtgtgcttcccaatcctgtcgggctggcagcgggttttgataaaaacgggagaatcatcgatcccctctttaacctcggatttggattggtcgaggtgggcacggtgactccgtttccccaa

SEQ ID NO: 218047 - DNA, 793 bp, Unknown
  Bacterial polypeptide expressing nucleotide sequence isolated from the Sargasso Sea
tcaacaataaattataggtcaggcaataaagaacctatatattgggaaaacagttttttaagtatcaattcttcaggacttcctaatttaggttttgatttttacaataattataaaaatgagaatattaataaaccctattttatttctatttctggaatgtctattgaagataatataactatgataaataatttaaatagtaatattgatggaattgaactaaatttatcatgtcctaatataaaaggacatagtcaaacaggatatgattttgttgctactgaacatttactaaggaaatactctgagatattagataataaacattctaaatttgtttttggaattaaattaccaccatattttgatgagaatcattttaattcaatggcagatattataaatgaatatagtgtaacgagtataacttgtataaatagtttaggaaatggattagtagttgattataatagtgaatcaacattaataaaacctaaaaatggatttggtggtataggagggtctataataaaacctatagctttatcaaatgttcataaattttttaagttaactaaatgttctgtaataggttgtggaggtattcaaaatggtaaagatgcttttgaacatatactatgtggtgcaagtgctgttcaaataggtactacattttatagagaagacgtagagtgctttacacgaataggtaatgaattaaagcaaataatgatagataaaaattacaactcaataaatgatttcaagggtaatttaaaatatttataat

SEQ ID NO: 218048 - DNA, 493 bp, Unknown
  Bacterial polypeptide expressing nucleotide sequence isolated from the Sargasso Sea
atgagaaggatattttttaatatacttaagaaacttgaccccgaagttgctcacaacttaacagtaaatgctcttaagtttccaaatccatttattttaagtggtaatgatttccctattttaagcaataatattaatggactaaagtttaagaaccctattggaatggctgcaggatttgacaaaaatgctgaagttataaatccattatttaatttaggatttggtttcacggagtgtggaactgttacaccaagacctcaatttggaaatgctaaaccaagggtatttcggcttgcatcagataaagcgattataaatagactaggttttaataataatggtattgaaaaatttttgatgaatatgagtaaatcaaataaaaatggtgtccttggtgcaaatattgggccaaacaaagacacagaaaatttcattgatgattatattaatttatacactcaagtatatgattattctagcattatgtaac

SEQ ID NO: 218049 - DNA, 745 bp, Unknown
  Bacterial polypeptide expressing nucleotide sequence isolated from the Sargasso Sea
agactcccagaagagaaagctttaattaataggatgggtttcaataacaaaggcatgttacacgtttcaaaaattgctgaaaagccaaagctgggaattgtgggagtgaatataggggccaacgcaaaaagtataaataagattctggactatacgaatgtttttgagtttatagctcatctattcgactatgtaacaataaatgtatcttcaccaaacacaaaatatcttagagatttacaaaagcctgaaacgctagaaaagatcttgcgggatgttaataccattaatgtttcgttaaaaaggaaagtacctatttttataaagattgcacctgatcttaacgatagtaatgttactgaaatccttagtgtgtgtgaagaaaataatgtgtctgggctaatcgcaaccaatacaacaatcaacccaaaaaacttaaaaaaccccaacagttttgaaggaggcttatctggtaaaccgctttttaatcaatcaaacaaaatattgagattacttgcaaaaaggaaaaatgcatcaacggttctaattggagtaggcggtatattctcagcatcagacatatatgaaaaaatcatgttgggagcgtcagctgtacaaatctacacaggatttgtctacaacgggcctatgcatattaaaaggatggagatggagcttaaaaatcttttattaagtgatggatataactctatcgacggagccgttggagctctaattagatgag

SEQ ID NO: 218050 - DNA, 525 bp, Unknown
  Bacterial polypeptide expressing nucleotide sequence isolated from the Sargasso Sea
aatgtactcaaaattaagatctttaatatttaaattagatcctgaaattgcgcacaatcttgcaattaaagctattaaatacaattatcttcccaaaaaaaaattggtaaattttgatctaataaaaactgaaatttttggaaaaacccttaataacccaattggcatggcagctggatttgataaaaacgctgaagtttataacgaactttttaatttaaactttggctttgttgaagtgggaacagtaactcctaaaagtcaatatggaaatgataaacctagaatttttagattagaagaagatagtgctttaataaatagattaggttttaataataaaggtgctgaaaatattttttcgagaatttcgtcaaattctccaaaaggactacttggaataaatataggccccaataaagaaaccacaaacagaatagaagattatttattatgttttagaaaatttcataagctagcagattatattactataaatatttcatcaccaaatacagaaaactt

SEQ ID NO: 218051 - DNA, 718 bp, Unknown
  Bacterial polypeptide expressing nucleotide sequence isolated from the Sargasso Sea
aatgaataatttaattaaataccttttaaatttttttgatccagaaactgcacataaattagcagtatctatcctctctagaaatcattttgtaagctataggaccaaagatttattcacaaaaatagctaatttagaatttaaaaatcctataggccttgctgcaggatttgataaatcaggtcaatgttttcatggtatatttaaactgggattttcatctgttgaagtcggaactgttactccattttctcaagcgggtaataataaaccaagagttttcaggttatataaaaatagggccgtaataaacagctatggttttaataatgatggtatggaaattgttaaaaatagactaaatgatggcaaaaaaagagaaggcgttttaggagtaaatattggcccaaataaaaaatcaaaaaacccaatagaagattttaaagttacctcaaaaaatttatcaaaatattgtgattacattacaattaatatttctagccctaataccccaggtttaagaaatatgcacgataaaaacttattatgtgaagttataaaagctactaaagaaggtatttctgaagcaggtagtcataaaccaatttttttgaaaatttcgcctgatgagaaaatttctaccattacagaaattataaatacttcaataaatgaaaatatagatgctcttgttatctcaaacacaacaattgaaaga

SEQ ID NO: 218052 - DNA, 928 bp, Unknown
  Bacterial polypeptide expressing nucleotide sequence isolated from the Sargasso Sea
ttgactgttcagctcgggcggctctcaataccgaatccgatcatggttgcatcgggaacgttcggctacgccaacgaaatgcaggaatttgttccactgcatcgacttggggggatcgttcccaaaacaatcacggttgccccaagagtaggaaaccgtccctggcgtactatcgagactgccgccgggttactgaattcgattgggcttgataacgacggtattgaacagtttgttctagacaaactccctttccttcggtcgtgtggtgcaccagtagttgtctccattgcaggagggacggtcgctgagtttgtgttgcttgcagagcaacttgataaagaaagcggaatagctgcgctcgaattaaatatctcatgccctaatgtcagtcacggtgttgattttgcaaccgatccagagctctgtaggcaggtagtcgagggagtacgccacgcaactcagttgccagtcatagcaaagctaacaccaaacgtgaccgacattacatcgattgctcaggcagcagctgacggtggagcagacgctgtgacacttatcaacacatgccaggggatggccgtcgattggcggaagcagcggacgctcttagggaatggtattggaggtttaagtggtcctgcaattaaaccaatcgctttgcgatgtgtgcatcaggtacatgtacgcgttggcatacccatcatcggcgtgggaggcattatgacaacagatgactgcatggaattcttcgttgccggagcctcagcagtacagattgggacggcgagttttgcagagcccgttattacgacccgaatcctggatgaacttcctgcagctgtaaattcacttggggcatcggaacttcaacaaatcgttggtactctggtgattggtgattctgccaaaacttcgaacaaatagc

SEQ ID NO: 218053 - DNA, 673 bp, Unknown
  Bacterial polypeptide expressing nucleotide sequence isolated from the Sargasso Sea
tttgggaataaatttcggtaaatcaaaaatcactagtttatctcacgcaaaagatgattatttaacctctttaaaattgttaattccatattgtgattacgcagcaataaacgtaagttctccaaatactgaaggactaagaaagttgcaagatccaattcttctaaaggaactgcttcaagagattaaaaacttacctaattgtccaccattatttgtaaaaattgcccctgatttaagccttaaagatattgaagatatttgccaattaataatcgaggaaaacatcaatggaataattgcaactaatacaagcattgatagattaggtctcgaaaatagaaagattaagcaaacaggattattactttctgaagaaaatggcggattaagtggaaggccacttcaaaaaaaagcaaatcaaataataaaacatatccataatattgataaaaagattatcttaattggcgttggtggaatcgatagtcctgagtcagcttgggaaagaatttgttccggagcatcattaatacaactgtatacagggtggatatataaaggtccacaattagtccccgacatacttaaaggaattacaaagcaactcaataaccatcaattgtctgatataaaagaggccattggatcaaatttaaaatgggttgaataa

SEQ ID NO: 218054 - DNA, 988 bp, Unknown
  Bacterial polypeptide expressing nucleotide sequence isolated from the Sargasso Sea
atttttatttctaaagtttattccattaaataaaacttttattcccaaagaattaaatacaaaaatctttggtattaatttttcaagtcctataggccttgctgcaggatttgataaaaatgctgaagtctatagtaaaatgtttaatcttggttttggctttgttgaagttggtactgttacacctaagcctcaggaaggtaactcaaagccaagaattcatagaattaagaaagaaagagtaataattaatagccttgggttcaatagtattggttttgaaaaggtaaaggttaatttattgaataaaaaaactgaaggtattattggcgtcaatataggtgcgaataaagatagtaaaatttttatagacgattatatttctgggataaaatttttttcaaatcatgtttcatatataactatcaatatttcttctccaaatacacctggcttaagagaattacatatagagaaaaatttgagagatttgcttgaaaaaattaaaaacctaaaaacaaataatgaaatagtagaagttcctctgttaataaaaatatcacccgatgtaaatgatgatgatcttaatattatgtgtgatatgtttttagaatttaatgttgatggaattataatatctaatactactcttgaaaggccttttaagggttttggtgaaaatctgaagggaggtttatctggagatttattataccaaacctctactaatcaattaaagaaagtatatgaatatacgaaaggacaaattcctttaattggggttggcggaattagttctgctaaggatgcttataataaaataagaaatggcgctagtttagttcagttatacactggtatagtttatcatggaccaggactaattaaaaaaatgaatagtgaaataagcgcccttttaaaaaatgacggttttgatagtataagtgatgctgtaggtgtagatacggagataaaaaatgggacttaa

SEQ ID NO: 218055 - DNA, 925 bp, Unknown
  Bacterial polypeptide expressing nucleotide sequence isolated from the Sargasso Sea
aaatacaataacaacagaattcttggggctcgacctagcctctcctattgttttactttcaggctgtgtgggctttggtgatgaatacacaagactagaaggtttttcgaatgctgacattggtggagcagttctaaaaggcaccacattggagcctcgtctaggcaatgtcccacatcgggtttatgaaaccccttctggtatgcttaattcaattggcttacaaaaccctggtgcgcatgaggttgtagaaaatatcttgccatcacttgagccctttgagacccactttattgcaaatgtatcaggctctaccattgatgaatatattgaggtctgcagaatatttgaccagtcaaacatcagtgcgatcgaattaaatatatcttgtcctaatgtaaaaaaaggtggcatggagtttggaaatgatcctgaaatgtctgcacaagtcgttgaggcttgtaaggctgtaacatccaagccgatcattacaaaactttctccgaatcaggctgatataaaagaaagcgccagaaaatgcattgatgctggaagcgatgccttatcagtgattaacaccattactggtatggccattgatattgaaagcaaacgtcctgttttaggcaatacatcgggaggcctctctgggcccgccatcaagccaatagcccttcaaaaagtcatgcaggtttacgaggttgctgggccccaaaatattccgatcatgggccagggtggcatcagctctgtcgaagatgcgctcgaattcatcattgctggcgcctctacgataggtattggaaccgcattgtttgttgaccccttggtttgcaacaaaatcaatgaaggtcttgaaaaatatcttgtcactcaaggcctaagcaaccttaatgagttggttggtagcctcataaaagattaa

SEQ ID NO: 218056 - DNA, 815 bp, Unknown
  Bacterial polypeptide expressing nucleotide sequence isolated from the Sargasso Sea
tgatgttggtgcaatatgcttaaaaggaaccacacttgaaccacgtttaggcaattctcctcatagaatctcagaaacttatttaggaatgttaaatgcaatagggctacaaaaccctggatcaaaagtagtggtcgatgaatatttaccaaatcttgattttgaagaaacacgttttatagcaaatttatcgggatcaacgattgaagaatatgaagaaataacaaaaatttttgatgattctccaattgacgcaatggaaattaatatctcttgtccgaatgtcaagaaaggtggtcttgaatttgggaatgatcctgtaatgtcagcaaaagttgtcgaagtttgtagaaaagcaacaaagaaaccactaataacaaaattgtctcctaatcagactgatattgcagaaaatgccaaatgttgcatagaatcaggaactgatggcctttctgttataaacacaattacagggatggcgatcgatatagaaaaacgtagacctataattgataacaatcaagcggggttatcgggacccgcaattaaaccgattgcactattaaaagtccatcaagtttatgaagtagctaaacaatacaatataccaataatcggacaaggaggtataagaacaatagaagacgttctcgaatttattatagctggctcaaccactgttggcattggcacagcattattttatgagccactagtttgctcaaaattaaatcaagggataatagaatatttggataaaaataatttaaatagtatttctgacctcattgggacattaaaattaaatagttaat

SEQ ID NO: 218057 - DNA, 1054 bp, Unknown
  Bacterial polypeptide expressing nucleotide sequence isolated from the Sargasso Sea
aatgttttcaaatttaagatctttaatatttaaaatagatcctgaaagagctcattttttagcaatacagtctcttaaactcaacctagtttcaaatatttttgatgagcataaaaatgaacctattttcaagacaaaaatttttaacaaagagttaaataatcctatcggtatagcggcaggttttgataagaatgcagaggtctacaaccctttatttaagttgggatttggattagtagaagttggcacaatcacacctttaaaacaatatgggaatagtaaacctagagtttttagattagtagaagaccaagcacttataaatagattgggcttcaacaatcacggttcagatgtcgtattaaataggattaaatcaaacaataaactgggtgtattaggaattaacgttggtcccaataaagattctgataatcgaataaatgattatttaataggaattgaaaaattccatgaagtggcagattatattactattaatatctcttcaccaaatacagaaaacctaagaaattttcacgatgaaagaaaattgcaagatttacttaaatctatttcagagaagaaaaaaaatttagatacaaatattccaatagtggtaaaaatttcacctgatatagatgaaaaccagattaatttaatttcagaaattcttttagaaaatgatataagtggaataattatttcaaatacctcagaatcatcaagagacattttaaaaaatattcaaagacatcaaaaaggaggattgtctggaaaacctattgagaaaaaatcaaatttattaataaacaagttttttaatctgttaaaaggtaaaattaagattattggtgtaggaggagtagactcaggacaatcagcttacgaaaagtttttactaggggcagactatattcaattatatacgggcatggtgtttcaaggtccaaatatagctagtattattaaaaaagacctaaaagaattattaactagagatggtgttaagaattttagtgaaattgtaggaaataaatctctttcttaa

SEQ ID NO: 218058 - DNA, 838 bp, Unknown
  Bacterial polypeptide expressing nucleotide sequence isolated from the Sargasso Sea
atgtacaacttatttaaagctttcctatttctttttgatcctgaggtaattcatagattaacaattttatttctaaagcttattccattaaataaaacttttattcccaaagaattaaatacaaaaatctttggtatgaatttttcaagtcctataggccttgctgcaggatttgataaaaatgctgaggtttatagtaaaatgtttaatcttggttttggctttgttgaagttggcactgttacacctaagcctcaggaaggtaactcaaggccaaggattcatagaattaagaaagaaagagcaataattaatagccttggattcaatagtattggttttgaaaaggtaaaagttaatctattgaataaaaaaactgaaggtattattggcgttaatataggtgcgaataaagatagtaaaatttttatagatgattatatttctgggataaaatttttttcaaatcatgtttcatatataactatcaatatttcctccccaaatacacctggcttaagagaattacatatagaaaaaaatttgaaagatttgctagaaaaaattaaaaacctaaaaacaaataacgaaatagcagaagttcctctgttaataaaaatatcacccgatgttaatgatgatgatcttagtattatgtgcgatatatttttagagtttaatgttgatggaattataatatctaatactactcttgaaaggccttttaagggttttggtgaaaatttgaaaggaggtttatctggagaattattataccaaacctccactgatcaattaaagaaagtatatgaatatacgaaaggacaaattcctttaa

SEQ ID NO: 218059 - DNA, 937 bp, Unknown
  Bacterial polypeptide expressing nucleotide sequence isolated from the Sargasso Sea
tatggccaacaaaaatacaataacaacagaattcttaggactcaacctagcatcaccaattgttttgctttctggatgcgttggctttggtgatgaatatacaagacttgagggtttttctaatgctgatatcggtggagctgttttaaagggcaccactcttgaaccccgtctagggaatgctcctcatcgtgtttacgaaacgccctcaggaatgctgaactctattggattacaaaatcctggcgctcacaaagttgttgaaaatattctgccatcgcttgagccttttgaaactcattttattgcgaatgtctcaggctcaactattgatgaatacattgaggtctgcaggatatttgaccaatctaagatacatgcaattgaactgaatatttcctgcccaaatgttaagaaaggtggtatggagtttggaaatgacccggaaatgtctgcgcaggttgttgaagcctgcaaaggtgtgacgtctaaacccatcatcacgaaactaagccccaaccaagcagatattaaggaaagcgccagaaaatgtattgacgcaggaagtgatgctttatccgtaattaatacgattaccggtatggctattgatattgatagtaagcgccctgtcttgggcaatacctcaggaggtctctccggaccagcgattaaaccaattgccctacaaaaagttatgcaggtgtacgaagttgctggccctcaaaatattccgattatgggccaaggtggaattagctctgttaatgatgcgctggaatttatcatcgcaggtgcttcaactataggcattggaacagcattattcattgatcctcttatttgcaataagattaatgagggaatcgaaaagtatttaagcgctcatggtttaggtgggctagaaaacttggtaggcagccttgtaaaagattaa

SEQ ID NO: 218060 - DNA, 937 bp, Unknown
  Bacterial polypeptide expressing nucleotide sequence isolated from the Sargasso Sea
tatggccaacaaaaatacaataacaaccgaattcttggggctcaacctagcctctcctattgttttactttcaggctgtgtaggctttggggatgagtacacaagactagagggtttttcgaatgctgacattggcggagcagttcttaaaggcaccacattagagcctcgtcttggcaatgtcccgcatcgtgtttatgaaacgccttctggtatgcttaactcaattggcttacaaaaccctggtgcgcatgaggttgtgaaaagcatcttgccatcactcgagccctttgagacccactttattgcaaatgtctcggggtctactgttgatgaatatattgaggtctgcagaatatttgaccagtcaaacattagcgctatcgaattaaatatatcctgccccaatgttaaaaaaggtggcatggagtttggaaatgatcctgaaatgtctgcacaagttgttgaggcttgtaaggctgcaacatcaaagccgatcattacaaagctttctcctaatcaggctgatataaaagaaagtgccagaaaatgcattgatgccggaagcgatgccttgtcagtaattaacaccattactggtatggccattgacattgaaagcaaacgtcctgttttaggcaatacatctggtggtctctcagggcctgccatcaagccaatagcccttcaaaaagtcatgcaagtttatgaggttgccggaccccaaaatatcccgatcatgggccagggtggcatcagctctgtcgaagatgcgctcgaattcattattgctggcgcttctactataggtattgggactgcattatttattgatcccttgatttgcaacaaaatcaatgaaggtcttgagaaatatcttgtcgctcaaggcttaagttgcattaatgagttagttggaagccttataaaagattaa

SEQ ID NO: 218061 - DNA, 937 bp, Unknown
  Bacterial polypeptide expressing nucleotide sequence isolated from the Sargasso Sea
tatggccaacaaaaatacaataacaacagaattcttagggctgaacctagcctctccgattgttttactctcaggttgtgtgggtttcggggacgaatacacaaggcttgaaggtttttcgaatgctgacattggcggcgcggtcctaaaaggaaccacactggagcctcgcttgggcaatgttcctcatcgggtttatgagacaccatcgggcatgctcaattcaattggcttacaaaaccctggtgcgcatgaggttgtggaaaatattttgccgtccctcgagccttttgagacccattttattgcaaatgtgtcggggtcaaccgttgatgaatacattgaggtttgcagagtttttgaccagtcaaatatcagcgcaatcgaattaaacatttcctgccccaatgtgaaaaaaggtggcatggagtttggaaacgatcctgaaatgtctgcacaagttgttggggcctgcaaggctgcaacatctaagccaatcattacaaagctttctcccaatcaggctgatataaaagaaagtgccaaaaaatgcattgatgctggaagcgacgccttatcagtgattaataccattactggcatggctattgatattgaaagcaagcgtcctgttttaggtaatacatcgggtgggctttcgggtcctgccatcaagccaatagcgcttcaaaaagtcatgcaggtttatgaagttgctggtccacaaaatattccaatcatgggccagggaggcatcagttctgtggaagatgcactcgaattcatcattgcaggtgcttctacaataggtatcgggactgcattgtttattgaccccttaatttgtaacaaaatcaatgcggggcttgaaaaatacttaaacgatcatggccttgatggccttgaatgcttggttggaagccttataaaagactaa

SEQ ID NO: 218062 - DNA, 985 bp, Unknown
  Bacterial polypeptide expressing nucleotide sequence isolated from the Sargasso Sea
attgaaagcttttataaagatttttagattcttcccaccggaaaccgctcaccatttagctttattaagtttaaaaattttaaataaagttaggattttgaagcttttctttcctgacaataaagattttgataatcctaaagaatatttcaatcttaaatttaggaatacgttgggcgtagcagctggtcttgataagaatggcgattatgttgatgagcttgaatcgcttggatttggatttgttgagcttggaacagttacaccaaaaccccaagagggaaatcaaaaacctagggtatttagatatttaaaccagcaagcagttgtcaacaggcttggatttaataataaaggagttaattatttagtttctaaaataaaaaataaaaaatatgatgcagtaattggagttaatattggagcaaataaagaaagcgcaaatgatcaaaggatagaggattatgtcttctgctttgaaaaagtttacaaatattgtgattacgtcacagtaaacatctcctctccaaatactccaaaattgaggaaactccatcatccagatgagcttgaaaaaatttttaaaagaattaatgaaatcaaatctacaaataaaactgagattccagtttttctaaaaatatcaccagatgaagacgaagagacaattcttaaaattgttaacatatataaaactttaaaaattaatggattgataattacaaatacttcaattgacaaggatattcttgagaggtgctctcatgaaggtgggatttctggcaaacccttatttaaaaaatctacccaacttttaaaaaggatacatgaatttgataaagatattttcttagttggcgttggcggagttttcacaaaagaggattatgaaaataagataaggttaggtgctagcttggtacagatttatactgggttcattttcgagggacctgcaatcgtaaaaaaaatcttatctagatga

SEQ ID NO: 218063 - DNA, 724 bp, Unknown
  Bacterial polypeptide expressing nucleotide sequence isolated from the Sargasso Sea
aatgttaaattctattggactagcaaatattggagttgaagaatacataaataagatgattcctaagtataataatatggatattcctataataatgaatatagcaggaagcagtgaagaagaatattgtgaggtgatggatttagtagaatctgtatcttcaaatattgttggatatgaaataaatatatcttgccctaatgttaaggttggaggtatggagtttggagtagattgcgaacttactgaaaaactaacttcacaattaagaaaacgaacagaacgtttgttaattatgaagttaagcccaaatgttactgatatttctgctattgctcaatcagctgcaaatggaggagcagatgcagtctcagcaatcaatactttggtcggaatgagtattaatgttcaatctatgaaaagtaatatacattatggttttgctggtttatcaggaccagctattaaacctgttggccttgcttctgtttataaaatacaccaatctgttaaaattccaattattggaattggtggtataaaatcctctgatgatgtgcttgaatatatattagccggtgcctttgcggttgaaattggtactgcaaactatcgagatccaaacgttggaaataatataatatcagatattaataattttcttgatgaaaataatattaaatcaattaatcagattattggtaaggttaaattaggcaaatga

SEQ ID NO: 218064 - DNA, 642 bp, Unknown
  Bacterial polypeptide expressing nucleotide sequence isolated from the Sargasso Sea
attgtacaatagttcattaaaaatattaagattattacctcccgagttatctcatactattacaattaattttttaaaatatttcaaagtaagacaaaaaaatattgaggatcctattcttgcacaacatctaatgggtttagattttgcaaatcctataggcctcgctgctggttttgataaaaatgctgaagtgatacattccatgttttcatttggttttggatttcttgaagttggtacaattactccacaacctcaaagtggtaattctaagcctagaatatttagattaagtgaagataaagctatcattaatagtttaggttttaataataagggtattaaaaaagtaaaaaaaaatttaattaaacacaaaaaatcatacttaaataataaaattgtaggagctaatattggaaaaaataaaaattcaagtgaatccattgatgattatctaattggtttagaaatgttaggtgatttagcaagctatataactataaatatatcctcacctaatactgaaggcctgagagatctgcaattgagaggaaagatagaaaaattaattaaaaaaattatagataaaagagatgaaataatacaaattaataccaagccaatactaattaaaatttc

SEQ ID NO: 218065 - DNA, 1024 bp, Unknown
  Bacterial polypeptide expressing nucleotide sequence isolated from the Sargasso Sea
attgcctcccgagctatctcataatattacaattaattttttaaaatatttcaaagtaagaaaaaaaaatattgaggactctattctttcacaacatttaatgggtttagattttccaaatcctataggactcgctgcaggttttgataaaaatgctgaagtgatgcattccatgttttcatttggttttggttttcttgaagttggtacaattactccacaacctcaaagtggtaattctaaacctagagtatttagattaagtgaagataaagccataatcaatagtttaggttttaataataaaggaattaaaaaagtaaaaaaaaatttaatcaaacacaaaaaatcatacttaaataataaaattgtaggagttaatattggaaaaaataaaaattcaagtgatgctattgatgattatctaatcggattagaagagttaggtgatttagcaagctatataactataaatatatcttcacccaatactgaaggtttaagagatctacaattaagaggaaagatagagcaattaattaaaaaaattataaataaaagagatgaaataaaaaatataaatacaaagccaatattaattaagatttcacctgatttgaatgaagaccaacttagagatatagctttaatttcattagctaataatatagatggattaatacttacaaatagcactatcaaaagagagagtaatttaatttctacaaataaaagaaaaaaagggggtttaagtggcaaacctctatatgataattcaaatataatattaaaaaaaatgtatgaattaacaaatggtcaaatgccgctaataggagtaggcggtatatcaagtggaagagactgttacgaaaaaatcaaatctggtgcttctttagttcagctttatactggtttggtttattctggtcctaatttaatcaatattatgaaaagtgacttgattgatctaattaaaactgatggatataaaaatgtatctgaagttattggtaaatcagtatag

SEQ ID NO: 218066 - DNA, 985 bp, Unknown
  Bacterial polypeptide expressing nucleotide sequence isolated from the Sargasso Sea
attgaaagcttttataaagatttttagattcttcccaccggaaaccgctcatcatttagctttattaagtttaaaaattttaaataaacttaggattttgaagcttttctttcctgccaataaagattttgataatcctaaagaatatttcaatcttaaatttagaaacatgctgggtgtagcagctggccttgataagaatggcgattatgttgatgagcttgaatcgcttggatttggatttattgagcttggaacagttacaccaaaaccacaagaaggaaatcaaaaacccagggtatttagatatttaaaccagcaagcagttgtcaacagactaggatttaacaataaaggagttaattatttagtttctaaaataaaaaataaaaaatatgatgcagtaattggagttaatattggagctaacaaagaaagcaccaatgatcaaagaattgatgattattcttactgctttgaaaaggtttataagtattgtgattacgtaactgtaaacatctcctcgccaaatacaccaaaattaaggaaactccataatccagatgagcttgaaaagatttttaaaagaattaatgaaatcaaatctacaaataagattgatattccaatttttctaaaaatttcgccagacgaaagcgaagagacaattcttaaaattgttaatatctacgagactttaaaaattaatggattgatagtttcgaatacttctattgacaaggacattcttgaggggtgctctaatgagggcgggatttctggcaaacctttatttaaaagatcttctcaacttttagaaaggatatatgaatttgataaagatattttcttaattggcgtgggcggagttttctcaaaagaggattatgaaaataagataaatttaggagctagcttggtacagatttataccggattcatttttgaaggacctgcaatcgtaaaaaatatcttatcaagatga

SEQ ID NO: 218067 - DNA, 937 bp, Unknown
  Bacterial polypeptide expressing nucleotide sequence isolated from the Sargasso Sea
atggccaacaaaaatacaataacaacagaattcttggggctcgacctagcttctcctattgttttactttcaggctgtgtgggctttggtgatgaatacacaagactagagggtttttcgaatgctgacattggtggagcagttctaaaaggcaccacattggagcctcgtctaggcaatgtcccacatcgggtttatgaaactccgtctggaatgcttaactcgattggcttacaaaatcctggtgcgcatgaggttgtagaaaacatcttgccatcactcgaaccttttgaaactcacttcattgcaaatgtatcaggctctaccattgatgaatatattgaggtctgcagaatatttgaccaatcaaacatcagcgcgatcgaattaaatatatcctgcccaaatgttaaaaaaggtggcatggagtttggaaatgatcctgaaatgtctgcacaagtcgttgaggcttgtaaggctgtaacatccaagccgatcattacaaaactttctcctaaccaggctgatataaaagaaagtgccagaaaatgcattgatgctggaagcgatgccttatcagtgattaacaccattactggaatggccattgacattgaaagcaaacgtcctgttttaggcaatacatcgggaggcctctcagggcccgccatcaagccaatagcccttcaaaaagtcatgcaagtttatgaggttgccggcccccaaaatattccgatcatgggtcagggtggcatcagctctgttgaagatgcgcttgaattcatcatcgctggcgcctctacgataggtattggaaccgcattgtttattgaccccttggtatgcaacaaaatcaatgaaggccttgaaaaatatcttgtcgctcaaggcctaagcaaccttaatgagttggttggtagtctcataaaagattaaa

SEQ ID NO: 218068 - DNA, 471 bp, Unknown
  Bacterial polypeptide expressing nucleotide sequence isolated from the Sargasso Sea
aatgtattcaaatttaagatcattaatatttaaaatagatcctgaaagagcgcattttttagcaattcaatcacttaaactcaatttagtttcaaatatatttgatgaaaataaaaatgatcctgttttaaaaactaaattatttaatcaacatcttggtaaccctataggaattgcggcaggttttgataaaaatgctgaggtatacaaccctttatttaaattgggtttcggatttgttgaagtaggtacggttacaccattaaaacaatatggaaatgaaaaaccaagagtatttagattggtagaagatcaagcattaattaataggttaggttttaacaaccacggatcagatacaatattaaaaagaataaaatttaataaaaaactaggtatactaggtgtaaatgtaggtccaaataaagattctaatgatagattgaatgattatttaattggattagaaaa

SEQ ID NO: 218069 - DNA, 637 bp, Unknown
  Bacterial polypeptide expressing nucleotide sequence isolated from the Sargasso Sea
ttgggccctaacaaagatacgttagatagagtagaagattatttaaattgttttaaaaaattttataattttgcagattatataacaataaatatttcatcaccgaatacaccagatttaagaaatttacatagatatgagaatttagatgaattattaaatttaattcaaactgaaaaaaaaaatttaaataccaaaattcctttagctcttaaagtatctccagatatagaagaagaaaatatttcggaaatttcagatttaattatgaaacacaaattagaaattataattgtttcaaatagcacagataaaaacaggcaaaatttaaaaaatataaataagcttgaaaagggtggcctatcaggcaaaccattagaaaataaatcaaataatttaataaataaattctataaaatttttaatggtaaagtaaaaattataggtgtgggaggtattgattccggaagatcagcatatgaaaagtttataaatggcgcaactttagtacagttatatactggaatggtttataaaggtcctgaaattgcacataaaatctcaggtgaattaatagatatattaaaaaacaaaggagtaaaaaatatatcagaggttattggcatcaaaaattgat

SEQ ID NO: 218070 - DNA, 358 bp, Unknown
  Bacterial polypeptide expressing nucleotide sequence isolated from the Sargasso Sea
ctgcttagattacttgaacccgaaatatctcatgtactgagtttaaaactcctaaaactggcccataatattggactactaagattgctgtctctaagttattctgataaccatttttctgaaaaaaataaattttcttatgagaagctcaaatttaaaaatagacttggcatcgcagcaggcattgataaaaacggtgattatattgatgctcttggagctttaggttttggttttcttgagattggcactgtcactccaaaaccgcaactaggcaatccaaaacccagagtttttcgtgaccaaaagaatttctccgtaattaatagattaggatttaataataaaggagtaaagt

SEQ ID NO: 218071 - DNA, 794 bp, Unknown
  Bacterial polypeptide expressing nucleotide sequence isolated from the Sargasso Sea
tatcggctttggatttgttgaagttgggacctttactcccaaagctcaatatggaaatccaaaacctagaataaaaagactgatttctcacgagtctttgcttaatagcctcggttttcctaatgaaggagtcagatcaattaaatcccggcttaagaaggtaagtggtgatatatgtttaggtgtgaatataggtccaaataaagatactcttcctgaggaagttataaatgattatttactttgttacgaagaagtttttgaatacgctgattttgtcacaataaatatttcctcaccaaatacacctaatctgcgcagtcttcataacgctgaaaactttaaagctgtgatcgatgcaattctaaatgaaagaaataggcatcaaaaaaaaccaaaagtatttattaagatttcacctgatgaggaatctaaaacttatacaaatcttattgaaaccataaataacagcgcaattgacggtgtaataatttcaaatacatcaaataatcagaacttgaaaaaaagtttaaatgttgcacatttacccggaggcatatctggcaaatcattaaaaaattcttctaataaaattctcaaagaaattagaacaatgattaacaaagaaaaaattattgttgcagtcggcggtatttttgatgtagattcttataacgaaaaatttgaattaggtgctgaccttgtacaaatgtatacaggtcttatctatgaaggaccaaatttagttaaaagaattgtaaaaaatgacaagcaaatctctagtaatagttgag

SEQ ID NO: 218072 - DNA, 856 bp, Unknown
  Bacterial polypeptide expressing nucleotide sequence isolated from the Sargasso Sea
ggattagaggtaaagaatagattaggcttagctgcaggccttgataaaaatggtgagcttatagaagaaatgtctaatttgggatttggttttattgagattggaacagttactccaaaaaaacaatttggaaacaaaaaaccaagaatatttagaattgaaagagaagaatctctgttaaacagcttgggtttcaataataaaggtgcaacctatgttaaaaagaaacttcaagcattaaaaaagaaagatattgttattggtgcaaatattggtccgaataagaatactaaatcaaataaaagaaaagaagattactcttattgtttcaatgagctcgcagattatgtagattacatggttttaaatatttcttctccaaatacaccagatcttagagatttacataatattgaaaatttaaaagaaattattgaatgcattttaatagaaaaagaaaacaaaaattactcaggaaaaatatttttaaaactatctccagatgaaaaaaaatctaaaacagaagcagtaattaatctggtaaattcaattaatattgatggagtaattgcttcaaatacatccgatgataaccaattaaaatccgccttaggagtatcacaaaagccaggaggtatatctggcaaaccattaaaaaataaatctaatgaattacttaagttagttaagagcaaaattgaaccaaaaaaaattattgttgcagttggtggtgtttttgatgtagattcttataacgaaaaaattgaactgggcgcagatttagttcaactttacactggacttatctatgaaggccctaatatcgttaaaagaattttaaataatggcaaataaa

SEQ ID NO: 218073 - DNA, 295 bp, Unknown
  Bacterial polypeptide expressing nucleotide sequence isolated from the Sargasso Sea
atgttttcttttttaagaccctttatatttaatctagatcccgaaatcgcacatgatttagcgatcaaatctttgaaatttaattttcttccacaaaacctattttcagtttcagatgagcaaatgttaagcacagagttatttggaaaagagattagcaatccaattggtttagctgctggttttgataaaagtgcagaggtttataacgaaatatttaaaattggatttggctttgtagaagttggtacggttactccaaaacagcaatttggaaatgcaaaaccaagaattt

SEQ ID NO: 218074 - DNA, 937 bp, Unknown
  Bacterial polypeptide expressing nucleotide sequence isolated from the Sargasso Sea
atggccaacaaaaatacaataacaaccgaattcttggggctcgacctagcctctcctattgttttgctttcaggctgcgtaggctttggggatgagtacacaagactagagggtttttcgaatgctgacattggcggagcagttcttaaaggcaccacattagagcctcgtctaggcaatgttccacatcgggtttatgaaacgccttctggtatgcttaattcaattggcttacaaaaccctggtgcgcatgaggttgtagaaaatatcttgccatcacttgagccctttgagacccactttattgcaaatgtatcggggtctactgttgatgaatatattgaggtctgcagaatatttgaccaatcaaacatcagtgcgatcgaattaaatatatcctgccccaatgttaaaaaaggtggcatggagtttggaaatgatcctgaaatgtctgcacaagttgttgaggcctgtaagtctgcaacatccaagccaattattacaaagctttctcctaatcagtctgatataaaagaaagtgccagaaaatgcatagacgctggaagcgatgccttgtcagtgattaacaccattactggcatggcaattgatattgaaagcaagcgtcctgttttaggtaatacatcgggtggtctctcagggcccgctatcaagccaatagcccttcaaaaagtaatgcaagtttacgaggttgcagggccccaaaatattccaatcatgggccagggtggcatcagctctgtcgaagatgcgctcgaattcatcattgcaggtgcttctacaataggtatcgggactgcattgtttattgaccccttgatttgtaacaaaatcaatgaaggtcttgaaaaatatcttgtcactcaaggcctaagcaaccttaatgagttggttggtagtctcataaaagattaaa

SEQ ID NO: 218075 - DNA, 397 bp, Unknown
  Bacterial polypeptide expressing nucleotide sequence isolated from the Sargasso Sea
atgtttagtattttaagaccattaatttttaaatttagccctgaagtagctcactctttagcaataaaagcactaaagttaaataatattccttacccaaaacctaaagataatcatattttagaaacaactttttgtaaaaaaaaattatcttcaccaattggtgttgctgctgggtttgataaaaatgctgaagtatataatccactgtttaatcttggatttggttttgttgaagtagggacaattacaccaaagcctcaatttggtaaccctaaaccaagagtttttagacttgaggaagatgaagctcttataaatagattaggttttaacaattctggttcagaacaaattagtcagacaattaaggaaaataataaaaagggtttttagg

SEQ ID NO: 218076 - DNA, 311 bp, Unknown
  Bacterial polypeptide expressing nucleotide sequence isolated from the Sargasso Sea
aatgtataaattagtaaggaaatttttatttttatttgatgccgaagaaatacatgaactctctacaaaattaatcaagctttttaacctcatacctttttcatctttccttttaagaaaatgctacttgatttcagataaatctcttgagaaagaattgtttggcataaaatttaagaatccaattggattagcagcaggatttgataaaaacgcaactctttttaatgattttagaaattttggttttgggtttatagaaattgggactgttactccattgcctcaagagggtaatcctaaaaaaagaa

SEQ ID NO: 218077 - DNA, 517 bp, Unknown
  Bacterial polypeptide expressing nucleotide sequence isolated from the Sargasso Sea
aatgttttcaaatttaagatctttaatttttaaattagatcctgagacagcacataacttggcaattaaatcattaaaatttaattttgttccaaatattttgaatgaagaaaaggataatcctttatttaaaacaaaactatttgataaaaatttagaaaacccaattgggatggcagcaggatttgataaaaatgcagaggtatataattctttatttaaactaggatttgcctttgttgaagttggcacgataacacctctaaaacaatatggtaatcctaaacctagagtatttagacttgttgaagatgaagctttaattaataggcttggttttaataatcttggttcaaaaaatattgttaacaggattaaatcaaataatcaaattggtctacttggagtaaatataggaccaaataaagattcaaaaaacaaactcaatgattatattgaatgtttaaaaatttttcatgaagtagctgattatattactattaatatttcttctcca

SEQ ID NO: 218078 - DNA, 838 bp, Unknown
  Bacterial polypeptide expressing nucleotide sequence isolated from the Sargasso Sea
atggccaacaaaaatacaataacaacagaattcttggggctcaatctagcctcgccaattgttttgctttctgggtgcgtgggttttggtaatgaatatacaagacttgagggcttttcaaatgctgatatcggtggagccgttctaaaagggaccactctggaaccgcgcttgggtaatgctcctcatcgtgtttatgaaacaccatcgggaatgctaaactccattggattgcaaaatcctggtgctcacgaagttgttgaaaaaattctgccatcgctcgagccttttgaaacccatttcattgcgaatgtatcgggctcgaccattgatgaatatattgaggtctgcaggatatttgatcaatcaaacatacatgcaattgaattaaatatttcctgtcccaatgttaagaaaggcggcatggagtttgggaatgacccagagatgtctgcgcaagttgtcgaggcatgcaaaggtgtgacctctaaaccaatcatcacaaaattatcgcccaaccaagctgatattaaggaaagtgcgagaaaatgtattgatgccggaagcgatgcgctatcagtgattaatacaattaccggtatggccattgatattgatagcaagcgtcctgttttgggcaacacctcaggtggtctctccggtccggcgattaagccaattgctctacaaaaagttatgcaggtgtatgaagttgctggccctcaaaatattccgatcatgggtcaaggtgggattagctctgctattgatgcgcttgaatttatcatcgcaggtgcttcaaccataggcattggaactgcgttattcattgaccctc

SEQ ID NO: 218079 - DNA, 334 bp, Unknown
  Bacterial polypeptide expressing nucleotide sequence isolated from the Sargasso Sea
atgttttcaaaatttagatctttaatttttaaaattaatccagaaactgcgcatgatttagcaattaaatcactaaaacttaattttataccaaatatttttgatgaaaataaaaatgacccaatgtttaaaacaactttatttggaaaagtaattgagaacccaataggaattgccgctggttttgacaaaaacgcagaagtatataatccattgtttaaattggggtttggatttgttgaagttggtacgattacaccaataaaacaatttggaaatcccaaacctagagtttttagattgcaagaagatgaggcgttgataacagattagg

SEQ ID NO: 218080 - DNA, 1042 bp, Unknown
  Bacterial polypeptide expressing nucleotide sequence isolated from the Sargasso Sea
aatgtttaattttttaagaccatttatatttaaatttagcccggaaattgcacattctttagcaatcaaagcattaaaattaaataatttcccaataaataagattacaaaaagtgaaatattgcaaactaacttttgtggaaaaaaaatttctagcccgataggtgttgcggccggatttgataaaaatgcagaagtttataatcctctatttaatcttggttttagttttgtagaagttggtactattactccaaaaccacagtatggaaatgcaaaacctagagtatttagattagaagaagatgaagctttaataaacagacttggatttaataactctggatctgaagaaattagctctagaatatctaaagaaaataaaaaaggaattcttggaataaatataggacccaacaaagatgctgaaaatagaatagaggattatattaattgttttaagaaatttcatagtttagctgattatataacagtaaatatttcttcgccaaacacagaaaatcttagagattttcataaacatgacgaactcagtactttgataaaagaattgaaaaatgaaaaagtaaagttaaattcaaaagttccaattgcaataaaagtttctccagatttaaatgataaacaaattgaagttgtttcaaacattctattagatcaggatataaacattattattgtttcaaatacctcagataaaaatagagataaattgaataatattagtaagttagaaaaaggaggtctgtctggcaaacctttgtatcatatttcaaatgatataattagcaaattttataaactactaggtaataagataaaaataattggagtaggaggggtagactcaggtgaagctgcttttgaaaaaattatcagaggagccagtcttgttcagctttacactggtatggtttataaaggcccaggtatagcctcctcaattagttctgaattaattaatatattgaaaaataaaggttttaaaaatatttcagaagcagttggaacaaaatattga

SEQ ID NO: 218081 - DNA, 300 bp, Unknown
  Bacterial polypeptide expressing nucleotide sequence isolated from the Sargasso Sea
aatgttttcaaaaatacgatcattaatatttaaattagaccccgaaacagcacatgatttagccattaaggcccttaaatttaatcttgtttatcaaaataaaattaaaaataacaaattaattcaaacagagatttttggcaaaacaattccgaatccaataggtatagcagctgggtttgataaagatgctgaagtatataattctttgtttaaattaggttttgggtttgttgaagttggaacagtcacaccagttaatcaatacggaaatcctaagccaagaatatttcgccttga

SEQ ID NO: 218082 - DNA, 498 bp, Unknown
  Bacterial polypeptide expressing nucleotide sequence isolated from the Sargasso Sea
aatgttttcaaatttaagatctttaattttcaagttagatcctgagacagcacataatttagcaattaaatcattaaaatttaattttgtttcaaatattttagatcaggataaaaataatcctctattcaaaactaaattatttaacaaaaatttagaaaatcctattggtatggcagcaggatttgacaaaaacgctgaagtatataattcattatttaagctaggctttggctttgtcgaagttggtacaattacacctttaaaacaatatggaaatcctaaacctagagtttttagattaattgaagatgaagctctaattaatagactcggttttaataattttggtgcaaaaaatatttttgatagaattaaatctaatagccagataggtttacttggaattaatataggaccaaataaagatacaaaaaatagacttaatgattatgttgaatgtttaaaaacttttcattcggtagctgattatcttac

SEQ ID NO: 218083 - DNA, 1069 bp, Unknown
  Bacterial polypeptide expressing nucleotide sequence isolated from the Sargasso Sea
actgaggctcattgactccgagactgcccattctatttctatgagagtaatgaggggcttcggtgaaactagtgcgggtcagaacatgctgaacgccctttacagacctccagaagttccaattgaagtcttcggaaagatgttccaccaccccctaggtttagctgctggtttcgataaaggtgcagaggcgctcatggcctggtctgctatgggattctcatggacagagtatggcggagttacaagatacccgcaggatgggaatacaaagcctcgcatgtttcgtgccaataggcataaggcgctagtgaataagatgggtttcaacaatcccggtgcatctgaaattcggaagaggttgatttctcgaaaatccgaagataaatggccaaagacaccagttgctgctaatattggtaggtctaagaaggtcccaaatgaacatgcagcagacgattattcttctacacttgatattctatgggatcatgccgacatgttcgtactcaatatctcttcacccaatactccaggccttagagatcttcaaggtcaagagtacctatcttcgattctaagatcatgtaataacgtacgggaaatgaagggagccaacaaaccaatattgctgaagctttctccggataatggtgatgatgagatactggaaaccgtttctctttgtttatcatctggtgttgatggcattgttgctacaaatacgaccataaagaggccggcaccactatccactcagtctagaaaggctttctcaagtgacggcgggttgtctggacgccctctgaattcacgctctcttgaagtgataaatttggtctatggtgaaactcagggcaaaattcctattgttggagtgggaggtatcgaatccaaggaaactgcatgggaggcaataatttctggatcatcgctcattcaactttactcagcacttgtattcaatggccctacagtagtgtccagtatagtcaaaggaataaagagtagagttagagagtccggcttttcgtctttatctgaagcagttggatacaaacacatttag

SEQ ID NO: 218084 - DNA, 937 bp, Unknown
  Bacterial polypeptide expressing nucleotide sequence isolated from the Sargasso Sea
atggccaacaaaaatacaataacaacagaattcttggggcttaatctagcctccccaattgttttgctttctgggtgtgtgggttttggtgatgaatatacaaggcttgagggtttttcaaatgctgatatcggtggagccgttctaaagggcaccactcttgagccacgcttggggaatgctcctcatcgtgtttatgaaacaccatcgggaatgctgaactcaattggattacaaaatcctggcgctcatgaggttgttgataatattcttccattgctcgaaccttttgaaactcatttcattgcgaatgtctcgggttcaaccattgatgaatacgttgaggtctgcagaatatttgaccaatcaaacatacatgccattgaattaaatatttcctgtcccaatgttaagaagggcggcatggagtttgggaatgatccagaaatgtctgcacaagttgtcgaggcctgcaagggtgcaacttctaaaccaatcatcactaaactatcgcccaatcaagcggatataaaggaaagtgccaggaaatgtattgatgccggaagtgatgcgctttcagtgatcaatacaattaccggtatggccatcgatatcgatactaagcgccctgtcttgggcaatacctcaggcggtctctcaggaccagcgattaagccaattgccctacaaaaagttatgcaggtgtatgaagttgctggccctcaaaatattccgatcatgggccaaggcggaattagctctgttaaggatgcgcttgaatttatcatcgcaggtgcttcgaccataggcattggaactgcattattcattgacccgcttatttgcaataaaattaatgagggaatagaaaattatttaagcgctcaaggtttggatggagttgaaagcctggtggggagccttataaaagattaaa

SEQ ID NO: 218085 - DNA, 526 bp, Unknown
  Bacterial polypeptide expressing nucleotide sequence isolated from the Sargasso Sea
cttatatgagtacgtagattattttgtagttaacgttagctcaccaaatacaattaatctaagggacctacaatctaaaaaaccattaactagaatattaagttctttacagaaattaaataataaaaaacctaaacgtaaacccattttattaaaaatagcaccggacttaaataaaaaagaattgtcagatatagttgaaataatcaagaaaactaaaattgatggagtcgttgcttccaatactactcttaatcgcaacggaattgtttcaaaaaatagaaatgagaagggtggcttgagtggaagaccattatcaaaaaaaagtacagatataattagttttttatctcaaaaaagtaataaaagctttccaataattggagttggtggggtacactctcctcaggatgcgattgaaaaattagaagcaggtgctgatttaattcaactttacacaggttttatttatgaaggtcctgggatagcaaaaaaaataaatcaatcattgattaattacctttga

SEQ ID NO: 218086 - DNA, 1057 bp, Unknown
  Bacterial polypeptide expressing nucleotide sequence isolated from the Sargasso Sea
ttgtacaatagttcattaaaaattttaagattattacctcctgagttatctcataatattacaattaattttttaaaatattttaaaataagacaaaaaaatattgaggaccctattcttgcacaacatctaatgggtttagattttgtaaatcctataggactcgctgccggttttgataaaaatgctgaagtgatgcattccatgttttcatttggttttggatttcttgaagttggcacaattaccccacaacctcaaagtggtaatactaaacctagagtatttagattaattgaagataaagccattatcaatagtttaggatttaataataagggtataaaaaaagtaaaaaaaaatttaattaaacaccaaaaatcatacttcaataataaaattgtaggagttaatattggaaaaaataaaaattcaattaaagctattgacgattatctaaaaggtttagaagagtttggcgatttggcaagctatattactataaatatatcttcaccaaatactgaagggttgagagatctacaattgagaggaaagatagaaaaattaattaaaaaaattatagataaaagagatgaaataaaaaatattaataccaagccaatattaattaaaatttcacctgatttaaatgaagatcaactaagagatatagctttaatttccttagctaataacatagatggattgatactgacaaatagtaccataaaaagagaaggtaatttaatttctataaataaagaaaaaaaaggagggttaagtggtaaacctctatatgataattcaaatttagttttgaaaaaaatttatgaattaacaaatggtcaaataccattaataggtgttggaggtatatcaagcggaagagattgttacgaaaaaattaaatctggtgcttctttagttcaactctatactgctttagtttattacggtccagacctgattaatagtatgaaaggtgacttaattgatttaattaaaacagatggatataaaaatatatctgaagttattggtaaatcagtttaaa

SEQ ID NO: 218087 - DNA, 991 bp, Unknown
  Bacterial polypeptide expressing nucleotide sequence isolated from the Sargasso Sea
tatgactcagatatctcattctcagcactctgttgtcgatctctctgtttcgcttggacgtctgcaactccccaatccaatcctcgttgcatctggaacatttggttatgcgaaagagatgtcaggacttgtcaaactcgatcgtcttgggggtatcgtcccaaaaacaatcaccttgttacctcgtcaaggcaatgtgccgtggcgaacgcttgaaacagcctccgggctcctcaactccatcggtctcgacaatgatggcattgatatttttctaaaaaagcaactgccttttcttcgggactgtggagcacccacgattgtaagtattgcgggtgcaaacagggaagaatttgttgaacttgcatcacgacttgatggtattcccggcattgcggcactcgaactcaatatttcatgcccaaacgtcagtcatggtgtcgaccttggcacagacgcagaactgtgtcgtggtgttgtttcaggtgttcgtggagtaacgaatgtaccagtcctcgcaaagcttactccaaatgtgacagatattgttgccatcgcgaaggctgcagcagatggaggggctgacgccgtcacgcttattaacacctgtcagggaatggcgattgattggcgccggcaacgaccgttgttgggaaatgttgtcggaggactcagtggtccggctatcaagccgatagcactgcggtgtgttcatcaagttcggcaaaaactgagtattccgattattggcgtcggaggcatcatgtcactggacgattgcatggagttttttgttgctggagccacggcaattcaactcggaactgtcaactttgcagaacccgttgtctgcacacaaatactggatgcgttgccagaagccgttcaggaactcggtgcatcgtcatttgctgatgtcgtgggcacacttgttcttccatcacaggaaactggtttttcagctaaggggtgttctgaacatgcacaatga

SEQ ID NO: 218088 - DNA, 314 bp, Unknown
  Bacterial polypeptide expressing nucleotide sequence isolated from the Sargasso Sea
gtgtatagctactaatactactatttcaagagatgggcttgaatccagacacaaagaggaaacaggagggcttagtggaatgaaacttagggataaaagtaatttaattatttcttcactaagaaaaaagcttgggaaagattttccaataattggagtaggtggtataatgaatgctgaggatgctctcgaaaaaattgaacttggggcagatttagttcagctttatacagggtttatttatgaaggcccctcattaattaaaagaattaatagattactattagatcaagaattaaacagaattaaatagg

SEQ ID NO: 218089 - DNA, 889 bp, Unknown
  Bacterial polypeptide expressing nucleotide sequence isolated from the Sargasso Sea
atgaaaattctctttccaactaaaaattattcacatgggcaaaaaaattatcttaatttacatttcaggaacagattaggcgttgcagcaggccttgataaaaatggtgactatgttgatgttctggattctcttggattcggtttcattgagttgggaacaactactcctaggcaacagtcaggcaacgagaaaccaagagtttttagatacatccatcaagaagctgtagtcaacagattaggatttaataataaaggcgtagattatttagtttctaaaataaagaataaaaaatatgatgcagtaattggagttaatattggagctaacaaagaaagcacaaatgatcaaaggatagaggattatgtcttctgctttgaaaaagtttacaaatattgtgattacgtcacagtaaacatctcctcgccaaatactccaaaattaaggaaactccataatccagatgagcttgaaaaaatttttaaaagaattaatgaaatcaaaactacaaatcagactgacattccagtttttcttaaaatatcaccagatgaaggcgaagagacaattcttaaaattgttgacatatatgaaactttaaaaattaatggattgatagtttcgaatacttcaattgacaaggacattcttgaggggtgctctcatgaaggtgggatttctggcaaacctttattaaaaaaatctaaccaactattaaaaaggatacatggacttgataaagatatcttcttagttggcgtgggcggagttttcacaaaagaagattatgaaaataagataacgttaggtgctagcttggtgcagatttatactgggttcatttttgaagggcctgcaatcgtaaaaaaaatcttaactagatgaa

SEQ ID NO: 218090 - DNA, 1042 bp, Unknown
  Bacterial polypeptide expressing nucleotide sequence isolated from the Sargasso Sea
attgattctcattttcataaaccaggagtcaaaaattttattcaatatttataaaaaaattgcattcaatctacctccagaggttgcccatgactacactcttaagattgctgaggttatatataaatcatttttagtaaaatttttaaaatctacgcctaatattgaaccgataaataaattaaatataagattccagaacaaacttgggcttgctgcaggttttgataaaaatggagattatcttaattttatcaataacataggatttgggtttattgaaataggtacagttactccctatcctcaacttggtaataaaaaacctagggttttcagaatagctgaacaagatgctgttataaatcatctaggattcaataataaaggaataattcatttgaaaaaaaatcttattaatttcatggataaaaaaactactcctattggagtaaatattggtaaaaacgcaacaacgtctattgagaatgcacatgaagactatatatattgcatggagaaaatatatgagtatgctgattatttaactatcaatatatcatcaccaaatacaaaagaacttcgcaagctccatcacgaggatagattatctacatttttaggaaatataaagaaatcgcatgaaagtttagagaaaaaacataaaaaattaacgcctctctttctaaaaatatctcctgatattgatcaagatgatatagcttcagtatctagtatgataaaacaattcgatatacacggtgtaattgccacaaacacaacgatagataaagaggttatacaaaatgaaatatatagagattatgaaggcggagtaagtggcaaaccattatttgtaaaatcaaatagtattgttaagcagatgagagaaaatcttcctgatattttaatgattggatgtggtggtgttaattcgaaaaaaaccgcggaagaaaaagttaatcaaggatgtgacttggtacaaatatatactgggctaatatataagggaacaaaagtgatcaatgagataacgtcctag

SEQ ID NO: 218091 - DNA, 559 bp, Unknown
  Bacterial polypeptide expressing nucleotide sequence isolated from the Sargasso Sea
ttgaaaatactaactaagatctttcaattcttccctccagaggtttcccattatttagctttagaaagcttaaaattacttaaaaagctgggaatcatgaaaattctctttccaattaaaaattattcagatgggcaaaaaaattatcttaatttacattttaggaacagattaggtgttgcagcgggacttgataaaaatggtgactatgttgatgttctggattctcttggatttggttttattgagttgggaacaactacaccgaggcaacagccaggcaatgagaaaccaagagtttttagatacatccatcaagaagctgtggtcaacaggttaggatttaataataaaggcgtagattatttagtttctaaaataaagaataaaaaatatgatgcagtaattggagttaatattggagctaacaaagaaagcacaaatgatcaaaggatagaggattatgtcttctgctttgaaaaagtttacaaatattgtgattacgtcacagtaaacatctcctcaccaaatactccaaaactaagggaaactccataat

SEQ ID NO: 218092 - DNA, 241 bp, Unknown
  Bacterial polypeptide expressing nucleotide sequence isolated from the Sargasso Sea
tttgcctccagaaagtgcccactttatcgggcttttttcattaaaaatcctaaatttagttggtcttttgggaattttttttcccgtaaggaaatcaaattttattcctaggagattttttggattagagttcagaaacacactaggagttgctgctggccttgataagaatggagattttattgatgtcttagattctctaggttttggttttatcgaaattgggtacaaactacaccct

SEQ ID NO: 218093 - DNA, 605 bp, Unknown
  Bacterial polypeptide expressing nucleotide sequence isolated from the Sargasso Sea
tggagctaatattggtaaaaattattttactcaaaataatgatgctcatagcgattatttgaaatgtttgtcagagcttaatgaattcgttgactattttgcaattaatataagttctcctaatactaaagatttaagagatttacacgataagagtcttttaaaaccattcctagaaaaactagtaaaattcaataacaaacatattaataaaagacctcttcttcttaaaatttcccctgatttaaatgaggagcaaatagccgatattgttgttttaatcaaagatttaaggctagatgggattattgctacaaatactacagtttctagagatggggctacttcgaaacataaaacgcagcaaggtggaatgagtggtaaattgctaacacataagagtaatgctataatcaaatatttaagaaaaaacttgggagataattttccaattattggagttggaggtataatgagtgcaaatgatgctattgaaagattaaactcaggagcagatctaattcaactatatacaggctttatttacaaaggaccttcatttataaaagaaattaataaggcaattattaatcaaagtaactaaa

SEQ ID NO: 218094 - DNA, 577 bp, Unknown
  Bacterial polypeptide expressing nucleotide sequence isolated from the Sargasso Sea
gaccaatctaatatacatgcaattgaactgaatatttcctgcccaaatgtaaagaaaggtggcatggagtttgggaatgatccagaaatgtctgcgcaggttgttgaagcctgtaaaggcgtgacgtctaaacccatcatcacgaaactatcccccaaccaagcagatattaaggaaagcgccagaaaatgtattgatgctggaagtgatgcgttgtctgtgattaatacaatcactggtatggctattgatattgaaagcaagcgtcctgttttaggaaatacctcaggtggtctctcggggcctgcaattaagccgattgcacttcaaaaggttatgcaggtttatgaggttgctggaccacaaaatatcccaatcatgggccagggcggcatcagttctgttgaggatgcactcgaattcataattgcaggcgcctctactgtgggtatcggaaccgcattatttattgatccccttgtttgcaataaaatcaataagggtcttgaaaaatatttaacagaccatggccttaattgtcttgaagatctggttggaagcctcataaaagattaaa

SEQ ID NO: 218095 - DNA, 819 bp, Unknown
  Bacterial polypeptide expressing nucleotide sequence isolated from the Sargasso Sea
agaaagtcatattttagaaacaactttttttgaaaaaatattaccttcacctataggggttgctgctgggtttgataaaaatgctgaggtatataaccctctatttaaccttggatttggctttgttgaagtaggaacaataactccaaaacctcaattcggcaatcctaagccaagagtttttagactcgaagaggatgaggctcttattaatagactaggttttaataactctggtgcagaagaaatttgcacaaggattaaggaaaataataaaaaaggttttttaggaataaatattggccctaataaagactcatcaaatagaattcaagattatctaatgtgtttccgaaaattttataatttagcagattacataacaataaatatttcatcacctaatacagaaaatttaagggattttcataatgaagatgagctaaattctttgatttacaatttaaaaaaagaaaaaaaagaattaaattcaaaagtcccaattgcaataaaagtttcacctgacttaaatgatgaacaaattaatgaagtatctaatattattttagaacaagaaatagaaattattattgtttccaacacaacagataaaaatagagaaaatttaaaaaatataaataaattagaaaagggtggtttatcaggtaagccaattgagaagatttcaaatgaagtaatttccaaattttatagaagtttaaaaaataaaacaaaaataataggagtaggtggtgttagcaatggagaagatgcatttgaaaaaattacttgtggcgcaacacttgtacagttatatac

SEQ ID NO: 218096 - DNA, 314 bp, Unknown
  Bacterial polypeptide expressing nucleotide sequence isolated from the Sargasso Sea
tttgaattttttcctaaaaatatttaaattgcttcctccagagtttgctcattctgcttcactaaattctctaaatttattatataaatccaagctgttagttttatttaacaagaaaattattaataaaaatgaacacacaatttttggaatgaaatttagaaacaaacttggcacagcagctggtttagataaaaatggggattatatagatgcattaggtgccctaggatttggttttttagaggtaggaactgttactccaagaccgcaatacggcaatcctaaaccccgaatatttcgtaactattctg

SEQ ID NO: 218097 - DNA, 872 bp, Unknown
  Bacterial polypeptide expressing nucleotide sequence isolated from the Sargasso Sea
aatgttttcaaaatttagatctttaatttttaaacttgatcctgaaaaagctcataatttggctattaagactctaaaatttaattttgtaaaaaatatttttgatcaagataaagatatttccatgtttcaaacaactatgtttggaaaaaaaattaaaaatcctataggtatagcagcaggatttgataaaaatgcagaagtttacaatcctttatttagattaggttttggttttgttgaagttggaacagttactccgttaaaacaatatggaaattcaaagccaagaatattcagattagaagaagatgaagctctaataaatagacttggatttaataatgagggatcaaaagacataagttttagaattaaatctaatactccagagggtttactaggagtgaatatagggccaaattataatactaaagatcaattaaatgattatttaattaatttaaaaatattccataatatttgtgattacgtaacaataaatatttcatctcccaatactgaaaaattaagagatttccatgactcaattaagcttgaaaaattaatagactctattgaaaaagaaaaaaaaaatttaaaatcaaaaattccaatagttgtaaaaatttcaccagacattattgatgagcaaataagtgaaataagtaaaatattattaaatcatgaaattaagggaattataatttcaaatacaactgattcaaatcgagaaaaattagttaatatatctaagtccgaaaaaggaggcttatctggaaaaccacttgagataaaatctaatcaattaataaataaattttataatttattaaaagaaaaaatccaaataattggagttggaggagtag

SEQ ID NO: 218098 - DNA, 637 bp, Unknown
  Bacterial polypeptide expressing nucleotide sequence isolated from the Sargasso Sea
aatgttttcaattttaagaccttatatattttcgttagacccagaagtagcgcatgacttggctatcaaatcattaaaagcaaatattcttccaaaaagtttttttaatgttgaaagcgaggaaatgcttgagacaaatctttttggaaaaacaatttctaatccgataggtttagctgcaggttttgataaaagtgccgaggtttataattctctctttaaatttggctttggttttattgaggttggcaccattactccaaaaaaacaattgggaaatccaaaaccaagaatatttagattagaaaaagaccaggctcttatcaatcgtcttggatttaataaccatggttcagaaattgtatctaaaagaatatctaataatcaccctgacgggtttctaggaattaacattggtccaaataaagaaacaaaaaataaagaagaagattattatatttgtatttcaagacttggaatgtatgctggatatatagtaattaatatctcctccccaaatactgagggtttaagagattttcatgatcaaggggaaatgaaaaaacttttattggggataaataaaattttaaaagaaaaaaaaattgactgtccaatacttatcaaaatatcacca

SEQ ID NO: 218099 - DNA, 712 bp, Unknown
  Bacterial polypeptide expressing nucleotide sequence isolated from the Sargasso Sea
tacttttgttaaaaaaaaattaaaaaaactaaatttaagttctttatccaaagggattgtcgggattaatataggcaaaaataaagacactttgaatgatattgatgattatatctactgcttacaagagttaggaccttttgctcattatgttactgtaaatatttcctctccaaatactccaggcttaagagaattacaaaatagaggaagaatagaaaaattagtacagactcttcaaaaaaaacaagaagaaatgaactctttagaaaatactcctattttttttaaaatagctccagatattgatgaagagcaaataagagatatagcattaattagtttagctaataatatagatggtttagtaattagtaattctacaattgaaagaccggatacattaaaatcaaatttaaataatgaaataggtggtttaagtggtaagccattgtttttgaaatcaacaatgatattaagaaaaatgcatacattaactaatggtcaaattccattaataggagtaggtggaattaataatgctttggaatgttataaaaaaattaaatctggagcatctttggtgcaattatattctgctttaacatttgaaggtccaaaaattattaataagatattaatggatttatcaactttgctaaaaactgatgggtataaaagtattaaagaagctataggcaaagatacgtga

SEQ ID NO: 218100 - DNA, 673 bp, Unknown
  Bacterial polypeptide expressing nucleotide sequence isolated from the Sargasso Sea
atgaaagttttattagctatcttaaggatgctgcctcctgaaacagctcatttaattgcattaaactctttaaaggttttacataaattgaaattaattaatttattttttccatttaaattttctaattctccattttatttcaagggtttagagtttaaaaataggctgggcattgctgctggattagataaaaatggcgattttatagattcattaggagcattaggtttcggttttattgaagtgggaaccattactcctaaaccgcaatctggtaactcaaagccgagagtatttcgttttgcagatcaggaagcaattgtaaataggctaggttttaataataaaggtgttgattatttagtaaaaaggctaaagaaaagaaaatattctggtgttttaggaataaatattggagccaataaagattctaacggtcaaaaaaggatagatgattatattgaatgctttaaaaaagtttccccttttgctgattatatttctgtaaatatttcttcgccaaacactcctggcttaagatctcttcattccaaagaaaattttttaccattgtttgaggctattaaaaacacgcgtgaatcagagaaattttataatccaatttttattaagctgtccccagatgaagagcaagatacaattttttgaa

SEQ ID NO: 218101 - DNA, 635 bp, Unknown
  Bacterial polypeptide expressing nucleotide sequence isolated from the Sargasso Sea
tatgataaattttcttaaatcaataataagtatttttcctcctgaactatcgcattctataactattaatttattaaaaataacaacaaatttccaaaaaaaaaatttatataatgatttaaaacttcatcaacatatatggggattagatttcaacaatcctgtcggtcttgctgcaggttttgacaaaaatgctgaagcagtcattccattactcaacttaggttttggatttgtagaagctggaactgtgacacctttaccacaagaaggaaatgataaaccaagagtttttagactgttagaagataaagcaataattaatcatcttggatttaataacaaaggactgaaaattgtaaaaaaaaatttacaaaaattaaatttgaataatttatcaaacggcgttgtgggaataaatattggaaaaaatttaaatagtattaaccatattgaagactattgccaatgcctggaaaaattaggtccttttgctcattatattactattaacgtctcttctccaaatacgcctggactaagagatctccaaaaaactggaaatatagaaaaattaattaaatcactctacaaattaagagataacaatgaatatctgaccaataaagctattt

SEQ ID NO: 218102 - DNA, 445 bp, Unknown
  Bacterial polypeptide expressing nucleotide sequence isolated from the Sargasso Sea
catgccgccatcccctctcagcagcggcgcgttctatcagcgctggctggggccggtgctcgccaatgacgaggggctcgatgctgaacagctgtcccgcacagcacttacagctctgggacaggcctcgctcaggcgccagtggcctctggtgtccacggtgctggagggcttggccggtgatctgcagcgccgtgatctgcggctcgagcaggtgttgttcggttgccgtttccctaatcctgtgggtcttgcggctggtttcgacaagaacggggtggcagctggactgtgggatcgctttggctttggctttgctgaggtgggcacggtcacctggcatggtcagcccggcaatccccgcccgcggttgtttcgcttggctcaggaaaaggccgctctcaatcggatggggttcaacaacgacggtgaacaggcgttgcgc

SEQ ID NO: 218103 - DNA, 715 bp, Unknown
  Bacterial polypeptide expressing nucleotide sequence isolated from the Sargasso Sea
atgtttgaaaaaataagatctttaatttttaaatttgacccggaaacggcgcatgatttagctattaaggctttaaaaaccaaaataatacctgtaagaccaaaaaattatgatcgtttaaaagtcaaatttttagaaaaagaaatccctaatcccattggtatagcagctggttttgacaaaaatgcagaagtatacaattcattatttaacttgggatttggatttgttgaggttggcacaattacaccagaagctcaatatggcaatccaaaaccaagagtatttagattggaagaagacgaggctttaattaatagacttggatttaataatgtaggctctgaacaagctgcaaaaaatattaacaatgattcccccaaaggtttgttaggtatcaatatcggaccaaataaagatacaataaatagaataagcgattatctaaaatgctttaaaactttatgtaatttaggcgattatattacaataaacatttcttcaccaaacactgaaaacttaagaagctttcataatccaaaagaattagaagaattattaaaagttataaatgaagaaaaaactaaagttgcctctactacaaatatcgctgttaaaattgcgcccgatctaaatattaaagatttagatttaattggaaatatccttataaataatagagtaaaattgataattatttcaaatacttcagata

SEQ ID NO: 218104 - DNA, 763 bp, Unknown
  Bacterial polypeptide expressing nucleotide sequence isolated from the Sargasso Sea
aatgtttaatattttaagaccattaatttttaaatttagccctgaagtagctcactctttagcaataaaagcgctaaagttaaataatattccttactcaaaacctaaagataatcatattttagaaacaactttttgtgaaaaaaaattatcttcaccaattggtgttgctgctggttttgataaaaatgctgaagtatataatccactgtttaatcttggatttggttttgttgaagtaggtacaattactccaaagcctcaatttggaaaccctaaaccaagagtttttagacttgaggaagatgaagctcttataaatagattaggttttaacaattctggttcagaacaaattagtcagacaattaaggaaaataataaaaagggttttttaggaataaatattggaccaaataaagactctactaatagaattgatgattatttaatttgttttcgtaaattttataatttagctgattatataactataaatatttcctcacccaatacagaaaatttaagagactttcataacacagatgaactcaatttactgattgacaaactaaaaaatgaaaaaaaaaaattgaattcaaacattccattagcaataaaagtttcacctgatcttaatgatgatcaaattaatgaagtatccaagatcattatggaacaagagatagaaattattattgtttcgaataccacagataagaatagagaaaatttaaaaaatataaataaattagaaaaggtg

SEQ ID NO: 218105 - DNA, 685 bp, Unknown
  Bacterial polypeptide expressing nucleotide sequence isolated from the Sargasso Sea
tgagacaaaagtttttaatataaaaataaaaaatccgattggtttagcagctggatttgacaaaagtgctgaagtttataattctttattcagatttggttttggatttattgaagtaggtactgttactccaaaaaaacaatttggaaacccaaagcctagagtgtttagacttgagaacgataaagccttaataaatagattaggctttaataatgatggtttagaaaaggtttctaaaagacttgaaaaaaattccccttctggttttttaggaattaacattggcccaaataaagatagcaatgatagaatagatgattatatcaaatgcttaaaagcaatacatacatttgcaaattacataactataaatatttcctcacctaatactccaggcctcagagacttccataaagaaagcactttacaaaatcttctagaaaaaattaccgaatttaaaaaaaaaagtaaaattcaaaaacctttagttttaaaagtttctcctgatatagacgacactaatataaatcacataattgagttaattaaaaaatttaaaattagtggaataataatttctaataccactgataaaaacagagaaaatttagttggaaaaaataaaaaggaggttggaggtttatctggagaaccactaattaacatttctaataatttgata

SEQ ID NO: 218106 - DNA, 871 bp, Unknown
  Bacterial polypeptide expressing nucleotide sequence isolated from the Sargasso Sea
tcatctctttataaatttcctcaagaatcaaaagaaataaaaggtttaaaaatcaagaataggcttggtttagctgctggccttgataaaaatggagaattaattaaagaaatggacaatataggttttggttttatagagattggaactgttacacctaaacctcaatatggaaatcctaaacccagattaaaaagattagttaatcaaggatctctgttaaatagtctaggctttaacaatgatggcacagaagaaattaagaataggctagaaaaattaaatcataattgcactttaggtataaatattggcccaaacaaatcaacgccagcagatagatttcatgaagattattcaatttgtatgagatctttggcaaagtatgcagactatatagctataaatatttcttctccaaatacaccggagttaagagatttacataaaaaagaaaatatagaaaaagttataaggggtgttcttgaagagcgcgataatacaaataacaaaccaaaaatttttataaaattgtccccagatgaagataatcaaacttacttagagttaatagaattaattaatttatcaaaaatagatggagttataatctcaaatacatccaacaatcaagaactgaaaaaagaactaaatgttgataatttaccaggcggtatttcaggtctagctataaaaaataaatcaaatgaacttttaaagttcgtcaaaaaaaatcttaacgaagaaaaaatacttgttgcagtgggtggtgtttttgatgtagattcttataacgaaaaaattgatatgggtgcagatctagtccaaatgtatacaggattggtctatgaaggccctaatcaggttagaa

SEQ ID NO: 218107 - DNA, 790 bp, Unknown
  Bacterial polypeptide expressing nucleotide sequence isolated from the Sargasso Sea
atgtattcaatttttaaacctttcatattttcactagatcctgaaattgctcacgatttagcaattaattctttaaaatttaatgttttgccaaaaaatatttttcaagttgataatgaagaattacttgaaactagtttatttaatgtgagattgcctaatccgattggattagccgctggatttgataaaagcgctgaggtttataattctttatttaaacttggttatggttttgtagaagtaggaactgttactcctaacaaacaacttggaaatcctaagcctagaatttttagattagaaaaagataaagctcttataaatcgacttggctttaataatcatggttctgaaatagtttcaagaagaatatcagaaaatttaccaaatggttttttgggaattaatattggtccaaacaaagatactaaaaaaaaagaggaagactattatttatgtttgtcaagactcgcatcttatgctggatatttgacaattaatatatcttcaccaaacactgagggattaagagattttcatgatcaaaatgaactcgaaaaacttctaacaggcataaacaaaattaaaaaagagaaaaatattttaaaacctattgctcttaagctttctccagatataaataattctgaagttagtagaataatggaattagtcatcaaacatcaaattgatggtatagtagtatctaatacaaccgatagtaatcgagaaaatttgtccgacacacaaaaaaatgaaaagggaggattatcaggccaaccttaaa

SEQ ID NO: 218108 - DNA, 853 bp, Unknown
  Bacterial polypeptide expressing nucleotide sequence isolated from the Sargasso Sea
aatgtattcaaatttaagatcattaatatttaaaatagatcctgaaagagcacattttttagcaattcaatcactcaaacttaatttagtttcaaatatatttgatgaaaacaaaaatgatccccttttaaaaaccaaattatttaatcaagatcttgacaatcctattggtattgcagcaggttttgataagaatgcagaggtatacaatcctttatttaaattgggttttggatttgttgaagtaggtacggttacaccattaaaacaatatggaaatgaaaaaccaagagtatttagattggtagaagatcaagcattaattaataggctaggttttaataaccacggatcagatgcaatattaaacagaataaaatctaataaaaaactaggtgtactaggtgtaaatgtaggtccaaataaaaattctaatgatagattgaatgattatttaattggattagaaaaattttctgaagttgcagattatattacaataaatatttcttcaccaaatactgaaaatctaagaaactttcatgatgagaataaattaatagagttattaaaatctatctcagagaaaaaaaaacaattaaaaactgaaattcctgtggctgtaaaaatttcaccagacattaacgaaaatcaaattgatttaatttcagaaatacttttagaaaatgatataagtgcaataataatttcaaatacatccgaagcttctagagaaacacttcaaaatatgcatagacatcaaaaaggtggtttatctggaaaacctattgaaaaaaaatctaatcttttgataagtaaattcttcaatttaattaaaggtaaaataaaataa

SEQ ID NO: 218109 - DNA, 371 bp, Unknown
  Bacterial polypeptide expressing nucleotide sequence isolated from the Sargasso Sea
aatgttttcaattttaagaccttatatattttcgctagatccagaagtagctcacgatttagctataaaatcattaaaagccaacttccttccaaaaagtttttttagtgtagaaaatgaggaaatgcttgagacaagtcttttaggaaaaacaatttcgaacccaataggtttagctgcaggatttgataaaagcgctgaagtttataattctcttttcaaatttggttttggttttgttgaagtggggactgttactccgaaacagcagttaggcaatccaaaaccacgaatattcagattggaaaaagatcaggcacttataaatcgtcttggttttaacaatcatggttcagaaactgtttcaaaac

SEQ ID NO: 218110 - DNA, 358 bp, Unknown
  Bacterial polypeptide expressing nucleotide sequence isolated from the Sargasso Sea
aatgttttcaaaattaagatctttaatttttaaattagaccctgaaactgcacattctttagcagtaaaagctttaaaatttaattattttcctgttaaaaatattaaaaaaagcgattctctaaaagttgaaatattttcaaaaaaattgcccaaccctatagggattgcagctggttttgataaaaatgcggaagtttataattcattatttaaattaggttttggttttgtggaggtaggaactgttaccccaataaaacaatatggaaatcccaaaccaagaatatttcgtcttgaagaagacgaagctttaattaatagattgggttttaataattttggatcaaaaaaaata

SEQ ID NO: 218111 - DNA, 527 bp, Unknown
  Bacterial polypeptide expressing nucleotide sequence isolated from the Sargasso Sea
actgataagaaatttaccacctgaactttcccactatataactttaaaattacttaagttaaatttatttaaatcaaaaaattttgaagacccaattttaaatcaacatatttttggttttgactttagtaatccactgggtttagctgcaggatttgataaaaatgctgaggtagtaaattctttacttaatttaggttttggatttatagaggctggaacagttacaccaaaatatcaatacggcaacgaaaaacccagagtttttcgtcttaagaaagatagaggtattataaatcatttaggatttaacaataaaggaacagaatttgtaaaaaaaaaactagaaaggcttaaactaagtactttatctaaaggtattgttggtattaatattggaaaaaataaagacactttgaatgatattgatgattatattttttgtttacaagagttaggaccttttgctcattatgttacagtaaatatttcttcgccaaatacacctggactaagagaactgcaaa

SEQ ID NO: 218112 - DNA, 709 bp, Unknown
  Bacterial polypeptide expressing nucleotide sequence isolated from the Sargasso Sea
cgctggaagactcgtgcgtcaaaaagtaccggaaaaaccggtgacctgcatgggactgacgtttaaaaatccgctgggtctggccgcaagtctggataaagacggcgaatgtattgatgccttaagggcgatgggattcggctctattgagattggaaccgtcacgccgcgtccacagccgggtaacgacaagccacgcttgttccgcctggttgatgccgaaaggttgatcaaccgcatgggcttcaataaccacggcgttgataacctggtcgagaacgtaaaaaaagcgcatttcgacggaattctgggtattaatattggtaagaataaagatacgccagtagagcagggcaaagatgactatctgatttgtatggaaaaaatctacgcttatgcgggctatattgcgattaatatctcctcaccaaataccccagggctgcgtacgctgcaatatggtgatgcgcttgacgatctcctttccggtattaaaaataagcaatctgaacttgaacaaaagcatcataaatatgttccagtggcggtgaagatcgcgccggatctttctcatgaagagttgatccaggtggccgatagtttagttcgccataatattgatggggtgattgcgaccaataccacattggatcgttctttggttcaggggatgaaaattgcgatgaaatgggtgggtttagtggtcgtc

SEQ ID NO: 218113 - DNA, 711 bp, Unknown
  Bacterial polypeptide expressing nucleotide sequence isolated from the Sargasso Sea
aatgtttaatattttaagaccactaatttttaaatttagccctgaagtagcccattctttagcaataaaagcactaaaattaaataatattccttactcaaaacccaaagataatcatattttagaaacaactttttgtgaaaaaaaattatcttcaccaattggtgttgctgctgggtttgataaaaatgctgaagtatataatcctctgtttaatcttggatttggttttgtcgaagtagggacaattactccaaaaccccaatttggtaaccccaaaccaagagtttttagacttgaagaagatgaagctcttataaatagattaggttttaataattctggttcagaacgaattagtcagacaataaaggaaaataataaaaagggttttttaggaataaatattggaccaaataaagactccaaagacagagttgaggattatttaatttgttttcgtaaattttataatttagctgattatataactataaacatctcctcaccaaatacagaaaatttgagagactttcataaccaagacgaattaaattcattaattgataagctaaaaaatgaaaaaaaagaattgaactcaaacattcctcttgccatcaaagtctcacctgatcttaatgatgatcaaatcaatgaagtatccaagattattatagatccagaaatagaatttatatgtttcaattacac

SEQ ID NO: 218114 - DNA, 906 bp, Unknown
  Bacterial polypeptide expressing nucleotide sequence isolated from the Sargasso Sea
aatatccctactcaaaacctaaagataatcatattttagaaacaactttttgtgaaaaaaaattatcttcaccaattggtgttgctgctgggtttgataaaaatgctgaagtatataatccactgtttaatcttggatttggttttgttgaagtagggacaattactccaaagcctcaatttggtaaccctaaaccaagagtttttagacttgaggaagatgaagctcttataaatagattaggttttaacaattctggttcagaacaaattagtcagacaattaaggaaaataataaaaaaggttttttaggaataaatattggaccaaataaagactctactaatagaattgacgattatttaatttgttttcgaaaattttataatttagctgattatataactataaatatttcctcaccaaatacagaaaatttaagagactttcataaccaggatgaattaaattcattgattgacaaactaaaaaatgaaaaaaaaaaattgaattcaaacattccgttagcaataaaagtttcacctgatcttaatgacgatcaaattaaagaagtatccaagattattatggaacaagaaatagaaattattattgtttccaatactacagacaagaatagagaaaatttaaaaaatataaataaattagaaaagggtggactttcaggcaaaccaattgaaaagatttcaaacgaggtaatttctaaattttatacaattttaaaagataaaacaaaaataataggagtgggtggtgttagtaatggacaagatgcttttcaaaaaatcatttctggtgcaacactcgttcaattatatactggaatggtttatagaggtcctcgtatagctttaaaaataagtacagaattaattgatttataaa

SEQ ID NO: 218115 - DNA, 798 bp, Unknown
  Bacterial polypeptide expressing nucleotide sequence isolated from the Sargasso Sea
gctatcctggtctgcaatgggtttttcttggtgtgagtacggtggaataacacgatatccccaggatggcaacccaaaacctaggatgttcagagcaaataaacatcgggccctcataaataggatgggatttaacaaccctggcgcgactgaagttaaaaggaggcttattgagagaagggcgtcagataaatggcctaaatttcctgttgctgcgaatataggcaggtctaagaaagtgtctaatgaacatgctgctgaagattattctgctactttggatatgctgtgggatcatgctgatttgtttgtattgaacatttcttcacccaacacacccggtttgagagatctgcagagtggcgaccatatatcctctgtcttgacatcctgtaatatgatcagggaaagaaagagagaaaggaagcctattttgttaaaactttcacccgattccaaagatgaggaaatatctaactcaatttcttcctcgatgaatcttggaattgatggcatagtggctactaatactacaattaagagaccggtgcccatcaatactcagtcgagaaaggcgttttcaaatgacggaggtctttctggcagaccattgcaatcgcgatctttggaggttattagcaaatcatatattgaaactagtggcaaaatcccaataattggtgttggtgggatagatagctcagaatctgcatgggaagctattacttccggtgccacattattgcaattgtactctgcaatggtattcaacggtccttcagttgtgtccagtatagt

SEQ ID NO: 218116 - DNA, 796 bp, Unknown
  Bacterial polypeptide expressing nucleotide sequence isolated from the Sargasso Sea
tatttaaaaagattgcttttttctttagaccctgaagttatacatgaacactctatcaagtttttgtctgactaccctcttttaagtgagctttttgaccaaaaaatttcaacctctgaaaatgataaataccaagtgactctgaacggaccttcttggtctttcccagtcggtcttgcagcaggtttagataagaatgctttagcgttagactttttttcaaagctttattttggcgcaattgaagtaggaacggtgaccccgaaacctcaggagggaaacccgaaacctcgcttgtttcgttatcccgataatgaatctcttagaaataaaatgggttttaacaacggaggagccgagagtgtcctgcggcaccttttgagtactacgaaaaataacaaagtgctaggagttaacttagggaaaaacaaagtaactccaattgataaagcctgggaagattataatattctttatcagaacttttcaaaaataagtgactatttagtgattaatgtctcttcgccaaacacaccggggttaagaggtttgcaggagagcgatgctcttgaagagattttatcttccttggagcaggtaagaaatgagaagccttgtccactctacttaaaaatatcacctgatattgataaaactcatgtctctgcaattattaatctggtaaaaaaatattccctaacaggtattattgcaacgaataccacgattatgaaagaaaagggtgaggggggaatatctggcaagctttgtttagaaaaatcaaggaatgtcagaa

SEQ ID NO: 218117 - DNA, 573 bp, Unknown
  Bacterial polypeptide expressing nucleotide sequence isolated from the Sargasso Sea
gatgagcctttatgactgggcaaggccagcattttttttgcttggtccggaagctgctcatgacctgactttagcattattatcagcaggcttaataccaaccagcaagaccagtaaacgtgcacagaaggtgaccaaccttggcgtaacaattgcgggcatacaatttccgaacccggtcggccttgcggccgggtttgacaagaaggcaattgccacagatgccttattaaacctgggctttggctttgtagaagtgggtacggttaccccaaaaccgcaagcaggaaacccaaaaccacggctatttcgcctgacagaagacaaagcggtcataaaccgttttggcttcaacaaccccggacacgaaaaatttatccaaaatcttgaaagagcagagaaggcgggcgttatcggcgggaatattggcgccaataaagacagcaaagaccccgttatggactattgtgagggcgttcgcaccatcggacctcatgtggactatctgaccctaaatatctctagcccgaacacacccgggttaagagacctgcaatgtgaagagcatttaac

SEQ ID NO: 218118 - DNA, 427 bp, Unknown
  Bacterial polypeptide expressing nucleotide sequence isolated from the Sargasso Sea
aatgttctctatactaagaccttatatattttctttagatcctgaagtagctcatgatttagcaattaaatctttaaaagcaaatattttacctaaaagcttttttgatattagagatgaagaaatgcttgaaacagaattatttaatcaaaaaataccaaatccaattggattggcagctggttttgataaaagtgcagaagtttataattctcttttcaaattcggatttggatttatagaagttggaacagtgacaccaaaaaggcaattaggtaatccaaagcctagaatttttagattagaaaaagataaggctttaattaatcgccttggatttaataatcatggctctgatgtagtctccaaaagaatttcaaatgatcatcctactggttttctaggaattaatattggtccaaataag

SEQ ID NO: 218119 - DNA, 562 bp, Unknown
  Bacterial polypeptide expressing nucleotide sequence isolated from the Sargasso Sea
aatgtttacaatatttagaccttatattttttctttggatcccgaagttgcacatgatttagctatcaaaactctaaaactaaatgtcttgcctaaaagtttgtttagtgttgatggagaagaattgcttgaaacaagtttgcttaaagaaaaaatacccaatcctattgggttagcagcaggatttgataaaagcgctgaagtttacaattcattatttaaacttggatatggatttgtagaagttggtacagttaccccaaaaagacaacttggaaaccctaaacctagaatttttaggctggaaaaagatcaagctctgattaatcgactaggatttaataatcacggagcacaagttgtatctgagagaattgcagaaaatttacctggcggttttcttggtgtaaatgtaggtcccaataaagatacaaaaaacaaagaagaagactattatttatgtatatctaaacttttttcttatgcaggttatttgactatcaacatttcctcaccaaacacacagggattaagagacttccacgatcaaagggaattgaaa

SEQ ID NO: 218120 - DNA, 636 bp, Unknown
  Bacterial polypeptide expressing nucleotide sequence isolated from the Sargasso Sea
attgaatttttttcttaaaatttttaaattattaccaccagaactcgcacattcaatttcattaaattctttaaatttactctacaaattaaaccttttaagtttattttcacaacaaattctaatacgtgataattttaattttttaggaatgaactttaaaaacagattaggtactgcagctggcctggataaaaatggagattttatcgatgcattaggagaattaggatttggttttttagaggttggtacagttactccaattgctcaaaaaggtaattcaaaaccgagagtatttagagtatatgaggacaaagcaattattaatcgccttggttttaataataaaggtgtgaattatttagttaaaaatttaaaaaagagaaaatataaaggcatcattggtgtaaacattggcgcaaacaaatcctcaaaaggtatacaaagaattaatgattatttgatatgtttagagaaagttcataaatatgctgattacataactattaatatctcctctccaaatactcctaacttaagagatttacataataaagatcatttaaataacttaattgtttctataaacaataaagtaaacgaaattaatacaaaaatacctatttttttaaa

SEQ ID NO: 218121 - DNA, 475 bp, Unknown
  Bacterial polypeptide expressing nucleotide sequence isolated from the Sargasso Sea
atgaggatattgctttcatgcttgagaatccttcctcctgagtttgcccactcaattgcgctctattcaatacaaattttatatagattaaagttaatagaaatatttttcccaaatagatttgttgatgttccattcacttttaaaggccttaaatttaaaaataaacttggaatagctgcgggattagataaaaatggagactttataaattcattgggagcattaggctttggatttattgaagttggaactattactcctaagtcacaaccaggcaatccaaagccaagggtatttcgctttaaagatcaggaagcaattgtaaatagtcttggttttaacaacaaaggagttgattacttggttaaaagggttaagggcagaaaatacaatggagttcttgggatcaatattggagcaaataaagattcaattggtcagaggagaattgatgattatgtcgaatgctttc

SEQ ID NO: 218122 - DNA, 804 bp, Unknown
  Bacterial polypeptide expressing nucleotide sequence isolated from the Sargasso Sea
gaaatttttggtaaaacaattccaaacccagtaggtatagcagctggctttgataaagatgcagaagtatacaatcctttattcaaattagggtttggatttgttgaagttggaacagtgactccaatttatcaatatggaaaccataaaccaagaatatttcgacttgaagaagatatggccttaataaacagacttggttttaataattcaggctctgaaaaggttagatcaagaattatgtcaaattctccaaaaggtttgttcggaataaatatagggccaaataaagatacaaataatagactggaagattatttaatttgtcttagaaaattttataatcttgcagattatttaactatcaacatatcttctcctaatactgaaaacttgagaagctttcacaatagagatgagttgaatgaactcttgagtttaattgagaaagaaaaaaaaatattaaaaacaaaagtaccaatcatagttaaaatatccccagatattaaggatgaaaatatcaatatgatttcagatttgcttttaaaacatgatgttaaagcaataataatttcaaatacaactgataaaaatagagaaaatttacttaatattaataaattagaaaaaggaggcttgtcaggaaaaccattagaaaaaagatcaaatgaattaattaataaattttataaaattttaaaaaataaaataaaaattataggcgtaggaggagttgattcaggtcaaagcgcatacgagaaaataattaatggagctagtttagttcaactttacactggtatg

SEQ ID NO: 218123 - DNA, 757 bp, Unknown
  Bacterial polypeptide expressing nucleotide sequence isolated from the Sargasso Sea
ctgttacacctcgcccgcaagcaggtaacgataaacccccgtatatttagattgccagaatcaaacgctattattaatcgtatgggttttaataataaaggtgttgataatttaattagtaatgtaaaagcagcaaagtacaacggcatattaggtattaatataggtaaaaataaagatacccctaatgagcaaggtaaagacgattacatacactgtatgagaaaagtttttgagcatgcctcttatattaccgtgaatatttcttcaccaaacacacccggcctgagagatttacaatacggtgctgcacttgatgatttattgcaaagtcttaaaaatgagcagctagatttaatttcagaacataataagcaagttcctatgcttgttaaaattgcgccggatcttgatcctattcaaatcgaacaggtaagtgaatcactgctaaacaacaaaattgacggggtaattgcaactaatactacactagaacgaagtgatgtgatcggtcagcagtatgctgaggaagccggtggtttatcaggacaccctgtaagaacacgttctacagaagtagttagtgaattaagacgattaacaaaaggccagttacctattattggtgttggcggaattgatgatgctaattcagctaaagagaagcttaatgcgggtgctagtttagtccaagtttatacaggttttatttataaaggccctgaattggtaaaatcgatcgtaaacggcttataag

SEQ ID NO: 218124 - DNA, 742 bp, Unknown
  Bacterial polypeptide expressing nucleotide sequence isolated from the Sargasso Sea
ataaatggtaaaaataatccatcacttgaaaaagaagtttttggtataaaattcccaaacccagtaggattggcggcaggttttgataaaaatgccgaggtatataaacaaatgtcttcattgggctttggtttcattgagataggtactgtaacaccagtttctcaagatgggaatccaaaaaaaagaatttttagattagttaatgataatgctttaattaaccgacttggttttaacaatgatggagttgataaagttgtaggtagattaataaacaagggcaatattataattggtggtaatattggtaaaaataaagttacaccaaatgaaaaggcaaaggatgattatttaatctgttttaaagctttatatgatcatgttgattattttgcggtaaatgtgagttcaccaaacacaccaaatttaagagatcttcaaaacataaatgatttacgtgaaatattatacccactgataagggagaataataaaaaagattccaaacctattctaattaaaatttcacctgatttaaatgatgatgatataaaaaaaatagtcgatatggcacttgatcttaaaattgatggtatcataacatcaaatacaacaatcagcagaaataatttaaagtctaagaaaaaattaaccagtgaaattggaggtttaagcggaaaacctttaacaattagaagcacagaaattattaaattaattcacgagtattcaaataaaa

SEQ ID NO: 218125 - DNA, 702 bp, Unknown
  Bacterial polypeptide expressing nucleotide sequence isolated from the Sargasso Sea
aatgtttagtattttaagaccattaatttttaaatttagccctgaagtagctcactctttagcaataaaagcactaaagttaaataatattccttactcaaaacctaaagataatcatattttagaaacaactttttgtgaaaaaaaattatcttcaccaattggtgttgctgctgggtttgataaaaatgctgaagtatataatccactgtttaatcttggatttggttttgttgaagtagggacaattactccaaagcctcaatttggtaaccctaaaccaagagtttttagacttgaggaagatgaagctcttataaatagattaggttttaacaattttggttcagaacaaattagtcagacaattaaggaaaataataaaaagggttttttaggaataaatattggaccaaataaagactccactaatagaattgatgattatttaatttgttttcgtaaattttataatttagctgattatataactataaatatttcctcaccaaatacagaaaatttaagagactttcataaccaggatgaattaaattcattgattgacaaattaaaaaatgaaaaaaaaaaattgaattcaaaaattccgttagcaataaaagtttcacctgatcttaatgacgatcaaatcaatgaagtatccaagattattatggaacaagaaatagaaattattattgt

SEQ ID NO: 218126 - DNA, 298 bp, Unknown
  Bacterial polypeptide expressing nucleotide sequence isolated from the Sargasso Sea
gatggatggcgttattgcaacgaacaccactttgtcgcgagatgcagtacaaggcctgaaacacgccgatgaaatgggtggcctaagcggctcggtcatgacagatatgagcctagaggtgacgcgaaagctaaataaagcgttagatcgcgctattcctataattggtgtaggtggtatagactcgccaaaggcggcgcaggcacgtctagatgctggggcttcgcttgttcaggtttactcggcttttatttatcaaggcccgtcactcgttaaacgcatcgtaaacgcgttataa

SEQ ID NO: 218127 - DNA, 367 bp, Unknown
  Bacterial polypeptide expressing nucleotide sequence isolated from the Sargasso Sea
aatgttttcaaaaattagaccttttatttttaagttagatcctgagttagcgcatgatcttgcaattaaagcactaaaaacaaatttaattattaatgaaaaaaaaaagaatgaatttacttttagaactcaattatttggaaaagaaattccaaatccagttggaatagctgctggtttcgataagaatgcagaagtttataatcctttatttaaactcggttttggttttgtagaagttggcactgttactcctttaagtcagtacggtaatccaaaacctcgagtttttagactagaggaagattgtgctctaataaatcgactaggctttaataacaatggggctgatgacgcaagatcaaga

SEQ ID NO: 218128 - DNA, 536 bp, Unknown
  Bacterial polypeptide expressing nucleotide sequence isolated from the Sargasso Sea
tttgaacaatatattatttaaactttatcaaaaaattgcttttcttggggatgcagagaaagtacacaatatttctctacccattcttgaatttatatataaaagttattttggaaaagtttttcataagaaaataatcagtaaaaaaacaaaacaatttggtatttcatttgacaaccctgttggtctagcagcaggatttgataaaaacgctgattatttgaattttctgtccaatataggatttggatttatagaagttgggacattaacaccaaaaccacagccaggtaatccaaaaccgagagtctttagagtaataaatgaacaagctatcatcaatcatcttggctttaataataaagggatagattatggaattaatcaaattaagaagtttaataaaaatattcctataggcatcaatattggtaaaaatgcaactactgatattaaagatgcttttcgtgactatgaatattgtcttagaaaatcttatgctatagcagattatattacattaaatatttcctcac

SEQ ID NO: 218129 - DNA, 554 bp, Unknown
  Bacterial polypeptide expressing nucleotide sequence isolated from the Sargasso Sea
aatgtttaaaaaaataagacctttaatatttaaatttagtccagaagctgcacattctttagcaattaaagcattaaaatcaaatttaataccatcaaataaaattgaagagaaatctatattaaaaattaaaatatttgggaaaaatattaaaaacccaataggtgtggctgctggattcgataaaaatgcagaggtctataatcctttatttaatctaggattcggttttgtcgaggttggaacaattactcctgaggcacaatatggaaacccaaaaccaagagtttttagattggaggaagataatgctttaattaatagattaggttttaataattctggatcagatgaaattagctctagagtaaaaacagatttaccaaatggtttactaggaataaatattggaccaaataaagatacatcaaatagagtagaagactacttaaaatgttttagaaaattttataatcttggtgattacataacaataaatatttcatctcctaatacagaaaacttaagagattttcataataaaaatgaactag

SEQ ID NO: 218130 - DNA, 727 bp, Unknown
  Bacterial polypeptide expressing nucleotide sequence isolated from the Sargasso Sea
atgttttcaaaacttaaaccttttattttttcccttgatccagaggtagcacatgatttagctattcaatctctcaaatttaatcttttaccaaaaagcatttttaatgttgaaaaagaggaactccttgaaacttatttgcttaatgagaaaatacctaacccaataggtctagctgctggatttgataaaagtgctgaggtttacaattctttattcaaattaggttatggatttgttgaggtcggaacaatcacaccaaaaagacaacttggtaatcctaaaccaagagtttttagacttgagaaagaacaagctcttattaatagactcggttttaataatcatggttctgaaatcgtttcaaaaagaatagaagaaaatttaccaagtggttttttaggtattaatgttggaccaaacaaagaaactctgaacaaagaagacgattattatgtatgcttatctaggctaggggctaatgccggttacttaacaattaatatatcatctccaaatacagagggattaagagattttcataaaaagaaagaacttgaaaaattgcttaagggtataaacaaaattagaaaagagaaaaatctttcaaaacctattgttgtaaaactttctccagatattaatgataacgaaatcagcaatatattagaactaatttataaatatgaaattaatggtatcattgtttcaaatacgactgacagta

SEQ ID NO: 218131 - DNA, 745 bp, Unknown
  Bacterial polypeptide expressing nucleotide sequence isolated from the Sargasso Sea
aatgattttttataaagagctttttcacaaaatcgaaaaaattttgtggagtgtttttttaaagccctttttcttttcaattgaccctgaaaaagttcaccattttgtagtaggtgcaatgaaactgttttcacctatttttcatttaagaaaatcattctatcattttaaaataaatggtaaaaatcatccattacttgaaaaagaagtttttggtataaaatttccaaacccagtaggattggcggcaggttttgataaaaatgcagaggtatataaacaaatgtcttcattgggctttggtttcattgagataggtactgtaacaccagttactcaagatgggaatccaaaaaaaagaatttttagattggttagtgataatgctttaattaaccgacttggttttaacaatgatggagttgataaagttgtaggtagattacggaacaagggcaatattataattggcggtaatattggtaaaaataaagttacaccaaatgaaaaagcaaaagatgattatttaatttgttttaaagctttatatgatcatgttgattattttgcggtaaatgtgagttcaccaaataccccaaacttaagagatcttcaaaacataaatgatttacgtgaaataatttacccattgatcagggagaataataaaagagataccaaacctattctaattaaaatttcacctgatttaaatgatgatgatataaaaaaaatagtcgatatg

SEQ ID NO: 218132 - DNA, 837 bp, Unknown
  Bacterial polypeptide expressing nucleotide sequence isolated from the Sargasso Sea
aatgtttaatattttaagaccactaatttttaaatttagccctgaagtagctcattctttagcaataaaagcactaaagttaaataatatttcttactcaaaacctaaagaaaatcatattttagaaacaactttttgtgaaaaaaaattatcttcaccaattggtgttgctgctggatttgataaaaatgctgaagtatacaatccactgtttaatcttggatttggttttgttgaagtagggacaattactccaaagcctcaatttggtaaccctaaaccaagagtttttagacttgaggaagatcaagctcttataaatagattaggttttaacaattctggttcagaacaaattagtcagacaattaaggaaaataataaaaagggctttttaggaataaatattggaccaaataaagactctaaagacagagttgaggattatttaatttgttttcgtaaattttataatttagctgattatataactataaatatctcctcaccaaatacagaaaatttaagagactttcataatcaagatgaattaaatttattaattgataagcttaaaaatgaaaaaaaagaattaaattcaaaaattccattagcaataaaagtttcacctgatcttaatgacgatcaaattaatgaagtatccaggatcattatggaacaagaaataggaattattattgtttccaataccacagataagaatagagaaaatttaaaaaacataaataaattagaaaagggtggactgtcaggcaaaccaattgaaaagatttcaaacgaggcaatttctaaattttataaaattctaaaagataa

SEQ ID NO: 218133 - DNA, 523 bp, Unknown
  Bacterial polypeptide expressing nucleotide sequence isolated from the Sargasso Sea
aatgttttcaaatttaagatctttaatttttaaattagatcctgaaacagctcatagtttagcaatcaaatctttaaaatttaattttgttccaaatattatgttggaggatataaacaatcctttatttcaaacaaaattatttaataaagatttagataatccaattggcatggcagcaggttttgataaaaatgctgaggtatataattctctttttaaactaggatttggtttcgttgaagtgggaacaattacacctttaaaacaatatggtaatccaaaaccaagggtttttagattagttgaggatgaagcgcttatcaatagacttggttttaataatttaggttcaaaaaatatatttgatcgaattaaacaaaataaaccaactggtttactaggaataaatattggaccaaataaagatacaaaagaaaaaacaaacgattatatagagtgtttaaaaacttttcatgaagttgctgattatattactataaatatttcttctccaaatact

SEQ ID NO: 218134 - DNA, 439 bp, Unknown
  Bacterial polypeptide expressing nucleotide sequence isolated from the Sargasso Sea
atgttttcttttataagaccctttatatttaatttggatccagaaaaagcgcatgatctagcaataaaatcgctaaaatacaatatcctaccaagtaattttttttcagtaaataatgaggaaattttaagcactaaacttttcggaaaagaaataagcaatcctattggtcttgcagctggttttgataaaagtgctgaggtttataatgaaatatttaaaataggttttggatttgttgaggttggaactgtaacaccaaaaaaacagtatggtaatgacaaacctagagtcttcagacttgaaaaagatttagcattaattaataggttgggatttaataatgatggatctgaaacagttaaaaaaagaattgaaacaaatatgccatctagtcttcttggaattaatattggtccaaataaagataccgaaaata

SEQ ID NO: 218135 - DNA, 890 bp, Unknown
  Bacterial polypeptide expressing nucleotide sequence isolated from the Sargasso Sea
cttaggattagatttcccaaacccagttgggttggcagctggttttgataaaaatgctgaagtaatgcaatcaatgttttctcttggttttggatttgttgaaataggaacagttacgccagaaccacaaaaaggaaatataaaacctagaatttttagattaaaagaagatgaagcaattgtaaatagtcttggttttaataacaaaggagcgcaaaaagtaaaaaaaaatcttttaaaaattagaaatacttacattaataataaaattataggtgttaatataggaaaaaataaaagtacgaaaaatgcagtagatgattacctgtataatattgagtatctaggaagccttgcaagttatataacaattaatatttcctctccaaatactgaaggattaagagatttacaattacgaggtaatattgataattttttaaaaaaaattctagataaaagagatcaaataaaagatattaataaaaagccaatattaatcaaaatttcaccagacttagatgaaaatcaattaagagatattgctttaatatcacttgccaataatattgatggtttgattttaactaacaccactactgagaggttaaatacattaatatctaataataaaaaaagaaaaggtggtctaagtggaaaacctctttttgaaacttcaaatacaattttaaaaaaaatgtatagtctaacaaatggtcaaattccattaattggtgtagggggcatatcaagtgctagtgattgttacgaaaaaattaaagcgggagcatcactagtccagctttataccgccttaacttatgcaggaccttccttaatttacaatattaaaaacgaacttattgatttaataaaacagatggttacaa

SEQ ID NO: 218136 - DNA, 862 bp, Unknown
  Bacterial polypeptide expressing nucleotide sequence isolated from the Sargasso Sea
gaagtttcttaatcctattggtttggcagcaggcctcgataaggatgcaaaagctttgcttggtcttgcaaggctaggtttcgggcatatcgaggtcgggacggtgactccaaaaccgcagctaggtaatcctaaaccaaggctgttccgaattagagaatctgaggctttgatcaacaggatgggctttaacaatgaaggtgtagagtcaatggtcgggcggttggagaaaattcgacgcgagaacctcttaggcagcaccttagttggagttaaccttggtaagaacaaaaccacgccaaatgaaaaagcggtagaggattatcttgcgtgtatgggggttgtgggatcgcttgctgattatttcacgttgaacctttcttctcctaatacgccaggccttagagagcttcaatatggtgagactttacggaagctcttgactgaatttaaagaagggcaattggcccttgcgcaggatgttgcagccaagccggtttttttaaagatagcaccggatctatcggagaaagaactagaccaaatagcggcagtttttctggagacaaaaatagatggcttgatcgcgaccaacacaaccctcagtcgaattccagaacttgatcatcgttatctttctgaaacgggtgggatgagcggaagaccgctgttcgacctcagtcgatgggtcgtgaaaaacatgagagctcgccttggccgagatcaccttatcatcgccgttggcggtatcgactcggaagagcgggcgcaaaaaatgatggattcaggagcaaatcttttgcagatttacaccagctttatttataaaggcactaaattagtgcataaattgattgagtcg

SEQ ID NO: 218137 - DNA, 707 bp, Unknown
  Bacterial polypeptide expressing nucleotide sequence isolated from the Sargasso Sea
agtttttagaataatagatgaacaagctatcatcaatcatcttggctttaataataaagggatagattacgcaattaaccaaattaagaagtttaataaaaatattcctataggtatcaatattggtaaaaatgcaacaactgacatcaaagatgcttttcgagactatgaatattgtcttagaaaatcatattccgtggcagattatattacattgaatatttcatccccaaacacaaaaaatttgagggatctacaatcagcaaataatatggatagttttcttaattcaataaaaatattacataataatttaaaaaaagtttataagaaacatacccctttggttgtgaaaatagctcccgatatagaagaagaacccctgaatgacttattaaatctggtcaatagttatgatattgatggaataatttgtaccaatacaactatagataaaactgacttagatcataaattcaaaaatatccagggaggattaagtggcaagcctttatatgaaaagtctaatattgttcttaaaaatgtaaagaaacatttaaataatgatattaccatcataggtgtaggaggtatagattctgcttcatccgcaaatgaaaagtttaaattgggagcagatctcgttcagctttatactggtctagtctataaagggcctaatctaataaaaaatattttaaattaag

SEQ ID NO: 218138 - DNA, 325 bp, Unknown
  Bacterial polypeptide expressing nucleotide sequence isolated from the Sargasso Sea
aatgattttttataaagagctttttcacaaaatcgaaaaaattttgtggagtgtttttttaaagccctttttcttttcaattgaccctgaaaaagttcaccattttgtagtaggtgcaatgaaactattttcacctattttttatttaagaaaatcattctatcattttaaaataaatggtaaaaatcatccatcacttgaaaaagaagtttttggtataaaatttccaaacccagtaggattagcggcaggttttgataaaaatgccgaggtatataaacaaatgtcttcattgggctttggtttcattgagataggtactata

SEQ ID NO: 218139 - DNA, 514 bp, Unknown
  Bacterial polypeptide expressing nucleotide sequence isolated from the Sargasso Sea
ttgttaccaccagaattagctcattctttttcattaaattctttaaacattctttataaacttaaaattcttggactactctttaacaaaatagagcatgatgaaaaagttacattcctcggaatggaatttaataatagacttggaacagcagctggattggataaaaatggtgattatattgattcacttggcgctttggggttcggctttcttgaagttggaacagttactccattacctcaatatggtaataccaaacctagaatattcagaaattataatgaaaactctattgttaataggttgggttttaacaacaaaggtgttgactacttagtaagcaatcttaaaaagagaaagtataaaggtattttaggaattaatattggtgccaataagaactcagatggtgatgaaagaataaatgattatattgtatgccttcaaaaagtaattcaatatgctgattacattacaataaatatatcttctccaaacacacctaattgag

SEQ ID NO: 218140 - DNA, 902 bp, Unknown
  Bacterial polypeptide expressing nucleotide sequence isolated from the Sargasso Sea
tatgctaagtacttcaattgcaggcctcaaaatcaataacccgatcgggttggctgctggttttgacaaaaatgcggaggtaattaatgcgatgagccgaattggatttggttttatagagtgtggaacaaccacaattaagccccaatatggaaatcctaaacctcgcatctttagacttgaagaggatgatgctttgataaataggttaggctttaataataatggaattgataattttctttcaaattttagaaaaagaaaacaacaaaatgctattgcaggaatcaacattgggccaaacaaagactccgacaattttataaaagattatattactttatttgaaaaaacttattcagatggtgactatattacaataaatctttcctctccaaatactgaaggactaagagaaattcaaaagatcgagtcacttgatacattaaccaatgaattaaaaatcataaaagatagtaaagaacataagaaaaatatttttttaaaaattgatcctgatagcactgaaaaagattatgacgatataataaatattgcttataaaaacaatattgatgggttaataatttctaatacttcaactgaaaggccatctaatttaacaagtagattttgcatagaaagtggggggttatctggcaaacctctcagagataaatcaaatgatgttctaagactaattgcagctaaaactaaaggagaaatttcacttattggggtgggaggtatttctaatgccaatgatgtttatcaaaaaataaagctgggtgcttcagcggtccaactttatacagctctcacttttgaaggctcaaaacttattgaaaatataaaaagagatcttgtaaagtttttaaagcaggataattttgaaaatatag

SEQ ID NO: 218141 - DNA, 823 bp, Unknown
  Bacterial polypeptide expressing nucleotide sequence isolated from the Sargasso Sea
gaagtagctcattctctagcaataaaagcactaaagttaaataatattccttactcaaaacccgaagataatcatattttagaaacaattttttgcgaaaaaaaattatcttcaccaattggtgttgctgctgggtttgataaaaatgctgaagtatataatcctctctttaatcttggatttggttttgttgaagtagggacaatcactccaaagcctcaatttggcaaccctaaaccaagagtttttagacttgaagaagatgaagctcttataaatagattaggttttaataactctggttcagaacaaattagtaagagaattaaggaaaataataaaaaaggttttttaggaataaatattggaccaaataaagactccacgaatagaatcgatgattatttaatttgttttcgtaaattttataatttagctgattatataactataaatatctcctcaccaaatacagaaaatttaagagactttcataaccaggatgaactaaattcattgattgacaaactaaaaaatgaaaaaaaaaatttaaattcaaacattccactagcaataaaagtctcacctgatcttaatgacaatcaaattaatgaagtttccaagatcattatggaacaagaaataggaatcattatcgtttccaataccacagacaagaatagagaaaatttaaaaaatataaataaattagaaaagggtggactgtcaggtaaaccaattgaaaagatttcaaacgaggcgatttctaaattttacaaaattctaaaagataaaacaaagataataggagtgggtggtgtta

SEQ ID NO: 218142 - DNA, 400 bp, Unknown
  Bacterial polypeptide expressing nucleotide sequence isolated from the Sargasso Sea
atgaatgaacagaaaggggtatttaaaaatctttataaaaacttgattacccctgtattaaaaagagactctggaattgatgcagaatacttaactaatttatctcttagtcttttatcattcagttcaagaaaatataattggcctgtagtttcatctatcttaaaaaatctaaatgaagaattttctatagttgataaaaggttaactcagagcatatgtggtataaatttttgtaatccaattggtttagctgcgggtttcgacaaaaatggaaatgctgcaaatgtatggaaagattttggttttggatttgccgaacttggtacagtaaccaaatttgctcagaatggaaatcccaaaccaaggttgtttagattggcggaggaaggagcagcat

SEQ ID NO: 218143 - DNA, 319 bp, Unknown
  Bacterial polypeptide expressing nucleotide sequence isolated from the Sargasso Sea
atgtggaaatattttattagaccacttttttttctttttgatccagaattagtacataattttttgataaaatggactaagttgtttggtggtactgggttaccagacatgcgtttctcatcaccattgatagaaaaaaaggtttttggtataaattttcctaatccagtgggtctagcggcaggatttgacaaaaacgctgaaatagttacatcaataaggaggcttggtggttttggatttactgaaattggaactgttaccccgagaccacagtcaggaaacccaaaaaagagaatatttcgtttaacaaaggacg

SEQ ID NO: 218144 - DNA, 849 bp, Unknown
  Bacterial polypeptide expressing nucleotide sequence isolated from the Sargasso Sea
aactatatccctcataaaaaaaatcggaagaacaaaattcttgaattagatatctttggtaaaaaaataccaaacccagttggtatcgcagcaggttttgataaagatgctgaggtgtataattctttatttaaactaggttttggttttgttgaagttggaacggtcactccacataagcaatacggtaatccgaaacctcgggtgtttagacttgaggaagacgaagctctgataaatagattgggatttaataattcaggctctgataaggtgagatcaagaatattatcaaattctccttctggtcttttaggtgtaaatattggacctaataaagatacaaaagatagggtaaaagactatttagtaggtttaagaaaattccatgacattggtgactatttaactgtgaatatttcatctcctaatactgaaaatttaagaagcttccataaagatgaagagctagatgaacttcttaaagagattcaagccgaaaagactagattaaaaacaaatgtaccaattgccttaaaaatttctccagatattgaaaataaaagtattgatagaatatgtgagatcttaactgataacaaaatcacaacagtaatcatctcaaactcaactgataggacgagagaaaatttaaaaaatattaataaattagaaaagggaggtctttcgggcaaacctctcgaaaataagtcaaattttctaataaatgaattttttaaaagttttaaatcagatattacaattattggagttggaggagttgatagcggtagatcagtttatgaaaaaataataaacggtgcaaaacttgttcaactttataccgga

SEQ ID NO: 218145 - DNA, 833 bp, Unknown
  Bacterial polypeptide expressing nucleotide sequence isolated from the Sargasso Sea
tttacttaattttataaaatcattccagccagaaacatcacattttttaattattcaactgttaaagtatttagcgttcacaattaatcaaaaaaaagatgaccctatgttaagtacttcaattgcaggactcaaaataaataatcctatcggattggctgcgggctttgacaaaaatgcggaggtaattaatgcgatgagtcgaattggatttggttttatagaatgtggaacaaccacaattaagcctcaatatggaaatcctaaacctcgtatctttagacttgaagaggataacgctttgataaataggttaggatttaataataaaggaattgataattttctttcaaattttaaaaaaagaaaaaaagaaaattctattgcaggaatcaatattgggccaaataaagattctgacaattttataaaagattatattattttatttgaaagaacttattcagaaggtgattatattacaataaatctttcctccccaaatactgaaggactaagagaaattcaaaagatcgagtctcttaatacattaaccactgaattaaaaatcataaaggatagcaaaaaatataaaaaaaatatttttttaaaaattgatcctgatagcactgaaagagattatgacgatataataaatattgcttataaaaataatattgatggtttaataatttctaatacttcaactgaaagaccatctaatttaacaagtagattttgcttagaaagtggaggtttatctggcaaacctctcagagacaaatcaaatgatgttctaaaactaattgcagctaaaactaaaggagaaattt

SEQ ID NO: 218146 - DNA, 892 bp, Unknown
  Bacterial polypeptide expressing nucleotide sequence isolated from the Sargasso Sea
gaaatattacaaactaacttttgtggcaaaaagctttctagcccaataggtgttgcagccggttttgataaaaatgctgaagtttacaatccactatttaatcttggttttggatttgtagaggtaggcactattactccaaaaccacagtacggaaatccaaaacctagagtttttagactggaagaagatgaagctttaataaataggctcggatttaataattctggatctgaagaaattagttccaggatgtcaaaagaaattaaaaaaggaattttaggaattaatataggacccaacaaagatgctgaaaatagaatagaggattatataaattgctttaataaatttcacagtttagccgattacataacagtgaatatttcctctccaaatacagaaaatcttagagattttcataaccgagatgagcttaattctttgataaaagaattgaaaaatgaaaagaagaaattaaattcaaaagtcccgattgcagtaaaagtatctccagatttaaacgacgaacaaattgaagtagtttcaaacattctattagatcaggaaatagaaattattattgtgtcaaacacctcagataaaaatagagataaattaaataatattaataaattggaaaaaggaggtctctcaggcaaaccattatatcatgtttcaaataacattattggaaaattttataaacttcttggaaataagataaaaataattggagtaggaggggtagattcaggtgaggccgcttttgaaaaaattataagaggagctagtcttattcagctttacacaggcatggtttataagggtccaggtatagcttcttcaattagttctgaattaattgatatattgaaaaataaaggattaa

SEQ ID NO: 218147 - DNA, 843 bp, Unknown
  Bacterial polypeptide expressing nucleotide sequence isolated from the Sargasso Sea
aatgataaaaaatttaccccctgaattttctcattatgtaactttaaaactacttaagctaaatttatttacaggaaataattttaatgatcctattttgcatcaacatctttttggttttgattttagtaaccctctaggtttagcagctggatttgacaaaaatgctgaagttatcaaacctttacttaatttaggatttggatttattgaggctggaacagttactccaaaatatcaatatggtaacgaaaagcccagagtttttcgccttaaagaagataaagcaataataaaccatttaggatttaataataaaggcactgcttttgttaaaaaaaaattaaaaaaactaaatctaagttccttatcaaagggaattgttggcattaacataggaaaaaataaagaaactttgaatgatattgatgattatatatactgtctgcaagagctaggaccttttgcccattacattactgtaaatatttcttccccaaatactccaggcttaagagaattacaaaatagaggaagaatagaaaaactagtacagactcttcaaaaaaaacaagaagaaatgaattctttagaaaatactcctattttttttaaaatagctccagatattgatgaagagcaaataagagatatagcattaattagtttagctaataatatagatggtttagtaattagtaattctacaattgaaagacccgatatattaaaatcaaatttaaaaaatgaaataggtggtttaagtggcaagccattgtttttgaaatcaacaatgatattaagaaaaatgtatacattaactaatggtcaaattccattaat

SEQ ID NO: 218148 - DNA, 668 bp, Unknown
  Bacterial polypeptide expressing nucleotide sequence isolated from the Sargasso Sea
taaagttattgctgagaatttaaaaaaaagaagagacataattatcggtgccaatattggaaaaaacttttttaccgaaaatattgatgctcataatgactatttaaaatgtttaatagatctgaatgactatgttgattatttcgcagttaatattagctctccaaatactaaaggtcttagagattttcatgataaaaagctattaaaacctcttctagaaaagttggtcaataaaaatgatgacataaggaacagtaagcctttgttattaaaaatatctccagatgtaaatagccaacagcttgatgctatcattcaattagtgcttgaattaaaaatagatggtgtaatagcaactaatactactatttcaagagatggccttgtgtctatacacaaagaggaaacaggtggacttagtggaatgaaactgagggataaaagtaatttaattatttcttatctaagaaagaagcttggtccagattttccaataattggagtaggtggtataatgaatgctgaggatgcccttaaaaaaattgaatttggggctgacctagttcaactttatacaggatttatttatgaaggtccttcattgataaaaagaataaataaattacttttagacaaagaattaaataaaaattatgaaaaataat

SEQ ID NO: 218149 - DNA, 741 bp, Unknown
  Bacterial polypeptide expressing nucleotide sequence isolated from the Sargasso Sea
aatgagaaggatattttttaatatacttaagactcttgaccctgaagttgctcacaacttaacaataaatgctcttaaacttcccaatccatttattgaaatcaataatgatttccctattttaagtaatgatattaatggactcagttttaagaatccaatcggaatggctgcaggatttgataaaaatgctgaagttataaattcattattcaatttaggatttggtttcactgagtgtggaactgtcacaccaagacctcaatttggaaatgttaaaccgagggtattccggttagcatcagataaagctattataaatagactaggctttaacaataatggcattgaaaaatttttgataaatatgagtaaatcaaacaaaaatggagtccttggggcaaatattggacccaacaaagacacagaaaatttcgtagatgattatattaatttgtacactaaagttgttgattactcagattacgttacagtaaatgtctcttcacctaataccaagaatttaagagagatacaagagcacgatacattgaatacattgcttggcgaattgtctcaactacgagaaaatatgaagacacaaaaaaagattatattaaaaattgatcctgatagcactaaacagcactacagcatgatactcaatttagttcaaaaatataaaatcgacggcataattgctactaatacaactatttcccgtcctcatgaattaatgga

SEQ ID NO: 218150 - DNA, 724 bp, Unknown
  Bacterial polypeptide expressing nucleotide sequence isolated from the Sargasso Sea
attgttaaatagcacatcaaaattattaaaaatttttccaccagaatttgctcattctttaactataaatattctaaaatatttgaatttaagaaataataattttgatgatccaattctttcccaacatttatttggtttagatttcccaaatccaataggattagctgcaggctttgacaaaaatgcagaaataattaaatcaatgttctcacttggttttggttttgtagaagttggaaccgtaactccacttccacaaaaaggtaatcccaaacctagagtgtttagattgacagaagataaagcaataatcaatagtttaggatttaataacaaaggtagtaaaaaagttaaaaaaaatataattaaatttcgaaaatctcttaaagaaagtagacttattggagttaatattggtaaaaataaatcatcaattaatgcaatagatgattatcttttttgtatggatgaactaggttctatagcaagttatattactataaatatttcatctcctaatactgaaggtctcagagatttacaattaagaggtaatattgaagagttaattaaaaaaattaatagaaagagagaaagttttgacactataaataaaaaaccaatacttataaaaatttcgccagatttaaatgatgatcaattaagagatatcgctttgatatcattagcaaataatattgatggattaattgttgcaaat

SEQ ID NO: 218151 - DNA, 780 bp, Unknown
  Bacterial polypeptide expressing nucleotide sequence isolated from the Sargasso Sea
catgttaaatcagcattttttgggattagatttttctaatcctattggtcttgctgctggatttgataaaaatgcagaagtaataaatccaatttttaatctaggatttggatttgttgagattggtacaatcactccaaaaccccaaaaaggaaataataagcctagaatttttaggcttaaagaagacgaagcgattattaaccatttaggttttaataatttaggaacagaaaaaatcctaaaaaatttaaaaaaatttagatcattaaattttaaaggtaaggtcttaggaattaatataggaaaaaatcaaaattcacttaatgcaattgatgattattgctattgtttagaaaaacttagcggatttggccattacattacagtaaacatttcatcaccaaataccccaggtttaagagatcttcaattaaggggtaaaatagaggttttagttaaatccctccaaaaaaaacaaaaagaattaaccaatagagctgaccttccaatttttataaaaatttcaccagatattagcgaggaacaattaagagatattgctttaatgtctttggcaaataatgtttctggattggtaataagtaatactacgataaaaagaaaaaataatttagcttctccaaataaaaatgaaatcggaggtctgagtggaaaacctttatttttacaatcaactttgattttaaaaaaaatgtattcattaactaacggacaagttccactaataggagttggtggtgtaagtaatggcaaaga

SEQ ID NO: 218152 - DNA, 792 bp, Unknown
  Bacterial polypeptide expressing nucleotide sequence isolated from the Sargasso Sea
ttggctttggtttcgttgaagtgggtactgtcactcctaaagctcaggatgggaatcctaagccaaggctatttagactcaccaaagacaagggcattatcaatcgaatgggctttaataacggtggtgtagaggccatgatcaaacgccttaagaaaagaaagaccaaagtcattataggtggtaatattggcaagaataaagtaacacctaatgaagaagctattaaagattatgagatctgctttgaggcactttatgatcatgtggattattttgtagtaaatgtaagctcaccaaacacacccgggctaagaagtcttcaggaaaaaggtccactactagccattctcaatcgattaatgacccttaataaggccaaagtaaaagaaaaagcgatattcttaaagatagctcctgatctggaatggtcacaaattgatgaagttattgaagttgttcaggaaagtggcatccatgggttgatagcaaccaatacaactatagaccgaagtagtcttcaaacggagtcagtaatagttgaagatataggcaatgggggactcagtggagcaccactaacaaaaagagctactgaagtcatcaagtatatttcagataaaacaaatggccaattacccattattggtgttggaggcataatgacggctcaagatgcgatagataaactcaatgcaggtgccagccttgtacaactctactcaggctttatatatgaaggaccatatctagttaaaaagataaacaaaactatttttaatactctttaaa

SEQ ID NO: 218153 - DNA, 919 bp, Unknown
  Bacterial polypeptide expressing nucleotide sequence isolated from the Sargasso Sea
atatttaaaatagatcctgaaagagcacattttttagcaattcaatctcttaaacttaatttagtttcaaatatatttgatgaaaacaaaaatgatcctatattaaaaacaaaactatttaataaagatcttaataatcctataggtattgcggcaggttttgataagaatgcagaggtgtataatcccttatttaaattgggttttggatttgttgaggtaggtacagtcactccgttaaaacaatacggaaatgaaaaaccaagggtatttagactggtcgaagatcaagcattaataaataggctaggttttaataatcatggatcagatacaatattaaatagaataaaatcaaataaaaaattaggtgtgttaggtgttaatgttggtccaaataaagattctaatgataggttgaatgattatttgattggattagagaaattttctcaagttgcagactacattacaattaatatttcttcaccaaatactgaaaatcttagaaattttcatgacgaaaataaattaaaagaattactaaaatctatttctgagaaaaaaaaaaatttaaaaacagaaattcctatagcagtaaagatttcgccagatataaatgaaaatcaaattgaacaaatttcagaaatactgttggaaaataatataagtgcaataataatttcaaacacatctgaggcctctcgagaaaaacttcaaaatatacagagacatcaaaaaggtggtttgtctggaaaacctattgaaaaaaaatcaaatcttttaataagtaaattctataatttaattaaagataaaattaaaatcattggagttgggggcgttgatactggtaaagcagcttatgataagttttcattaggagcagattacgttcagctggtatacccggccatgg

SEQ ID NO: 218154 - DNA, 856 bp, Unknown
  Bacterial polypeptide expressing nucleotide sequence isolated from the Sargasso Sea
ttgaagcttggtttgcatccaagattaaatcaaaatataatttcaataaaaattggtgacttgttttttaaaaatttgattggtgttgcagctggttttgataaaaatgcagaggtaataaaaaaagttaatttcttgaactttggtttcactgaagttggcactattacaccaatgcctcaatatggaaatccaaaaccaagagtttttaggttagaaaaagataaagctataataaaccgaaatggttttaacaatttaggaatgttggaagcaaaaaaaaaattacagcattatagaaaaagttacccagtaggaagtgattttcttgttggaattaatattggcccaaataaagatagcaaagataggtttaacgattataaagttcttgctgaaaatttatcagtgtttgctgactatgtttctataaatatttcttcaccaaacacaccaaacttaagagattttcaaaacaaggataacttagaaaaagttataaaatttgttaaaaatggaattgtttcatcaaaaacgttgaataaaaaattaccaatttttttgaagattgcaccagatataaataagcaaacattgaattctataattgaaatagcccattcacaaaaaatttatggattgatcatctcaaatactactttagatagagcaagtaatcttaaatcaaaaaaatctgacgaattaggaggcttatctgggaaaccattatttaaaaaatcaacagatatattgtcacaagcaaacaaaataataaaaattaataattataaaatatttttaatcgcagccggtggtgtgtcagatagtaagactgcatatgtaaagattttgtgtg

SEQ ID NO: 218155 - DNA, 444 bp, Unknown
  Bacterial polypeptide expressing nucleotide sequence isolated from the Sargasso Sea
aatgttaattaatttattaagattactacctccagaaagtgcgcatcatataacaattaaattattaaaatcaaatttatcaatttctggaaaaaatactttagaatttaatacattaaaacaaactattttaggtatagattttgcaaaccctatagggttagcagctggttttgataaaaatgctgaagttattaaaccaatgttgtcttatggatttggatttgttgaagtaggaacgattacgccaagacctcaaaaaggaaatccaaagcctagagtcttcagattagaagaggatgaagcagtaataaatcatcttggttttcataattatggtagtgaaaaaattttaaaaaatttaaagtcattttatagcagtgattatttaaatggagttgtaggcattaatattggtaaaaataaatccactgaaaatgatat

SEQ ID NO: 218156 - DNA, 697 bp, Unknown
  Bacterial polypeptide expressing nucleotide sequence isolated from the Sargasso Sea
aatgttttcaattttcaaacctttaattttttcactagatcctgaaattgctcatgacttagcaattaattctttaaaactaaatattttaccaaaaaacatctttcaagttgaaaatgaagaattgctagaaactaatttatttaatgagagattgccaaatccaataggtttagctgcaggatttgacaaaagtgctgaagtttataattctttgtttaaacttggttatggttttgtagaaataggaactgtgacgcctaaaagacagctcggaaatccaaagcctagaatttttagattagaaaaagatctggcccttataaatcggcttggttttaacaatcatggttctgaaatggtttctaaaagaatatcagacaacttacctagtggttttttaggaattaacattggtccaaataaagaaactgtaaaaaaagaggaagactattacacatgcatctctagacttgcgtctttggctggatatttgacaattaatatatcatctcctaatactgaagggttaagagattttcatgaccaagaagaactcgaaaaacttttaacaggcataaacaaaattagaagagaaaaaaatatttcaaagcctataactttaaaactctctccagatattaacaactcagaaattagtaaaataatagaattaattactaaacataaaatcgac

SEQ ID NO: 218157 - DNA, 355 bp, Unknown
  Bacterial polypeptide expressing nucleotide sequence isolated from the Sargasso Sea
ttgcgtccgcttatcttttggctcgatcccgagcgcgctcacggccttagcctttgggctcttcgttcggggcttgtgcctggccctggcccaatcaaagatcaaatattaacacaaactctttgggggcttgagtttcctaatccagtagggtccgccgcaggctttgacaaagatgttcaggttcctatgcagacgttaaaccttggttttggatttgttgagattggatcagttactcctcggcctcaggagggcaatccccgcccccgcttgtttcggctggccgccgacgaggccgtaatcaatcgcaatggttttaatagttgcggtatggactttgcggctcagccat

SEQ ID NO: 218158 - DNA, 482 bp, Unknown
  Bacterial polypeptide expressing nucleotide sequence isolated from the Sargasso Sea
tatgaatgaacagaaaggagaatttaaaaatctttataaaaacttgattacccctgtattaaaaagagactctggaattgatgcagaatacttaactaatttatctcttagccttttatcattcagttcaagaaaatataattggcctgtagtttcatctatcttaaaaaatctaaatgaagaattttctatagttgataaaaggttaactcagagcatatgtggtataaatttttgtaatccaattggtttagctgcgggttttgacaaaaatggaaatgctgcaaatgtatggaaagattttggttttggatttgccgaacttggtacagtaaccaaatttgcacaaaatggaaatcccaaaccaaggttgtttagattagcggaggaagaagcagccttaaatagaatgggttttaataataatggtgctgaaaatctagttaaaaacttaatggaacaaggaattgagtttaaaaaaa

SEQ ID NO: 218159 - DNA, 880 bp, Unknown
  Bacterial polypeptide expressing nucleotide sequence isolated from the Sargasso Sea
aatgtttaataaaattagaccattaatatttaagttagatcctgaatttgcccactcgctagctattaaagctctcaaaacaaatttatttctaaaacaaaaaattccagaggacttatatttgaaatctagcttatttggaaaagagattaaaaacccaattggaattgctgctgggtttgataaagacgctgaagtttataattcattatttaatttaggttttggttttgtagaggtaggaacagtcacgcctctaaaacaatatggaaataaaaaaccaagagttttcagattagagaacgataaagctttgataaatcgtctaggtttcaacaattcaggtagtgataatgtaagtaaaagaataaaaaaaaataaaccaattggtatactcggtgtaaatatagggcctaattgggatagtaaagacagagtagaagattatcttattggttttaaaaaattccacaacttagcagattacataacattaaatatttcctcgcctaacacagaaaacttgagagattttcataatttagatgaattagagaatttactagacaaaatttttgctgaaaaaagaaaattaagcagcgaaattccaattgccttaaaggtttcaccagacattaataatgaaatcataaaagaaatatctaaattattaatagaatacaaagttaatgcattaatagtttcaaataccactgatcaaaatagagataatttaaaagatcatcaaaaatttcaaagaggtggtttatcaggtaaacctttgagaaatatatcaaataagttaataaaccatttttttaaaaatctaaatggacaagtaaaaataattggtgtgggaggcgtagactctggaaaatct

SEQ ID NO: 218160 - DNA, 397 bp, Unknown
  Bacterial polypeptide expressing nucleotide sequence isolated from the Sargasso Sea
gcaaacccacggtaaatatgtgccgctgttcattataatagcgccagatttgagcgatgtggaaattgacagtatcgctgcctcgctaattaacagcaaaatggatggcgtaattgctactaatacgacactttcacgtgatgccgttgccggattacagcacgctgaggaaatgggcggtttaagtggctcagttatgacagatatgagcttagaagtaacacgcaagctaaacaaagcacttgaccgcgctattcctattattggcgttggtggtattgactcacccgaagcggcacaagcacgcttggacgctggcgcatcactggtgcaggtctactcggcttttatttatcaaggcccatcgctcgttaaacgcatcgtaaacgcgttataa

SEQ ID NO: 218161 - DNA, 481 bp, Unknown
  Bacterial polypeptide expressing nucleotide sequence isolated from the Sargasso Sea
ttgaaacttaacattttaagaaagaaaaagacttttgaaaatttaaaaattaatatactcaatagacaatttgaaaatcctttaggtttagcagctggttttgataaaaatgcagaggttatagatggatccttgggtttaggttttggttttgttgaagtaggaacggtgactccaatgcctcaagagggaaaccctaaaccaagggtttttaagattcctgaattcgaggcaattattcagaggcttggatttaataatagtggtgttgagatttttttgaataatcttaaaaaaataaaaaaaacacaaaaccaaataataggagtaaatataggtaaaaataaagggtcattaaaaccgtactcagattatgaatttttatatgaattgatgcaaccttttgcagactatataactattaacatatcatcaccaaacacaccaggactcagagacctgcaaaagaaagaaaaactag

SEQ ID NO: 218162 - DNA, 634 bp, Unknown
  Bacterial polypeptide expressing nucleotide sequence isolated from the Sargasso Sea
atgttttcaaaatttagatctttaatttttaaaattaatccagaaaccgcacatagcttagcaattaagtcattaaaacttaattttattcaaaatatttttgatgaaaataaaaatgatccaatgtttaaaactaatttatttggaaaaacaataaataatccaatagggatagcagctggttttgacaaaaatgctgaagtatataatcctttatttaaattaggatttggttttgttgaggttggaactgttactccttttaaacaatttggaaatcctaaacctaggatatttagactagaacaagatgaggcattaattaatagactaggatttaataattttggcgcagatattattagttcaaaaattatatcaaataagccaaatggattattaggaataaatattggtccaaatagcgactcaaaagatagactaaatgattacttaatttgtattaaaaaatttcatgatattgctgattatatgaccattaatatttcgtctccaaatactgaaaaacttagagactttcatgagaatgataaactagaagaactattaagctctataagtgaagaaatgaaaaatttgaactccaaaacaccaatcgtggtaaaaatttcac

SEQ ID NO: 218163 - DNA, 448 bp, Unknown
  Bacterial polypeptide expressing nucleotide sequence isolated from the Sargasso Sea
tatgaatgaacagaaagggggatttaaaaatctttataaaaacttgattacccctgtattaaaaaaagactctggaattgatgcagaatacttaactaatttatctcttagccttttatcattcagttcaagaaaatataattggcctgtagtttcatctatcttaaaaaatctaaatgaagaattttctatagttgataaaaggttaactcagagtatatgtggtataaatttttgtaatccaattggtttagctgcgggttttgacaaaaatggaaatgctgcaaatgtatggaaagattttggttttggatttgccgaacttggtacagtaaccaaatttgctcagaatggaaatcccaaaccaaggttgtttagattagcggaggaagaagcagcattaaatagaatgggctttaataacaatggtgctgaaaatctagttaaa

SEQ ID NO: 218164 - DNA, 490 bp, Unknown
  Bacterial polypeptide expressing nucleotide sequence isolated from the Sargasso Sea
ctttttggaaaagaaattaataatcccattgggttggctgcaggttttgataaaagtgcagaggtttataatgaaatatttaaaattggttttggttttgtagaggttggaactgtgactccaaaacaacagtttggtaatgaaaaacctcgtgtatttagattggaaaaagatcaagcacttataaatagacttgggtttaacaatgatgggtctgatgtagttagaaaaagaatagaagccaatattccttcaagtcttttaggaataaatataggacctaataaagacacagaaaatatggctaatgattttttaaagtgtgctgaaattttttttccaattggtgattatataacaataaatatctcttcacctaataccaaaggtctaagagattttcataatgaagatgatttaaaaaatctactttcaaaaattaatgaaataagagaaaaaagtaattttaaaaaatcttttttattaaaga

SEQ ID NO: 218165 - DNA, 817 bp, Unknown
  Bacterial polypeptide expressing nucleotide sequence isolated from the Sargasso Sea
tggaaaaaaattatcttcaccaattggtgttgctgcagggtttgataaaaatgctgaagtatacaattcattgtttaatcttggatttggttttgttgaagtagggacaattactccaaaaccacaatttggtaaccctaaaccaagagtttttagacttgaagaagacgaagctctcataaatagattaggttttaacaattctggttcagaacgaattagtcagacaattaaggaaaataataaaaagggttttttaggaataaatattggaccaaataaagactccaaagacagagttgaggattatttaatttgttttcgtaaattttataatttagctgattatataactataaatatctcctcaccaaatacagaaaatttaagagactttcataaccaagatgaattaaattcattaattgataagctaaaaaatgaaaaaaaagaattgaattcaaacattccattagcaataaaagtttcacctgatcttaatgacgatcaaattaacgaggtatccaagaccattatggaacaagaaataggaattattattgtttccaatacaacagataagaatagagaaaatttaaaaaatataaataaattagaaaagggtggactatcaggtaaaccaattgaaaagatttcaaacgaggcaatttctaaattttataaaattctaaaagataaaacaaaaataataggagtgggtggtgttagtaatggacgagatgcttttgaaaaatcatttctggcgcaacactcgttcaattatatactggaatggtttacagaggtcctcgtatag

SEQ ID NO: 218166 - DNA, 661 bp, Unknown
  Bacterial polypeptide expressing nucleotide sequence isolated from the Sargasso Sea
aatgagttccccagttgattttgtttttcacaaacttcgacctataattttttcaagtgatgccgaaactgcacatgaaagaatgctgtcttcggttgagatgatttcaaaatttcctggtgtaatcccttttttgagatggcaattccgggaagaatctcccattctaaatacaaatctttttggaataaaagtaaataatccaataggccttgctgcaggatttgacaaagacggacgtatatatccatctttattcgctcttggttttggttttgtggaaataggtacagtaactccacttccacagtcaggaaattccaaaccccgcattttcaggcttctggatgaccatgctttggttaaccatctaggtttcaacagtcaaggtatccagaaaatgtccgaaaaactttatcttagaaacaaaatatattctctagaaaagtctgaaaaaatcaaaaaatactttgaaaaacaagaaaaatcttcatcctgcatgttaggaataaacataggtaaaaatagagatacatctctgaaaaaagctcgggaagattacgtgtcagcactaagcgcacttcatccctttgcggattattttactatcaatatcagctctccaaacacagaaggtcttagaagtcttcaggaaaaacaa

SEQ ID NO: 218167 - DNA, 545 bp, Unknown
  Bacterial polypeptide expressing nucleotide sequence isolated from the Sargasso Sea
aatgtactcactgttaaagccatttatttttaaaatagatccggaaatggcacacgatttagcaattaaatctttaaaatataattttttacccgaagatatatttaaggttcaagaggaagaaattctcgagacaaaaatatttaatacaaaaataaaaaatccaattggtttagcggctggttttgataaaagcgcagaggtatacaattctttatttaagttcggatttggatttattgagattggaacagttactccaagagaacagtatggtaatccaaaaccaagagttttcagactcgaaaatgatcgagctcttataaatagactgggttttaacaacgatggcatagaaaaagtttcacaaagactccaaaaaaatactccctctggttttttaggtattaatattggcccaaataaagacagtgaaaatagaactgatgactaccttaaatgtattaaagaaataaatacttttgctaattatattactattaatatttcatcgcccaatactccaggtttaagagattttcatg

SEQ ID NO: 218168 - DNA, 859 bp, Unknown
  Bacterial polypeptide expressing nucleotide sequence isolated from the Sargasso Sea
tttcaagaagaatcaccagcactttgtactaggatttttggaaaaaagatcaataatccgataggcctagcagctggattcgacaaagatggacgcatattttcttcattatttgctcttggatttagttttgtggaaataggcacagtaactccacttcctcagtctggtaatcccaaaccccgcattttcagacttgaggaggaccaagctttggtaaaccgtttaggttttaacaatctaggtatagagaaaatggcggaaacgcttgattcaggaatcaatataattccccccaaaaaatctgaaacaataaattattccttaaaaaataactcctatgcgatgctagggataaacattggcattaataaagaaacttctctattaaaagctcgtgatgattttatgctagctatcaataaacttcattcctttgcagattattttacaatcaatataagttctccaaacacaacaggtcttcaaaggcttcaggaaaaacagatgcttggcaaattactggaatcagtttgttctgaaagaaataaaattgatcgaaataaaatacggcaaactcctttgcttttaaaactttctcccgatttagatgataacggactaaaaaattttaccgaggtgataaaagagttcccaattcaaggcgttattgcaacaaacacaagtttggatagaccacaactaaaaagtaaccataaaattgaacatggtggtctcagtgggaaacctctcaagcggcgaagtacagaagttgtcaggtatctatttaaagaactgggtaatgacgtgactataataggaacaggtggagtttttaacggtgccgatgcttatgaga

SEQ ID NO: 218169 - DNA, 856 bp, Unknown
  Bacterial polypeptide expressing nucleotide sequence isolated from the Sargasso Sea
tggcattttttaattaaaacacctttactcggttatctttctaaaaaattgtttttttttgaagataattcattaaacacaaaagtttttgggattaattttgcgaaccctgttggtttggctgctggttttgataaaaatgccgatttatataatgacttttctcattttggattttcctttatagaagttggaacagtaactccaaaaccccaagcaggtaatcccaagcctagattatttagattgatcgaagattctgcaattattaatagaatgggatttaataatttaggtcttgaaaatgccattagtaacttaaaaaaaagaaaaaccaatattgttgttggtggaaatattggaaaaaataagtggactaaaaatgaattggcttcagatgattatcttgaatgttttaatcaattatttccttatgttgattattttgttgtaaatgtttcttctccaaatactccaaatctaagatctcttcaagataaagaacctttgtcaaatcttttaggtttaattcagaaatgtaatgattcaaaagaaagtagaaagccaattctattaaaaattgcacctgatgtttctactaatgagttagatgatattattgatgttgttgttagttgtaagcttgatggaattgttgcaaccaatactactattgaaagatcaaatttgaaaacctcaaaatcaaaggttgatgccattggtaatggaggtgtctctggaaaacctttgaaagaaaaatcaaatcagattatatcttatatttataataagactgagggtaaaattccaattataggtgttggaggaatacattctgcaaatgatgctatagaaa

SEQ ID NO: 218170 - DNA, 770 bp, Unknown
  Bacterial polypeptide expressing nucleotide sequence isolated from the Sargasso Sea
ttagcaataaaatcattaaaatataattttttaccagaaagtttatttaaagttgaaaatgaagaagttttaaataccagactatttggaaaagaaattcaaaatccaataggtctagcagcaggatttgataaaagtgcagaagtttacaataaaatatttaaacttggttttggatttgtagaagtaggcacagtcacacctagacaacagtatggaaatgaaaaaccaagaatttttcgtttagaaagagataatgccttaattaataggctgggttttaataatgatggatctgaaatcgtaaaaaaaagaattgaggaagacgtaccaaatggtcttttgggtataaatattggacccaataaagatacttctaatatgacaaatgattttatcgagtgtgcaaaaactttttttcccttaggtgattatattactataaatatttcatcacccaatactgagggtttaagagattttcataataaagaacatttacagaaacttttatcaaacataaatcttgtaagagagacaagtaattttaataaatcttttttgcttaaagtttcaccggatttagatgatcaatctattgataatattgtccagttgtcattagagaataatattgatggattgatcttaacaaatacaactgacagaaatcgagaaaatttattagacgaaaaaaaaaatgaaaagggaggattgtccggtaaaccaatacaggctttatcgacaagctatataaaaaaattttataa

SEQ ID NO: 218171 - DNA, 880 bp, Unknown
  Bacterial polypeptide expressing nucleotide sequence isolated from the Sargasso Sea
tgataagaatgctgaagtttataactccctatttaacttaggatttggatttgttgaggttggtacagtaactccaaaaccacaatatggaaacccaaaaccaagagtttttagacttgaggaagatgaagctctaataaatagattggggtttaataacaagggatccgaaaatgtgagttcaagggttaaaaaaaataaaccaagaggactacttgggataaatataggaccaaataaagattctataaatagagtagaggattatatagtttgttttaaaaaattttgtaatcttgcagattatataacgatcaatatttcatcgccaaatactgaaaatttaagagattttcatgaaagaggagaattaggtaatttgataaagactattaacaaagaaaaaaaaaataataatagcaatataccaattgcagttaaaatttctccagatctgacatttgatcaaattgaaggtgtatcagaaattttaattgaaaataatgttgagataataattatttctaattcaacagataaaaacagagatgcacttaaaaatattaacaaaattgaaaaaggtggtttatcaggcaagccaattgaaaaaatttcaaacaatataattaatagattttataaattaattggaaaaaaaataattataattggagttggtggagttgactcagcacgtggagtctatgaaaaaatgacaagcggggcaacaatagtccaactttatactgggatggtttacaaaggtcctaaaattgcttcgatgataaatgatgatttagttaagattcttgaaaaggacggaattaaaaatataagagaaatcattggatcaaaaaaatcatctgacgacgggcgatct

SEQ ID NO: 218172 - DNA, 553 bp, Unknown
  Bacterial polypeptide expressing nucleotide sequence isolated from the Sargasso Sea
atgccgccatcccctctcagcagcggcgcgttctatcagcgctggctggggccggtgttggccaatgacgagggactggatgccgagcagctctcgcggacagcactgaccgctctggaacaggcgtcgctgcggcgtcaatggcccctggtgtccacggtgctggagggcctggccggtgatctgcaacggcgtgatctgcgcctcgagcaggtgttgttcggttgccgtttccccaatccggtgggtctggcggccggcttcgacaagaacggtgtggcggctggtctctgggatcgtttcgggttcggctttgcggaggtgggcacggtcacctggcatggtcagcccggcaatccccgcccccgattgtttcgtctggccgaggaacaggcggccctgaatcgcatgggcttcaacaatgacggggcccaggccttgcgcagaaccctggaacggcaacggctggatccccccggccgccgcccggcggtgctgggaatcaacgtgggcaaatccaaggtcaccgcgctggaacaggctccggaggact

SEQ ID NO: 218173 - DNA, 326 bp, Unknown
  Bacterial polypeptide expressing nucleotide sequence isolated from the Sargasso Sea
catgtactcccttgcccgccccttcctgttctccctggacgccgaacgcgcccacggccttggcctgagcgcgctggaactggcctaccgcaccggcaccagtccgctgctggcccgccgccccgcgcccatgccgacccccgcgttcggcctcacgttccccaacccggtcggcctcgcggccggcctggacaagaacggcgagcacatcgacgcgctgctggcgctgggcttcggcttcgtcgagatcggcaccatcaccccgcgcgcgcaggacggcaatccgaaaccgcgcctgttccggctgccgaagcaccaggccatca

SEQ ID NO: 218174 - DNA, 499 bp, Unknown
  Bacterial polypeptide expressing nucleotide sequence isolated from the Sargasso Sea
aatgatatttaatataattaaacctctgatatttaagtttgatcctgaaaccgcacacagtttagcaattaaagcattaaaatataattatattccaaaaactaaattattaaaaaatgatttaatatctacagaaatttttggaaaaaagatttccaatccaatcggtcttgcagcaggttttgataaaaacgcagaggtatataattcgttttttaaacttggatttggttttgtagaagtaggcactattactcctaaaacccaatatggaaatcctaaaccaagagtttttagattagaggaagatgaggctctcatcaatagactgggttttaataactcaggcgctgataaaattggttctagaattaagtcaaaccctccaaatggtttacttggaattaatattggtccaaataaagatacaaaaaataaaattgaggattttttgattggcttaagaaatttaataactagcagattatttgacaattaa

SEQ ID NO: 218175 - DNA, 824 bp, Unknown
  Bacterial polypeptide expressing nucleotide sequence isolated from the Sargasso Sea
tttgaattttttcctaaaaatatttaaatttcttcctccagagtttgctcattctgcttcactaaattctttaaatttattacataaatccaagctattagttttatttaacaacaaaattattaataaaaatgaacacacaatttttggaatgaaattcagaaataaacttggcacagcagctggtttagataaaaatggggattatatagatgcattaggtgccctaggatttggtttcttagaggtaggaaccgttactccaaaacctcaatacggtaatcctaaaccccgaatatttcgtaactattcggaaaattcaatcatcaacagacttggttttaataataaaggtattgattatttggttaataatcttaaaaaaagaaaatatggtggagttgtaggagtaaatattggctcaaataaatcctctaaaggtattgaaagaataaacgattacttgctttgcattgaaaaaattcataagtttgcagattacataacaataaatatatcttcacccaatacacctgatttgagagacttgcatttgaaagaaaatctacaaaatctaattacttcagtagaaaacaaaattgacaagcttaattttaaaaaaccaatttttttaaaaatttctccagatgagactgacgaatcgattgagatgataattgatttagttaaaaaatcatctataacaggcctggttgctacaaacacaacaattgataaagaaaatcttaataataaaaaattaaaaaaagaagatggcggagtttcaggtcaacctttgatggataagtctacaaataaaattc

SEQ ID NO: 218176 - DNA, 765 bp, Unknown
  Bacterial polypeptide expressing nucleotide sequence isolated from the Sargasso Sea
aatgttttcttttataagaccttttctatttaacctagatcctgaaaaagctcacgatttagcgataaaatctcttaaatataattttcttccgagcaacttattttcagttaatggtgaagaaatattaagaactaagcttcttggcagagagattaataatccaattggtctagcagcaggttttgataagagtgcagaagtttataatgaaatatttaaaattggttttggatttgttgaggttggaactgttacccccaaaaagcagtttggaaatgaaaaacctcgagtttttagattagaaaaagaccaggcattaataaatagacttggatttaataatgacggatctgaaattattaaaaaaagaattgaaaataatattccatctagtttattaggtataaatataggtccgaataaaaatacagttaatatgactgatgattttctaaaatgtgcagaaatttttttcccgattggagattatataacaattaatatttcttcaccaaatacctctggtctaagggattttcatgatgaagatgccttaaaaaaattattatttaagattaatgaagtaagagaaaaaagtaattttaaaaaatcttttttattaaaagtttcacctgacctagacagttctcagataccaactatggtaaaacttatactagagtataaaattgatggtgtcattttaacaaatactagtaataaaaatagggacaatctaattgacccaaatagtaaagaaaa

SEQ ID NO: 218177 - DNA, 717 bp, Unknown
  Bacterial polypeptide expressing nucleotide sequence isolated from the Sargasso Sea
aatgtataacttacttaaagctttcctttttctttttgatcctgaaacagttcatagattaacaatactattcctgaaatttattcctataaataagacatcaattcctccagaattaaatataaaaatctttggtttagactttatgagcccaataggcctagctgcaggatttgataaagatgctgaagtgtatgataaaatgttacaacttggttttggttttgttgaagtaggtaccgttactcccaaaccgcagagaggaaatccaaaaccaaggattcatagaataaaaaaagaaaaggcaataattaatagcttgggattcaatagtattggttttgagaatgtaaaagaaaatctacagaataaaaaaactgaaggtattattggcgttaatataggtgcgaataaatatagtaaaatttttatagatgattacatttctgggataaaatttttttcaaatcatgtttcatatataactatcaatatttcctccccaaatacacctggcttaagagaattacatatagagaaaaatttgaaagatttgctagaaaaaattataaacctaaaaacaaataacgaaatagcagaagttcctctgttaataaaaatatcacccgatgttaatgatgatgatcttagtattatgtgtgatatatttttagaatttaatgttgatggaattataatatctaatactactcttga

SEQ ID NO: 218178 - DNA, 890 bp, Unknown
  Bacterial polypeptide expressing nucleotide sequence isolated from the Sargasso Sea
ttccaacccatttattgaaagcaataatgatttcccttttttaagtaatgatattaatggactcaattttaagaatcctatcggaatggctgcaggatttgacaaaaatgctgaagttataaattcattattcaatttaggatttggtttcactgagtgtggaactgtcacaccaagacctcaatttggaaatgttaaacccagggtatttcggttagcatcagataaagctattataaatagactaggctttaacaataaggggattgaaaaatttttgacgaatatgagtaaatcaaacaaaaatggagtccttggagcaaatattggacccaacaaagatacagtaaatttcttagatgattatattaatttgtacactaaagtagttgattattcagattacgttacagtaaatgtctcttcacctaataccaagaatttaagagagatacaagagcacgatacattgaatacactgctcagcgaattgtctcaattacgagaaaatatgaagacacaaaaaaagattattctaaaaattgatcctgatagcactaaacagcactacagcatgatactcaatttagttcaaaaacataaaattgatggcataattgcaactaatactactatctcgcgtccacaagatttaatggacgagtataaagatgaagaaggaggcatttcaggacagccacttaaagaattatcaaataaagtgttgagtttcctctcaaaagaaacaaatggagaattgcttcttattggcgttggaggaatttctaatgcgaaagatgtttatactaaaattaagttaggcgcatcattagttcaattgtatacagcccttactttcaatggaccacaaatgataaataagattaaaa

SEQ ID NO: 218179 - DNA, 601 bp, Unknown
  Bacterial polypeptide expressing nucleotide sequence isolated from the Sargasso Sea
atgttttcaatattaaaaccgtatattttctctttagatcctgaaatagcacacgatctagcaattaagtctttgaaatttaatgtcttacctaaaagtatttttaaagtggaggatgaagaaattttagaaacaacttttttggatacaaaactaccaaacccaataggtttggcagctggatttgataaaagtgcagaagtatataattcattatttagactaggttatggttttattgaagttggcactgtcacacccagaagacaacttggcaatcctaaaccaagaatcttcagactagaaaaagatcaagcacttattaatcgacttggatttaataatcatggatcagaaatagtttctaagagaatagaaatgaatccacctataggctatttaggaataaatattggccctaataaggatactgagaacaaagaggaagactattacttgtgtatggaaaaactctcttcactaggaaattatatcacaattaatatatcttcacctaatacagaaggtcttagagattttcacgatcaaaaagaattagacaaacttttaagtggtttaaatagaataaagaaagagaaaa

SEQ ID NO: 218180 - DNA, 894 bp, Unknown
  Bacterial polypeptide expressing nucleotide sequence isolated from the Sargasso Sea
attctccataggtgttgcagctggttttgataagaatgccgaagtttataactctttatttaatttaggatttggatttgtagaagttggaaccgtaacacccaaaccacaatttggaaatccaagaccaagagtatttagattagaagaagacgaggctctaataaatagattaggttttaacaatcaaggatgtgaagaaattagtttgagaataaaaaaaaataaacctaagggtttattgggaataaacattggtccaaataaagattcaagtaatagagtcgaagactacactacatgcctaaaaaaatttataaatcttgcaaattatatctcgattaatatatcttctcctaatactgaaaatcttagagattttcataaaactagtgaactaaataatttaatcaaatcaatacttgaagaaaaaaataattctaaatcaagtacaccaatagcagttaaaatttcaccggacttatcatcaaatcaagtagaaaaaatttctcaaatattaatagataataaaattgaaactataattatctctaactcgactgatagaaatagagaaggtttgacgaatatgaatagatttgaaaaaggtggattatcaggaaagcctatagaaaaaatctctaacagaataattaacgagttctacaaactcgtaggaaaacagattaagatcatcggtgtaggtggtgtagactctgcaaaaagtgcgtacgagaaaattttaagcggtgcaacgctagtacaactttacacaggaatggtttataggggtcctcgtattgcagcacaaattaataatggattaattaaaatcttagaacaagaaggcataaataatataaatgatgtggttggattaaaaaaatcaacttg

SEQ ID NO: 218181 - DNA, 845 bp, Unknown
  Bacterial polypeptide expressing nucleotide sequence isolated from the Sargasso Sea
agtatataattctttatttcagctaggatttggatttgttgaagttggaacaattacgccagaacctcaatttgggaatccaaaaccaagagtttttagacttgaagaagatgatgctttaattaacagacttggatttaataatataggatcagaaaaagttgcattaaatctaaaaaataatactcccaaaggtttattaggaattaatattggaccaaataaagatactaaaaacagagcagaagactacttaaaatgttttagaattttaaacaaactaggtgattatataaccataaatatttcatctccaaatactgaaaatttaagaagctttcataatccagaagagttagaaaaattattaaaattattaaatgaagaaaaaactaaacttaattccacgataagttttgcagttaaaattgcaccagatattcaaacaaaagatttagaaattattggaaatattctattagcaaacaatataaagtttgtaattatttcaaatacttctgatgttactagggaaaatttaaaaaatataaataaatttgaaaagggaggtatttctggaaaaccaatagaggaaaaatcaaatttattaataaatgaattttacaaaaaatttgagaataaaattaagataattggagtgggagggattgactctggcaaaagcgcctatgagaaatttatttcgggagcaagttatattcagttatatactggcatggtttatcaaggaccaaatatagtaaataaaatttctaaagaattgtatgaaattttgagttctaatggagttaaaaatattacagaaataataggatctaagtaat

SEQ ID NO: 218182 - DNA, 780 bp, Unknown
  Bacterial polypeptide expressing nucleotide sequence isolated from the Sargasso Sea
aatgtataaattagtaaggaattttttatttttatttgatgccgaagaaatacatgaactctcaacaaaattaatcaacctttttaatttcatacctttttcatctttccttttaagaaaatgctatttgatttcagataaatctcttgagaaagaattgtttggcataaagtttaagaatccaattggattagcagcaggatttgataaaaacgcaactttttttaatgattttaggaattttggttttggttttatagaagttgggactgtcactccattacctcaagaaggtaatcctaaaaagagaatctttagattatctaaagatgaagcattgattaatcgtttagggtttaataattctggagtagaaaaaataaaaaagaatcttaatagaaagaagaatattataataggagcaaatattggaagaaacagttttacttctaatgaagaagctcatcttgactatataaaatgctatacagaactatatccctatgtagactattttgcaattaacatcagctcgccaaacacaaaaggtttgagagaccttcataatagagatcttcttgaaccattgattaaaaaaatcacttcattaaattattcaaaaggaaatcctaagcccattttattaaaaatatcccctgatgttacatttaatcaattagatcaaattattcaattagttattgactatagaatagatggaataattgcgactaatacatctatatctagagaaggacttctttctaaaaacaaatctga

SEQ ID NO: 218183 - DNA, 715 bp, Unknown
  Bacterial polypeptide expressing nucleotide sequence isolated from the Sargasso Sea
atgttttcttttttaaaacccttaatttttggcttagacccagaagccgctcatgatttagcaattaaatctttaaagttaaacattgtcccagaaaatatttttaaagtcgaaaatgaagaaatgttagaaactaattttttgaaaaaaaaaataaaaaatccaataggtatggcggcaggttttgataaaagtgccgaggtttataattctcttttcaagcttggcttcggttttgttgaagttggaactgtaacgccaataaaacaaataggaaatcctaagccaagaatttttagacttgaagaagatgaagctttaataaataggctaggttttaataatgatggtttagaaacaatattaaaaagactcgaaagtggccagttcggcaagggagataatactcttggagtaaatattggccccaattttaatagtaaatctttcgaatcagatttttgtaaatcagcagaatctctcataaggttatctttggcagattatattacgattaatatttcttcacccaatactgaaaatctaagagattttcatgatgaaagtaaactggattctttactggaggctattaataaattgaagcaagagtttggaagtcttatgccaatttttgttaaagtatctccagatataaaagactcttccattgaaaaaatttcagaaataattattaatcaaaaggtacaaggtg

SEQ ID NO: 218184 - DNA, 865 bp, Unknown
  Bacterial polypeptide expressing nucleotide sequence isolated from the Sargasso Sea
tttgtggagtgtttttttaaagccctttttcttttcaattgaccctgaaaaagttcaccattttgtagtaggtgcaatgaaactattttcacctattttttatctaagaaaatcattctatcattttaaaataaatggtaaaaatcatccatcacttgaaaaggaagtttttggcataaaatttccaaacccggtaggattggcggcaggttttgataaaaatgccgaggtatataaacaaatgtcttcattgggttttggtttcattgagataggtactgtaacaccactttctcaagatgggaatccaaaaaaaagaatttttagattggttaatgataatgctttaattaaccgccttggttttaacaatgatggagttgataaagttgtaggtagattaaggaataagggtaatattataattggtggtaatattggtaaaaataaagttacaccaaatgaaaaagcaaaggatgattatttaatctgttttaaagctttatatgatcatgttgattattttgcggtaaacgtgagttcaccaaacacaccaaacttaagagatcttcaaaacattaatgatttacgtgagataatgtatccattgatcagcgagaataataaaagagataccaaacctattctaattaaaatttcacctgatttaaatgattatgatataaaaaaaatagtcgatatggcactagatcttaaaattgacggtatcataacatcaaatacaacaataagcagaaacaatttaaaatctaagaaaaaattaaccactgaaactggaggtttaagcggagaacctttaacaatgagaagcacagaaattattagattaattcatgagtattct

SEQ ID NO: 218185 - DNA, 864 bp, Unknown
  Bacterial polypeptide expressing nucleotide sequence isolated from the Sargasso Sea
tatttgaaacgcagttattttggaaaaaaaattgataatccaattggactagcagctggttttgataaaaatgctgaagtttataatcctatatttagtttaggctttggttatgttgaagtagggactgtaacgcctttaaagcaatatggaaatccaaaaccacgagtttttagattggtagaagatcaagcgttaataaataggttaggatttaataatttaggagcagagaatattagctcaagaattcgctcaaataaaccaaaaggtttactaggagtaaacataggaccaaataaaaatagcacagatagattgaatgattatgtaataggattaaaaacatttaatgatatagcagactatctaacaattaatatttcttccccaaatactgaacaacttagagacttccatgataaaaataagttagatgaattaatgacaacaatatttaatgagaaagaaaaacttaactcaaaaattccaattgtggtaaaaatttctcctgatattcaggattatcaaatagaaaatatttcttcattattgattaaatacaaagtgagtgccataataatttcaaacacaaccgataggtatagagataaattattgagtaattctagacatcaaaaaggaggtttatcaggaaagcctctagaagataaatcaaatttactaattaaaaaattttataacgttctaaatggtagaatcgatattattggagttggaggtatagattctggaagaagtgcatacgaaaaaattgtatcgggatctagttacttgcaactttatactggcatggtttatcagggtccaaatattatttcaaaaataaagagcgagcttaaa

SEQ ID NO: 218186 - DNA, 469 bp, Unknown
  Bacterial polypeptide expressing nucleotide sequence isolated from the Sargasso Sea
aatgttttcaaaattcagaaacttaatctttaagattgatcctgaaatagctcacaacttagcaatcaaatccttaaaacttaattttactagaaatatttttgatgaaaacaaaaatgatccaatgtttcaaacaatattgtttggaaaaaaattagataacccaataggactagcagcaggttttgataaaaatgctgaagtttataattcaatttttaaattaggatttggttttgttgaagttggaactgtaacacctttaaaacagtatggaaatccgaaaccaagaatttttagattagttgaggatcaagctcttataaatagattgggttttaataatttaggttcggataatattagctctagaattcgtttaaacaaacccaatggtttgttaggtgtaaatttaggaccaaacaaggacacacaagacaggttaaatgattatttaatcggacttaga

SEQ ID NO: 218187 - DNA, 777 bp, Unknown
  Bacterial polypeptide expressing nucleotide sequence isolated from the Sargasso Sea
aatgtactcaattttaaagccttttatttttaaaatagatccagagatggcccatgatttagcaataaaatctttaaaatacaattttttacctgaagacttatttaaagttgaaaatgagtctattcttgaaactgaaatctttaatacgaaaattaaaaatccaattggattagcagctggctttgataaaagcgcagaggtatataattcacttttcaaatttggttttggatttatcgaagttggaacagtaactccaaaaaaacagtttgggaatttaaaaccaagagtatttagactagaaaatgatcaagcattaataaatagacttggatttaataacgatggtttagaaaaggtctcagaaaggcttaaaaaaaataccccatctggatttctaggaataaatattggacctaacaaggacagcgatgatagaattgctgattatacagaatgtttaaaaggaatttatagtttcgcaaattatattacaattaatatatcttcaccgaatacaccaggactaagagattttcataaagaagactttttaaaagaactcttaaaacatttatctgaattcgcgaataaaaataaaattaataaacctttagttttgaaagtatctccggatattacagataaagaaataagttatataattgatcttataaaaaaatttaatataaagggtataattgtttctaatactactgataaaaatagggataacttaatcgcaaagaataaaaatgaggttggaggtttatc

SEQ ID NO: 218188 - DNA, 646 bp, Unknown
  Bacterial polypeptide expressing nucleotide sequence isolated from the Sargasso Sea
atgttttctatcttaagaccttttttatttaatttagatccagaagctgcgcatgatttagctatcaaatcacttaaatttaattttcttcctagcaaagtatttgaagttgaagatgagcaaatgctaaatattaaattgttaggaaaaaattttcctaatcctattggtttagcagcgggttttgacaaaagtgccgaggcttataattcattattaaaattaggatttggatttgtggaagttggaacagttacacccttaaaacaatttggaaatcctaaaccaagaatatttagacttgaagatgatggtgccttaatcaatagactcgggtttaataatgatggaatggagacagtaaaaaacagaatcaagtcagatggaaagaaaggtatactaggaattaatattggacccaacaaagacacaaaagatcaaaaaattgatttttgtttaggtttaaaaaatttctttgacgtggcagactatattactgttaatatttcttcgccaaataccgaaggattaagagattttcataatcaagaaaaactcaaagatcttctactcgttcttaacaaaataaaaaaagataacaaaactgatattccgcttttattaaaaatttcacccagatattaaa

SEQ ID NO: 218189 - DNA, 373 bp, Unknown
  Bacterial polypeptide expressing nucleotide sequence isolated from the Sargasso Sea
atgctgtttgatatcgctcaaaaaatcatgctaagaatggatgcagaaacagctcatgatgttacgctttcaattctcaaacgaagcgctaataccccggttgataaactttatcggcaaacactcaaatccaaacccatcgagctcatggggctccgcttccccaatccagtaggcctagctgctggtctggacaaggatggtgaagcgatcgatgccttccatgccatgggattcggacatgttgaagtgggcactgtaactccgaggcctcaatcaggaaatcagctgccgcgcctattcaggctccaagaaacgaaagcgataatcaatcgtatgggttttaacaatctgggagtaaacaatctcaaag

SEQ ID NO: 218190 - DNA, 880 bp, Unknown
  Bacterial polypeptide expressing nucleotide sequence isolated from the Sargasso Sea
aggtgttgcggcaggatttgataaaaatgctgaagtatataaccctttatttaatttaggatttggttttgttgaggtaggaacaattactcctaaaccacaatatggaaatcctaaacctagagtattcaggctggaagaagatgaagcactcattaatagacttggatttaataattctggatctgatgaaataagcttaagaattaaaaaagaaattaaaaaaggttttttaggtattaatattggtcctaacaaagattctcaaaatagaattgaggattacttaatatgttttagaaaacttcatacgctgggtgattatattacaattaatatatcttcaccaaatactgaaaatctaagagattttcataataaaagtgaattaaattccttaattaaaaaactaaaagaagaaaaaaaaaaactcaattctaaaattccaattgcgattaaagtttctccagatttaaatgaagatcaaatagataatgtagctaaaatattattagatgaggagatagagatcataatcatttctaatacttctgaaaaaaatcgtgataatcttaaaaatatcaataaattagaaaaaggtggtctttcaggtaagccaattcaagaaatatcaaataacacaatatttaaattttataaaattcttggaaataaaattaaaataattggagtaggaggggtagatactggtcagagtgcttttgaaaaaataatatctggagctagtcttgttcaattatataccggcatggtttataaaggcccaggtatagcttctaaaattagttatgaattaatagatatattgaaaaacaaaggttttaaaaatgtttcggaagccattggaacaaaaaattga

SEQ ID NO: 218191 - DNA, 766 bp, Unknown
  Bacterial polypeptide expressing nucleotide sequence isolated from the Sargasso Sea
atgttttcaaatttaagatccttaatttttaaattagatcctgaaacagcacataatttggcgattaaatcattaaaatttaattttgttcctaatatttcagatgaaaataaagatgatcctttatttaaaactagaatgtttaataaagatatagaaaatccaattggtattgcagcagggtttgacaagaatgctgaggtctataattcattatacaaattaggatttggctttgttgaagtaggtacaattactcctttgaaacaatatggaaatcctaaacctagagtttttagactggttgaagatgaagctttaattaacagacttggatttaataatttaggtgcaaagaatgttgttaatcgaattaaatctaataagccaattggtttacttggaattaacatagggccaaataaggaaacagaaaatagacttggtgattatattgaatgtttaaaaacttttcatgaagtagcagattacattactataaatatttcttctccaaatactgaggatttaagaaattttcatgaacaaacaaaattaaatgaattgctagaaataattaataaagaaaaaaaaattttaaattcaaaaattccaatagtagttaagatatctccagatattgatgatcaagaaataaacaaagtgtctgaagttcttttaagcaataatattgaggtaattattatttcaaattcatctgactcaactagatatagtttgattgatattcaaaaacatcaaaaag

SEQ ID NO: 218192 - DNA, 601 bp, Unknown
  Bacterial polypeptide expressing nucleotide sequence isolated from the Sargasso Sea
catggttcagtctgaaactgccgggtcactcacctgcggcgccttctacagacgctggcttggtccagtcctcagtcgtgatgagggaatggacgctgagcagctgtcccgcgcggccctctcggcattggctcaggccagcttgcgaaggagctggcctggcgtctcaaccgtgctcaaagggctcgccactgaactgaacagacgtgatctgcgcttggagcaggtgctgttcgggtgtcggttcagcaatcccgtcggactggccgctggttttgacaaaaacggtgtggccgctggcatctgggatcgattcggctttggttttgccgaactcggcacggtgacgtggcatggccagcccgggaatccccgcccgcgattgtttcgccttgctgaggagcaggctgccctgaatcgcatgggctttaacaacgacggtgccgaggctttgttgcgtaccttgcaacggcaacggctggaatcgccagggaagcggcctgcggtgctgggcatcaacttcggcaaatcaaggatcaccgcgctcgagcaggcggcagatgattacgcctcctccctggaattgctgtccccgatggcg

SEQ ID NO: 218193 - DNA, 703 bp, Unknown
  Bacterial polypeptide expressing nucleotide sequence isolated from the Sargasso Sea
  misc_feature (640)..(640): n is a, c, g, or t
tatgaatattttagctaaaattataagtaggatttacttaggttttttatttaataagtctcctgaaaagtctcatgacatagccttaaatcaattagataaacttcacaagttaagattattgaattttctaggtattaataaaaagtatttttctccagtaagttgtatggggatagattttccaaatatgttaggtttggccgcgggtttagataaaaatggtgactatatagatgctttatcttccctagggtttggttatatagaaatagggaccgtaactccaaagccacaactaggaaatcaaaaaccaagattatttagattaaaaaaagataaagctattattaatcgtatgggatttaataataagggtgttgactatctaattaaacaagtagaaaaatctagctataaaggaatattaggaataaatattggtaaaaatgctgacactccaatagaaagtgcagttgatgattatttgatttgtttacgtaaggtatatgattattcaagctatgtaactataaatatatcatcgcctaatactaagaatttaagagatttacaatcagaagattctttaaataatttattatcttgtttaataaaagagagaatgatattacaaganaaatataataaatatgttcctttagttgttaagatttcaccagatattaataaaaatcaataa

SEQ ID NO: 218194 - DNA, 766 bp, Unknown
  Bacterial polypeptide expressing nucleotide sequence isolated from the Sargasso Sea
aaaatttttaaattactaccacctgagatagctcattcagcatcattaatttcattaaaaattctacataagactaaacttttaaaattctttataaagaagaattcgaagaatgaaaattataacttcgaaggcatgatatttagtaataagcttggaactgctgctggtttagataagaatggtgattttattgatgccttaggcgaccttggatttgggtttcttgaggttggaacaataactcccttgccacaaagtggtaatgctaaaccaagagtttttagaaactataaagaagaatctattattaatagtttaggttttaacaataaaggagtcgactatttagtagaaaatttaaaaagaagaaaattcaaaggtgttgtaggtgtaaatataggcgctaataaatcatcttctggcaatcaaagagtagatgattacctaatttgtcttgaaaaagtgcataaatatgctgactatattacagtcaatatatcctcacctaacacaccaaacttgagagatttgcataatgaaaaaaattttaaatccttaatatctgcactagaggaaagatctaaaaagattggaataaatattcctatatttataaaaatatctcctgatgaatctaaagatgatcttgattctataattaatatagtcaaagaatcatttttgtcaggcatagtagctaccaatacaacaattaataagtcaaatgttgttgaccaaaaatttcaatcaatcaatggaggct

SEQ ID NO: 218195 - DNA, 722 bp, Unknown
  Bacterial polypeptide expressing nucleotide sequence isolated from the Sargasso Sea
aaaagatgatgcattgataaatagattgggatttaataatgacggagttgatgcagtggtcaaaagattaaaaaataaaaaatttaaattttacaacacgagcttacccattggagcaaatattggaaaaaataagtcaacacctaattctaaagcacatgaggattatcttgaatgttttaaaaagttaagatcatatgttgattattttgctgtaaatgttagttcacccaatactccagagctgagaaacctgcagtcagtttcttttctaaaaaagattttgaatactttgattagagaaaataagataggtgagaggaagccgattctcgttaaagtttccccagatttatctaatagacagcttgcagatgttgtcagtctattaatggaattaaatattgacggtataatatgttcaaatacgacaattgctagagagaatttaaaatcagacaaattaaaaaatgaaactggaggtttaagtggaaagccgctttctaaaagaagtacagagatggttaaattgatcaaaaaccaggcaggagataaacttcctatcgttgctgttggaggcataatgacacctgatgatgtagttgaaaagataaatgcgggggcatcacttgttcaaatctatacagggtggatttattatggcccaacattcgtttatgatatcaataaaaggcttttaaaagaatattttaagaattgaa

SEQ ID NO: 218196 - DNA, 885 bp, Unknown
  Bacterial polypeptide expressing nucleotide sequence isolated from the Sargasso Sea
actgatgttttcaaaataagatcattaatatttaaattagacccagaaacagcacacgatttagctataaaggctttaaaatttaatattgtttctcaaaataaaattaaaaataacaaattaatacaaacagaaatttttggtaaaacaatcccaaatccaataggcatagctgctggatttgataaagatgctgaagtatataatcctctgtttagattaggatttggttttgttgaggttggaacagttactcctgttaatcaatatggaaatccaaaaccaagaatatttcgtcttgaagaggaccaggcattaataaatagacttggatttaataattcaggttctgataaagttagattaaaaattatttcaaactctccaaaaggcctatttgggataaatataggaccaaataaagatacaaacaacagattggaagattatttaattggttttcgtaaattttacaatcttgcagattatttgactattaatatatcctctcctaatacagaaaatttgagaagttttcacaatgaaaatgaattaagtgaactacttagttctattgaaaaagaaaaaaaaatattaaataccaatgtaccaattgcagttaaaatatcaccagatattgaagataaaaatattaatataatttcagatttacttttaaagtatagaattgcagcaataataatttcaaacactactgataaaaatagggaaaatttatttaatataaataagttagaaaaaggaggcttgtcaggaaaacctttagaaaagagatcaaatgaactaattaataaattttataaaattttaaaaaataaaataaaaattattggcgtagggggagttgattctggtcaaagcgct

SEQ ID NO: 218197 - DNA, 713 bp, Unknown
  Bacterial polypeptide expressing nucleotide sequence isolated from the Sargasso Sea
aatgttttcaattttaaaacctttcatttttactctggatccagaagtagctcatgatttagcaattaactcattaaaacttaatgttttacctaaaaatctttttaaagttgatgatgaagaattattagaaacaaaattatttaatcaatctttacccaaccctataggtctggctgctggatttgataaaagtgcggaggtatataactctttatttaaacttggttatggtttcgtggaagttggcacagtaactccaaaacgtcaacttggaaatccaaaacctagagtatttagattagaaaaagatcaagctcttataaatcgactaggttttaataaccacggttctgaaatagtttcaaagagaatactagaaaatattcctaatggttttttaggaattaatgtgggcccaaataaagatactaaaaataaagaggaagattattatctttgcctttcaaaacttcattcatgcgctggttatttaacaattaatatatcttcgccaaatactgaagggctgagagattttcacgaaaaaaaagaatttgaaaaacttctaattggtataaataagattaaagaggagaaaaatattttaaaaccgttagcagtaaaactttctccagatattgatgatagtgaaatcagtgaaataattgagttaattttaaaatataaagttaacggcattataatatcaa

SEQ ID NO: 218198 - DNA, 394 bp, Unknown
  Bacterial polypeptide expressing nucleotide sequence isolated from the Sargasso Sea
atgaatgaacagaaaggggtatttaaaaatctttataaaaacttgattacccctgtattaaaaagagactctggaattgatgcagaatacttaactaatttatctcttagccttttatcattcagttcaagaaaatataattggcctgtagtttcatctatcttaaaaaatctaaatgaagaattttctattgttgatagtaggttaagtcagaaaatatgtggaataaatttttgtaatccaattggtttagctgcgggttttgacaaaaatggaaatgctgcaaatgtatggaaagattttggttttggatttgccgaacttggtacagtaaccaaatttgctcagaatggaaatcccaaaccaaggttgtttagattagcggaagaagaag

SEQ ID NO: 218199 - DNA, 842 bp, Unknown
  Bacterial polypeptide expressing nucleotide sequence isolated from the Sargasso Sea
aatggcggaggtgtataatccactatttaacttaggttttggttttgttgaggttggtactattacacctgaaccacagtatggaaatccaaaaccgagagtattcagactggaagaggatgaggctctaatcaatagactaggatttaataattcaggttcagaggaaatttataaaagaattgaaagtaataaaccattcggtttgttaggagttaatataggcccaaataaaacaagtgataatagaattcaggattatgtaaaatgttttagaaaatttatttcggttgcagattatatcacaataaatatttcttctcctaatacagaaaatttaagaaattttcataatcaagaggaaatgaataatttgttatctgaaattcaaaaagaaaaaaaaaaattacaatccaatttacctatagctgtaaaaatttcaccagatataaattttaactcaattgaccaaatttgtgagtcattggttaaacattctatagaagttttaatcgtatctaatacctccgaaaaaaatagggataatcttaaaaacataaataaacttgaaaaaggtgggctttctggagccccaatagaaaacaaatcgaatgaactaattaatttattttataacaacctaaaaaataaaattaaaattataggtgttggaggagtaagcactggtaagggagcttacgaaaaaataatacgcggagcatctttaattcaactttatactggcatggtttatagaggaccagatatagctaataaaataagtcaggaattaatcgaaatactcacaaaagatggtattaaaaatatttcagagatagtgg

SEQ ID NO: 218200 - DNA, 622 bp, Unknown
  Bacterial polypeptide expressing nucleotide sequence isolated from the Sargasso Sea
aatgttttcaatttttaaacctttcattttttctctagatccagaaacagctcacgatttagcaattaattcccttaagcttaatgttttgccaaaaaatatttttcaagttgaaaacgaagatttattggagaccaagttatttgatgagacgttacccaacccaattggtttagctgcaggatttgataaaagcgctgaggtctataactctttatttaaacttggttacggatttgtagaagttggaactgttactcccagaagacaacttgggaaccctaagccaagaatttttagattagaaaaagatcaagcccttattaatcgacttggctttaacaaccatggttccgaaatagttttgaaaagaatttcagaaaatttacctagtggtttccttggaattaatattggcccaaacaaagatacaaaaaaaaaagaagaagattattacttatgtttatcaagactgtcctcttatgctggatatttaacaattaacatatcttcacctaatactgtaggattaagagattttcatgatcaatcagaactagaaaaacttcttttaggaataaacaaaataaaattagagaaaaatatttcaaaacctatcgca

SEQ ID NO: 218201 - DNA, 469 bp, Unknown
  Bacterial polypeptide expressing nucleotide sequence isolated from the Sargasso Sea
atgttttcaaatattagatccctaatttttaaacttgatcctgaaacagcacacagtttagcgattaagtctttaaaatttaattttgttccaaatattttagatgaagataaaaataatcctttatttaaaacagaaatatttaacaaaaaaattgaaaatccaatagggatggcagcaggttttgataaaaacgccgaggtgtataatgcattatttaaattaggttttggttttgttgaagttggcacagtcacacctctaaaacaatatggaaatccaaaacccagagtttttagattagtagaggatgaagctttgataaatagacttggttttaataatttaggtgcaaaaaatatagttgatcgaataaaacaaagtaatccaataggattgcttggtgttaatataggtcctaataaagatacaacaaatagaatcggtgattatgtcgaaaatctaagag

SEQ ID NO: 218202 - DNA, 853 bp, Unknown
  Bacterial polypeptide expressing nucleotide sequence isolated from the Sargasso Sea
taaagaaaaaagttatgattgtttaaaagttaagtttttggggaaagaaattccaaatcctattggtatagctgctggatttgataaaaatgccgaagtttataatcctctttttaaattaggttttggatttgttgaagtaggaactgttactcccgaacctcaatttggtaatcctaaaccacgtgtatttagacttgaagaagatgaggctttaattaacagacttggatttaataatattggatcaaataaagtatctttaaatattaaaaaggacttaccacgtggtttgctaggaattaatatcggaccaaacaaagataccaaaaacagaatagatgactatttaaaatgtattagatctttaaataatctaggagattatattactataaatatttcctctcctaatactgataatttaagaagttttcataatccaaatgagttagaaaaactattgaaattaattcaagaggaaaaaaataaacttaagtcctcaataaatattgctgtaaaagttgcgccagatattgaaataaataacctagataatattggaaatattttattaaattatgatgttaaatttataattatttctaatacatcagatggtactagagatagattgaaaaatattaataaatttgaaaagggaggattatctggaaaaccaatagaagaaaaatcgaatatattaataaagaaattttataaaaagtttaataacaaaatcaaaatcattggtgttggaggagtagattcgggcagaagtgcctatgaaaaatttatttctggggcaagttttattcagttatataccggtatggtttatcaaggacctaga

SEQ ID NO: 218203 - DNA, 879 bp, Unknown
  Bacterial polypeptide expressing nucleotide sequence isolated from the Sargasso Sea
gtatggctgcaggttttgataaaaacgccgaagtttacaattcattatttaaacttggatttggctttgttgaagtaggaacaattacacctttaacacaatctggaaatcctaaaccaagagtatttagactggtagaagataaggcattaattaatagacttggttttaataaccaaggatgtcaaaatatttttagtagaattaaatctaataaacagaaaggtatacttggagtcaatataggacccaataaagatacaagagatagacttaatgattatgttaagggatttaaaacattttatgcggttgctgactatataactatcaatatttcttcacctaatactgaggatcttagaaattttcacgaccaaataagattaagtgaattattaaaggttattaataaagaaaaagaaaatttagattcagatattcctatagtagtcaaaatatcacccgatatcaaagaccaagaaataaataaaatatgtgaggttttattagataataaaatagaggctgttataatttcaaatacatcagatgctacaagagagaaattacttaatattcaaaaatatcaaaaagggggattgtcaggcaaaccaatagaagaaaaatctacattattaataaataaattttacaaaattcttaaagggagaattaaaataattggagtggggggagtagattcaggagaaagcgcttattcaaaatttttagctggtgctaactaccttcaactttacactggcatggtatttagaggacctaatatagttaattatattaaaaaagaactcaaagaactattgataaaagatggagtatcaaatttttctgaaaatataggaaaaaatcattaat

SEQ ID NO: 218204 - DNA, 868 bp, Unknown
  Bacterial polypeptide expressing nucleotide sequence isolated from the Sargasso Sea
gtcaaacaatttgatgttcttttcgataaccctgtgggactagctgcggggtttgacaaaaatgctgactatcttaattttatcaccaatattggatttggttttgttgaagttggtaccttaactccaaaggcccaggctgggaacccaaaaccaagggtttttagattagtcaaggatgaggcaataattaatcatctcggttttaataataagggtattgactatggaatttctcgcataaaagaatttaacagaaatatacccataggtgtcaatataggcaaaaatgcctcgacagatgtaaaagatgcctttcgtgattacgagtattgtctgagaaaagcttattcagtagcagactatatcacgttaaatatttcctctcccaatacagagaatttgagagacctacagaaaggagaaaagataagtagcttccttcattccataaaaacacttcatgacaatttaaaaaaagtttataaaaaacatacgccactagttgttaaaattgctcctgatgtgactgatgaaataatatttgatttatcaaatctagtgaatgagtatgatatagatggagtgatatgcactaacacaactatagataaatcttatctgagtgatcaatttaaggctttacaaggtggtttaagtggtaaaccccttttccaaaaatcaaatgatgtgctcactaaaatttctaatgttctgggtaaagagagaacgatcattggtgtaggtggtatcgattcatatgaatcagcaaatgaaaaatttagattaggtgcaaatttgcttcagctttatacaggtcttgtatacaaagggccaaaagttatcgaggatatattaagatactagt

SEQ ID NO: 218205 - DNA, 916 bp, Unknown
  Bacterial polypeptide expressing nucleotide sequence isolated from the Sargasso Sea
tttggagatttaacttttgcaaatcctatagggatagccgctggatatgataagaatgcagaagtaattgaccctctattgaaaatgggttttggatttgtagaatgtggaactgttactcccattgcacaatatgggaaccccaagcctcgcgtatttagactaaaagaagatagaggtataattaatcggctaggtttcaacaattgtggggtaagccaatttttaaaaaattttaatcaaagaagtgcaactttaggaattgcaggaataaatataggtccaaataaggggtcagaaaattttatagatgattatttaaaaacttttgatctaatctacgactatgcagattatattacacttaatgtatcttcgccaaatacaaaaaatttaagggatattcagagaaaagaagatttaaattttttgacatctgaaattaattcttttagggagtccaaagaagcaaagaaaaaaatcctgcttaaacttgatcctgatagtactgaggaagattatggaaaaattataaatattgctcagaaaaacaaaattgatggcttaattattggcaacacttctatttatcgaccggaatttttaaaaagtaattataagaacgaagaaggtggtctgtctggtgcacctattaagaaaaaatcaaatgatgttttgagatttatttcaaaagaaacacgaggggaaatagttttaattggtactgggggaattgaaaatgctagggatgcatatgaaaagattaagattggagcatcttttgttcagctttattctgctcttacatttagcagtttaggatttataaataaactaaataaagatctggcttcatatattaataatgatggttttgataacattaaagaagcaataggtattgaaattcgatgac

SEQ ID NO: 218206 - DNA, 555 bp, Unknown
  Bacterial polypeptide expressing nucleotide sequence isolated from the Sargasso Sea
aatgttttcaaatttaagatctttaatttttaaattagatcctgagacggctcatagtttagcgataaagtcactaaaattcaattttattccaaatattttagatgaagaaaaaaataaccccctttttaagacaaaattatttaataaggaaatagaaaatccaattggtatggcagcaggatttgataaaaatgctgaggtatataattcattgttcaatttagggtttggttttgttgaagtagggactgttacaccgttaaaacaatacggaaatcccaaacctagagtttttagattggtagaggatgaggctctcataaatagacttggtttcaataacctaggttcaaaaaatatcgtagatcgaattaaaagaaataatccaaccggccttcttggaataaatattggacccaacaaagattcagaagatagaactaatgattatatacaatgtttaaaaacatttaatggggtctcagattacatcactattaatatttcttcaccaaataccgaggatttaagaagctttcatgatcaaaaaaa

SEQ ID NO: 218207 - DNA, 687 bp, Unknown
  Bacterial polypeptide expressing nucleotide sequence isolated from the Sargasso Sea
aatgttttctattttaaaaccctttttatttaatttagatcctgagaccgcacatgatttggccattaaatccctcaaatttaatattcttcccgaaaggttgtttcaggttgaagaagaacaaattttaaatattgaattattgggaaaaaaatttcctaatcctatcggacttgccgctggctttgataaaagtgctgaagtttataattcgctattgaaattaggatttggttttgtagaaattggaacagttacaccactaaaacaatttggaaatccaaaaccaagaatatttagacttgaagatgatggtgctttaattaatagacttggatttaataatgatgggatggacgtaataaaaaatagaataatgttagacagaaagtcgggcatactaggtgtcaatatagggcccaacaaagatacagaagaccaaaaaaatgattttggtttaggactaaaaaatttctttaatatagcagattatattgtaattaatatttcgtctccaaacaccgagggtttacgggactttcacgatcaagaaaaactaaaaggtcttttatcttatcttaataaaataaaggaggataaaaaaacaaacattccactgctattaaaaatttcaccagatattgaagatgattacattcataaaattgtagatgtggcaaataaaaa

SEQ ID NO: 218208 - DNA, 689 bp, Unknown
  Bacterial polypeptide expressing nucleotide sequence isolated from the Sargasso Sea
aatgtttgaaaaaataagatccttaatttttaaatttgatcctgaaaaagctcatgatttagctataaaggccttaaaaacaaatatagtacccgtaaaaattagaacttatgagagtttaaaggtaaattttttagaaaaagaaatcccaaatcccatcggcatagcagctggttttgataaaaatgctgaagtatataattctttgtttaaattagggtttggatttgttgaggtgggaactatcacgccggaacctcaatatggcaatccaaaaccaagagtatttagattagaagaggatgaagctttaatcaatagacttgggtttaataatgttggatcaaaaaaagcttctgaaaatattaataataacattccaaaaggattgttaggaattaatattggccctaacaaaaatacgaaaaatagattagatgactatttaaattgttttagaagtttaagtaatttaagtgattatattacaataaacatttcgtcaccaaatactgaaaatttaagaagttttcataacccaaaagaattggacgaattattaaatgcaataaatgaagaaaaaagtaaaataaatgcttcagtaaaaattgctgtgaaaattgcgcctgatttaaaatctagtgatttagatgtactaggaaatattcttttaaaaaacaatataaaaa

SEQ ID NO: 218209 - DNA, 443 bp, Unknown
  Bacterial polypeptide expressing nucleotide sequence isolated from the Sargasso Sea
aatgttttcaatttttagacctctcattttttcacttgatccagaaactgcacatgatttagcaattaattctttgaaattaaatgttttgccaaaaaacattttccaggttgaaaatgaagaaatattagaaactaatctatttaaagaggcactacctaatccaattggtttagctgcaggatttgataaaagcgctgaagtttataattctttgtttaaactcggatacggctttgtagaggttggaactgttacacccaaaagacagcttggtaatcctaagcccagaatttttagattagaaaaagataaagcactcataaaccgacttggttttaataatcatggttcggaaatagtttccaaaagaatatcagaaaatttgcctagtggttttttaggaataaatattggccctaacaaagatactaaaaaaaaag

SEQ ID NO: 218210 - DNA, 749 bp, Unknown
  Bacterial polypeptide expressing nucleotide sequence isolated from the Sargasso Sea
aatggctgaagtatataatccattatttaaattaggttttggttttgtggaggtgggaactgtaactcccaaaagtcaatatggaaacgaaaaaccaagagtatttagacttgaagaagataaagcattaataaatagattgggctttaataattcaggagctgaaaagatttactcaagaattgcttcaaataaaccaaatggtcttttaggtattaatattggtcctaataaaaatagtgaaaatagattagaggattatattatctgtgtaagaaaattttgtaatattgcagattatcttactataaacatatcatcgccaaatacagaaaatttaagggattatcataatcataagcaactaaatgaacttttagagtcgataaataatgaaaaaagtaatctaaattctaaaactccaatagcagtaaaggtatctcccgatattgatgatgaaaatatagaaaaaatttctgaaaatttaattaaacataatgtagaattaattatagtttcaaatacaactgatagtaatagaaaaaatttgattaatataaataagttagaaaaaggaggattatctggaaaacctcttgaaaacttatcgaatttaataattaataaattttataaaaaattaaataacaaggttaaaatagtaggagttggtggagtagattcaggcaaaagtgcatatgaaaaaattattaacggagcgtcactaattcaattatatactggaatgg

SEQ ID NO: 218211 - DNA, 487 bp, Unknown
  Bacterial polypeptide expressing nucleotide sequence isolated from the Sargasso Sea
tgatctacgtgcattgcaagaaaaagagcctctaatggaactgttgagtcatttacaacaactgaatatcaacaaagaaaaaagaaagccgatcttattgaaaattgctcctgatcttagcgatcatcaattggacgatattatagaaattgtacaacatacaaaattggatggaatcatagctacaaacactacgatcgatagaagtaatttgattgataaatcaaaagcagataaaattggtacaggaggtttgagtggtactccgttaaaggacagagcaactcaggtcattaaatatatatcagataaaacaaacggttctttacccatcataggagtgggtggtatacatagtggtgaagatgctgttgaaaaacttaaagctggtgcctctttggtacaaatatatacgggttttatatacgaaggaccaggtttggtaaaagatatcaatcagtcaataagaaactatgaaaataattga

SEQ ID NO: 218212 - DNA, 617 bp, Unknown
  Bacterial polypeptide expressing nucleotide sequence isolated from the Sargasso Sea
aatgtataaattagtaaggaaatttttatttttatttgatgccgaagaaatacatgaactctcaacaaaattaatcaagctttttaatttcatacctttttcatctttccttttaagaaaatgctatttgatttcagataaatctcttgagagagaattgtttggcataaagtttaagaatccaattggattagcagcaggatttgataaaaacgcaactctttttaatgattttagaaattttggttttgggtttatagaaattgggactgttactccattgcctcaagaaggtaatcctaaaaaaagaatcttcagattatctaaagatgaagcattgattaatcgtttagggttcaataattctggagtagaaaaaataaaaaagaatcttaatagaaagaagaatgttataataggagcaaatattggaagaaacagtttcacttctaatgaagaagctcattttgattatataaaatgctataacgaactatatccatatgtagactattttgcaattaacatcagctcaccaaatacaaaaggtttgagagaccttcataataaagatcttcttgaaccgttgattaaaaaaatcacttcattaaattatt

SEQ ID NO: 218213 - DNA, 862 bp, Unknown
  Bacterial polypeptide expressing nucleotide sequence isolated from the Sargasso Sea
ttaaaattcaattttgttcccaacatcttagcagaggatcaaaataatccattatttaaatcaaaattatttaataaagagatagaaaaccctattggtatggcagcaggcttcgataagaatgctgaggtatataattcattatttaaattaggatttggatttgtagaggttggaaccgttactcctttaaaacaatatggaaatcctaaaccaagagtttttagattggttgaggatgaagctttaattaataggctaggtttcaataatttaggtgcacaaaacatcgctagtcggattaaaaaaaatgatccaacaggtttacttggaataaatattggacccaataaagatacaaaagaaaggattgttgattatatcgattgtttaaaaatatttcatagtttagctgattatattacaatcaatatttcttctccaaacactcaagatctgagaaatttacatgatcaaaaaaaattaaatgagttactagaaacaattaataaagaaaaaaaaaatttaaaatcacaaaccccaatttcagttaaagtatcccctgatttacagaatgaagagattaaatcaatttgtgaagttcttttgaaaaacaatgttgatgcaattataatttctaatacatcagacgctactagaaatgagctaaagaatgtgcaaagtcatcaaaaaggtggtttatcaggcaagccaatacagtcaaaatcttcagaattaataaataaattttacaaaattcttaatggaaaaataaagattatcggtgtagggggagtagattctggcaaaagtgcatatgataagtttttagcaggagccaattatattcaactttatactg

SEQ ID NO: 218214 - DNA, 717 bp, Unknown
  Bacterial polypeptide expressing nucleotide sequence isolated from the Sargasso Sea
aatgttttctgtcttaagaccttttttgtttaatttagatccagaaaccgcacatgatttagctatcaaatcacttaaattcaatcctattcccgaaaaagtatttcaggttaaagatgaacaaatgttaaatattaatttattgggaaaaaattttcctaaccccattggtttagcagctggctttgacaaaagtgccgaggcttataatgcattgttaaaattaggatttggatttgtagaaataggaacagttacacctttgaaacaattaggaaaccctaaaccaagaatatttagacttgaaaatgatgatgctttaatcaatagacttgggtttaacaatgatggaatggaagtaataaaaaatagaataaattcaaataaaaaaaaaggtatattaggaattaatattggacctaacaaaaatactaaaaatcaaaaaaatgatttttgtttaggcctaaataatttttttgatatagcagattatattacagttaatatttcttcacctaatacagaaggattaagagatttccatgatcgagaaaaacttgaagaactgttacttgctcttaataaaataaagaaagaaaataaaacaaatattccacttttattaaaagtttcacctgatattgaagataaccatattagtgaaatcgtagatgtagctataaaaaataatatttctgcgattattcttaccaatac

SEQ ID NO: 218215 - DNA, 696 bp, Unknown
  Bacterial polypeptide expressing nucleotide sequence isolated from the Sargasso Sea
tttgcatacaaatattaaaggtctaagcttcagtaatccactaggtatcgctgctggttttgataaaaatgctgaattaatagatcctttattaaagattggatttggatttgtggaatgtggaaccgttacaccgttgccacaatttggaaatccaaagccaagagtttttagattaaaacaggataatgctataattaatagattaggttttaacaacaagggagaaaagagatttgtaaagaatcttatttctgcaaaaaagacaggtattgttggatcaaatattggaccaaataaaaactctaaaaattttattgatgattatttaaaaatttacagaaagatttcagtctcttgtgattatgttgcaattaatgtttcatctccaaatactatagccttacgtgaattacaaagaaaagaatatcttgaagtacttttaagagaagtatctcaaattagggatgaggaaaaaaatagaaaacccatcatgctaaaaattgatcctgataatacaaatgatcactacagtatgatccttaatcttgttgataaatataaaatagatggaattattgctacaaatacctcactttcaaggccagaaattttacgagatctcaataagaaaagagagggtgggttatctggcactccgataaaagatttatcagataaagttttaaaattttt

SEQ ID NO: 218216 - DNA, 688 bp, Unknown
  Bacterial polypeptide expressing nucleotide sequence isolated from the Sargasso Sea
atgtttaatattttaagaccattaatttttaaatttagccctgaagtagctcactctttagcaataaaagcactaaagttgaataatattacttacacaaaacctaaagataatcatatgttagaaacaactttttgtgaaaaaaaattatcatcaccaattggtgttgctgctgggtttgataaaaatgctgaagtatacaatccactgtttaatcttggatttggttttgttgaagtagggacaattactccaaagcctcaatttggtaaccctaaaccaagagtttttagacttgaagaagatgaagctcttataaatagattaggttttaacaactctggttcagaacaaattagtcaaacaattaaggaaaataataaaaaaggttttttaggaataaatattggaccaaataaagattctactaatagaatcgatgattatttaatttgttttcgtaaattttataatttagctgattatataactataaacatttcctcaccaaatacagaaaatttaagagactttcataaacaggatgaattaaattcattgattgacaaactaaaaaatgaaaaaaaagaattaaattcaaacattccattagcaataaaagtttcacctgatcttaatgacgatcaaattaatgaagtatctaagatcattttggaacaagaaatag

SEQ ID NO: 218217 - DNA, 847 bp, Unknown
  Bacterial polypeptide expressing nucleotide sequence isolated from the Sargasso Sea
gcaggtctggacaagaatgcggttgccgtggatggcctggccgccatgggcttcggctccattgaagtgggcaccgttactccgcgcccgcagccgggcaacccaaagccgcgcctgtttcgtttgaccgagcagctggccatcattaaccgcttcggtttcaacaaccagggcgtggatgccatgctggagcgtctcgatggcgtgcgctaccagggcgtactgggcatcaatatcggcaagaacgcggtaaccccggtagagaacgccgtggatgattacctgtactgcctgcgcaaggtctacgaccgcgccagctacgtcaccgtcaacctgtcttcgcccaacacccccggtctgcgcacgctgcagtacggcgaggcgctgaaggtgctgctgggccagatcaagcagtgtcagcagcaactggccgccgagcgtgggcgctacgtgcctatcgccatcaagatcgccccggatatgaccgcagaagaagtcacgctggttggcgcaaccttgctggaagagggcatggatgcggtgattgccaccaataccacccttgatcgcagcgccgtagcagactcgccctacgccaatgaggcgggtgggctctcgggtgcaccgctgaccgatatgtccaccgaggtcatccggctgctggccgatgagctgaaagggcgcacgccgattatcggcgtgggcggcatcttcagtggcgccgatgcggcggacaagattgctgccggtgccagcctggtacagctgtacagcggctttatctaccgcgggccggagctggtgcgtgagtgtgctgatgcgattgctgtgatgccgcagccctgaa

SEQ ID NO: 218218 - DNA, 561 bp, Unknown
  Bacterial polypeptide expressing nucleotide sequence isolated from the Sargasso Sea
gatgttttctttttttaaaccctatattttttctttagaccccgaagttgcacatgatttagcaattaaatctctaaaatttaatgttttaccaaaaagtatttttagtgtgcacgacgaagaaatgcttgaaacaaagttattcaattcaaagttgcctaatccgattggactggctgcaggatttgataagagtgcagaggtttataattcattatttaaacttggttatggttttgtagaagttggcacgataacgcctaaaagacagctcggcaatccgaaacctcgaatatttaggttagaaaaagatcaagctttaattaatcgactcggttttaataatcatggatctgaaactatttctagaagaattgccggaaacttaccgagtggttttttaggaattaatattggcccaaacaaagacaccttaaataaagaggaagactattacatttgtttgtcaaaactttcatcatttgctgggtatctaacaattaacatttcttctccaaacacagagggtttaagagattttcacgatcaaaaggaattaga

SEQ ID NO: 218219 - DNA, 669 bp, Unknown
  Bacterial polypeptide expressing nucleotide sequence isolated from the Sargasso Sea
aatgtataaattagtaagaaaatttttatttttatttgatgccgaagaaatacatgaactctctacaaaattaatcaagctttttaacttcatacctttttcatctttccttttaagaaaatgctatttgatttcagataaatctcttgagaaagaattgtttggtataaagtttaataatccaattggattagctgcaggatttgataaaaacgcaattctttataatgattttagaaattttggttttggttttatagaaattgggactgttactccattgcctcaagatggtaatccaaaaaaaagaatctttagattatctgaagatgaagcattgattaatcgtttagggtttaataattctggagtagaaaaaataaaaaagaatcttaatagaaagaagaatgttataataggagcaaatattggaagaaacagttttacttctaatgaagaggctcatcttgattatataaaatgctataacgaactatatccatatgtagactattttgcaattaacatcagttcaccaaatacaaaaggcttgagagatcttcatgataaatatcttcttgaaccgttgattaaaaaaatcacttcattaaattattcaaaaggaaatcctaaacccattttattaaaaatatcccctgatgttgcgtt

SEQ ID NO: 218220 - DNA, 724 bp, Unknown
  Bacterial polypeptide expressing nucleotide sequence isolated from the Sargasso Sea
aatgcttgagacaagtcttttaggaaaaaaaatttcaaacccaataggtttagcagctggttttgataaaagtgctgaggtttataattctctttttaaatttggttttggttttattgaggtaggcactgtaactccaaaacagcagctgggaaatccaaaaccaagaatatttagattagaatcagatcaggcattaatcaatcgtcttggatttaacaatcatgggtcagaaattgtttcaaaacgaatatcgagtaattatcctgatgggtttctaggaattaacattggtccaaataaagagacaaaaactaaagagaatgattattatatttgtctttcaagacttggaatgtacgccggatatataacaattaatatctcttcaccaaacactgagggtctaagagattttcatgatcaagaagagatgaaaaaacttttatctgggatcaataaaattgtaaaaaaagaaaaaattgactgtccaatagcaataaaaatatctccagatattaatgataatgaaataagcaaaatagttgaattagtgagcagtcataagatacaaggtttaatagtttctaatacatcagacagtaatcgcgataacctgtctgatatcaaaaggcatgaagccggtggattatcaggacagcctctcaaagatatttcaacaaatttaattaaaaaattctttaaagaaaccaagggtaagatt

SEQ ID NO: 218221 - DNA, 658 bp, Unknown
  Bacterial polypeptide expressing nucleotide sequence isolated from the Sargasso Sea
aaaaataaagacactccattggaacatgcggtggaggactaccttaagggactttccgcaacccatgcctgggcagattatttctgcatcaacatcagttcacctaacactgagaacttgagacaactgcaggaaggggatcaactcagcaggcttttggaccaactctgcagccagagagaaatgctcgatcgcgaagccggaaagaagacgcctctgctgatcaaactcgcaccggactgggaaaaagaggcactccagcaaagcatcgagcggatcaaaacctctcctctagacggagtgattgccaccaacacgaccatttcaagagaaggacttacgagttccttggctagggaatccggaggattgagtggaaaaccgcttttgaaatccagcaacaaagtgatcaagaccctttaccgcgaaatcggagcacacatcccgatcatcggcgtcggaggaattttcactgcagaagatgcctatgcaaaaataaaagcaggggcaagcgcagtgcaggtctacaccggactggtttatcaaggaccggggatagtcagggagatcaaaaaaggactggtcaggctcctcaggcaggatggcctacccaacttatctgctgctatcggattggatgaaaaaaccgcagtttaac

SEQ ID NO: 218222 - DNA, 884 bp, Unknown
  Bacterial polypeptide expressing nucleotide sequence isolated from the Sargasso Sea
agaccatttatttttaatttagatccagaaactgcacatgatttagcaattaaatcattaaaatataatgtactcccgaaaagtttatttactgttgaagatgaagaaattttaaatacaaaactatttggaaaaattatagataatccgattggtttagcagcaggttttgataaaagtgctgaggtttacaatgaaattttcaaaattggttttggttttgtagaggttggaacagtcactccaaaaaagcagtatggaaatcaaaagccaagagtttttcgtttagaaaaagatcaagcacttattaatagacttggctttaataatgatggttcggatacaataaaaaaaagaatcgagcataatacacctgatggtttattaggtattaatattggtcccaataaagacacagacaatatgtataatgattttttatcatgtgccaaaacttttttccctattggagattatattactataaatatttcttctccaaataccgaagggttaagaaattttcatgaaaaagaaaatctcgagaagctgttaattcaagtaaatgaaattagaaaagagagtaattttaaaaagtcttttttgttaaaaatttcacctgatcttgacgagtcctctataaataatattgttgatttatctttaaacaataatattaacggaataatattaacaaatacttctgataaaaatagggataaattaatagataatcaaaaaaatgagaaaggtggtctatcaggtcagcctataaaagatttatctacaaaaataattaaaaaattttatcaaaaactcggtagaaaaatacctataattggagtagggggagttgattcaggagaagctgcttttgaaaaata

SEQ ID NO: 218223 - DNA, 487 bp, Unknown
  Bacterial polypeptide expressing nucleotide sequence isolated from the Sargasso Sea
atgttagttaatttattaagattatttccccctgaaactgctcatgaaatcactataaaatttcttaaatcaaaatttaatttaaaaaaaaaacatgtacaaatacataaatgtcttcaacagactatactaggtataaattttaaaaatccaataggtttagcagcaggttttgataagaatgctgaagtaataaatagtatgctttcttatggttttggttttatcgaggttggaacagttactcctaaaaaacaattaggtaatgaaaaaccaagagtttttcgtctattggaagatgaggctattattaaccacttaggctttaataataaaggaagtgaaaaaattttatctaatttaaaatctttttatgaacataaaaattctaatgaaattgttggtattaatattggaaaaaataaatcaacacaaaatgatatagatgattatttatattgtgttgaaaaactctggtatttatagt

SEQ ID NO: 218224 - DNA, 387 bp, Unknown
  Bacterial polypeptide expressing nucleotide sequence isolated from the Sargasso Sea
aatgttttcttttctaagaccttttatatttagcttagatccagagaaggcgcatgatcttgcaataaaatcattaaaatataattttcttcctcaaaatctattccaggttgatgatgaggaaattctaaacaccaatttatttggaaagaaaattcagaatccaataggacttgcagctggttttgataaaagtgctgaagtttataacgaaatattcaaattaggtttcggctttgttgaagttggaacaataacaccaaaagagcagtacggaaataaaaaacctagaatgtttcgattggaaaaggatcaagcactaatcaatagacttggctttaataatgatggatctgaaatcgtaaaaaatagaatagaaaaaattta

SEQ ID NO: 218225 - DNA, 835 bp, Unknown
  Bacterial polypeptide expressing nucleotide sequence isolated from the Sargasso Sea
gatgcagaagtatataatccgttatttaaattagggtttggatttgtagaagtaggtacggttactccaaaaattcaatatggaaatgaaaaaccaagggtatttagacttgaagaagacaatgcactaataaatcgactaggttttaataacactggagctgaaaaggtttattcaagaatttctttagaactaccaaaaggtcttttaggtattaatattggtccaaataaaaatagcaaaaatagactagaagactatctcatttgtttgagaaaattctataaaattgcagactacctcactataaatatatcttctcccaatacagataatttaagagattttcataatgaaaaagaacttgatgaacttttgaaatctgtgatcaatgaaaaaaataatttaaatactaaagtgcctatcgcagttaaagtatcgcctgacattgatgataaaaatgttgaaaaaatttcagaaatattaattaaacacaatattgagataataatagtttctaatacaactgatcgcaacagagaaaatctagttaatattaataaattagaaaaaggaggattatcaggaaaacctcttgaaaaaatttcaaatttattaattaataaattttataaaaatttaaataaaaaagttataataattggagcaggcggaatagattcaggtcaaagtgcttttgaaaaaattattaacggagcatctttaatacaattgtatactggtatggtttaccaaggcccaaatattgttaataaaattagcagtgaattaattgatattttgaaaaaaaaaaggatttcaaaacatatctaaa

SEQ ID NO: 218226 - DNA, 865 bp, Unknown
  Bacterial polypeptide expressing nucleotide sequence isolated from the Sargasso Sea
atgtattcaaaattaagatctttaatatttaaattagatccagagttagcacatattttagcaataaaagctttaaaatttaattatgttcctaaaataaatcttcaaaaaaacaaaatacttgaaactaatatttttggaaaagtgattcctaatcctattggagttgcggcaggatttgataaagatgcggaagtttataattctttatttagattaggatttggctttgttgaagtaggcactataactccaaaaaaacaatacggtaatccaaaaccaagagtctttcgtttagaagaagacgaagcattaattaatcgccttggtttcaatagctctggcgcagatatagtaagttctagaattcaaaataatataccaaaaggtttactaggtataaatataggacctaacaaagatacaaataacagattagaagactatttagtatgtcttagaaaattttataatattggtgattatttgactattaatatttcttctcctaatactgaaaatttaagaagttttcataatttaaaagaattagatcaattattaaaatctatagaaaaagaaaaagaaattttgaaaacgaaaataccagtcgctttaaaaatttctccagatattgatgaaaaaaatatcattgaaattgtagaattaatcacaaagtataaacttgaggcaattatcatttcaaataccacagatggaaatagagaaaatttaaaaaatattaataaactagaaaaaggcggtctttccggcaaacctctagaaaatttttcaaacattttaattaataaattttataaacttttaaataataaaattaaaattattggagttggtggcgtga

SEQ ID NO: 218227 - DNA, 945 bp, Unknown
  Bacterial polypeptide expressing nucleotide sequence isolated from the Sargasso Sea
cggcgcgttctatcagcgctggctggggccagtgctcgccaatgacgaggggctcgatgctgaacagctgtcccgcacagcactgattgccctgggacaagcgtcgctgcgacgccagtggccgcttgtctccacggtgctggagggcctggccggcgatctgcagcgccgtgatctgcggctcgagcaagtgttgttcggttgccgtttccctaatcctgtgggtctggcggctggtttcgacaagaacggggtggcggcaggactctgggatcgctttggctttggtttcgcggaggtgggcacggtcacctggcatggccagcccggcaatccccgcccgcggttgtttcgcctggctcaggaacaggccgctctcaatcggatggggttcaacaacgacggtgcccaggcgttgcgcagaaccctggaacgtcaacggctggatccccccggtcgtcgcccagcggtcctgggaatcaacgtcggtaaatccaaggtcaccgcgttggaacaggcccctgaggattacgcctccacgctggagctgctggcacccctggcggattacgccgtgatcaatgtgagttctcccaatacccctgggctgcgggatctgcaggattccagccagttgcggcggctggtggagcggctgcgtcgcttgccggcctgtccaccgttgctggtgaagatcgcaccggatcttgaagatgaagcgatcgatggtattgcccggctggccttcgaggagggtcttgctggggtgattgcggtgaataccagcctggatcgcctggggttggagcagcgtcggctgttgcagaccggccgcaccttggcggaggaggcgggtggtctcagtggtgcgcccttgcggcaacgggcgcttgaggtgattcgccggctgcgggccagcgccggtccagccctaacgctgatcgg

SEQ ID NO: 218228 - DNA, 865 bp, Unknown
  Bacterial polypeptide expressing nucleotide sequence isolated from the Sargasso Sea
atttgggaaaaaatagacaatccaattggtttggcggcaggctttgacaaaaatgctgaagtttataattcaatatttaaattaggttttggctttgttgaggttggaactgtgacgcctttaaaacagtatggaaatccaaaaccaagagtattcagactagctgaagatcaagctctaattaataggttaggctttaataatttaggcgtagaaaatgttagttctagaattagcatgaacaagcccaaaggtttaataggtgtgaatttaggaccaaataaagatacagataatagactcaatgattatttgattggacttagggcatttcataatttggtggattatataacaattaatatttcatcaccaaatactgaaaatttaagagaatttcatgaagaaaataaatttgatgaattaatgactttaatatttaacgaaagagaaaaattaaattcaaatataccaattgtattaaaaatatctccagatgtaagtgaggataaaattgataaaataacatcaatattaattaatcataaagttaaagcagttattatttcaaatactacggaagctaatagagaaaatttaaaaaatatatctaaataccaaaaaggtggattatcaggaaaaccccttgagcaaaaatcaaatatactaatcagtaaattttatagttttttaaacggaaaaattgatattataggtgttggaggcatagactcaggaaaaagtgcctacgataagtttttagcaggcgctagctatttacaactttatacaggtatggtttatcagggccctaatattgttagtaaaattaaaaaagaacttaaagaaatattaattgataaga

SEQ ID NO: 218229 - DNA, 805 bp, Unknown
  Bacterial polypeptide expressing nucleotide sequence isolated from the Sargasso Sea
tgcagcaggttttgacaagaatgctgaggtatataatcctttatttaaattgggatttggatttgttgaggtgggcacagtcaccccattaaaacaatatggaaatgagaaaccaagagtatttagattagtcgaagatcaagctttaataaataggttaggttttaataatcaaggatcagatacaattttaagtagaataaaatcaaataaaaaattaggcatgctaggtataaatattggaccaaataaagattctaaaaataggcttaaggattatttgattggattagaaaaattttatgaaactgcagactatattacaattaatatttcttcaccaaatactgaaaatcttagaaattttcatgatacaaataaattaaaagaattattaaattctatattagaaaagaaaaaagaattaaaaactgaaattcctatagctgtaaagatttcaccagatataaatgaaaatcaaattaatttaatttcagaaatacttttagaaaataatgtgagtgcaataataatttcaaatacttctgatacttctcgagaaacacttcaaaatattcagagacatcaaaaaggtggtttatctggaaaaccaatagaaaaaaaatcaaattttttgataagtaaattttatactttagtcaagggcaaaattaagattattggagtgggtggcgttgactctggcaaagcagcatatgataagtttttattaggagcaaattatgttcaattatatactggaatggtatttcaaggacccaatattgctagcatgattaaaaaa

SEQ ID NO: 218230 - DNA, 448 bp, Unknown
  Bacterial polypeptide expressing nucleotide sequence isolated from the Sargasso Sea
cttgaagatactcttatcattttttaagttattttctccagagacatcgcattttcttgctctgcattcattaaaaatcttacataaaactagactgctaaatatttttttttcaaagtttgaagataaagattttcaatttttaggactcacatttaagaatagattaggaacagctgcaggtcttgataaaaatggtgattatattgattgtttgggggatcttggttttggattcctagaggttggaacagtaacaccgcttcctcaacctgggaatcctaagccaagagtatttaggctatctaatgaaaacgcagttattaatagactaggctttaataacaagggtgtggatcatttagtaaataatctaaaaaatagaaaatataaaggaatcgtgggggtaaatattggtgcgaataaaagctctaaaggacaacaaaga

SEQ ID NO: 218231 - DNA, 931 bp, Unknown
  Bacterial polypeptide expressing nucleotide sequence isolated from the Sargasso Sea
catgtactaccccttcgttcgtaaagccctttttcagctcgatccagagcgcgctcatgaattgacattccagcaattacgtcgcattaccggcacaccgcttgaagcgcttgtgcgccagaaagtaccggcaaaaccggttacctgtatggggttgacgtttaaaaatccgctcgggcttgctgccggactggataaagacggggagtgcattgatgcgctcggcgcgatgggatttggttccattgagattggtaccgtgacgccacgccctcagccgggtaacgataaaccgcgtctgttccgtctggtcgatgcagaaggtttgatcaaccgtatggggtttaataaccacggggttgataacctggttgagaacgttaaaaaatcgcattttgacggtattctggggattaatattggtaagaataaagataccccagtagagaacggcaaagatgactatctgatttgtatggaaaaagtctatgcttatgcgggttatatcgcgattaatatctcttcaccgaatacgccgggattacgtacgctgcaatacggcgaggcgctagacgatctcctaacggcaattaaaaataagcaaaatgatctgcaagcgatccaccataaatatgttccagtggcggtaaagatcgcgccggatctttctgtggaagaactgatccaggttgctgacagtttagttcgtcataatattgatggtgtaattgcgactaacaccacgctcgatcgttctctcgttcaaggaatgaaaaattgcgatcaaatgggtggcctgagcggtcgaccattacaattaaaaagtacagaaattattcgccagttgtctcaggaattaaaaggccaactgccgattattggtgttggtggtatcgactcggtgattgctgcacgtgagaaaatagctgct

SEQ ID NO: 218232 - DNA, 826 bp, Unknown
  Bacterial polypeptide expressing nucleotide sequence isolated from the Sargasso Sea
gataaaaatggcgattacattgatgcttttgcgcgcctggggtttggtttcattgagatcggtactatcacaccgcgtccacagcctggtaacccaaagccgcgtctgttccgtttgccggaagagcgcgccatcatcaaccgcatgggcttcaacaataaaggtgttgatcacctcgttgagcaagtaaagaaagcgaagtttaaaggtgtgctgggcatcaacatcggcaagaactttgacaccgctgttgaagatgcgacgtccgattacctgatctgccttgagaaggtctatcagtacgccacgtatatcacggtcaatatctcttcaccgaatacaccagggctgcgcaccttgcagtacggcgatgcactacgtgacctgctgatgccgctgaaagcgcgtcaggccgagctggcaaaagagcatggctacaagccaatcttcgtgaagattgcgcccgatatggaagacgcagaaattgatactgtggcgcagacgcttctcgattgtgaaatcgacggcgtcattgcgaccaacaccaccttgtctcgtgaaggcgttgaaggttctaagcatggcgctgaggctggtggtttatccggcgcgccggtgaccgatctttcaaccatgaccattgagcgcctgtgtggtgtgctgggcgatcgtctgccggtgatcggcgttggcggtattcttgaaggtgaagacgcggttgataaagtacgtgcaggcgcatctctggtgcaggtttactctggctttatttatcgtggtccagagctgatcggtgagtgtgtacgctctctcagtaaagcctgat

SEQ ID NO: 218233 - DNA, 687 bp, Unknown
  Bacterial polypeptide expressing nucleotide sequence isolated from the Sargasso Sea
aatgtattctgttttaagatctctaatttttaaattagatccagaattgtcccacagtctagcaataaaatcattaaagtttaattatagtccagtaaaaaatgttataatagatagttctattgaaacaaatttttttggaaaaaaaattaacaaccctataggtgtagcagcaggatttgataaaaatgctgaggtttataatcctttatataaacttggttttggttttgttgaagttggcacagttactcctaaaaagcaatatggcaactccaaaccaagagtttttagattagaagaagatgaagcattaattaataggttagggtttaataattctggatcagattcaattggttctaggattaattcttatccacccaagggcgtgttaggaataaatattggaccaaatatgaataccacaaataaattagaagattatttaatttgtttaagaaaatttcacaagctttgtgattatttaacaataaatatttcttcaccgaatacagaaaaccttagaaattttcacaataaatctgaattggatcaattattgaaaactattcacgaagaaaaaaaaatattaaaatccaaagtactaattgctttaaagatatctcctgatattgaagaaaaaaacatatctaatatttcagatttacttttaaaatatgaagt

SEQ ID NO: 218234 - DNA, 1042 bp, Unknown
  Bacterial polypeptide expressing nucleotide sequence isolated from the Sargasso Sea
atgtttaataaaataagacctttaattttcaaatttagtcctgaagtagcacattctttagcaattaaaactcttaagctaaactctttgccaaaaaagaaaattaaaaataaaactgttttagaaacatcaatatttaataaaattcttgaaaacccaataggagttgcagcaggttttgataaaaatgcggaggtatataatccattatttaacctaggttttggttttgttgaggttggcactattacacctgaaccacagtatggaaatccaaaaccgagagtattcagactcgaggaggatgaggctctaatcaatagattaggatttaataattcaggttcagaggaaatttataaaagaattgaaagtaataaaccatacggtctattgggagttaatataggcccaaataaaacaagtgataatagaattcaggattatgtaaaatgttttagaaaatttatttcggttgcagattatatcacaataaatatttcttctcctaatacagaaaatttaagaaattttcataatcaagaggaaatgaataatttattatctgaaattcaaaaagaaaaaaagaaattacaatccaatttacctatagctgtaaaaatttcaccagatataaattttaactcaattgatgaaatttgtgagtcattgattaaacattctatagaaattttaatcgtatcgaatacctccgaaaaaaatagggataatcttaaaaatataaataaactagaaaagggtgggctttcaggagccccaatagaaaataaatcgaatgaactaattaatttattttttaacaacctaaaaaataaaattaaaattataggtgttggaggagtaagcactggcaagggagcttacgaaaaaataattcgtggagcatctttaattcaactttatactggcatggtatatagaggaccagatatagctaataaaataagtcaggaattaatcgaaatactcacaaaagatggcattaaaaatatttcagagatagtgggatcaaaaaattgat

SEQ ID NO: 218235 - DNA, 632 bp, Unknown
  Bacterial polypeptide expressing nucleotide sequence isolated from the Sargasso Sea
aatgttttcaatattaaggccttatatattttctttagacccagaagtagcacatgatttggctattaagtctttaaaagcaaacattcttccaaaaagttttttttatgttgaagatgaacaaatgcttaagataaatcttttaggtaaaacaatatctaaccccattggcttagcagcaggttttgataaaagtgcagaggtttataactctttatttaaatttggctttggttttatagaagtaggcacaattactccaaaacaacaattgggcaatcctaaacctagaatatttagactagagaaagatcaagcgcttattaatcgtctcggatttaacaatcatggttcagaaactgtttcaaaccgaatatctaataatcatcctgatggctttctaggtattaacattggaccaaataaagaaacaaaaaataaagagaatgattattacatttgcctttcgagacttgcaattcatgctggatacataacaatcaatatttcttccccgaacacagaaggtttaagagattttcatgaccaaaatgaaatgaaaaaacttctttctggaataaataaaattaaaaaagaaaaaaagattaattgtccaatagcaataaaaatat

SEQ ID NO: 218236 - DNA, 705 bp, Unknown
  Bacterial polypeptide expressing nucleotide sequence isolated from the Sargasso Sea
tttggctattaaatcattaaagtttaattttgttcctaatgttttagaggaagataaaaacaatcctttatttaaaacaaaattatttaataaagatttagaaaacccgattggtatggcagcaggttttgacaaaaatgcagaagtatacaacactttgtttaagttaggctttggttttgtagaagttggtacagttactcctcttaaacaatatggaaatcctaaaccaagagtatttagattagttgaagatgaggctttaataaatagacttggttttaataatcttggggctaaaaatattgtagatagaattaaatctaacaaacaaacaggtttgcttggaataaatattggaccaaataaagactcagagaatagacttgaagactatttaaattgttttaagactttttatgatgttgctgattatattacaataaatatttcttcgccaaatactgaagatttaagaagttttcatgaggatacaaaattaaatgaattattagaggctgttaataaagagaaagcaaccttaggatcaaaaattccaatagcagtaaaagtatctccagacatagatgataaacaaataaaaaaaattaccgaagttcttttaagtaataatattgaagttgttgttatttctaatacatcagactctactagagaaaggttgaataatattcaaaaacatca

SEQ ID NO: 218237 - DNA, 1129 bp, Unknown
  Bacterial polypeptide expressing nucleotide sequence isolated from the Sargasso Sea
cttgattacccctgtattaaaaaaagactctggaattgatgcagaatacttaacaaatttatctcttagcctcctatcattcagttcaagaaaatataattggcctgtagtttcttctatcttaaaaaatcttaataaagaattttctgtagttgataaaaggttaactcagaacatatgtgggataaatttttgtaatccaattggtttggctgcgggttttgacaaaaatggaaatgccgcaaatatatggaaagattttggttttggatttgctgaacttggaacggtaactaaatttgctcagaatggaaattccaaaccaaggttatttagattagcaaaagaagaggcagcattaaatagaatgggtttcaataacaatggtgctgaaaatctagttaaaaacttcgtcgaacaaggaattgagttcaaaaaaaatagaaagaatatttgtttagggataaattttggtaagtctaaaattacagatttatctcaagcaaaagatgactatttaacttctctaaaattattaattccatattgtgattatgcagcaataaacgtaagttctccaaatactgaaggactaagaaagttacaagatccaattcttctaaaagaacttattaaagaaattaaaaacttacccagttgtccaccattatttgtcaaaattgcaccagatctaagctttaaagatattgaagatatttgccaattaataatcgaggaaaacatagatggaataattgctactaacaccagcatagatagattaggtcttgaaaatagaaagatcatgcaaaccggattattactttctgaagagaatggaggtttaagtggaaggcctctacaaaaaaaagcaaatcaaataataaaacatattcataatattgataaaaagattattttaattggcgttggtggaatagatagtcctgagtcagcatgggaaagaatttgttctggagcatcattaattcaactttatacgggatggatatataagggtccacaattagtacccaatatacttcaaggaattataaagcaactcaatatccataaattatcaaatataaaagaggccattggatcagatctaaaatggattgaataa

SEQ ID NO: 218238 - DNA, 896 bp, Unknown
  Bacterial polypeptide expressing nucleotide sequence isolated from the Sargasso Sea
taatcctataggcatggctgcaggttttgacaaaaatgcagaggtatataattctttgtttaaactgggttttggttttgttgaggttggaacaataactcccttaaaacaatatggcaatccaaagccaagagtttttagattagaggaagatgaagcattaattaatagattgggtttcaataatgatggtgcaagaaatatcatgaatagaataaaatctaatcaacaaaaaggattgttgggagtaaatataggacctaataaagacacaaaagacagaattgcagattatctaaattgcttaaatatctttagtgaagtagcagattatataaccataaatatttcatcaccaaatactcaggatttaagaaattttcataatcaaacaaaacttgataagctactaagaaatattgaaatagaaaaaaaaaaaatgaattcgaaaatacctattgtggttaaggtatctccagatgttaatgataaagaaataaatgagatatccgatgttcttcttaataatgatattgagggtattattatatctaatacatcagattcaactagaaacgatttaataaacatacaaaaacatcaaaaaggtggattatcaggaaagccaattaaagaaaaatcgacacttttaattaataaattttataatttaatcaaaggaagaataaaaataataggagtaggaggggtagattcaggagcaagtacatatgaaaaattcttagctggagccaattatgttcaactttacactggcatggtttatagaggcccaaatattgtaagtattattaaaaaggagcttaaagaattattaatgagggacggagtaaagaacttcagtgaaattgtgggaaataaaacaatttcttaaa

SEQ ID NO: 218239 - DNA, 1005 bp, Unknown
  Bacterial polypeptide expressing nucleotide sequence isolated from the Sargasso Sea
tgggtcttgcatcatcaaaagatctgaggggcaacgaattttcagaaactatttcaaatattttcgagttaagatttcggaatcccataggccttgcagcgggctttgataaagatggagaagtttttgaccaactatctcaaattggtcctgggttcgtggaagcgggaacactaactcttgagccccaaataggtaatccccgtccgcgtgtatttaggttgtcatcagataatgcggttataaacaggctcgggtttaataacaaaggcattatgggtggactagagcgtctgagcaaacgtagagataagtctgtggtattgggcgtaaatattgggatcaacaagagtactcaaacgcctgtcgaagactatgttgaatgcttatcacttttaaggaacatagctgactatgtcactgtaaatgtttcttctccaaacacgccggggctccgctcatttcagcaagtagaaaaactggaggaacttttaaacacgctgattacagcttcgtgggaaaacagtgattcgaaccgtcgaatccccttacttctgaaaattgcccccgacttaacaaatgaagacatcaatgagattgttgacgtggctgtatcaagtggcatttctgggattattatctcaaacacaacgattagtcgtcccaaaaatcttttagatgctaagcaaggtgaaccaggcggcctaagtggagcgcctctcttcgaactttctacgcaaaaattggcgcagaccttccttgcagcaaaacaacgcataccaataataggagtcggtggggtcgagagtgctgagacggcatataccaaggtcaaggcgggggctagcttgatacagctttacaccgcacttatttataaaggacctaggctgtttagcgaaattaacaaaggattatcggaggccttaaaaaatgataacatagaccatatctcagaggccgttggtatcgaagctgactattgggcttctagagaggtataaa

SEQ ID NO: 218240 - DNA, 1012 bp, Unknown
  Bacterial polypeptide expressing nucleotide sequence isolated from the Sargasso Sea
aagtttgatccagaattggcgcataatttagcaattaaagcattaaaagtaaaatatatatccttaaataagccaagaaaatattcatctctagaaacagccgtattaggaaaaaaaattttgaaccccattggattggccgcaggttttgacaaagatgcagaagtttacaattctttatttaaactaggttttggatttgttgaagtcggaacagttacaccgttaaaacaatttggcaatgaaaaacccagagtatttcgtttagaggaagatgaagctttaattaatcgacttggatttaataattcaggtgtagaaaaaataagctctagaattaaattaaatcctccgaatggtttatttggtataaatattgggcctaataaagataccaaaaatagattagaggattatttaatctgtctaaaaaaaatttatgatattgctgactatattacaattaatatatcttctcctaacacagaaaatttaagagatttacatcaagaagttgagcttgatcaactacttagctcagtacaaaatgaaaaaaaaaaattaaattcgaaaattccaattgctgtaaaaatttctcctgatattaaagaaaatgaaattgaaaaaatttctgaaatattgattaaaaataatatatttgctgctataatatcaaattcatctgatagtaatcgccaaaatcttaaaaatattaacaaacttgaaagaggaggcttatcaggaaaacctatagaaaaaaaatctaatgatttgataagtaaattttataaatatttaaaagacaaagtaattattataggagttggaggagttgattctggaaaaagtgtctatgaaaaaattactaatggcgcaagtttagtacaattgtatacaggtatgatatataaaggtcctaatatagtttctaaaatcagtgaagatttaaatgatattttgaaaaaagatggtatcaaaaatatttctgaagtagtaggaataaaaaaatgaa

SEQ ID NO: 218241 - DNA, 973 bp, Unknown
  Bacterial polypeptide expressing nucleotide sequence isolated from the Sargasso Sea
aatacaattccttccaagcaattattttcagtaactggtgaagaaattttaagaactaaacttcttggcaaagagataaacaacccaattggtttagcagcaggttttgataaaagcgcagaagtttataatgaaatatttaaaattggttttggatttgttgaggttggaactgttactccaaaaaagcagtttggaaatgaaaaacctcgaatttttagattagaaaaagatcaggcattaataaacagacttggatttaataatgatggatctgaaattgttaaaaaaaggattgaaaataatattccatcaagtttattgggtataaatataggtccaaataaaaatacagttaatatgactgatgattttttaaggtgtgcagaaattttttttccaattggagattacataactattaatatttcttcaccaaatacctctggtttacgagattttcatgatgaagatgctttaaaaaaattacttacaaagattaatgaagtaagagaaaaaagcaattttaataaatcttttttattaaagatttcacctgacctagatagttcgcagataccagttattgtaaaactaattttagagtataaaatcgatggagtgattttaacaaatactactaacaaaaatagggataatttaaaagacccaaatagtaaagagatcggaggattgtctggaaagcctattagagatttgtcaactgaatttgtaaaaaaattctacagaaatttaaatggaaaaataccaattataggtgttggtggtattgactctggtgaaacagcttttgaaaaaatagctgctggtgcatcagctgtacaactttatacaggtcttatttacaaaggtccaaatattgtaaaagttataaaaaaagatttaattaaaattctaaataacaaaggttttaaaaatattagtgaggctgtagggacttcatcacactaat

SEQ ID NO: 218242 - DNA, 1042 bp, Unknown
  Bacterial polypeptide expressing nucleotide sequence isolated from the Sargasso Sea
atgttttcaaaaataagatcacttatatttaaattagaccctgaaattgcacatgatttagctattaaagctcttaaatttaatcttgtttctcaaaataaaattaaaaataacaatttaattcaaacagaaatttttggtaaaacaattccaaacccagtaggtatagcagctggctttgataaagatgcagaagtatacaatcctttattcaaattagggtttggatttgttgaagttggaacagtgactccaatttatcaatatggaaaccataaaccaagaatatttcgacttgaagaagatatggccttaataaacagacttggttttaataattcaggctctgaaaaggttagatcaagaattatgtcaaattctccaaaaggtttgtttggaataaatatagggccaaataaagacacaaataatagactggaagattatttaatttgtcttagaaaattttataatcttgcagattatttaactatcaacatatcttctcctaatactgaaaacttgagaagctttcacaatagagatgagttgaatgaactcttgagtttaattgagaaagaaaaaaaaatattaaaaacaaaagtaccaatcatagttaaaatatccccagatattaaggatgataacatcaatatgatttcagatttgcttttaaaacataatgttaaagcaataataatttcaaatacaactgataaaaatagagaaaatttaattaatattaataaattagaaaaaggaggcttgtcaggaaaaccattagaaaaaagatcaaatgaattaattaataaattttataaaattttacaaaataaaataaaaattataggtgtaggaggagttgattcaggtcaaagcgcataccagaaaataattaatggagctactttagttcaactttatactggcatgatttatcaaggtcctagcattgcttcaaaaataagtgaagaattaataaatattttagataaggaaagagtaaaaaatatatctgatgttgtaggaagtaaaaattgat

SEQ ID NO: 218243 - DNA, 557 bp, Unknown
  Bacterial polypeptide expressing nucleotide sequence isolated from the Sargasso Sea
ttacctgcattgcctggagcgcgtgtatccgcatgcaagctatgtgacggtcaacatttcgtcgccgaacacgaagaacctgcgtcaactgcaaggcgcgagcgaactggacagtctgctcgggacgctacgcggagcacagcagcgcctggcagatcagcacaagcgctacgtaccggtggcactgaagatcgcgccagacctggacgatgaccagattgccaacgttgccgacgcgctcctgcgccataagatggacggcgtgattgcgaccaatacgacgatcagccgtgaggcggtcgtcggtctggcgcatgcggaagaggcgggtggcttgtcgggccagccggtgcgcgagggctcgacgcgggtgattcgcgccttgcatagtttgctcggcgatgcggtgcccatcattggcgtgggcggcatcctcgcgggcgagcacgcgcgcgagaagatcgacgcgggcgcgcaactggtacagctttatacgggattgatctatcgcggcccggccctgattgccgaatgcgcgcgcgcgttggcgcgttaga

SEQ ID NO: 218244 - DNA, 886 bp, Unknown
  Bacterial polypeptide expressing nucleotide sequence isolated from the Sargasso Sea
ccaattggtctagccgccgggtttgataaaagtgcagaggtttataattctttattcaaacttggttatggctttgtagaagttggcactgttactccaaaaagacaactaggcaatcctaaacccagagtttttagattagaaaaagatcaagcacttataaatcgacttggttttaacaatcatggatcagaaactgtatcaagaagaatatcaaataatctacctactggctttttaggaattaatgtgggcccgaacaaagatactgcaaacaaagaggaagactattatttatgtctatccagactctcatcctacgcagggtatttaacgattaatatatcttcaccaaatactgagggcctaagaaattttcacgatcaaaaagaactcgaaaagcttttaattggaattaataaaataaaaaaagagaaaaatatttcaaaacctttagtattaaaattatcgccagatataaatgatggtgaaattagtaaaattattgaattagtaatcaaatataaaatcgatggaataatagtctccaacactactgatagtaatcgagaaaatttacatgatgttcaaagatttgaaaaaggtggattatctggaaaacctttaaaagatatatcaacagatttgataaaaaaattttatttggaaactagaggaaaaatacaaataattggtgtgggtggtgttgacacagggaaagctacttttgaaaaaataagtgctggtgccaacgcagttcaattgtatacagggatggtttacaaaggacctggcatagtaaaagaaatgaaaaaagagttaatttcaattctaaaaaaagaaaatatcaaaaatatcagtagtgctgtcggaattaatgcttgac

SEQ ID NO: 218245 - DNA, 1126 bp, Unknown
  Bacterial polypeptide expressing nucleotide sequence isolated from the Sargasso Sea
tatgatttggaaatttattacattttttgtaagaaaacttgatccagaaattgctcataaaataactattaaattcttgcaacttggtttgcatccaaaattaaataaaattggaattccgataaacattggtaatttgatttttaaaaattttattggtgttgccgcgggttttgataaaaatgcagaagtaataaataaaattaattttttgaactttggtttcactgaagttggcactattacaccaatgcctcaatatggaaatccaaaaccaagaattttcagattagaaaaagataaggctataataaaccgaaatggttttaacaatttaggaatgttaaaagctaaaaaaaaattagaacattatagaaaaaaatttccagtaggaagtgattttcttgttggaattaatattggccctaacaaagatagtgaggacaagtttagtgattacaaagtgcttgccaaaaacttatcaaagtttgctgactatatttctataaatgtttcttcacctaatacaccaaatttaagagagtttcaaaataaggagaatttagaaaaagttataaattttgttaaggatgggattcccacttccaaaacttttaataaaaaattgccaatttttttgaagattgctccagatataaataatcagacattgaaatctattattgaaacagctcattcgcaaaaaatttttggtttgatcatctccaatacgacgttagatagaaaaagtaatctaaaatcaaaaaaagcttatgaattaggaggtttgtctgggaaaccattatttaaaaaatctacagatattttgtcacaagcaaacaaaataattaaaaataataattataaattatttttaattgcagctggaggagtatcagacagtaaaactgcatatgtaaaaattttatgtggagcacatttagtccagttatattcttctctaacatttgaaggacctttagttgcaaatcaaataataagtggcatattgaaattaatgaaaagagataaaataaaaaatattattgatatagttggtgttattgataatcccaaagaagctatgaatgttgcaagtaatggtttcaaaaattataaaagttag

SEQ ID NO: 218246 - DNA, 1027 bp, Unknown
  Bacterial polypeptide expressing nucleotide sequence isolated from the Sargasso Sea
attgctacctcctgaaatagctcacagtattactattaaaacattaaaatatctaagattgaaatcaaaaaattttgacgatcaaatattatctcaacacattttaggattagattttccaaacccaataggtttggcagcaggttttgataaaaacgctgaagttatgaattcaatgttttcatttggctttggttttgtagaagttggaacagttacaccaatgcctcaatatggtaatactaaaccaagagtttttaggcttacagaagataaagcaataattaatagtcttggatttaacaataacggatcaaaaaaaattaaaaaaaatcttaataataatcgtaatgctgagtttaataacaaaataattggaataaatattggaaaaaataaaaattcaataaatgcaattgatgattatctttatttaattcaagatttaggtcatttagcaagttatattactgtaaatatctcctctcctaacactgcaggtttgagagatatgcaattaagaggaaatatagaaaaattaataaaaaaaattgttaaaaaaagagatgaaatagatagtataaataataaacctattttaattaaattatcaccagatttaaatgaagatcaattgagagatattgctttaatatctcttgctaacaatattgatgggctaatattgacaaatactacaacaaacagaaatcaaaaacttttatcccaatacaagattaaaaatggtggtttgagtggtcagcctctttttgaaagatctaatcaaacattaagaaaaatgttcactcttaccaatggtcaaattcctttaattggagttggaggtatttttagtggaagtgactgttatgctaaaattaaatctggagcatctttagtccaattatatacatccttagtatattcagggcctggattaatagcaaatattaaaaatgaacttattgatttaattaaaactgatggatacaaaaatatatcagaagtaattggaaaatcagtttaa

SEQ ID NO: 218247 - DNA, 1042 bp, Unknown
  Bacterial polypeptide expressing nucleotide sequence isolated from the Sargasso Sea
atgtttaatcttataagaccttttatatttaaatttagccctgaagttgcacactcactagcaataaaggctttaaagttaaatcagataccagctatagataaaacaaccagagttactatccaaactaaatttttaaacaaaaccttaaattctcctctaggtgtagctgctggatttgataaaaatgcagaagtttacaatcctctatacaaactaggatttggttttgttgaggtaggtacaattacacctaaaccacaaataggaaatccgaagccaagagtgttcagattggaggaagatgaggctttaattaatagacttggatttaacaatattggatcagaagaaagtaaaaaaaatattgaaaataattcacctaatggattacttggtattaatataggacctaataaagatactgaaaacagagttgaagattatttaatttgtttcagaaaatttcataatttagcagactatattacaattaatatctcttctcctaacacagaaaatttaagaaactttcacaaaaatgaagagttagataatcttttaaaatgcataaatgaagaaaagaaaaatttaaattcaaatgtgccaatagcagtcaaagtatctcctgatattgatgaaaaaagtattgatgaaatctcagaactttttttaaaatataatgttcaaatagttatagtttcaaatacgacagatagaaatagagaaaatatatctaatataaataaattagagaaaggcggtttgtctggaaaaccacttgaaaatatctctaatgaattaattaataaattttttaaattagttggaaaaaaaatcttaataattggagttggaggcgttgactctgccgatggcgtttttaataaaattgtaagcggtgcaactcttgtgcaattgtatacaggtatggtttataaaggaccaactattgcttcaaagattaataaagatctcgacgaaattgtaaaaagagaaggttttaaaaatatttctgaagctattggaacaaaaaattaat

SEQ ID NO: 218248 - DNA, 1021 bp, Unknown
  Bacterial polypeptide expressing nucleotide sequence isolated from the Sargasso Sea
catgttttataaaatcgcacagaaagtcatgtttcagatggatcctgagcgagcgcataatttagccattggtagcctgagactgacaggtaatagccctctgaatgctttttatgctcagcatattgctcctgcgccagtgagttttatggggctgacgtttccaaatcctgtgggtttagccgcaggtatggataaagatggtgagtcgatcgatgcttttcatgcgatgggatttggtcatgtggaagtgggaactgttactccaagaccacaacccggtaatgatttaccccgtttatttagattaaaacccgccaaggcgattatcaatcgcatgggctttaataacaaaggtgtcgataatctggtcaaaaatttgatcgcaaagaaaaccgatatcatggttggggtcaatataggtaaaaataaagacacgccagtagagcaggggaaagacgattatttgatctgcatggataaagtttatccttatgccgcctatattgcggtgaatatttcatcacccaatacgccaggattacgatcgttacaatatggcgatctattagatgaattattaagcgcattaaaaaccaagcaacttgagctagcagagaagcataaaaaatatgtaccaatagcccttaaaattgctcccgatttaaccacagaagaaattgaaaatattgctcaagcattaattaaaaatcagtttgacggtgcaattgcgaccaatacaaccttaactcgtgacggtgttagcgggcttaccaatgctaatgaaagcggtggtttaagcggtaaacctttaacagaactgtcaacaaaagtgattaaacaattggcgacttctttacagggaaaactcccaattattggtgtgggcgggattaatagtgctgaagatgccttagcaaaatttgatgccggtgcgacaatggttcagatttactctggttttatttatcaaggtccaaagttaattaaagagatagttgaagcttatcgcttaaaataa

SEQ ID NO: 218249 - DNA, 628 bp, Unknown
  Bacterial polypeptide expressing nucleotide sequence isolated from the Sargasso Sea
atgttttcaatcttaagaccatttttatttaacctagatccagaaaccgcccacgatttagctatcaagtcacttaagtttaaccctcttcctaaaaaaatgttcgaggttgaagatgagcaaattttaaatattaaattatttggaaaaaactttcccaatcctattggccttgcggcaggatttgacaaaagcgcagaggcttttaacccactattaaaattaggatttggatttgtagaaattggaactgttacaccattaaaacaatatggaaatcctaaaccaagaatatttaggcttgaggatgataatgctttaattaataggcttggatttaataatgatggcatagaaataataaaagatagaattatatcaaataagaagaaaggcatattaggagttaatattggaccaaacaaggagaccaaagatcaaaaaaatgatttttgtttaggactaaaaaatttttttaatttggcagattatattactgtaaatatttcttcaccaaatactgaaggtttgagagattttcatgatcaggaaaaacttacagatcttataacaactctcaacaaaataaaaaaagataacaaaaccaatattcctttattgcttaaaa

SEQ ID NO: 218250 - DNA, 1072 bp, Unknown
  Bacterial polypeptide expressing nucleotide sequence isolated from the Sargasso Sea
ttgtcattcattccggctgtccgccctattcccgtgttcagttccctctatccgctggcccgcgcatccctgttcaagatggatgcggaagacgctcaccacctcacgctgcgcgcgctcggcgcggccggccgcacgggccttgcctgcgcgctgtcggcccgcgtgcccgacgcaccgcgcaccgtgatggggctcacgttccgcaacccggtcggcctcgcggccggcctcgacaaggacggcgcggccatcgacggccttgcggcgctcggcttcggcttcatcgaggtcggtacggtcacgccgcgcccgcagcccggcaacccgcgcccgcgcatgttccgcctgccgcaggccgaagcactgatcaaccggatgggcttcaacaaccacggcgtcgaccagttcgtgaagaacgtccaggctgcccgctatcgcggcatcctcggcctgaatatcggcaagaacgccgatacgccgatcgagcgcgccgccgaggattacctgtactgcctcgaacgcgtgtacccgttcgcgagctacgtgacgatcaacatctcgtcgccgaacacgaagaacctgcgccagctgcagggtgcgggcgaactcgacgcgctgctcgcggcgctgaaggacaagcagcaacgcctcgccgacctgcacggcaagctcgtgccgctcgcgctgaaaatcgcacccgatctcgacgacgaacaggtcaaggaaatcggcgacacgctgctgcgccacaagatcgaggcggtcattgccaccaacacgacgctgtcgcgcgcggccgtccagggactgccgcatgctgacgaagccggcggcctgtcgggccgccccgtgttcgatgcgtcgaacgaagtgatccgcaagctgcacgccgaagtcggcagcgaagtgccgatcatcggcgtcggcggcattttctcgggcgaggatgcccgggcgaagctcgcggccggcgcggcgctggtgcagctctacacggggttcatctaccgtggccccgcgctcgtcgcggaatgcgtgaaggccgtcgcccgcgaccgcaccgcgtaat

SEQ ID NO: 218251 - DNA, 1051 bp, Unknown
  Bacterial polypeptide expressing nucleotide sequence isolated from the Sargasso Sea
aatgtataacttacttaaagctttcctttttctttttgatcctgaaatagttcatagattaacaatactattcctgaaatttattcctataaataagacatcaattcctccagaattaaatataaaaatctttggtttagactttatgagcccaataggcctagctgcaggatttgataaagatgctgaagtgtatgataaaatgttacaacttggttttggttttgttgaagtaggtaccgttactcccaaaccgcagagaggaaatccaaaaccaaggattcatagaataaaaaaagaaaaggcaataattaatagcttgggattcaatagtattggttttgagaatgtaaaagaaaatctacagaataaaaaaattgaaggaattgttggtatcaatataggtgcaaataaagatagcaaaaattttatcgatgattatctttctggtatcgaatttttttctaattatatctcctatataaccataaatatttcttctccaaacacacctggcttaagggatttgcatttagctaataacttaaaaaacttgctgaagaatattgaaaatctcagaaaaaaaaatgaaatcagaacagttcctatctttgtaaaaatttctcccgatctaaacgatgacgagcttggtgttatgtgtggtatttttttagaatttaatgtcgatggtataataatatcaaataccactcttgaaaggcctttcaagggttttggtataaatttgaagggtggtttatctggaaggttattatatcaaacttctactgatcaattaaaaaaagtttatgagaaaactaagggaaaaataccgttaattggcgttggaggaattagctctgctaaagatgcatataataaaataagaaatggcgcaagtttagttcagctctacactggtttagtttatcaaggtccaggtcttataaaaaagataaaccaagagataagcgtccttttaaaaaatgatggttttgataatataaaagatgctgtaggaatagatacggagatagtaaatgacaattaa

SEQ ID NO: 218252 - DNA, 671 bp, Unknown
  Bacterial polypeptide expressing nucleotide sequence isolated from the Sargasso Sea
cgtcgatcatctgctcgagcgggtcaaggctgcgaaattcaagggtgtactgggcatcaacatcggcaagaacttcgataccccggtggagcgtgcggtggatgactacctggcatgcctggacaaggtgtacgcccacgccagctacgtcacggtcaatgtcagctcgcccaatacgcccgggctgcgcagcctgcagttcggcgactcgctcaaagagctgctggaggccttgcgtcgccgtcaggaggacctggcccaggagcatggcaagcgcgtgccgctggcgatcaagatcgccccggacatgagcgatgaagaaaccgcgctggtggcgtcggcgctattgggcgcggacatggacgcggtgatcgcgaccaataccacgctcagccgcgaaggtgtcgaggggctggcccatggcgacgaagccggtggcctgtccggtgcgccggtgcgcgacaagagcacgcatatcgtcaaggtgctggctggcgaactgtccggccgtctgccgatcatcgccgttggcggtatcaccgaaggtcggcatgcggcggagaagatcgctgccggagccagcctggtacagatctattcggggttcatctacaaggggccggcgttgatccgtgaagcggtggatgcgatcgcggcactgcgtaaataaa

SEQ ID NO: 218253 - DNA, 742 bp, Unknown
  Bacterial polypeptide expressing nucleotide sequence isolated from the Sargasso Sea
aatgtattcaaatttaagatctttaattttcaaattagatccagaaaaagcccatactttagcaattcaatctttaaaatttaatttagtatcaaatgtatttgatgaaaataaaaatgatccgatttttaaaacacaaatatttggcaaagatttaagtaatccaataggaatagcagctggttttgacaaaaatgcagaagtttacaatcctttgtttaaattaggatttggttttgttgaagttggaactgttactcctttaaaacaatatggaaatgaaaagccaagagtatttagattagttgaagatcaagcgttaattaatagattgggattcaacaatcaaggatctgaaactattttaaatagaataaaatcaaataaaaagaatggaatacttggagtaaatgttggaccaaataaagactctgataatagattgaatgattatttaattggattagaaaaattttatgaagttgctgattatgttacaataaatatttcttctcctaatactgcaaatttaagaaattttcatgatgaaaataagttaaaagaattattaaaatcaattaaagataagaaaaatgaattgaaaactaatattccaatcgcagttaaaatttctccagacattgatttaaagcaaatcgaattaatatcagagatacttttggaaaatgaaatatctgcaataattatttcaaatacatcagaaagaactagagatgattaa

SEQ ID NO: 218254 - DNA, 1042 bp, Unknown
  Bacterial polypeptide expressing nucleotide sequence isolated from the Sargasso Sea
atgtttaataagttaagatcaataatatttaagctcgaccctgaattagctcataacttggctattaaagctttaaaatataattatattccaaataataaaattccagcaaatagcttgatagaaacagaaatattcggtaaaaaaatttctaacccaataggtcttgctgcgggttttgataaagatgcggaagtttacaattctttttataaacttggttttggttttgttgaggtagggactattactcctttaaaacagtatggaaatccgaaaccaagagtttttcgtttagaagaagatgaggctttaataaatagattgggttttaataattcaggcgcgaataaagttagttctagaataaaatctagtccacccaatggattatttggaattaatattggacctaataaagatacaaaaaatagagttgaagattatttaattggtttacgaaaattttataatttggccgattatttaactgtaaacatctcatctccaaatacagaaaatttaaggagttttcataattcaaacgaacttggtgaacttttaagtgaaattgaaaatgagaaaaaacttttaaaatcaaatatacctattgttgttaaaatttcacctgatattcatggtaatgacatagaaaagatttctgaattacttttaaaatataatatttcatctgtaataatttcaaattctacagacagcagtagagaaaatttaaaaaatataaataaactagagaaaggtggattgtcaggcaagcctctagaagttaaatctaatttgttaattaataaattttttaaaattttgagaaataaaataaaaataattggagttggcggagttgactcaggaaaaagtgcatacgagaaaataattaatggcgcaaacctagttcaaatatatactgggatggtttatcaaggtccaaatattgcttctaaaattgctaaagaactaattgaaattacgaaaaatcatagtgttaagaacatttcagaacttgtaggtattaaaaaatgat

SEQ ID NO: 218255 - DNA, 715 bp, Unknown
  Bacterial polypeptide expressing nucleotide sequence isolated from the Sargasso Sea
aatgttttcaaaattcagaaatttaatctttaagattgatcctgaaatagctcataatttagcaattaagtccttaaaatttaattttactcaaaatatttttgatgaaaataaaaaaaatccaatgtttcaaacaactttatttggaaaaaaattagataatccaattggattggccgcaggttttgataaaaatgccgaagtttataatgcaatatttaacttaggttttggctttgttgaagttggcactgtaacacctttaaaacagtatggaaatccaaaaccaagagtttttagattagttgaagatcaagctctaattaataggttaggttttaataatttaggttcagaaaatgttagttctagaattcgcttgaataaacctaaaggccttataggtgtaaatttaggacccaataaagacacagatgaccgattaaatgattatttagttggatttagagcatttcatgatttggtagattatattacaattaacatttcatctccaaatactgaaaatttaagagaatttcatgaggaaaaaaaatttgatgaattaatgactttaatatttaacgaaagagaaaaattaaattcaaatataccaatagtggtaaaaatatctccagatataaaagaagataaaattgagaaaataacttcactattaattaatcataaagttaaagcagttattattcgaaca

SEQ ID NO: 218256 - DNA, 1039 bp, Unknown
  Bacterial polypeptide expressing nucleotide sequence isolated from the Sargasso Sea
atgttcgataaaattagaccattgatatttaaattagatcctgaattggcacatacattagctattaaggctcttaaaacaaatttgtttttaaaacaaaaaatttcagaagtatcatatttaaaatctgaattatttggaagagagataaaaaatccaatcggggttgctgctggctttgacaaagatgctgaggtttataattcattatttaatttaggttttggttttgttgaggtgggaacagtcacacctttaaaacaatatggaaacaaaaaaccaagagtatttcggttagagaacgataaagctttaataaatcgtcttggttttaataattcaggcagtgatattgtaagtgatagaataaaaaaaaataaaccgattggtatacttggtgtaaacatagggccaaattggaacagcaaagatagagtaggagactatctaattggattcaataaattttataaattagcagattacataacaattaatatttcatcacctaatacggaaaacttaagagattttcacaatttggatgaattaggaaatttattagataaaattttttctgaaaaaaaaaaattaaatagcgatattccaattgctttaaaaatttcaccagatattgataacactattgttaaagatatatctaaaatattaatacaatataaagttaatgctttaattgtttcaaatactactgatcaaaatagagataacctgaaagaccatcaaaaatttcagaaaggcggtttatctggtaaacctttgaatgatatatcaaataaattaataaataatttttttaaaaatctaaatggacaaataaaaattattggtgtgggaggtgtggaatctggagaaacggcttacaaaaaatttttgagtggggctaattttgttcaactttatacaggcatggtttttagaggaccaaaaattgcgataaaaattaatgaagaacttaaaaaaatattaaaggaaaaaaaaataaaaaattattccgatattattggtaaattataaa

SEQ ID NO: 218257 - DNA, 925 bp, Unknown
  Bacterial polypeptide expressing nucleotide sequence isolated from the Sargasso Sea
ctgatagaaacagaaatatttggaaaaaaaatttctaacccaataggtcttgctgcgggttttgataaagatgcagaagtttataattctttgtacaaacttggttttggttttgttgaggtagggactattacacctttaaaacagtatgggaatccaaaaccaagagttttccgtttagaagaggatgaagccttaataaatagattgggctttaatagctcaggggcggatgtagttagttctagaataagatccactccacctaatggattatttggaattaatattggacctaataaagatacaaaaaatagagttgaagattatttaattaatttgagaaaattttataatttagctcattacttaacagtaaatatttcatctccaaatacagaaaatttaaggagttttcataattcaaatgaacttactgaacttttaagtgaaattgaaaatgagaaaaaaattttaaaatcaaatatacctatcgttgttaaaatttctcctgatatttatgataatgatatagaaaaaatttctgaattacttttaaaatataatatttcatctgtaataatttcaaattctacagaaagtaatagagaaaatttaaaaaatataaataaattagagaaaggtggtttatcaggtaagcctctagaagttaaatctaatttgttaattaataaattttataaaactttgagaagtaaaataaaaataattggagttggtggagttgactcaggaaaaagtgcatatgaaaaaataattaatggcgcaaacctagttcaactatatactgggatggtttatcaaggtccaaatattgcttctaaaattactaaagaactaattgaaattacaaaaaatcatagcgttaagaacatttcagaacttgtaggtattaaaaaatgat

SEQ ID NO: 218258 - DNA, 1042 bp, Unknown
  Bacterial polypeptide expressing nucleotide sequence isolated from the Sargasso Sea
atgttttcaaaaataagatcattaatatttaagttagatcctgaaacagcacatgatttagccattaaagctcttaaatttaattttatttctcaaaataagattaaaaataatgaatcaattaaaacagaaatttttggtaaaatagttccaaatccaataggtatagcagctggttttgataaagatgcagaagtatacaactctttatttaagttaggttttggatttgttgaagttggaacagtaactccaattaatcaatatggaaaccctaaaccaagaatattccgccttgaagaagatgaggcattgataaatagacttggttttaataattctggttctgaaaaagttagcacaagaattatatcaaatcctccaaaaggtttatttggaataaatattggaccaaacaaggatacaaaaagtagaattgaagattttttaatctgtctaaataaattttataatcttgctgattatttgacaatcaatatatcttcaccaaatactgaaaatttgagaagttttcataacgaaaatgaactggatgaactactgagtctaattgaaaaagaaaaaaaaaaattaaaaacttccgttcctattgtagttaaaatatcgccagatattgaagatgaaaatattaataaaatttcagatttactcataaaatataaagtaaaagctgtaataatttctaatacaacagataaaaatagacacaatttatctaacattaataaacttgaaaaaggaggattgtctggcaaacctttagaaaaaaaatctaatgaattaataaataaattttataaaattttaaaaaatgaagtaaaaataataggagtaggcggtgtcgattcaggtcagagcgcttatcaaaaaataattaacggagccagtttaattcaactttatactggaatgatttatcaaggtcctaatattgtttcaaaaataaatgaagaattaataaatattttggacaaagaaggagtacaaaatatatctgatatagtgggtagcaaaaaatgaa

SEQ ID NO: 218259 - DNA, 945 bp, Unknown
  Bacterial polypeptide expressing nucleotide sequence isolated from the Sargasso Sea
gcaaaaatgatttctctattttaagcaatgatataaatggactcagttttaagaatcctatcggaatggctgcgggatttgataaaaatgccgaagttataaattcattattcaatttaggatttggtttcaccgagtgtggaactgtaacaccaagacctcaatatggaaatgttaaaccaagggtattccggttagcatcagataaagcgattataaacagactaggctttaataataatggtattgaaaaatttttgatgaatatgagtaaatcaaacaacaatggagtccttggagcaaatattgggcccaataaagacacagaaaatttcgttgatgattatattaatttatatactcaagtagttgattattcagattacgttacagtaaacgtttcttcacctaatactaagaatttaagagagatacaagagcacgatacattgaatacactgctcagcgagttgtctcagctacgagaaaatatgaagacacaaaaaaagattattctaaaaattgatcctgatagtactaaacagcactacagcatgatacttaatttagttcagaaatacaaaatcgatggcgtcattgccactaatacaactatttctcgtcctcaagatttaagagacgagtataaagatgaagaagggggcatttcaggacagccacttaaagaattatcaaataaagtgttaggttttctctcaaaagaaacaaacggagaattgcttcttattggtgtgggaggcatttctaatgcagaagatgtttatactaaaattaagttgggagcgtcattagttcaattgtatacagcacttactttcaatggacctcaaatgataaataatattaaaaaggatttatcatatcttttgcaaaatgatggatacaaaaatatctcagatgcagtaggtagtattcattcatgaa

SEQ ID NO: 218260 - DNA, 868 bp, Unknown
  Bacterial polypeptide expressing nucleotide sequence isolated from the Sargasso Sea
aatgtttaatattttaagaccactaatttttagatttagccctgaagtagctcattctttagcgataaaagcactaaagttaaataatatttcttactcaaaacctaaagaaaatcatattttagaaacaactttttgtgaaaaaaaattatcttcaccaattggtgttgctgctggctttgataaaaatgctgaagtatacaatcaattgtttaatcttggatttggttttgttgaagtagggacaattactccaaagcctcaatttggtaaccctaaaccaagagtttttagacttgaagaggatgaagctcttataaatagattaggttttaacaattctggctcagaacgaattagtcagacaataaaggaaaataataaaaagggttttttaggaataaatattggaccaaataaagataccaaagacagagttgaggattatttaatttgttttcgtaaattttataatttagctgattatataactataaacatatcctcaccaaatacagaaaatttgagagactttcataaccaagatgaattaaattcattaattgataagctaaagaatgaaaaaaaagaattgaattcaaacattccattagcaataaaagtttcacctgatcttaatgacgatcaaatcaatgaggtatccaagatcattatggaacaagaaatagcaattattattgtttccaataccacagataaaaatagagaaaatttaaaaaatataaataaattagaaaaaggtggactgtcagggaaaccaattcaaaagatttcaaacgaggcaatttctaaattttataaaattctaaaagataaaacaaaaataatagggagtgggtgggtatag

SEQ ID NO: 218261 - DNA, 1054 bp, Unknown
  Bacterial polypeptide expressing nucleotide sequence isolated from the Sargasso Sea
atgttttcaaaccttagatctttaatatttaaaatagatcctgaaagagctcattttttagcaatccaatcacttaaacttaatttagtttcaaatatatttgatgagcataaaaatgaccctatttttaaaactaaaatttttaataaagagttaaataatccgattggtatagcagcaggctttgacaagaacgctgaggtttacaaccctttatttaagttaggatttgggttggtagaggttggtacaattactcctttaaaacaatatgggaacagcaaacctagagtttttagactagtagaagaccaagcgttgataaacagattgggcttcaacaatcatggttcggatattgtattgaacaggattaagtctaacaataaacaaggagtgttaggaataaatattggtcctaataaagattctgataaccgaataaatgattatttaataggaattgaaaaattttatgaggttgcagattatattactgttaatatttcgtcacctaatactgaaaatttaagaaattttcatgacgaaggaaaattgcaagacttattaaaaaatatttcagaaaagaaaaaaaatttaaagacaaatatacctatagtagtaaaaatttcgcctgatataagtgaaatacaaataaacttaatttccgaaattctcttagaaaacgatataagtggaataatcatttcaaatacatcagagtcatcaagagaggtgttgaaagatattcaaaaacatcaaaaaggaggattgtctggaaaacctattgagaaaaaatcaaatattttaataaataagttttataatttatttaaaggaaaaattaagattattggggtaggaggaatagactctggccaatcggcttatgaaaaatttttattaggtgcagattatatacaattatatactggtatggtatttcaaggtccaaatatagctggtagtattaaaaaagagctaaaagaattattgatcagagatggagttaagaattttaccgaaattataggaaataaaactctttcttaaa

SEQ ID NO: 218262 - DNA, 1021 bp, Unknown
  Bacterial polypeptide expressing nucleotide sequence isolated from the Sargasso Sea
atgttttataaaatcgcacagaaagtcatgtttcagatggatcctgagcgagcgcataatttagccattggcagcctgaaaatgacaggtaatagcccattgaatgcgttttatgcccagaatattgcgccagcgcccgtcagctttatgggactgacttttccaaaccctgtcggtcttgccgcgggtatggataaagatggcgaatcgatcgatgcctttcatgcgatgggatttggtcatgtggaagtgggcacagtgaccccaagaccacaacccggtaatgatttaccccgtttatttagattaaaacctgcaaaggcgatcattaatcgcatgggctttaataacaaaggtgtcgataatctggtcaaaaatttgatcgcaaagaaaaccgatatcatggttggggtcaatattggtaaaaataaagacactccggtagagcagggcaaagacgattatttgatctgcatggataaagtttatccctatgcggcctatattgcggtgaatatttcatcaccgaatacacccggattacgatcgctacagtatggcgatctattagatgaattattaagcgcattaaaaaccaagcaacttgagttggccgagaaacataaaaaatatgtgccaattgcccttaaaattgcgcccgatttaaccacggaagaaatcgaaaatattgctcaatccttgattaaaaacaagtttgatggcgcgattgcgactaacacaacgttaacccgtgacggtgtaagcggccttgcgaatgccaatgaaagtggtgggttaagtggtaagccattgactgagctttcaactaaagtgatcaaacaattagccacttgtttaaatggccagatcccgatcattggtgtcggtggtattaacagtgccgaagatgcgttagctaagtttgatgcgggcgcgactatggtacagatttactcaggttttatttaccaaggtccaaagttaattaaagaaattgttgaagcttaccgcttaaaataat

SEQ ID NO: 218263 - DNA, 1054 bp, Unknown
  Bacterial polypeptide expressing nucleotide sequence isolated from the Sargasso Sea
aatgtattcaaacttaagatctttaatatttaaaatagatcctgaaagagcacattttttagctattcaatcactcaaactcaatttagtttcaaatatatttgatgaaaacaaaaatgatcccattttaaaaacaaaattatttaatcaagatcttgataatcctatcggtattgctgcaggttttgataagaatgcagaggtatataaccctttatttaagctgggttttggatttgttgaagtaggtacagttactccattaaaacaatatggaaatgaaaaaccaagagtatttagattggtagaagatcaagcattaattaataggttaggttttaacaaccacggatcagatacaatattaaacagaataaaatctaataaaaaactaggtgtgctaggtgtaaatgtgggtccaaacaaagattctaatgatagattgaatgattatttaattggattagaaaaattttctgaagttgcagattatattacaatcaatatttcttcaccaaatactgaaaatctaagaaactttcatgatgagaataaattaaaagagttattaaaatctatctcagagaaaaaaaaacaattaaaaactgaaattcctgtagctgtaaagatttcaccagatataaatgaaaatcaaattgacttaatttcagaaatacttttagaaaatgaaataagcgcaataataatttcaaatacttctgaagcttctcgggaaacacttcaaaatatccagagacatcaaaaaggtggtttatctggaaaacctattgaaaaaaaatcaaattttttaataagtaaattctacaatttactaaaaggtaaaattaaaataattggagtaggtggtgtagactctggtaaagcagcttatgacaagtttttattaggagcagattatgttcagttgtataccggcatggtatttcaaggaccaaatattgctgggatgattaaaaaggacctaaaagaattactaataagagatggtgtcaaaaatttcacagaaattgtgggaaataaaactgtttcttaa

SEQ ID NO: 218264 - DNA, 1012 bp, Unknown
  Bacterial polypeptide expressing nucleotide sequence isolated from the Sargasso Sea
gttggcccacagtcttacattgaaaggactcagtttgggatctcgcttgatcccatcttccaaccacgatgactcacgcttggcggttgaggcgctcggactaaatttttcaaacccgctcggtatggctgccggctttgataaaaatggagaggttcctgatgcgttgttaaaacttggttttgggttcactgagataggtaccgttacgccagaacctcagattggaaacccaaagccgcgtgtattcagattggttaaagatcaggcgttgattaatcgcttgggttttaacaacaatggacaaaaacacttagtagaccgattaaggcaaaggtctgaggtaaaaaacggttctcgaagaattggggtgattggagtaaatctaggtgccaataaagaatcccttgatagaattctcgactatggcgctggggcaaaggctttatctccctatgcggactacttagtcgtaaacgtctcatcacccaacaccccaaatttaagaggccttcaatctgctgaggcgctaagcgccatcattaatcaggttagatcgtcaatggtcaaagaagtgccggtccttgtaaaaatcgctcctgatctcaaaaaaaacgaaatagaggaaattgcagagatcgcgagaataacatcggttaatggaataatagtatcgaacacaacaatagaacgaccgaaaaatattcaggaccagcataagaatgaggagggagggctatcgggaaatcctcttttcgaaccatctacccgcttgctctctcagctctaccatctgacaaaaggccagaccaccctgattggtgtgggtggagttggctccgcagaggacgtccttaaaaaaattcgttcgggcgcctctctggtgcagctctacactgcgctagtctataaagggcccggtttgataaaaaagataaagcatgatcttgtcgagttgttagagcgggacggcttacagaatatctccaacgctatagggatagacgtatag

SEQ ID NO: 218265 - DNA, 1035 bp, Unknown
  Bacterial polypeptide expressing nucleotide sequence isolated from the Sargasso Sea
aatgttcccttttttaaaaccctttatttttggtttagacccagaagtagcccatgatttagcaattaagtcgttaaaactaaatgttattcctgagaatttttttaaagttgaaaatgaaaatatattagaaacaaatatgtttgataaaaaattaaaaaatccaataggtatggccgcaggctttgataaaagtgctgaagtttataactcactttataaaattggctttggttttgttgaggttggcaccattacaccaaaaagacaatttggaaatccaaaaccaagaatatttaggttagaaaaagaccaagcgttgataaatagacttggttttaataacgatggtttagaaaaaatatcaaaaagaatttcaaaaaacaaacccagtaaaatcttgggcgtaaatattggtccaaacaaagataccagaaataaaattgatgactttattatttgtttatctgaacttcatagtcaagcagattatataactataaatatttcatcacccaacactgaaggtttaagagattttcacgaaaaaaaatcattatctaaattattggaacaaattaatagtctaaagttaaaaaaaaaaattaataaaccaatatttataaagatctcaccagatattgacgataaagacattagccaaataaatgaaataattcttaaacataatataagtggaataattatatcaaattcaactgatagaaatagagctggcttatatgataataataagaatgaggaaggagggctttctggtttgcctttaaaaaatttgtcaacaaagttgattaaaagattttatagagaaactaaaggaaaaattcaaattattggagttggaggagttgactctggtcaaagtacttttgaaaaaattacatctggagcaaatgctgttcaactttatactggaatgatttacaagggtccaggaatcgtgaaagaaattaaaaaagaactaattgaaattttaaagaaagagaaaattaaaaatattacagcagcgatagg

SEQ ID NO: 218266 - DNA, 1036 bp, Unknown
  Bacterial polypeptide expressing nucleotide sequence isolated from the Sargasso Sea
attgataaaaaatttaaatcctgaattttctcattatgtaactttacaactactaaagttaaatttatttacaggaaataattttaatgatcctattttgcatcaacatctttttggttttgattttagtaaccctctaggtttagcagctggatttgacaaaaatgctgaagttataaaacctttacttaatctaggttttgggtttattgaagctggaacagttactccaaaatatcaatttggcaatgaaaggcctagagtttttcgtcttaaagaagataaagcaataataaatcatttaggatttaataataaaggaactacttttgttaaaaaaaaattaaaaaaactaaatttaagttccttatccaaagggattgttggcattaacataggaaaaaataaagaaactttgaatgatattgatgattatatctattgtttacaagagttagggccttttgctcattatgttactgtgaatatttcttctccaaacactccaggtttaagagaattacaaaatagaggaagaatagaaaaactagtacagactctccaaaaaaaacaagaggaaatgaattctttagaaaatactcctattttttttaaaatagctccagatattgatgaagaacaaataagagatatagcattaattagtttagccaataatatagatggtttagtaattagcaattctacaattgaacgagctgatacattaaaatcaaatttaaataatgaaataggtggtttaagtggcaagccattgtttttgaaatcaactatgatattaagaaaaatgtatacattaactaatggtcaaattcccttaataggagtaggtggtatcaataatgctttggaatgttatgaaaaaattaaatctggagcttctttggttcaattatattctgctttaacttttgaaggtccaaaaattattaataagatattaatagatttatcaaatttactaaaaactgatggatataaaagtattaaagaagctataggcaaagatacgtga

SEQ ID NO: 218267 - DNA, 904 bp, Unknown
  Bacterial polypeptide expressing nucleotide sequence isolated from the Sargasso Sea
aattgataatcctattggaatagctgcaggctttgataaaaatgcagaggtttataattctttattcaagcttggttttgggtttgttgaggttggaactgttaccccaattaagcagtatggcaatccgaaaccaagagtctttagacttgaagaagatcaagctctaattaatagattgggttttaatagctcaggtgctgaaaaggtttatacaaatatttcttccaatctgccaaatggattatttggaataaacataggaccgaataaagaatcaaagaatcgattcgaagattatcttataggtttaagaagatttcataaaattgctgattatttaactattaatatttcttctcctaatacggaagatcttagaaaatttcataatgaagaggaattatataagctactaaatttaattattaatgaaaaaaataaacttaaaactaaaattccaattgcggtgaaagtctctcctgacttaaatgatgagaatattgataaaatttcagaattacttcttaaattcaaaatagatgcagcaataatttcaaatacaacagaaaaaaatcgtgaaagtcttaacaatattaataaagttgaaaaaggaggcttgtctggaaagcctatagaaaaaatgtccaatattataattaataaattttttaataaacttgacaataaagtaaaaataataggagtaggtggtgtagattcaggactaagcgcatatgaaaaatttttgcatggtgcaagtgcagtacagctttacactggcatggtctatcaaggtcctgatatagcttacaaaattggaaaagatttaatacaaattttgaaaaataaaaatattaaaagtatttcttctgtaataggaaaaaagaataatcttgactga

SEQ ID NO: 218268 - DNA, 896 bp, Unknown
  Bacterial polypeptide expressing nucleotide sequence isolated from the Sargasso Sea
tatgttctattcactggcgcgttctttaatgttttgtacagatgctgagttttcacatcacctggcccttggcagcttaaagcatttaaaaaataccccggcatcactgctgtggcgtcaggatttaccgaaaaaacctgtgacagtagccggtattcattttgataatcctgtgggcttagctgcgggtttggataaaaacgccgattgcatcgacgcttttggccagatgggttttggttttattgaagtaggcactgtgacaccacgacctcaggtgggcaacgacaaacctcgtttgttccgtttacctgaagcgaacgccattattaatcgcatgggatttaataacaaaggtgtggattatctggttgagaacgtaaagaaatcgagctacaaaggtgtgcttggcatcaatatcggcaaaaacaaagacacacctaacgagcagggcaaagacgactatatcgaatgtatgcgtaaggtttatgctcacgccagctacattacagtgaatatttcttcacctaatacaccgggtctgcgggatctgcaatttggtgatgcgttatttgatttgctgcaggcggtgaaaaacgagcagctggatctgcaggcccaacaagacaagtacgtgccggtttttgtcaaaattgcacctgatatggacgaagtcgcagtgcagcaagtggctgagactttgcttcgcagtaaaatggacggcgtgattgcaaccaacacgaccttggataaaagctcagtgcaacacctgaaatatggcaatgaaatgggcggtttaagtggtttgccggtgcagcagaagagcacggagattatccgtcagttccgcgcagctttaggcccacagatgccaattattggggtaggtggcatag

SEQ ID NO: 218269 - DNA, 1051 bp, Unknown
  Bacterial polypeptide expressing nucleotide sequence isolated from the Sargasso Sea
aatgttttcttttataagaccttttatatttaatctagatccagaaaaagcacatgatttagcaattaaatcccttaaattcaatttcttaccaagcaatttattttcagttcaaggtgaagaaattttaaataccagtcttttcggaaaagaaattagtaatccaatcgggctagcagcaggttttgataaaagcgcagaggtttataatgaaatatttaaaatcggttttggatttgttgagattggaacagtaaccccaaaacaacaatttggaaatgaaaaaccacgtgtctttagattagaaaaagatcaggcgcttataaatagacttgggtttaacaatgatggatctaatgagattagaaagagaatagaagctaatattccatcaagccttttaggaattaacataggacctaataaagatacagataacatgactaatgattttttgaaatgtgctgaaattttttttccaattggcgattacataacaataaacatttcctcacctaacaccaaaggtcttagagattttcataatgaagatgatttaaaaaatctactttcaaaaatcaacgaaataagagaaaaaagtaattttaaaaagtcttttttattaaagatatcacctgatttggaagactctcaaatctcaggaatagtaaatttaattttggagtataaaattgatggtattattttgacaaataccaccaataaaaatagagaaagtttgattgatgtaaatagtaaggaagccggcggattgtctggaaagcctattaaggaactatcaactgaattcgtcaaaaaattttataaagagctaaatggaaaaataccaattatcggtgttggaggggttgactcaggagaatctgcctttgaaaaaattgctgcaggtgcatcagcggttcaattatatacaggtttaatttataaaggtcctaatattgtaaaagagatcaaaaaagatttaattcgaattttgaaaagcaaaggttttactaatataaataaggctgtaggttcttctttaaattaa

SEQ ID NO: 218270 - DNA, 985 bp, Unknown
  Bacterial polypeptide expressing nucleotide sequence isolated from the Sargasso Sea
ttgtttctaaaaatttttaaattacttccgcctgaaacggcccattcaatttctttaaactctttaaaattactttataaattaaaacttctaaaattttttactaaacagaatttcaaaaataatgaatattactttgaaggtatgatttttaaaaatcagcttggcactgcagctggcttagacaaaaatggtgactttattgatgctttgggagagcttggatttggttttcttgagattggcacaacaacacctttacctcaagatggaaacccaaagccaagagtttttagaaattacaaagaaaattcaataattaataggctaggctttaacaataagggagttgattatttagttaataatttaaaaaagagaaaatataagggcattgttggagtcaatattggagctaacaagacatcttcaggtaaacaaagaatagacgattttttaatatgtttagaaaaagttcataaatttgctgactacattactatcaatatttcttctcctaacactccaaacttaagagaattacataataaagaaaatcttaaaattttgatcactgcgcttgagaataagtcaaatgaaattaaattaaatataccaatatttataaaaatttctcctgatgaatctgaccaaattcttgataatataattacagttgtatccaactcattcattactggaataattgcaacaaacaccaccatttctaaatcaaaaataataaatgatgaatttaagcaaattgagggcggcttatcaggacagtttttaatggatgaatctactaaaagattgtcatatatacgaaataaatctaataatatgccattgattggtgttggcggagttatgagtagagaagattttttagaaaaaattgatgctggtgctcaccttgttcaactatatacaggctttatcattaaaggccctaatttaattaatcaaatcttaaaagattagt

SEQ ID NO: 218271 - DNA, 880 bp, Unknown
  Bacterial polypeptide expressing nucleotide sequence isolated from the Sargasso Sea
gaaatattcagatttttttttcagttcaaagatcctagattagaaagagtggtttttgggattaaatttaataatcctattggcttagccgctggatttgataaagatgctaagtttattaaagaattttcaaactttggttttggctttattgaaattgggacattaaccccaagagctcaaattggtaattctaagaagagagtttttagattaactagtgacagtgctcttgttaatcgtttgggatttaataatgatggagttgatgcagcgatcaaaaaaattaagagagtaaagggaataataattggaggtaatattggaaaaaatagagatacaccaaacagtgaagccttaaatgattataaatattgctttattaaacttcatccatatgtagattacttcgcaattaatcttagctcccctaatactcaaggactaagggaattacaggagaagaaaaacttacgtaaaattttatctggacttaaaaaattgaatttgaattttaaaattcaaaaacctattttattgaaaatagatccagatttaaatgatgatcagcttacagacgtaatagatgttgtcaaggaaacaaaaattgatggcgttatagcttcaaatacaacaacaaaaagaattaatctaaaatcagatattaatttggtttctcaaaaaggcgggctaagtgggaagccattatcaaaaagaagtactgaaattatcaattttttacataaaaaaagtaatggatcatttccgataattggtgttgggggagtacatagtccagatgatgccatagaaaaaatcagagcaggagctctcttgttcaattatatactggatttatatacgaaggcccctttttaat

SEQ ID NO: 218272 - DNA, 1054 bp, Unknown
  Bacterial polypeptide expressing nucleotide sequence isolated from the Sargasso Sea
aatgttgattaatttattaaggttgttaccccctgaaactgctcatgaattaacaataaatctacttagatcaaatcttatattaaaaaggaaacctacaaaattatttaagagtcttaaacaaacaatactaggtataaattttaaaaatccaataggattggcagctggctttgataaaaatgctgaggtaataaatcaaatgttttcttatggttttggttttgttgaaattggaacagtgaccccaaaaatacagctaggtaatgaaaagccaagaatttttcgtttggtagaagatgaagctataattaatcacttaggttttaataataaaggaagtgaaaaaattttatcaaatataaaatatttttatgaaaacaaacacattaatgaaatagtaggtattaatattggaaaaaataaatcaacacaaagcgatatagatgattatttatattgtgttgaaaaacttggtatgtttagtgattatataactattaatatctcatctcccaatacacctggccttagagacttgcaattacgtggaagaatagagctattagttaaaaaaattcaagcaaagcaatcagagattaaagaattggtaaaaaaacctatttttattaaaatctcacctgatttaaatgatgaacaattaagggatatcgctttaatgtcacttgctaataatgttaatggtttaataatttcaaattcaacaactcaacgtccagacactttaatttctagttataaaaatgaattaggaggattaagtggtaaaccaatatttttaaattcaacaattcttttaaaaaaaatgtattcccttacaaatggtcagattacacttgtaggagtaggaggagtttcaagtggtcatgaatgttatgaaaaaataaaagctggagctagtttagttcaactatatacagcattagtttataaaggtcctaaaataataaataaaattttaaaagaacttgatgaattaattataattgatgggtatcaaaatatatcagaggctattggaaaatcatcttaa

SEQ ID NO: 218273 - DNA, 708 bp, Unknown
  Bacterial polypeptide expressing nucleotide sequence isolated from the Sargasso Sea
aatgttttcaattttaagacctctcatatttaacttagaaccagaaatagctcatgatttagctattcaatcattaaaaaccaaccttatccccaaaggattttttagagttgaaggagaagaaatgcttgagactgacttattaaaaaaaagaattaaaaatccaattggtttagctgcaggttttgataaaagtgcagaagtatataatcctcttttcaaactaggatttggtttcgttgaaataggaactgttacaccaagaaggcaattaggcaatcctaagccaagaatttttagactagaaaaagataaagccatgattaacagacttggttttaataatcacggggcagatgtgattgcaagtcgtatagaaaaaattaaaccagatggtattttaggagtaaacattggacctaacaaagactctttaaataagcttgaagattatttgaccgctcttacatctttgcatcatatatctgactatattacaataaatatttcctcacctaacacggaaggtttacgtgattttcacaacaaggatttaatgcaaaatttatttaatcaacttaataaattaaaatctttaaaaaaaattaagaaaccactaatgattaaaatttcacctgatatagatgataaaaatataagtgaaattatagagcttatattaaatttaaaattgatggagttatcata

SEQ ID NO: 218274 - DNA, 1054 bp, Unknown
  Bacterial polypeptide expressing nucleotide sequence isolated from the Sargasso Sea
atgttttcaaatttaagatctctaatttttaaacttgatccagagacagcccatggtttggcaataaagtcattaaaatttaattttgtgccaaatgttttggataaaaataaaaatagccatttatttaagactaaattatttgaaaaagaaatagaaaatccaattggaatggcagcaggatttgacaaaaatgctgaggtttataattctttatttaaattgggatttggttttgtggaggtgggcacagttacacctcttaaacaatatggtaaccccaagccaagagtttttagattagtcgaagatgaggcattaattaatagattgggttttaataatttaggtgcaaaaaacattgttgataggatctcaagtaataaacaaattggtttacttggaattaacataggtcccaacaaagatacaaatgatagattgaaggattatgttgaatgtttaaaaaccttccatgaatttgcagactatattacgattaatatttcatctcccaacaccgaagagctgagaaattttcatgatcaggaaaaattgaatagtttattaaatataattaatagtgaaaaaacaaaactaaattcaaaaattccaattgtagtaaaagtctcaccagatattaaagataaggaaatacccaaaatttctgatgttcttttaagcaataatataaaagcagtcattttatcgaacacctctgactctactcgagataaattaaatgacattcaaaagcatcaaaaaggaggtttgtcaggtaaaccaatagaagaaaaatctacaatgctgattaataaattttataaaactcttggtaataaaattaaaattattggagttggtggagtagactctggaataagtgcgtacaataagtttttagctggcgcgagttatgttcaactttatacaggtatggtatacagaggaccaaatattgtaaaccttattaaaaaagagcttaaggaattattgataagagatggagttaaacattatagtgaaatcatagggaaaaaaacaacttcttaaa

SEQ ID NO: 218275 - DNA, 613 bp, Unknown
  Bacterial polypeptide expressing nucleotide sequence isolated from the Sargasso Sea
aatgtattcaaatttaagatctttaatatttaaaatagatcctgaaagagcacattttttagcaattcaatctcttaaactcaacttagtttcaaatatatttgatgaaaacaaaaatgatcccattttaaaaactaaattatttaatcaacatcttgataatcctatcggtattgcagcaggttttgataagaatgcagaggtatataaccctttatttaaattgggttttggatttgtcgaagtaggtacggttacaccattaaaacaatatggaaatgaaaaaccaagagtatttagattggtagaagatcaagcattaattaataggttaggttttaacaatcatggatcagatacaatattaaacagaataaaatctaataaaaaactaggtgtactaggtgtaaatgttggtcccaataaagactctaataatagattgaatgattatttaattggattagagaaattttccgaagttgcagattatattacaattaatatttcttcaccaaatactgaaaatcttagaaattttcataaagagaataaattaaaagagttattgaaatctgtctcagagaaaaaaaaacaattaaaaactaaaatt

SEQ ID NO: 218276 - DNA, 1126 bp, Unknown
  Bacterial polypeptide expressing nucleotide sequence isolated from the Sargasso Sea
atgatttggaaattaattactttttttgtaagaaaacttgatccagaaattgctcataaattaactataaaatctttaaaacttggtttacatccaagattaaaccaaagtgaaatttcaattaaaattggtgatttgatttttaaaaatttactgggtgttgcagctggttttgataaaaatgccgaggtaataaacaaaattcattttttgaattttggttttactgaagtggggactatcacaccattacctcaatatggcaatccaaaaccaagaatttttaggttagagaaagataaagcgataataaatagaaatggttttaacaatttaggaatgttagaggcaaaaaaaaaattagaggattatagaaaaagattcccagtcggaagtgattttcttgttggtgttaatatcggtcccaacaaagatagtgaagataggtttaacgattataaatttcttgctgaaaatttgtcagagtatgctgattatatttctattaatgtatcttcacccaatacaccaaacttaagaaagcttcaaaacaaagagaatttagaaaaagttataaaatttgttaaggatggtgttgccacttctagagctttgaataaaaaactacccatttttttgaagattgctccagatataaataagcaaacattgaattcaattattgaaacagctcattcacaaaaaatttttgggatgattatttctaatactacgttagatagagatagtaatctaaaatcaaaaaaatctaatgaattaggaggattgtctgggaagccattatttaaaaaatcaacggctattctatcagaagcaaacaaaataattaaaaataaaaattataaattatttttaattgcagctggtggagtaacagacactacgactgcatatgtaaagattttgtgtggggcacatttagttcagttatattcttctttaacttttgaaggacctttagtagcaaataaaataataagtggcatgttgaaattaatgaaaagagacaatttaaacaatatttttgatatagtaggaattattgataaccctaaagaagctatgaatattgcaattagtggttttaaaaaatccaaaaattaga

SEQ ID NO: 218277 - DNA, 1039 bp, Unknown
  Bacterial polypeptide expressing nucleotide sequence isolated from the Sargasso Sea
atgtatagtattttaagaaaaattcttttcctttttgatgctgaattaatacatgaattttctgtccactcaataaaaatttttaataaaatacctttaattgacattctgattaaaaagtttttttgtataagtgataaaaagcttgagaggaatatcttaggtttaaaatttaataaccctgttggtttagctgcaggatttgataagaatgctgagtgttacaatgaattctctaattttggatttggctttatcgaaataggaacagttaccccaatgcctcagccaggcaatcccaaaaaaagaatttttagactagctgaagataaatctttaattaatagacttgggtttaataataaaggaatatcagaggtggttgataatttaaagaaagaaagagatataattattggagcaaatattggtaaaaattattttactcaaaatagtgatgcccatagcgattatttgaaatgtctttcagagcttaatgaatttgttgactattttgcaattaatattagttctcctaatactaaaggtttaagagatttacacgataaaagtcttttaaaaccattcttagaaaaactagtaaaattcaataataaacaaatgaataaaagacctttgcttcttaaaatttctcctgatttgaatgaagagcaaatagccgatattgttgttttaataaaagatttaaagctagatggtattattgccacaaatactacagtttctagagatggggctacttcgaaacataaaacccaggaaggtggaatgagtggtaaattactaacacataagagtaacaaaataatcaaatatttaagaaaaagcttgggagacaattttccaattattggagttggaggtataatgagcgcaaatgatgctattgagagattaaactcaggagcagatctaattcaactatatacaggctttatctacaaaggaccttctctaataaaaaaaataaataacttaattttagatcaagaattaaataaaaattatgaaaaataat

SEQ ID NO: 218278 - DNA, 647 bp, Unknown
  Bacterial polypeptide expressing nucleotide sequence isolated from the Sargasso Sea
aatgtttaaaaagttaagaccaataatatttaaatttagtccagaagttgcgcattctttagcaatcaaagctttaaaaacaaacttactaccatcacataaattaaataatccatccacactaagtacaaatttatttggaaaaaatatcaaaactcccgttggagttgccgctggatttgataaaaacgcagaagtttataatcctttgtttaatttaggatttggttttgttgaagtaggcacaataaccccaaaaccacaatatggaaatccaaaacctagagttttcagactagaggaagacaatgctctaattaatagattaggatttaataattctggatcagaagaagttagtagaagaataaatggcaatactcccaatggttttctcggaattaatattggcccaaataaagactcagataatagaattgatgactatataaaatgttttaacaaattttataatctaggtgattatataacaatcaatatttcttccccaaatactgaaaatttaagagaacttcataataaaaatgaattaaaagaattgctggatgcaattaatgaagaaaaaaataaaaaaaaatctaatattccaattgcagtaaaaatttctccagacataaaaaatgatt

SEQ ID NO: 218279 - DNA, 1048 bp, Unknown
  Bacterial polypeptide expressing nucleotide sequence isolated from the Sargasso Sea
aatgttttcaaatttaagatctttaatttttaaattagatcccgagacggctcatagtttagcgataaagtcactaaaatttaattttattccaaatattttagatgaagaaaaaaataatcctctttttaagactaaattatttaataaagaaatagaaaatccaattggtatggcagcaggatttgataagaatgccgaggtatataattcattgttcaatttagggtttggtttcgtcgaagtaggaactgttacaccattagaacaatacggaaatcccaaacctagagtttttagactagtagaagatgaggccctgataaatagacttggtttcaataatctaggttcaaaaaatattgtagatcgaattaaaagaaataatccaactggattacttggaataaatattggacctaataaagactcagaagatagaacaaatgattatatacagtgtttaaaaatatttaatggggtctctgattatattactgttaatatttcctcaccaaataccgaagatttaagaaactttcatgatcaaaaaaaattagatgatcttttaaaactaatagaaaaagagaagagagatcttaactctaaaacacctatagcggtaaaagtatcaccagatattaatgataaagaaattatgaaaatttctgaagtgcttttagataacaagatagaagctgctattatttctaacacatctgatacaacaagagaaaatttacaaaatactcaaagccatcaaaaaggaggattatccgggaaacctattgagttaaagtcttcagagttaatcagaaaattttataaagttttaaaaggcagaattaaaattataggcgtaggtggtgtggactctggcagatctgcttatcaaaaatttttagcaggagctgattatttacaactttatacaggcatggtttttagaggtccaaatattgttggtctaattaaaaaagaactaaaggaaatactattaaaagatggtgtaaaaaactttaatgaaatagtaggaaaaaaggattag

SEQ ID NO: 218280 - DNA, 1036 bp, Unknown
  Bacterial polypeptide expressing nucleotide sequence isolated from the Sargasso Sea
ttgataaaaaatttaaaccctgaattttctcattatgtaactttaaaattacttaagctaaatttatttactggaaataattttaatgatcctattttgcatcaacatctttttggttttgattttagtaatcctttaggtttagcagctggatttgataaaaatgctgaagttataaaaccgttacttaatctaggttttggatttattgaggctggaacagttactccaaaatatcaatttggcaatgaaaagcctagagtttttcgtcttaaagaagataaagcaataatcaaccatttaggatttaataataaagggactacttttgttaaaaaaaaattaaaaaaactcaatttaagttcattatcaaaaggtattgttggtattaatataggaaaaaataaagaaactttaaatgatattgatgattatatttactgcttacaagagttaggaccttttgctcattatgttacagttaatatttcttctccaaatactccaggcttgagagaattacagaatagaggaagaatagaaaaactagtccagactcttcaaaaaaaacaagatgaaatgaattctttggaaaatactcctattttttttaaaatagccccagatattgacgaagagcaaataagagatatagcattaattagtttagctaataatattgatggtttagtaattagtaattctacaattgaaagacctgatacattaaaatcaaatttaaaaaatgaaataggtggcttaagtggcaagccattgtttttgaaatcaacaatgatattaagaaaaatgtatacattaactaatggtcaaattccattagtaggagtaggtggaatcaataatgctttggaatgttatgaaaaaattaaatctggagcttctttggttcaattatattctgctttgactttcgatggtccaaaaattattaataaaatattaatagatttatcaaatttacttaaaactgatggatataaaagtattaaagaagctataggcaaagatacatgaa

SEQ ID NO: 218281 - DNA, 1042 bp, Unknown
  Bacterial polypeptide expressing nucleotide sequence isolated from the Sargasso Sea
aatgtttaaaaaaataagaccttttatatttaaatttagcccagaagttgctcactctttagcgatcaaaacattaaaatcaaatttaataccttcaagtaaagctattgattctgaaattttgaaaactaagctatttggtaaaaatatcaaaaatccaataggtgtagctgctggatttgataaaaatgcagaagtttataatcctttatttaatttaggatttggttttgtagaagttggaacaattactcctaatccacaatatggaaacccaaaaccaagagttttcagattagaagaagataaagcattaataaatagattaggttttaataactctggatcggacgaaataagtgctagaataaaaaaaaattcagctcatggtttattaggaataaatattggaccaaacaaagatacaaaaaatagagtagaagattatttaaaatgttttagaaaattttataatcttggagattatataacaataaatatttcatctccaaatacagaaaatctaagagattttcataataaaaatgaactagaagaattattggatgctattcataaagaaaaaattaaattaaaatctaatattccaatagcagttaagatttcaccagatatagaaaataataaaattgaaagtgtggctgaaatattaaataaatattttgtagatattgctatcatttcaaatacttctgatatgaacagagatagtttaaataatataaacaaattagaaaaaggaggtttatcaggaagacctatagaaaaaatatctaatgatctaataagaattttttataaattacttggaaaaaatattaaaattatcggagtagggggcgttgactctggaaaaggtgttttagaaaaattattgaatggagctagcttaattcaactttatactggaatggtttataatggacctaatatagcatctaaaattagcaatgaattaaatgatattttaaaaaatcagggaataaaaaatatctcagaaataataggatcaaaaaattga

SEQ ID NO: 218282 - DNA, 397 bp, Unknown
  Bacterial polypeptide expressing nucleotide sequence isolated from the Sargasso Sea
tttgagattttttcttaaaatttttagacttttaccacctgaaatcgcacataagattgctctagatctactgaatttatctcacaagttaggtattctgagtttcatttttagaaaaccaaaagatgagaattgctcatttgctggaatgaatttaagcaacagacttggaactgcagcaggcttagacaaaaatggagattatattgattgtcttggagctttgggatttggttttttagaggttggaacagttacacctatgccacaatatggcaatccaaaaccgagggtatttagaaattttgatgataattctattattaatagattaggctttaataatagaggggtcgatcgacttgttaagaatttaaagtcaagatcatttaacgga

SEQ ID NO: 218283 - DNA, 991 bp, Unknown
  Bacterial polypeptide expressing nucleotide sequence isolated from the Sargasso Sea
ttgagtttttttcttaaactatttaagttactctcgccagagttatctcattctttttcattaaattccttaaatattttatataaacttaagattcttaaattttttattaaaacaccatcaaatgaagaatgctttgattttgttggcttaaaatttaaaaatcgattaggaactgccgcaggtcttgataagaatggagattatatagatgcattaggtgagcttggatttggttttttagaagttggcacaattactcctaaggcacaaaaaggaaatagtaaacccagagtttttagaaattttaaagaaaactctattattaatcggttggggtttaataacaaaggcgttgatcatttagttaaaaatttaaagaacagatcatatgaaggcattattggagttaatattggagccaataaacaatctgaaggccctgaaagaatcaatgattatttgatatgtttagagaaagtttataaacactcagattacatcacaataaatatatcttcaccaaatactccaaatttaagagaacttcataataaggatgagcttaaaaatttaatcgaagctatagactcaaaagtaatcgagctagatattgctgcgcctatttttttaaaaatttcaccagatgaatcagatctggtaattgatacggtaattgaaatcttggatagctctcaaatttcaggaattattgctaccaataccacaatagataaatcaaatattataaacaaagaatttagatctattgatggtggtttatcaggtgcgccattgatgggcaaagctactgataaactttcgtatatatatactagatcaaatcatttacctcttattggtgtgggaggcgttacatctaagaaagattatgagatgaagttacaagcgggcgctcaactagtacaaatttatacaggctttataatcaaaggcccaaaaatagttaatgaaatattaagtaactaag

SEQ ID NO: 218284 - DNA, 941 bp, Unknown
  Bacterial polypeptide expressing nucleotide sequence isolated from the Sargasso Sea
aatgttttctttcctaagaccatttatttttaatttagacccagagactgcacatgatttagcaattaaatcattaaaatacaatgtgcttccaaaaagcttatttactgttgaagatgaagaaattttaaatacaaaattgtttggaaaaattatagataatccaattggtctagcagcaggttttgataaaagtgctgaggtttacaatgaaatttttaaaatcggttttggttttgttgaggtaggaacagtcaccccaaagaaacaatatggaaatcaaaaaccgagagtttttcgtttagaaaaagatcaagcacttattaatagacttggctttaataatgatggttcagatgctataaaaaaaagaattgaacataatgcacccgatggtctcttaggtattaacattggtccaaataaagatacagacaatatgtacaatgattttttatcatgcgccaaaacttttttccctattggagattatattacaataaatatctcttctccaaatacggaagggttaagaaattttcatgaaaaagaaaatcttgaaaagctattaattaaaataaatgaaattagaaaagaaagtaatttcaaaaaatcctttttattaaaaatttcacctgatcttgacgagtcctctataaataatattgttgatttatcactaaaaaataatattaacggaataatattaacaaacacttctgataaaaatagggacaaattaatagataatcaaaaaaatgagaaaggtggtctatcaggtcaacctataaaagatttatctacaaaaataatcaaaaaattttataaaaaactaaatggaaaaataccaataattggagttggaggagttgactcgggaaatgctgcttttgaaaaaatagccgcaggagcttctgcgatacaattatataccggaatga

SEQ ID NO: 218285 - DNA, 991 bp, Unknown
  Bacterial polypeptide expressing nucleotide sequence isolated from the Sargasso Sea
tttgaattttttcctaaaaatatttaaatttcttcctccagagtttgctcattctgcttcactaaattctctaaatttattacataaattcaagctattagttttatttaggaacaaaattattaataaaaatgaacacataatttttggaatgaaattcagaaataaacttggaacagcagctggtttagataaaaatggggattatatagatgcattaggtgccctaggatttggtttcttagaggtaggaaccgttactccaaaacctcaatacggtaatcctaaaccccgtatatttagaaactatccagaaaattcaataatcaacagacttggttttaataataaaggtattgattatttggttaacaatcttaaaaaaagaaaatatggtggagttgtaggagtaaatattggcgcaaataaatcctctaaaggtattgaaagaataaacgactacttgctttgcattgaaaagattcataagtttgcagattacataacaataaatatatcttctcccaatacacctgatttgagagatttacatttgaaagaaaatctacaaaatctaattacttcagtagaaaacaaaattgccaagcttaattttaaaaaaccaatttttttaaaaatttctccagatgagactgacgaatctattgaaatgataattgatttagttaaaaaatcatctataacaggactggttgctacaaacacaacaatttataaagcaaatcttaataataaaaaattaaaaaaagaagatggtggggtttcaggtcagcctttgatgtataagtctacaaataaaatttctctaataagatcaaaatgttctgacattccaattattggagtaggcggcgttatgagtaaaaaagattatttatctaaattaaatgctggtgcagatttagttcaaatttatactggatttatcataaaaggcccaaatttgattaatcaaatagttagagattaa

SEQ ID NO: 218286 - DNA, 1042 bp, Unknown
  Bacterial polypeptide expressing nucleotide sequence isolated from the Sargasso Sea
aatgtttaatattataagaccaataatttttaaatttagtcctgaagtagcacattcactggcaataaaagcattaaaattaaataacatttcttacactaaacctaaaggaagccaaattttagaaacaactttttgtgaaaaaaaattaccatcaccaattggggttgcagccggatttgataaaaatgctgaagtatacaatcctttgttcaatcttggatttggttttgttgaggttgggacaattacacccaaacctcaatttggtaaccccaaaccaagagtttttagactagaagaagatgaggcccttataaataggttaggtttcaataattctggttcagaagaaattagtagaaggattagggaaaacgataaaaaaggtctcttaggaataaatattggaccaaacaaagactcaatgaatagagttgaggattatctaatttgttttcgcaaattttataatttagctgattatatcacgataaatatttcctcaccaaatactgaaaatttaagggactttcataatcagaacgaactaaatttattgattgataaaataaaaaaagaaaaaaaagaattaaattctgaagttccaattgcgataaaagtttcaccagatcttaatgatgatcaaattaatgaagtgtccaagatcattatggaacaagaaataggaatcattgttgtttccaataccacagataggaatagagaaaatttaaaaaatataaataaattagaaaaaggtggtctgtcaggcaaaccaattaaaaatatttcaaatgaggtaatatctaaattttataaaattttaaaaaataaaacaaaaataataggagtaggtggtgttagcaatggacacgatgtttttgaaaaaatcacctctggtgcaactcttgttcaattatatactggaatggtttatagaggtcctcgtatagcttcaaaaataagtaacgaattaatcgatttattaaaaaataagggttttaaaaatgtttcagaagctattggaactaaaaattaa

SEQ ID NO: 218287 - DNA, 928 bp, Unknown
  Bacterial polypeptide expressing nucleotide sequence isolated from the Sargasso Sea
tgaaatattacaaactaacttttgtggtaaaatgctttctagcccaatatgtgtagcagctggatttgataaaaatgcagaagtttacaatcctctatttaatctcggttttggttttgtagaagttggcactattaccccaaaacaacaatatggaaatccaaaacctagggtatttagattggaagaagatgaagctttaataaatagacttggatttaataactctggttctgaagaaattagttctaggatgtctaaagaaattaaaaaaggaattcttggaataaatataggacctaacaaagatactgaaaatagaatagaagattatattaattgttttaacacatttcatggtttagcagattatataacggttaatatttcttcgccaaacacagaaaatcttagagattttcataaccgagatgagcttaattcactgataaaagaattgaaaaatgaaaagggaaaattaaattccaaagtcccgattgcagtaaaagtatctccagatttaaatgatgaacaaattgaagtggtttcaaacattctattagatcaggaaatagaaattattattgtttcaaatacctctgataaaaatagggaaaaattgaaaaatattaataaattagaaaaaggaggtctttctggcaaacctctttatcatgtttcaaataatataattggtaaattttataaacttcttggcaaaaagataaaaataattggagtaggaggggtagatacgggtgaggctgcttttgaaaaaattattagaggagctagtcttattcagctttataccggtatggtttataagggtcctggtatagcttcctcaattagttctgaattaattaatatattgaaaaataaaggttttaaaaatatttcagaggcggtgggatcaaaatattga

SEQ ID NO: 218288 - DNA, 493 bp, Unknown
  Bacterial polypeptide expressing nucleotide sequence isolated from the Sargasso Sea
catgtactccctggcccgcgagctgctgttcaaactgtccccggaaacctcccatgagctgtccatcgatctgatcggtgcaggtggccggctggggctcaatggcttgctgaccaaggcgccgaccagcctgccagtaaacgtgatggggttgcagttcgccaatccggtcggtctggctgcagggctggacaagaacggcgatgccatcgatggtttcgcccagctcggcttcggtttcgtcgagatcggtaccgttaccccgcgtccgcagccgggcaaccccaagccgcgactgtttcgtctgccggaggccgaggcggtgatcaaccgcatgggtttcaacaaccatggcgtcgatcacctgctcgagcgggtcaaggcagcgaagttcaagggtgtgctgggtatcaatatcggcaagaacttcgatacgccagtcgagcgggcggtggacgattacctggcctgcctggacaaggtgtacacccac

SEQ ID NO: 218289 - DNA, 985 bp, Unknown
  Bacterial polypeptide expressing nucleotide sequence isolated from the Sargasso Sea
ttgaaagcttttataaagatttttagattcttcccaccggaaaccgctcaccatttagctttattaagtttaaaaattttaaataaagttaggattttgaagcttttctttcctgacaataaagattttgataatcctaaagaatatttcaatcttaaatttagaaacacgctgggcgtagcagcaggtcttgataagaatggcgattatgttgatgagcttgaatcgcttggatttggatttgttgagcttggaacagttacaccaaaaccccaagagggaaatcaaaaacctagggtatttagatatttaaaccagcaatcagttatcaacaggcttggatttaataataagggagttaattatttagtttctaaaataaaaaataaaaaatatgatgcagtaattggagttaatattggagctaacaaaaaaagcacaaatgatcaaaggatagaggattatgtcttctgctttgaaaaagtttacaaatattgtgattacgtcacagtaaacatctcctcgccaaatactccaaaattaaggaaactccataatccagatgagcttgaaaagatttttaaaagaattaatgaaatcaaaactataaatcagacagacattccagtttttcttaaaatatcaccagatgaaggcgaagaggcaattcttaaaattgttaatatatatgaaactttaaaaattaatggattgatagtttcgaacacttcaattgacaaggatattcttgaaggatgctctcatgatggtgggatttctggtaaacctttatttaaaaaatctaatcaactattaaaaaaaatacatgaacttgataaagacattttcttagttggcgtgggtggagttttcacaaaagaggattatgaaaataagataacgttaggtgctagcttggtgcagatttataccgggttcatttttgaaggacctgcaatcgtaaaaaaaatcttatctagatgaa

SEQ ID NO: 218290 - DNA, 366 bp, Unknown
  Bacterial polypeptide expressing nucleotide sequence isolated from the Sargasso Sea
aatgttttcaaagataagatccttaatatttaaatttgaaccagaagttgctcatagcttggctattaaagcactaaaatataattttgttccacctaaaaaaattccaaataataaattaattgaaacaaaattattttcaaaaataataaagaatcctattggacttgccgcaggttttgataaagatgcagaagtatataatagtatatttgatctaggttttgggtttgtagaagttggaacagtgactcctcttaaacaatatggaaataaaaaaccaagagtctttaggcttgaggaggatgaggctcttataaacagattaggttttaataattcaggatcagaagaagttcttcaaaa

SEQ ID NO: 218291 - DNA, 525 bp, Unknown
  Bacterial polypeptide expressing nucleotide sequence isolated from the Sargasso Sea
aatgttttcattcctgaggccgtacatatttaatctagatccagaaaaagcacataaacttgcaattagttcattaaaatacaacttattacctgagagtttatttaaggtagaaaatgaagagattctaagcatcaatctttttgggaaatcaattaaaaatcctataggacttgctgcaggttttgacaaaagtgcagaagtttacaatcaaatgtttaaaataggttttggttttgttgaggttggcactgtaacaccaaataagcaatatggaaatccaaagcccagagtttttaggttagaaaaagactctgcattaattaatagattgggtttcaacaatgatgggtctgatttagtaaaaaaaagaattgaaaataatcttccaaaaagtctccttggtataaatattggacctaacaaagcaaccaaagatatgagccaagacttttttagttgtgcagaaacttttttccctttaggtgattatataactataaatatatcttccccaaatactga

SEQ ID NO: 218292 - DNA, 1171 bp, Unknown
  Bacterial polypeptide expressing nucleotide sequence isolated from the Sargasso Sea
tatgaatgaacagaaggggggatttaaaaatctttataaaaacttgattacccctgtattaaaaaaagactctggaattgatgcagaatacttaacaaatttatctcttagtctcctatcattcagttcaagaaaatataattggcctatagtatcttctatcttaaaaaatctaaatgaagaattttctgtagttgataaaaggttaactcagaacatatgtggaataaatttttgtaatccaattggtttagctgcgggttttgacaaaaatggaaatgccgcaaatatatggaaagattttggttttggatttgctgagcttggtacagtaactaaatttgctcagaatggaaatcccaaaccaaggttatttagattggcagaagaagaagcagcattaaatagaatgggtttcaataataatggtgctgaaaatctagttaaaaactttgtcgaacaaggtattgagtttaaaaaaaacagggagaatatttgtttagggataaatttcgggaagtcaaaaattacaggtttatctcaagcaaaagatgattatttaacttctctaaaattattaattccatattgtgattacgcagcaataaacgttagttctccaaatactgaaggactaagaaaattacaagatccaattcttctaaaagaacttcttagagaaattaaaaacttacctaattgtccaccattatttgtaaaaattgcgccagatttaggccttaaagatattgaagatatttgccaattaataatcgaggaaaacatcgatggaataattgctacaaacaccagcattgatagattaggtcttgaaaatagaaagatcaggcaaactggattattactctctcaagagaatggaggattaagtggaaggcctctccaaaaaaaagcaaatcaaataataaaacatatacataatattgataaaaagattattttaattggcgttggtggaatagatagtcctgagtcagcttgggaaagaatttgttctggagcatcattaattcaactttatacaggatggatatataagggtccacaattagtaccagatatacttgagggaattataaagcaactcaataaccatcaattatctagtataaaagatgcaattggatcagatttaaaatgggttgaataa

SEQ ID NO: 218293 - DNA, 1042 bp, Unknown
  Bacterial polypeptide expressing nucleotide sequence isolated from the Sargasso Sea
atgttttcaaagattagatcattaatatttaaattagatcctgaaatagcacacgatttagcaattaaaagtttaaaatttaattttatttatcaaaataaaattaaaaaaaataaattaattgaaactgaaatttttggaaaaaaaattccgaatccaatagggattgcagcaggttttgataaagatgctgaagtatacaattctttatttaaattgggatttgggtttgttgaagttggaaccgtaactcctcttaatcaatatggaaatcctaagccaaggatatttcgtcttgaagaggatgaagctttaattaatagacttggatttaatagctcaggctctgaaaaagttagatcaagaattatttcaaattctccaaaaggactatttggaataaacataggaccaaataaagatacaaataacaaggaagaagattatttaattggtctacgtaaattttataatcttgctgactatttgacaataaatatctcatctcctaatacagaaaatttaagaagctttcataacgaagacgaactcagtaaacttttagatttggtagaaaaagaaaaaaaaatattaaaaactaatataccaattgttgtaaaaatttcacctgacatcaaagatgaaaatattaatataattgcagaattacttttaaaacataatgtcgaagctgtaataatttcaaattctactgataggaatagagaaaatttatctaatattaataaattagaaaaaggcggtttatctggaaaaccacttgaaaaaaaatcaaatgaattaatcaacaaattttataaaattttaaaaaataaaattaaaataataggagtaggcggtgttgattctggccagagtgtatatcaaaaaataattaatggagccagtctggtgcaactctatactggtatgatttataaaggcccaagtattgtttcaaaaataaatgaggaattaataaatattttagaaaatgaaagagtaaaaaatatatcagatatagtaggaagtaaaaattgat

SEQ ID NO: 218294 - DNA, 883 bp, Unknown
  Bacterial polypeptide expressing nucleotide sequence isolated from the Sargasso Sea
atgttttctgcattaagaccttttttgtttagcttagatccagaaactgctcatgatttagctattaaatcacttaagtttaatccttttccgagaaaaatgttcgaagtcgaagatgagcatatgctcaatatagaattatttggaaaaaaatttcctaacccaattggtctcgcggcaggttttgataaaagtgcagaggtttataattcattgttaagtttaggattcggatttgtagaagttgggacagttacaccgttaaagcagtatggtaatccaaaaccaagaatttttaggctagaggaagatcacgctttaataaataggctaggttttaacaatgatggcatagaaaaaataaaagatagaattagctccaatagaaagaatggaatattaggcattaacattggtccgaataaagatacaaaagatcaaaaaaatgatttttgtctaggattgaaaaacttttttagtttagcggactatattactataaatatttcttctccaaacacagaaggtttaagagattttcatgatcaaaaaaaacttttagatcttgtaaatattttaaataaaattaaaaaagataataaaactagcattcctttattactaaaaatttcacctgatattagcaataacaatatttcagaaattgcagaaggcgcagtgaaaaataatatttctgcaattattcttactaatactacaagtggtaatagagatgatttaataagtagatttaaaaaggaagaggggggcttatcaggcgatccattaagtcaaatatcaactagtatgattaaaaaatttagtaaagaattaaatggtaaaattcaaatcattggagttggaggggttagttcaggacaat

SEQ ID NO: 218295 - DNA, 526 bp, Unknown
  Bacterial polypeptide expressing nucleotide sequence isolated from the Sargasso Sea
atgaacgaacagaagggtgtatttaaaaatctttataaaaacttgataacccctatactaaaaaaagacactggaatagatgcagaatatttaacgaatttatctcttagccttctatcattcagttcaagaaagcataattggcctgtagtttcatcaatcctaaaaaatctaaatcaagaattttccattgttgataataggttaagtcagaacatatgtggaataaatttttgtaatcctattggtttagctgcaggttttgacaaaaatggaaatgctgcaaatatatggagagattttggttttggatttgctgaacttggtacagtaactcaatttgctcaagatggtaatcccaaaccaaggttatttagattagcggaagaagaggcagcattaaataggatgggtttcaataataatggggctgaaaatctagttaaaaactttcttgaacaaggtattgagttgaaaaaaaacagggagcaatatttgtttgggaataaatttcggcaaatctaaa

SEQ ID NO: 218296 - DNA, 617 bp, Unknown
  Bacterial polypeptide expressing nucleotide sequence isolated from the Sargasso Sea
aatgtttcctttcttaagacctttcatattcagtttagatcctgaaaaagcccatgaattagctataaaatcgttaaaatataatattattcctaaaagcttttttgaagttgaaagtgaagaaatcctaaatacaaaactatttggcaagaatattaaaaatcctattgggcttgccgcaggatttgataagagtgcagaagtttataatcagatttttaaaattggttttggatttgttgaggttggaacgataactccaagaaaacaagatggaaacccaaaaccaagagtttttcggttagaacaagatcttgctttgattaatagacttggttttaataatgatggatctgaaattatagaaaaaagaattgaaaacaatattccggatggtcttttaggagttaatattggtccaaataaagacactgataatatggtcgaggatttcttggattgtgcaaaaactttttttcctttaggtgactatttaactataaatatttcctcacctaatacaaaaggtttgagagattttcacgataaagaaaatttgcagaaattgttatcaagtattaataaaataaggaaggaaagtaattttaataagtctt

SEQ ID NO: 218297 - DNA, 1171 bp, Unknown
  Bacterial polypeptide expressing nucleotide sequence isolated from the Sargasso Sea
atgaatgaacagaagggggtatttaaaaatctttataaaaacttgattacccctgtattaaaaaaagactctggaattgatgcagaatacttaacaaatttatctatcagtctcctatcattcagttcaaggaaatataattggcctgtagttgcttctattttaaaaaatctaaataaagaattttctgtaattgataaaaggttaactcagaacatatgtggaataaatttttgtaatccaattggtttagctgcgggttttgacaaaaatggaaatgccgcaaatatatggaaagattttggttttggatttgctgaacttggtacggtaacaaaatttgctcagaatggaaatcccaaaccaaggttatttagattagcagcagaagaggctgcattaaatagaatgggtttcaataacaatggtgctgaaaatctagttaaaaacttcgtcgaacaaggaattgagtttaaaaaaaacagggagaatatttgtttagggataaattttggtaagtctaaaattacagatttatctcaagcaaaagatgactatttaacttctctaaaattattaattccatattgtgattatgcagcaataaacgtaagttctccaaatactgaaggactaagaaaattacaagatccgattcttctaaaagaacttcttagagaaattaagaacctacctaattgtccaccattatttgtaaaaattgcgccagatttaggccttaaagatattgaagatatttgccaattaataatcgaggaaaacatcgatggaataattgctacaaacaccagcattgatagattaggtcttgaaaatagaaagattaggcaaactggattattactctctaaagagaatggaggattaagtggaaggcctctccaaaaaaaagcaaatcaaataataaaacatatacataatattgataaaaagattattttaattggggttggcggaatagatagtcctgagtcagcttgggaaagaatttgttctggagcatcattaattcaactttatacaggatggatatataagggtccacaattagtaccagatatacttgagggaattataaagcaactcaataaccatcaattatctagtataaaagatgcaattggatcagatttaaaatgggttgaataaa

SEQ ID NO: 218298 - DNA, 742 bp, Unknown
  Bacterial polypeptide expressing nucleotide sequence isolated from the Sargasso Sea
gatgttttcaaaaataagatcattaatattcaaattagatcccgaaacagcacatgatttagctatcaaggctcttaaatttaatcctattcctaaagaaaaaattaaaaataacaatttaattgaaacagaaatttttggaaaatcaattccaaatccaataggtatagcagctggatttgataaagatgcggaggtatataatcctttgtttaaattagggtttgggtttgtagaagttggaacagttactccagttaatcaatacggaaaccctaaaccaagaatatttcgtcttgaagaagatatggcattaataaatagacttggttttaataattcaggctctgaaaaagttagatctagaattatttcaaattctcccaaaggcttatttggaatcaatataggaccaaataaagatacaattaatagattagaagattatttaatttgcttccgtaaattttataatcttgcagattacttaactataaatatatcttctcctaatactgaaaatttgagaaattttcataatgaagatgaactgaatgagctattaagtttgattaataaagaaaaaaaaatattaaaaactaccattcccatcacagtaaaaatatcaccagatatagaaaatcaaaatattaatataatttcagatctacttttaaaacacagtgttgaagcagtaataatttcaaatacgacagataaaaatagagaaaatttatctaat

SEQ ID NO: 218299 - DNA, 1054 bp, Unknown
  Bacterial polypeptide expressing nucleotide sequence isolated from the Sargasso Sea
atgttttcaaatttaagatctttaattttcaaattagatcctgagacagctcacagtttagctattaaatctttaaaatttaattttgctccaaatattctggatgaagataagaataatcctttatttaaaactaaattatttaatagaaatttagaaaatcccataggaatagcggcaggttttgataaaaatgcagaagtatataattcattatttaagcttggttttggttttgttgaagttggtacagttacgccccttcagcaatatggaaatcctaaacctagagtttttaggctggtcgaagatgaagccctgattaatagacttggttttaataattttggatcaaaaaatgttttagatagaattaaatctaaaaagcagattggtttactgggtgtaaatataggtccaaacaaagatactaaggaccgaaatggtgattatattgaatgtttgaaaactttttgtgaagtagcagattatattacaataaatatttcctcaccaaatacagaagacttaagaagttttcatgatgaatttaaattagatgaattattaaaggcgattgataaagaaaaaaaaattttgaactcatctattccaattgttgtgaaagtttcacctgatataagcgatcaagacgtcagtaaaatttctgatgttcttttagacaataatattaaagctgtaattatttcaaatacctcagattcgactagagatcgattgagcaatattttaaaacatcaaaaaggtggattatcaggcaaacctattgaggaaaaatctacaagtttgattaataaattttataatattttagaaggaagaattaaaattataggagtggggggagtagactcaggcatgagtgcttataaaaaatttttggcaggcgctgattatgttcagctttatactgggatggtttatagaggtccaaatgtagtgggtattatcaaaaaagagttaaaagaattactattgaaggatggtgttaagaattttactgagattataggaaaaaaaagacaatcttaaa

SEQ ID NO: 218300 - DNA, 666 bp, Unknown
  Bacterial polypeptide expressing nucleotide sequence isolated from the Sargasso Sea
aggtgtcgatatctggtcaaaatttgatcgcaaagaaaaccgatatcatggttggggtcaatattggtaaaaataaagacactccagtagagcagggcaaagatgattatttgatctgcatggataaagtgtatccctatgcggcctatattgcggtgaatatttcatcaccgaatacacccggattacgatcgctgcaatatggcgatctattagatgaattattaagcgcattaaaaaccaagcaacttgagttggccgagaaacataaaaaatatgtgccaattgcccttaaaattgcgcccgatttaaccacggaagaaatcgaaaatattgctcaatccttgattaaaaacaagtttgatggcgcgattgcgactaacacaacattaacccgtgacggtgtcagcggccttgcgaatgccaatgaaagtggtgggttaagtggtaagccattgactgagctttcaactaaagtgatcaaacaattagccacttgtttaaatggccagatcccgatcattggtgttggtggtattaacagtgccgaagatgcgttagctaaatttgatgccggcgcgactatggtgcagatttactcaggttttatttaccagggtccaaagttaattaaagaaattgttgaagcttatcgcttaaaataat

SEQ ID NO: 218301 - DNA, 1054 bp, Unknown
  Bacterial polypeptide expressing nucleotide sequence isolated from the Sargasso Sea
aatgtattcaaatttaagatcattaatatttaaaatagatcctgaaagagcacattttttagcaattcaatcactcaaacttaatttagtttcaaatatatttgatgaaaacaaaaatgatcctattttaaaaacaaaactatttaatcaaaatcttgataatcccataggtattgcagcaggtttcgataagaatgccgaggtatacaaccctttatttaagttgggttttggatttgttgaagtaggtacggttacaccattaaaacaatatgggaatgaaaaaccaagagtgtttagattggtagaagatcaagcattaattaataggttaggttttaacaatcatggatcagatacaatattaaacagaataaaatctaataaaaaactaggtgtactaggtgtaaatgtaggtccaaacaaagattctaatgatagattgaatgattatctaattggattagaaaaattttctgaagttgcagattatattacaattaatatttcttcaccaaatactgaaaatcttagaaattttcatgaagagaataaattgaaagagttattaaaatctgtctcagagaaaaaaaaacaattaaaatctgaaattcctgtagctgtaaagatttcaccagatataagtgaaaatcaaattgacttaatttcagaaatacttttagaaaatgaaataagcgcaataataatttcaaatacttctgaatcttctcgggaaacacttcaaaatatacagagacatcaaaaaggtggtttatctggaaaacctattgaaaaaaaatcaaatttgttaataagtaagttctacaatttaattaaaggtaaaattaaaataattggagtgggtggtgttgactcaggtaaagcagcctatgataagtttttattaggagcagattatgttcagttgtataccggcatggtatttcaaggacccaatattgctggcatgattaaaaaagacctaaaagaattactaataagagatggtgtcaaaaatttcacagaaattgttggaaataaaactgtttcttaa

SEQ ID NO: 218302 - DNA, 1057 bp, Unknown
  Bacterial polypeptide expressing nucleotide sequence isolated from the Sargasso Sea
attgttagagagttttataaaaatattaaaatttttacctccagaattagcacattctaccactataaatgcgcttaaatactttagatttaattttgataatattgatgatccaatattagcgcagcacttgattggattagattttccaaatccaataggtcttgcagccggatttgataaaaatgcagaagttgtgaattctatgttttctcttggatttggttttgtagaggttggaactataactccaaagccccaaaagggtaaccccagacctagagtatttcgattagatcaggataatgcaataattaatagcttaggttttaataacaaaggatcaaaaaaagtaaaaaaaaatataacaaaaataaaaaatagttttgttggtaatagaataattggagttaacttaggaaaaaataaaaatactttaaattcaattgatgactacctttttggtatagaaaatttgggtaatctagcaagctacattacaataaatatttcttctccaaatactgaagggttaagagatttacagttaagaggtaatattgaaaatttaattaagaaaattgtttcaaaaagagatgaaatagaaattataaataaaaaaccagtttttataaaaatttctcctgatttaaatgatgatcaactcagagatatagctctaatttcattagctaataatattgacggcttaatattgactaatacaacaactaacagaccaaataatttattatcaaaaaataaaaaaaataaaggtggtttaagtggaagacctctctttgaagattcaaataatgttttaagaaaaatgtataaattaacaaatggtcaaatcatattaataggtgtaggaggcattacaaatgcaagtgattgttatcaaaaaataaaatcaggagcttctttagttcagttatacaccgctttaactttttctggaccttatttaatttcaaaaattaagaatgagctgattgatttaattaaaactgatgggtatagaaatatttcagaagtgataggaaaatctgtttaa

SEQ ID NO: 218303 - DNA, 991 bp, Unknown
  Bacterial polypeptide expressing nucleotide sequence isolated from the Sargasso Sea
ttgaattttttcctaaaaatatttaaatttcttcctccagagtttgctcattctgcttcactaaattctctaaatttattgcataaatccaagctgttatttttatttaacaacaaaattattaataaaaatgaatacacaatttttggaatgaaattcaaaaataaacttggcacagcagctggtttagataaaaatggggattatatagatgcattaggtgccctgggatttggtttcttagaggtaggaaccgttactccaaaacctcaatacggtaatcctaaaccccgtatatttcgtaactattcggaaaattcaatcatcaacagacttggttttaataataaaggtattgattatttggttaacaatcttaaaaaaagaaaatatggcggagttgtaggagtaaatattggcgcaaataaatcctccaaaggtattgaaagaataaacgactacttgctttgcattgaaaagattcataagtttgcagattacataacaataaatatatcttcacccaatacacctgatttgagagacttacatttgaaagaaaatctaaaaaatctaattgcttcagtagaaaacaaaattaccaagcttaattttaaaaaaccaatttttttaaaagtttctccagatgagactgatgagtctatcgaaatgataattgatttagttaaaaaatcatctataacaggagtggttgctacaaacacaacaattgataaagaaaatcttattaataaaaaattaaaaaaagaagatggcggagtctcaggtcaacctttgatggataagtctacaaataaaatttctctaataagatcaaaatgttctgacattccaattattggagtaggcggcgttatgagcaaaaaagattatttaactaaattaagtgctggcgcagatttagttcaaatctatactggatttatcataaaaggcccaaatttgattaatcaaatagttagagattaag

SEQ ID NO: 218304 - DNA, 991 bp, Unknown
  Bacterial polypeptide expressing nucleotide sequence isolated from the Sargasso Sea
tttgaattttttcctaaaaatatttaaatttcttcctccagagtttgctcattctgcttcactaaattctctaaatttattacataaatcaaagctattagttttatttaacaataaaattattaataaaaatgaacacacaatttttggaatgaaattcaaaaataaacttggcacagcagctggtttagataaaaatggggattatatagatgcattaggtgccctaggatttggtttcttagagttaggaaccgttactccaaagcctcaatacggtaatcctaaaccccgtatatttcgtaactattcggaaaattcaatcatcaacagacttggttttaataataaaggtattgattatttggttaacaatcttaaaaaaagaaaatatggtggagttgtaggagtaaatattggcgcaaataaatcctctagaggcaatgaaagaataaatgactacttgatttgtattgaaaagattcataagtttgcagattacataacaataaatatatcttcacccaatacacctgatttgagagacttacatttgaaagaaaatctacaaaatctaattacttcagtagaaaacaaaattgccaagcttaattttaaaaaaccaatttttttaaaaatttctccagatgaaactgacgaatcgatcgaaatgataattgatttagttaaaaaatcatcaataacaggactggttgctacaaacacaacaattgataaagaaaaccttaataataaaaaattaaaaaaagaagatggcggagtttcaggtcaacctttgatggataagtctacaaataaaatttctctaataaaatcaaaatgttctgacattccaattattggagtaggcggtgttatgagtaaaaaagattatttaactaaattaaatgctggtgcagatttagttcaaatttatactggatttatcataaaaggcccagacttgattaatcaaatagttagagattaa

SEQ ID NO: 218305 - DNA, 705 bp, Unknown
  Bacterial polypeptide expressing nucleotide sequence isolated from the Sargasso Sea
aatgttttcttttataagaccttttatatttaatttagatcctgaaaaagctcacgatttagcgataaaatcactcaaatataattttcttccaagcaatttattttcagtatctggtgaagaaattttaagaaccaaactacttggcaaagagattaataatcccatcggtctagcagcaggttttgacaaaagcgcagaagtttataatgaaatatttaaaattggttttggatttgttgaggttggaactgttactccaaaaaagcagtttggaaatgaaaaacctcgaatttttagattagaaaaagatcaggcattaataaacagacttggatttaataatgatggatctgaaattgttaaaaaaaggattgaaaataatattccatcaagtttattgggcataaatataggtccaaataaaaatacagttaatatgactgatgatttcttaagatgtgcagaaattttttttccaattggagattatataacaattaatatctcttcaccaaatacctctggtttacgagattttcatgatgaagatgctttaaaaaaattactatcaaagattaatgaagtaagagaaaaaagcaattttaataaatcttttttattaaaggtttcacctgacctagatagttcgcagataccagttattgtaaaacttattttagagtacaaaatcgatggagtgat

SEQ ID NO: 218306 - DNA, 608 bp, Unknown
  Bacterial polypeptide expressing nucleotide sequence isolated from the Sargasso Sea
tgccaatccggtaggtctggcggccggtctggacaaggatggcgagtgtatcgatgccttcggggccatgggattcggctttatcgaggtcggtaccgtcacccccagagcccagagcggcaatgacaagccgcgtctgttccgggtgattccggcagaggggatcatcaaccggatgggcttcaacaacaaaggggttgaccacctggttgcccaggtaaagaaagctaaatatcaaggggtgattggcatcaatatcggcaaaaacaaggacacccccatcgagcagggcaaggatgattacctgatctgcatggacaaggtgtatgaccatgccggttatattgccgtcaatatctcttctcccaatacgccggggttgcgttcgctgcaatatggcgatgcactggatgaactgttggccgccctcaaggttcgtcagcaggagctggctgcgcaatataagaaatacgtgccactggccgttaaaattgcgccggatttgactccggatgaaattaatcaggtggccgcatctctgataaaaaatggcattgatggggtgattgccaccaataccacccttgagcgcgtacatgatttatgac

SEQ ID NO: 218307 - DNA, 244 bp, Unknown
  Bacterial polypeptide expressing nucleotide sequence isolated from the Sargasso Sea
atgccccatgccggtgaagcgggtggcctcagcggtcgtcccttgcagcataaaagcaccgaagtgatccgccagctggccaaggcactggatggtgcgctgcccattattggcgtcggtggcatcgacagtgccatggcggcccgcgagaagctgacagcgggtgccagtctggtccagatttacagcggctttatttacaagggcccggatctggtcaaagagattgtgacccatatataag

SEQ ID NO: 218308 - DNA, 1009 bp, Unknown
  Bacterial polypeptide expressing nucleotide sequence isolated from the Sargasso Sea
catgtacgaacttatccaaaaagctttgcttaactgcgaccccgaaaagagtcacgatttcagtattaaatggttacaccgcacccagcgcacaccgctgtcggcactgtaccgggtaaacactccggataagccggttacggttgctggtgttaccttcagaaatccggtagggcttgctgccggcctggataaaaacggtgagtgcattgatgcgtttgccgctatgggctttggttttatcgaagttgggacagtcacacctcgtccgcagccgggtaaccccaagccgcgcttgttccgtttaccggaaaaaaacgccatcattaatcgcatggggtttaacaataaaggcgtagattatctggttgaccaggtaaaggccagtcgatatgacggcgcgctgggcattaacattggcaagaacaaagacaccgaagaagctaacgcgctggacgattacttaaaatgcctcaacaaagtgtatgaacatgccagttatgtaaccatcaatatttcctcgccaaacacgccgggtctacgaaacctgcagtatggcgaagcgctggaagctctgctaggtggtctgaaagaagcccagggcgcactggctcaggtgcacggtaagtatgtaccgctgtttattaaaattgcgccggatttaagccctgaagaagtgaatggcattgccgagtcgctgataaaatcagaaatggacggcgtgattgccaccaatacaacgctggatcgcgaagcagtgaaaggcctcgagcatgccaatgaagcaggtggtttaagcggtgaggtgctggtgaatcaaagccagctgatcaccgaacaattacacacagcacttaacggtacaatgcccattatcggggtcggcggtatccatgacgtcgccagtgctaaagcccgaatggcggccggtgccgagcttattcaggtatattcttcttttatttatcagggaccagcgttaattaaacaactggttgagggcctttaa

SEQ ID NO: 218309 - DNA, 988 bp, Unknown
  Bacterial polypeptide expressing nucleotide sequence isolated from the Sargasso Sea
ttgaatttttttctcaatatatttaaatttttacctccggaatatgctcactctatttcattaaattctttaaatttcctctataaacttaagctcttaagtttatttcaaataaaaaaagatgatgaggttgaatttaatttatgtggaatgaattttaagaataaacttgggacggctgctggtttagacaagaatggtgactacattgatgcattgggcgaattaggatttggttttttagaagttggtacagttacaccgtcaccacaaagcggcaactcaaaaccacgtgttttcagaaactacgaggataacgcaatcataaatagattaggttttaacaacaaaggcatagattatttattaaagaatctaaaaaaaagaaagtacaaaggaattgtaggagtaaatattggtgcaaataagacatcaaaagatgaccaaaggattaatgattatttgttatgttttgaaaaaattcatgaatatgctgactacatcaccattaacatatcatctccaaatacacctgatttaagagatttacataatgaagaaaacctaaaaaatttaataagctctgttgaaaataaatctattgaaatcaattttcaaaagcctattttccttaagatttcaccagatgaaagtgatgaatcaataaaaatgattattgaattagtggaaaactcttctttctctggtctagtggcgacaaatactacagtaaacaaagacagtatcacaaatgaaaaattaagaaatgaagagggagggttgtctggacagcctttaatggaaaaatcaacgaataagatttctttcattagatcaaacactgacatgctaattataggagttggtggcgtcatgagtaaaaatgattttcatactaaaatcgaagctggtgcaaatctggttcaaatttatacaggttttataatcaaaggcccaaaattaataaatcaaataattcgagattaaa

SEQ ID NO: 218310 - DNA, 943 bp, Unknown
  Bacterial polypeptide expressing nucleotide sequence isolated from the Sargasso Sea
atgtggctaataataagaatactcagaatctttcctcctgaaatagcgcataaaatctctcttaccttgttgttttttatacatcgattaggcttattgagcatttttaaaaatgagaaacaatcagaaacaatagaatttctgggattaagatttaaaaacacgctaggtacggctgcaggtctagataaaaatggtgattatatcgattgtttaggtgcgctcggttttggctttttagaggttggtaccattacaccaaaagctcaggctggaaacaaaaagccaagggtctttagattgagtaaagataagggtgttattaataggctgggcttcaataacaaaggaatagatcaccttgtaactaatctaaagcaacacaaatatgatggagtaattggagtaaacatcggtgcaaataagaattcacatggtaaaaaaagaatagaagattacattgaatgcataagaaaagtatataaatacactgactatattacagtcaatatttcatcgccgaacacaaaaaatctaagaaatctgcaaaactcggaaaacatagataaattatttgtagccttagagaatgaaattcatacactcaaaattgataaaccaattttcataaaaatttcaccagatgaatcattggatacgattaaatacataataaacaaagtacaaaattcaaaaatcacaggtattatcgctacaaacacaacaacagataagtcaacattaaaagacgaaaaatattggaattatgaagggggattgtcaggagagcccttaagagaaaaatctaacgacctcatctccgaaataagaagagtttcagaggaaatcccattaattggcgtttggcgtgttatgacccaaaaagactataaagaaaaattagacctgggagccaatctggtccagatatatacgggattta

SEQ ID NO: 218311 - DNA, 1117 bp, Unknown
  Bacterial polypeptide expressing nucleotide sequence isolated from the Sargasso Sea
gatgagtcttctatacaaaacctttctgaggccggcagtttttttgcaagattcagaacgcgcgcactcacgggttttagctgtgctatctaaaatgtctagaactagattctctctttcgatgttaggagcgctttatcgttcacctgatcttccagttaatgtttttgatattgattttccaaatcccattggagtagctgcaggaatggacaaaaacggggcggcggttccttcatggcaatcaataggttacggattttgtgaaataggtggcgttactcttcatgagcaaccaggtaatccaaagcctaggatgtttaggataaacaaagagaaggctcttatcaaccgcatgggtttcaataacatcggtgcaactgcccttcaggaacagttacaattttggaaggataagggattatggccagattctcccgtaggaattaacttaggtaaatcaaaattaacttcacttgaagaagcaccttcagactattcaggttcaattaaaattctgtggaatcacgcagacttttttgtcataaatgtaagctcgcctaatactcccggtcttaggaaccttcaagagtcaaaaaatttggattctattataaaaaaatgttgtgatattaataaacaaaagtctgttgaaaaaggtacttcagaaaaacctcttttagttaaaattgctcctgagctaggagatgggttcttggaagacattgttaaattagtaaaaaagtacaagctttcagggattgtagcaactaatactaccgtaaagagaccaaaggcaaagcatcaatcatctgaaaaggtttaccaagagaaaggcggattaagtggtgcacctctcaaagatcagagtaccgagatgattagaaaaatttttaaaatgaccgatggtaaagttcctattattggagtcggagggatccttacagcagatgacgcatgggaaaaaataaaagcaggagcttcaatcttacagctttatactggcttagtatttgaaggtccaggaattgccaaaagtattgtaaaaggattgaaaaagcgcattgaatctgagggttttgaatctacagcagaagcagtcggaatagaagcttaa

SEQ ID NO: 218312 - DNA, 931 bp, Unknown
  Bacterial polypeptide expressing nucleotide sequence isolated from the Sargasso Sea
atgtattcaattttaaaaccttacattttttcactagatccagaggtagcccatgatttagcaattaaatctttaaaagcaaattttttaccagagagtttttttagcgttaaacatgaagaattgatagaaacaaatttgtttaaaaaaaaaattaataatccaataggcttagccgctggttttgacaagagcgcggaagtttataattctctttttaaattaggatttggttttgtagaagttggaacaattactcctaaaagacaacttggaaatccgaagcccagaatctttaggcttgaaaaagatgaagctttaattaatagactagggtttaataatcatggttctgaaatagttgcagatagaatagctaaaaataaaccacttggagttttaggaataaatattggtccaaatagagatacgaaaaacaaatcagaggacttttattcttgtctttcaaaactttactctttttcagattatataactatcaatatttcgtcacctaatactgaaggcttgcgtgattttcatgaaaagaattcaatgaataaattattagagggtttacaaaaaataaaaaaaaataaaaatataaaaaaacctcttgtgataaaactatcacccgatttaaatgagaaagaaataagcaacactatagaaattataaaaaaatatgaaattgatggaattatagtttctaatacaaccgataaaaatagagacaaactattagataacaaaaaaaatgagctaggaggattgtccggtcaacctataaaagatatttctacaaatcttattaaaaaattttatagagaattaaataaaaaaactactattattggtgttggaggtgtggactctggtaaaagtacttttgaaaagataactgctggcgcccaatgtagtgcaattatat

SEQ ID NO: 218313 - DNA, 946 bp, Unknown
  Bacterial polypeptide expressing nucleotide sequence isolated from the Sargasso Sea
atgttagttaatttattaagattgcttccccctgaaactgcacatgaaataacaataaaacttctcaaatcaaatctcaattttaatagaaaacatataaaaatttataaaagtcttaaccaaactatactaggtataaattttaaaaatcctattgggttggcagcaggttttgataaaaatgctgaagtcataaaacaaatgtttacctatggatttggtttcattgaagtaggaacagttactccaaaaaaacaactaggtaatgaaaaaccaagagtatttcgtttagttgaagatggggctattattaatcatttaggctttaacaacaaaggaagcgaggaaattttatttaatttaaaatctttctatgctcataaagacataaatgaagttattggaattaatgttgggaaaaataagtcgactaaaaatgacattgatgattatctgcatagtattgaaaaacttggcaattatggtgattatataactatcaatatttcatcaccaaatacaccagggcttagagacttgcaattacgaggaaggatagaagcattggtaaaaaaaattcaaaaaaaacaatctgatctagagcatttacaaaaaaaaccaatttttataaaaatttctcctgatcttaatgatgagcaattaagagatatcgctttgatgtcgcttgccaacaatgttaatggtttaattatttctaattctactatcaaacggtatgatactttaatttcaaattataaaaatgagataggtggattaagtggtaaaccaatttttttaaattcaacaattctgctaaaaaaaatgtactctttaactaacggtcaaattacacttataggagttggtggtatatccagtggttatgagtgttatgaaaaaataaaagctggtgccagtttggttcaattatacactgctttag

SEQ ID NO: 218314 - DNA, 974 bp, Unknown
  Bacterial polypeptide expressing nucleotide sequence isolated from the Sargasso Sea
aattttaagacttttaccacctgaaatagcacataagattgctttagatttattaagtttatcttataagtttggaattctgagtttcattttcagaaaaccaaatgatgagaattgctcatttgctggaatggatttaagcaataggcttggaacggcagcaggtttagataaaaacggagattacattgactgtctaggtgcactgggatttggttttttagaggttggaaccgttacacctatgccacagtatggcaatccaaaaccaagagtatttagaaattttgatgagaattctattattaatagattaggctttaataataggggggtcgatcgacttgttaagaatttaaagtctagatcatttgacggaatagtaggtgtaaatgttggtgcaaataaaaattcaaatgacgaagaaagaataaatgattatttgcattgcattgaaaaagtccacaaatacgctgactacatcacggttaacgtttcttcaccaaatacgccaaatttaagaaatttacaaaatgatgcaaatcttcataatttagtttctaaagtagataaactagttaataaattacaaataaaaattccattatttttaaaaatttcacctgatgaaaataatataacaattgaaaacatcattgaaattgtaaaaaattctattttttctggaattgtggccacaaatacaacaattgataaaacttcattatcaaatattaaatacaagaatattgaaggcggcctatcaggagagcctttaatgaagaaatcaacagaaatgattgagctgataaatacaaaggcaaataagacaattccaataattggtgttggaggagttatgaatagggaagattatcttgaaaaaataacttcaggagctggtttagttcaaatatatacaggttttgtcttaaaaggaccaaatatagttagtcaaatattaccagattgac

SEQ ID NO: 218315 - DNA, 1048 bp, Unknown
  Bacterial polypeptide expressing nucleotide sequence isolated from the Sargasso Sea
aatgaaaaatatatttcttaattttttaagaaatcttaatcctgaaacttcacatcatatctctattctttcacttaaataccttagtgggttcttggaaaaaaattataaaagtgaaatactaaatacaaactttggtaatttaaatttcgcaaatcctattggacttgctgctggatatgataaaaatgcagaggtaatagactctttatttaaaataggatttggtttcgttgaatgtggaactgttactcctgttgcacaatatggtaacactaaacctcggatatttaggctcaaggaagataaaggaattattaatcgtcttggatttaataattgtggaattgatcagttttcgaaaaattttaatcaaagaaactttaatttaggcatcgcaggagtaaatattggcccaaacaaagaatctaataattttattgatgattacttgaatctttttaattcagtatatgaatatgccgattatgttaccttaaatgtttcatcgccaaatactaagaatttaagaagtatccaaagaacagaggatttaagtgttttaacttatgagattaactcactgagagaatcaaaaggaagtcataaaaaaatagttttaaaagttgatcctgattgcactaagaaagaatatagtaaaataattaatattattcaaaaaaataaaatagatggtttaatagttgctaatactacactctcacgtcctgagtttcttaagagtgattttaaaaatgaagagggtggattatctggagcacctattaaggagaaatctaataaaattttaagattcatatcaaaggagactcaaggagaagtcactttaattggagttggtggcataagtagtgctaaagacgcatatgaaaagattaagattggcgcttcattagttcaactttattcatctctaacatttaataatcttggctttataaatcaaattaataaagacttgtcttcatatttaaggaaagatggttttactaatattaaagaagcaataggcatagaaataagatga

SEQ ID NO: 218316 - DNA, 1204 bp, Unknown
  Bacterial polypeptide expressing nucleotide sequence isolated from the Sargasso Sea
aatggctccatcaccgtcagcaggatcgatcaccagcggcgccttctatcggcgctggctggctccgatgctgtcccgggatgaggggatggatgccgagcagctgtccaggatggccctggctgctctcgctcaggcgagtctgcggcgccgctggccgggagtctccacggttctggcaggtctggccatggatctgcagcgccgggatctgcgcctcgaacaggtgttgttcggctgccgcttcgtcaatccggttggccttgcggccggtttcgacaagaacggagtggctgccggcatctgggaccagttcgggttcggctttgctgaagtgggcacggtgacctggcacggacagcctggaaatccccggccgcgtctgttccgcctggcggaggagcaggctgcgctcaatcgcatgggcttcaacaacgacggtgctgaggctctgctccggaccctgaaccggcaggttctgccggcccggggacagcgtcctgccgttctcggcatcaatttcggcaaatcgaagatcacaccccttgacctggcgcccgacgactacgcctcatccctcgagctgctggctcccctggctgattacgcggtgatcaatgtcagctctcccaacacccccgggctgcgtgatcttcaggacaccacgcagttgcgccggctggtggagcggttgcgtcgtctggcaggttgcccgcccctgctggtgaagatcgcgcctgacctcgaggatgagtcgatcgacggaatcgcccgactcgctttcgaggaggggttggcaggggtgatcgcggtcaacacgagcctcgaccgtcttggcctcgagcgccgacgcctcgtgcagaccgggcggaccctggcggaggagccgggcggtctcagtggcgtccctctgcggcagcgcgccatcgaggtgatccgccgtctgcgggccggagccggtcccgctctcccgctgatcggcgtgggtggcatcgactctcctgagtccgcctgggagcggatcacggctggagcctccctgatccagctgtacaccggatggatttttcagggtccagatctggtgccgcgcatcctggaagggtttcagcaacagctcgatcgtcatggcctgcgcacggtgagcgaagcggtgggcagcggtctggcctggcggggtgaggacgggccggagagtggctga

SEQ ID NO: 218317 - DNA, 333 bp, Unknown
  Bacterial polypeptide expressing nucleotide sequence isolated from the Sargasso Sea
caaaaaacgctacttggcaggaggcaatagcttcaagcctgacagaattatttgctccacatattcatcagcaacgtctggatacatggcctgaaaaatacccctgggtagatccagagggaatgaaatatttcaagtatcggctcggtcaggcgcgaagggatgtcaagcacggattggaagttaccaaggattttttcagtaattctcgagctctgcaggatagggccttggaaattttgcaatttaaattggatgttttatggtctttggctgatgctattatgttgcaacaatgtgaaatttccgtattaggttccaaacaaggttaac

SEQ ID NO: 218318 - DNA, 334 bp, Unknown
  Bacterial polypeptide expressing nucleotide sequence isolated from the Sargasso Sea
ttttgtcgaggcgcctcgtggcaggaagccgcatgttcttcactcacagaattgtttgcgcctgatattcataaacgtcgtttgaaaaattggcccgagcactacccttggatagatactgaagggtacaactatttcaggaaaaggctctccgaagcccgacgagatgttcaacatggattggacataactctggatcattttaagtcgcgcgaacaacaggagcatgcgttagagattttacaattcaaactaaatgtgctctggacgatgcttgatgcaatgcagatggcctatgaacttgaaaagccgccttttcacagttgtccatgac

SEQ ID NO: 218319 - DNA, 410 bp, Unknown
  Bacterial polypeptide expressing nucleotide sequence isolated from the Sargasso Sea
gatgagccaagctgccatgacacctgccgaattcgagcaggcgctgcgcgccaagggcgcgctgtaccacatccatcatccgtttcatcgcgccatgtacgaagggcgcgctacccgcgagcagatccagggctgggtggccaatcgtttctactatcaggtcaacatcccgctgaaggatgcggcgatcctcgccaactgcccggatcgcgaaacccggcgcgagtggattcagcgcatcctcgatcacgacggtgcgcccggtgaggagggcggtatcgaggcctggctgcgcctggccgagtcggtcggcctcgaccgcgatcaggtgctgtcgcaggagctggtgctgcctggcgtgcgcttcgccgtcgatgcctacgtcaacttcgctcgccgcgctaactggc

SEQ ID NO: 218320 - DNA, 380 bp, Unknown
  Bacterial polypeptide expressing nucleotide sequence isolated from the Sargasso Sea
gatgagccaagctgccatgacacctgccgaattcgagcaggcgctgcgcgccaagggcgcgctgtaccacatccatcatccgtttcatcgcgccatgtacgaagggcgcgctacccgcgagcagatccagggctgggtggccaatcgtttctactatcaggtcaacatcccgctgaaggatgcggcgatcctcgccaactgcccggatcgcgaaacccggcgcgagtggattcagcgcatcctcgatcacgacggtgcgcccggtgaggagggcggtatcgaggcctggctgcgcctggccgagtcggtcggcctcgaccgcgatcaggtgctgtcgcaggagctggtgctgcctggcgtgcgcttcgccgtcgatgcct

SEQ ID NO: 218321 - DNA, 694 bp, Unknown
  Bacterial polypeptide expressing nucleotide sequence isolated from the Sargasso Sea
gttgcacgcgacgccctggaccgcgaccgaattcgagacgcgcctgcgtgcgctcgaatcgcgctaccacatccatcacccgttcaaccggcggctcaacggcggcgcctgttcgcccacgcagatccgcggctgggtggcaaaccgcttctactaccagatcaacatcccgctcaaggatgcggcgatcctgtcgaactgccccgaccgcgacacgcggcgccgctggatccagcggctggtcgatcacgacgggcagggcgacaacgaaggcggcatcgaggcgtgggtgcggctcggcgaggcatgcggtctctctcgcgccgaactgtggtcgctcgagcacgtgttgcccggcgtgcggttcgcggtggatgcatacgtgaacttcgcgcggcgcgcgccgtggcaggaagcggtgtgctcgtcgctgaccgagatgttcgcgccgcagatccatctcgaccgcctcgcgggctggccgtcgcattacccgtggatcgaaccggccgggctgcattactttcgcagccgcgtgccgctcgcgcagcgcgacgtcgagcatggcctcgcggtcacgctgcagcatttcacgacaccggatgcgcagcagcgcgcgctcggcatcctgcaattcaagctcgacattctgtggtcgatgctcgacgccgtcgaaagggcctacccgctatga

SEQ ID NO: 218322 - DNA, 525 bp, Unknown
  Bacterial polypeptide expressing nucleotide sequence isolated from the Sargasso Sea
ttcagcgcatcctcgaccatgacggtgcgccgggtgaggaaggcggtatcgaggcctggctgcgcctggccgagtcggtcggcctcgaccgcgagcaggtgctgtcgcaggagctggtgctgcccggcgtgcgcttcgccgtcgatgcctacgtcaacttcgctcgccgcgccagttggcaggaggcggccagcagctcgctgaccgagctgttcgcgccgaccatccaccagtcgcgtctggacgcctggccgcagcactacccgtggatcgatgcggccggttacgactacttccgcaatcgcctgagccaggcgcggcgcgatgtcgagcacggcctgcgcatcaccctggagcactaccgcacccgtgaggcgcaggagcgcatgctgaatatcctgcagttcaagctcgacgtgctgtggagcatgctcgacgccatgagcatggcctacgagctggagcgcccgccgtatcacacggtgaccaacgagcgcgtctggcatcgggggatcgctttatgat

SEQ ID NO: 218323 - DNA, 665 bp, Unknown
  Bacterial polypeptide expressing nucleotide sequence isolated from the Sargasso Sea
catgactcaaacagtaaaagaagcatctatagagcccgttaaagattattttcaatctctccaagaacaaatatgctcgactctggaagcactagagatagacgaaaaattctcagtcgaaaacatatcaacgccaggcggaggaatgtctaaacctcgagtagtgagtgacggggaacacattgagaaagcagcggtcatgttcactcactccattggtgactcgcttcccccagcagcttctgagcgaaacccaaaattggcaggaaaaccattccaagctgccgccatatcgttgatcgttcatcctaaaaaccccttcgtcccgatgactcacatgaacctacggttctttattgtttttacggaggagccctcttggcacttcggagggggctacgacttaaccccctactatccttacgagcaagacgttgtgcattggcattcaacagcatctcaagcagcagggaaatactatcgtcggttcaaagatcagtgcgatgactacttttatcttcctcacagaaatgaagcaagaggtgtgggcgggcttttttttgatgactggagcgaaggcgggttcaacaaatccttcaaattaactcaaaagattggtgattcctttctgaaagcttatcaacctatcttcgagaaacggaaaa

SEQ ID NO: 218324 - DNA, 346 bp, Unknown
  Bacterial polypeptide expressing nucleotide sequence isolated from the Sargasso Sea
cagcttcagcataaaaaaatagaagatagcctagatttacttaatgctattgcaaattgctatattgaaacttatgtaagtcttgtcaattccaataaaaatcaaaaatttacagctgatgatagagagtttcagttatacaggagaggaagatacgttgagtttaacttgttatttgatagaggtacaaaatttggaattgaatcaaatggtagaactgattcaatacttgcatctatgcctccagcggtaaattggccatttcggctttctaaaaacatcattaaaaatgaaagtaaacttttaaggtttataaataaaaactggaatcaacatatattatgaa

SEQ ID NO: 218325 - DNA, 697 bp, Unknown
  Bacterial polypeptide expressing nucleotide sequence isolated from the Sargasso Sea
tatggttgttagtaaatataaagttacaaaagaagaaaaagtaagtgctgaaaattggttctctgaactcagagataatatttgtagtgaatttcaaaatattgaaaaaaatatttcaaataatacttttcaaattaaaaattggaaaagagatggtggtggtggtgggaaaatgagtattatgaaaggagatatttttgaaaaagtaggagtaaatatttcaactgtacatggaaaattttctgagcaatttagaaaaaacatacctggtgcagaagaagatggaaaattctgggcaagtggtatatcagtcgtagctcacccaaaaaacccgtttgttcctgcggctcatatgaacacaagacttatttctacatcaaagagttggtttggaggaggtggtgacattacgcctatgaaaccggcaccagaaatgtcaaagcttttccataaagacctgaaaaatgtatgtgataagcataataaagaatattataaaaaatttaaagaatgggcggacaaatacttttttctagaacaccgtaatgagacaagaggcgatggtggtatattctttgattatctaaataatggtaattggaaaaatgattttaactttgtcaaagatattggtatgggttttcttgggtcttactcaaatatagttaggaagaattttagtataccttggaaatga

SEQ ID NO: 218326 - DNA, 622 bp, Unknown
  Bacterial polypeptide expressing nucleotide sequence isolated from the Sargasso Sea
atgcaaataaatcaagaaattcaaaaaaaaatagccagtgaatggtttagatttttacagatagaaatctgtaaaaaatttcaaaatcttgagagaattttttcaaaaagaaaaaaattaaaacctaaatattttaaaaaaaatgagtggaaaaaaagaaatattaataatggtggaggcacatactatctcctagaaaatggcagagtatttgataaggtcggagttaatcattcaacagttaagggaatttttccaaaaaaatttaagtcaagtattcctggtacaaaaaaaaataattcttattgggcctctggaatatcagtagtggcacatatgaagaatccttgcataccatctatgcacttcaatactagatttgttgtaacctcaaaaagttggtttggaggtggaatggatgtaacgccaagtttaaaagacttgaaggaaaaaaaactacttcataaagaactaaaagttctgtgtgataataataaaaaaaattataagagttataaaaaatggtgtgataaatatttttatatcactcacagaaaagaggtaaggggaattggtggtattttttttgattacttgttcgaagattggaccacaaaaattt

SEQ ID NO: 218327 - DNA, 757 bp, Unknown
  Bacterial polypeptide expressing nucleotide sequence isolated from the Sargasso Sea
atggatttaaatattaaaaaagatttatcaagtaattggttcaaattattacaagatgcattctgtaatgatattagtattttagagaataataaaactaactttaaatcaataacttggaaaaaaaatgaatatagagatgaaggtggaggagaatatagaatacttaaagatggaaaaatatttgataaggtaggtgtgaattattctaaagtttatggaaaatttccgaaaaaatttcaaaaaaatatccttggtgctcaaaaagatcctagattttgggcatcaggtatatctgtagtaatgcatatgaaaaatcctctaattcctgcaatgcattttaatactagatatatttgtacaactcgacaatggtttggcggtggtatggatataacaccctcaaaaaaagatgatctagaaaaaaaagattttcatcaaattttaagtaacatgtgtaatcgtcataataaaagttattataaaaaatataaaagattttgcgatgaatacttttatcttccacatcgaaaagaaaaaagaggtattggtggaattttttttgattataaaaaagataattttgaaaaagattttaaatttgtaagagacgtaggtattacatttcaattaatatttaataaaattattagaaaaaaaattaaaaagaaatggactaagaaagataaagaaactcaatatattaaaagaggtagatatacagaatttaatttactttatgatagaggtacaaaat

SEQ ID NO: 218328 - DNA, 331 bp, Unknown
  Bacterial polypeptide expressing nucleotide sequence isolated from the Sargasso Sea
gtgcgatgaatattttttcttacctcaccgaaatgaaccaagaggtattgggggtattttttttgataatttaaataataatgattgggataaagattttaattttgttaaagatgtaggattattttttaaaaattattcaataaatataataaataaatacaaagataaaaaatggaataatgaggaaaagaaaattcaattaaaaaaaagaagtcgttatgcagaatttaatttattacatgatagaggaacacgttttggtcttgaaacaggaggaaatattgatgctattttaatgtctatgcctcctcaagctagttgggattaa

SEQ ID NO: 218329 - DNA, 443 bp, Unknown
  Bacterial polypeptide expressing nucleotide sequence isolated from the Sargasso Sea
tatgttaataaatttagaaaaatcttttaaaaaaattcaatcattaatcattaataattttaaacttcttgagggttcatcttcagcagaaatttcatctgatgcatggaaaaggcaagaaggtggcggaggaaaaacctttgtaatatctaacggtaatttctttgataattgtgctgtaaatttctcgtcaatatatggtaaaaatatgcccacaagtgcgcttgaaaaaaaattagccaaaaaaattaatcatggctatcaagctatgggtgtttctgtgatctctcacccaaaaaatccatatgttccaactagtcatatgaatgttcgtctatttggaatattagacaagaataaaaacattaaagattggtggattggaggtggctatgatttaacgccttatatatctttttcagaagataatattagttggcata

SEQ ID NO: 218330 - DNA, 565 bp, Unknown
  Bacterial polypeptide expressing nucleotide sequence isolated from the Sargasso Sea
tatggaccaaataattaagaaaaaattagcaagaaattggttcaaaacattacaagaagttttatgtaaagaaatagaggaaatagaaggtggtataaaactttttaaatataaaaattgggaaagaggaaaaaaatcaaatgaaggtgggggtcaatcaagaatttatgaaaatggaaaaatatttgataaagttggtataaatttctcagaagtttacggaaaattttctaaacaatttaaaaataaaatcccaggtgcaaataagaatcctaaattttgggcatcaggcatttctgtagttatgcatatgaaaaaccctcatattccagcaatgcattttaacacaagatatgtttatacatctcatggatggtttggtggaggaatggatgtaactccttgctttaaagataaaaaattagaaaaatggtttcattctgaattaaaaaaatcctgtgataaacataataaaaattattacaaaaaatataaaaaatggtgtgatgaatatttttatttacctcatcgaaatgaaccaagaggtattggtggtatttttttt

SEQ ID NO: 218331 - DNA, 697 bp, Unknown
  Bacterial polypeptide expressing nucleotide sequence isolated from the Sargasso Sea
atggttaacgtaaataatttaatagaaaagattaggcttcagcctaaaatcagacatgaaaaaactttacttaaaaaacaagatttaacaaaagagtggttttcttgcttaagggatgaaatttgtaaggattttttgatattagagaaagaatttttaaaaaaaaacacatttaaatcttttttaaaaatacctaactcaaaatttgttacaagaaaatggaagagaaaaggaggagggggagggaccatgtcgataatgcgtggagtcctttttgagaaagttggtgtaaatatatcaactgtgtttggagagttttcaaaagaatttagatcacaaattccaggcgctgagaaaagtggaaaattttgggctagtgggatatcaattgttgctcatatgaataatccaaaaatacctgctgcacatatgaatacaaggtttttggtaacaggtgaaggtgaaaaacaaaaattttggtttggtggggggtgtgatttgactccaatgttagaagataataaagctaaaaacacttttcatgatggtttaaaagaaatgtgcaataaacatgatgataaatattacaagcgttttaaatcatggtgtgacgattatttttttttaccgcatagaaatgaatcaaggggtgtaggaggtattttttttgattatttaaataattcaaattgggaaa

SEQ ID NO: 218332 - DNA, 334 bp, Unknown
  Bacterial polypeptide expressing nucleotide sequence isolated from the Sargasso Sea
gaaattatgtgatgaatatttttatctagcacatcgaaaagagcctagaggtattggtggaatattttttgactataaaaaagataattttgaaaaagactttaactttgtaagagatgtaggtgttacttttcaaatattatttaacaaaatgatcagaaaaaaactaaaaaagaaatggactgctaaggataaagaaattcagtatattaaaagaggtagatatactgaatttaacttattatatgatagaggaacaaaatttggtttacaaactggtggaaatatagatggaattttgatgtcacttccacctttagcaaaatggaaataa

SEQ ID NO: 218333 - DNA, 638 bp, Unknown
  Bacterial polypeptide expressing nucleotide sequence isolated from the Sargasso Sea
aatgaaaacaaatgaaatatcgaagagctttaaaaaaactcaaaatcaaattatcaaagctataaaaaccctagactccacaattatcaaaaaatcatctacttggaaatataggtcaggtggtggtggggtaagctgtgaaatggagggaagtaaatatattgataaagcagctgttaatttttcaagtatagtaggtgataaacttccagcgagcgccctacagaaatctggagtgagtggtctcaataaatttagagccacaggagtttcggtaattattcaccctgctaacccaaaaataccatgtgctcacatgaacattagattttttgaagccagagtgaataagaagaatgtttggtggtttggtggaggttttgatttaactccttacttcattaataaatcagatattcattattggaaaaactcagcaaaagaactttgtgataaatacaaaacgggaatgtatgaagaatacaataaaaattgtaataactattttttcttaccgcatagagaagaaccaagaggagtaggcggattattctatgatcaaatgaactcgcctgattataggacatgtaaagagttctctcttgattgtgctagtacattcaaaaattcgtatttac

SEQ ID NO: 218334 - DNA, 235 bp, Unknown
  Bacterial polypeptide expressing nucleotide sequence isolated from the Sargasso Sea
catgttcagagaacctcctaaaaactcaagagaaaaaactaaaaatctcttattaactctacaagacaaaatttgttcagggcttcaaaatatagatggcaaagggaaatttatagaagaatcgtggctaagagacgaaggtggtggtggaaggtcaagagtattgaaaaatggttctatttttgagcaagcaggagtaaagttctctgaagtacggggaaaagaattacctcaa

SEQ ID NO: 218335 - DNA, 457 bp, Unknown
  Bacterial polypeptide expressing nucleotide sequence isolated from the Sargasso Sea
tggtttggtggaggtatggatgccaccccatctattaaggatgaaaaagaaaaaaaattctttcatagaaaaataaagctcacatgtgataaatataataaaagttattacccgagatataaaaaatggtgtgataagtatttctatttacctcatagaaaagaaacaagaggtattggtggaatattttttgactataaaaaagataattgggaaaaagattttagttttgtgagaaatataggattatgttttctagattgtgcaaaaaatataattgaaaaaaaaatcaataccgtatggtccgaaaaggaaaaaaatgaacaactttataaaagaggaaggtatattgagtttaatttgttatatgatagaggtacaaagtttggtttaaacactggtggtaatgttgatgcaatcttaatgtctttaccaccaatggcaaaatggaaataaa

SEQ ID NO: 218336 - DNA, 602 bp, Unknown
  Bacterial polypeptide expressing nucleotide sequence isolated from the Sargasso Sea
aatgaatattaaaaaaaaacaaaagttaacgaaagaatggtttgctaaattgcaaaatatgatctgcaaaaatattgaagatttagaaaaagaatatggctcaagatctaaatttaaaaaaaataaatggaattatggagaatttagaataattaaaggtaaagtaattgaaaaaggcggtgtagctttttctaatgtaaaaggtagattttcagaaaattttgctaaaaaaataccaggtgttaaaaaaaacttacgtttttggtcatctggtgtatcagttgtgcttcatccaaaaaatcctaaaattcctgctatgcattttaatacaagatttatttgcacatcgaaaaattggtttgggggaggtatagatgtaacgccatgcctagctgacagtaaagaaaagaagtttcttcatatgcaattaaaaaaaatgtgtaatgtacataacaaaaaatactataaaaaatataagaaatggtgtgatgagtatttttatttacctcatagaaaagaaattcgtggcgtaggcggaatattttttgactataaaatggatgactggaataaagattttttatttgttaaagacgtaggaa

SEQ ID NO: 218337 - DNA, 511 bp, Unknown
  Bacterial polypeptide expressing nucleotide sequence isolated from the Sargasso Sea
gtcgtacatcttccccgaggacgccgagcacttccacggcaccctcaagggggtgtgcgacaagcacgacgaggcgttctaccctcgcttcaaggagtgggcggatgattacttcatcatcaagcacaggatgaacgagcgccgcggcatcggcggggtctttttcgacgacatgaacgaccgcccgcaggaggagctcctcgccttcgccaccgacatggcatccgccgtcgtgcccgcgtacgtgcccctcgtcgccaagcacaaggacgacgagttcaccgagcaggagcgcgagtggcagcagatgcgccgagggaggtacgtcgagttcaacctcgtctacgaccgaggcaccaccttcggcctgcgcaccggggggaggatcgagtccatcctcatgtccctgccgctcaccgcgaggtggcagtacgacatgcagcccgaggaggggtccagggaggcggacgccctcgacgcgttcaggaaccccaggacctgggtcgcgtga

SEQ ID NO: 218338 - DNA, 422 bp, Unknown
  Bacterial polypeptide expressing nucleotide sequence isolated from the Sargasso Sea
ggaatcgaaaaaaattgctaattatttccatggtgagcttgaaaagacctgtaatgattacaaaaaaggttcgtacaaaaaatacaaaaaatggtgtgatgattatttttttttacctcataggaatgaatcaagaggattgggaggaatattctttgattatttagattctgataattggaattcggatatgaattttgttagcaacgttggaaaaacatttattaatacatacaaaacaattgttcaaaaaacaattaacttaccatggaataataaagacaaattattacaatttcatagaagatcaaggtatgttgaattcaatttattatatgatagaggtacaaagtttggtttagagacagatggaaacatagaggccatctttatgtctcttccacctatggcttcatggtaaa

SEQ ID NO: 218339 - DNA, 717 bp, Unknown
  Bacterial polypeptide expressing nucleotide sequence isolated from the Sargasso Sea
gaggatgcgggcggtggagtaatgtccattatgcgagaaggtcgtctgttcgaaaaagttggtgtaaatatttcaacagtgtttggacaattggaaaacaggcacaagacagtattagcgctcgaagaaatgtacctggacttgacaaagatccccgtttctgggcttcgggaattagcttggttgcccacatgcggtccccaaaaacacccgcggtacatatgaatacaagaatgttttggacacctgaggattggtggtttggtgggggtgctgacctgaaccccatgttggaaaactcagaggacaccaaattttttcacacagagctacgcaaagcatgtgaccgccatgatccttcgtactatccacgctttaaaaaatgggctgatgaatacttcctcattagacattggaatgagcctcgtggagttggtggggttttttttgatgaccattgtaccaacgattgggaaaaagatttttcgtttacaaaagatattggacgtgcttttttgaatgccttcataccgataacagagaagcattctactgaagaatggaccgaggcggaaagagaaacgcaattaataaagcgtggtagatatacggaatttaatcttgtatatgaccgaggcacacaatttggcctgcatacgggtcataatcctgaagccgttctgatgagtttaccacctatagccaaatggccttagt

SEQ ID NO: 218340 - DNA, 679 bp, Unknown
  Bacterial polypeptide expressing nucleotide sequence isolated from the Sargasso Sea
catgcgccgcaaattcgagcagatgctccgagaagcgcagaacaagatctgctcggccgtcgaggaactagacggcgagggcaccttccgccaggacgtctgggagcgcgagaacggcggcggcgggattagtagggtcatggcgggcggcaaggtgtgggaaaaggccggctgctcgctgtcagtggtctacggctccatgccccaggaagcgttggcgtcggcgaccgagcggggcgtcgaccgagccaagggcatggagcccggggaacgggtcccgttctgtgtggaaatcaaccagtgcgacggatgcacgacaattcttcactacgtcatttctcggcgatggcgcggccgtcctggctcggtcgagcggcgaggaaccggcatcgtcacgccatcgagcaggcggccgcgtcgatggcgtggaggtcgacgggacgattcagcacgaacgcgccgtaaaattttgatttccacacaggtccccttcttcgcctgtggtctcagcagtgtcatgcatcctaggaaccccatggcgccgaccatgcacttcaattatagatatttcgagacggacggcggcgtctggtggttcggcggcggtattgttgcggcgtccgtgcctgccttcgacacgtcgcggcgacagcgcagggtcgcggagctgcgggaatga

SEQ ID NO: 218341 - DNA, 389 bp, Unknown
  Bacterial polypeptide expressing nucleotide sequence isolated from the Sargasso Sea
actcttgataaatataacaaaaatttttataagtcattttctgagaattgtaataaatatttttatatacctcatagaaaagaaagaaggggtattggaggtatcttttttgataatctatctagctttagccttgacgatagcttaaaaatgctaaattctattgcaagcacctatttaaattcatatttagatattgtttctaaaagaaagaaaataaagtattcctcagatgagaaagattttcagctaattaggagaggaagatatgctgaatttaatctaatatatgacagaggaacgtcatttgggcttcaatcaaacggaagaattgaatcaatcttagcttcacttccaacagaagttaaatggaagtataaaaaaaataa

SEQ ID NO: 218342 - DNA, 454 bp, Unknown
  Bacterial polypeptide expressing nucleotide sequence isolated from the Sargasso Sea
atgatacgtactacatcccttgaatgtccttttggtggtattggccaagatatgtgtgattatgctttatcgttacaagataccattgtatctcatttaagtgactatgaacctaattcggtatttaaaactgacatttgggaccgacctggtggtggtggtggtcgcacctgtgttattgaagatggtttaatatttgaaaagggtggcgttaatgtatctgctgtagaagggcttatatcgacacctcatgaagtgcaaatgtttcaacaattgttacagcaacaaaatcggtcttgtccattagataatgctcatttttttgcaactggaattagtcttgttctacaccctcgtcatccacttgtcccaattgttcatatgaactatcgttactttgaaatgaggacccaacaacatactatttggtggtttgggggaggaacagattaaa

SEQ ID NO: 218343 - DNA, 152 bp, Unknown
  Bacterial polypeptide expressing nucleotide sequence isolated from the Sargasso Sea
cataatggtttaaaaatcatatgtgatgagtacagcccaaacaaatattacgaatttaaaaaatggtgtgatgaatatttttatcttcctcatagaaaagaaccaagaggggcaggaggtattttttttgattatttaaaaaataattggga

SEQ ID NO: 218344 - DNA, 540 bp, Unknown
  Bacterial polypeptide expressing nucleotide sequence isolated from the Sargasso Sea
gtatttcagttgtaatgcacatgaaaaatccgatgatcccagccatgcattttaatacaagatatatatgcactactcaagattggtttggtggtggaatggatgtaactccatcaataaaggatgatagtgaaaaaaaagaatttcataaaattttagaaaaaatgtgtaatcaacacggtaagaattattatacaaaatataaaaagtggtgtgataactatttttacttacctcatagaaaggaacctaggggaatagggggaattttttttgattataaaaaaaataattttgaaaaagattttaaatttgtgagagatgtgggggtaacttttcaatttatttttgaaaaaattattagaaaaaaaatgaataaaaaatggaccaaaaaacataaagaattgcaattcataaaaagaggtcgatacacagaatttaatttactatatgaccggggaacaaaatttggtttacaaactggtggaaatgtcgaaggtatcttaatgtcattacccccattagcaaaatggaaataaa

SEQ ID NO: 218345 - DNA, 692 bp, Unknown
  Bacterial polypeptide expressing nucleotide sequence isolated from the Sargasso Sea
aatggatttaattgaagatcagaaaaaaatagctcgcaggtggtttgaaaccctacgtgatcaaatttgccatgtttttgaaacaatcgaaaatactgtggatggggtagattgcattatgaaaatgcaaccaggacactttgatcgtacagactgggagcgtcccgaagggctcgatgcggggggtgggggtgtcatgtcaatcatgcgtggacgtgtgtttgaaaaagtgggggtaaatgtttcaacagtttttggcgaattttcagagaattttagagcctctgtgccaggcgcagaggagaatccgcagttctgggcctccggcatttccgtagtggctcaccctcgttcgccacgtgtcccaattgcacatatgaacacccgcatgattgtaactacaaaacaatggtttggtggagggggagacttaactccagtgattccaattagagaggacacgaaagagttccataaagccctaaaaatagcatgcgatgctcacgataaagaatactatccacgtttcaaaaaatggtgtgatgaatatttttatcttcctcatcgagaggaaagtcgaggtgtaggtggtgttttctatgacaacttatctacaggaaattgggataatgacatgaattttacgcgcgacattggaatatctttcaaaaatacatattcaaatatagtaa

SEQ ID NO: 218346 - DNA, 534 bp, Unknown
  Bacterial polypeptide expressing nucleotide sequence isolated from the Sargasso Sea
catcaggaatatccgtagtagcacatatgaaaaatcctaaaattcttgcaattcactttaatacaagatttattgtaacttcaaaaagctggtttggcggtggaatggacgtaacacctagttttagggacgaaaaagaaaaatattttgttcataaaaaattacggcaactttgtaaaaaaaataagaaaaattttaatatttataaaaaatggtgtgataggtatttttttataaaacatagaaatgaaccaagaggaattgggggtattttttttgattacttgtataaggattggaaaagtaattttaagtttgtaagagaacttggattatgctttttaagcttatctaaagagattatttttaaaaaaaaattattaaaatggaataaaaaacataaatatgatcaaattttaaagagaaaaaaatatgttgagtttaatttattatatgacaggggaacaaaattcggtttaaatactggcggaaatattgatgcaatttttatgtcgcttccgccactaaaataaa

SEQ ID NO: 218347 - DNA, 700 bp, Unknown
  Bacterial polypeptide expressing nucleotide sequence isolated from the Sargasso Sea
aattggtttaagatattacaaaatgcaatatgcgacgacattgtaaaaattgaaaaaaacaaaataaattttcaatcaacttcttggaaaagaagcagtaaaaaaaatgagggtggtggtgaatatagaattcttaaaaatggaaaaatttttgaaaaagtaggggtaaatttttcaaaagtttatggaaaatttcctaagcaatttcaaaagaatataccaggcgcaaataaggaccctagattttgggcatcagggatatcgatagttatgcatatgcaaaatcctcatattcctgcaatgcattttaataccagatttatttgtacaacaaagaattggtttggtggaggaattgatgtaacccctgcaataaaagatgaaaaagaaaggaaaaattttcataaaatattaaaagcaatgtgcgatagacataataaaaattattataaaaaatataaaaagtggtgtgataaatacttttatctgcctcacaggaaagagacaagaggtataggtggaatcttttttgactataaaaatgataattttgaaaatgacttcaaatttgttagagacgttggcgttacatttcaaatgctatttaatgaaataattaaaaaaaaaataaaaagaaaatggactttaaaagataaagagtttcagtatattaaaaggaggtcgatacgcagaatttaat

SEQ ID NO: 218348 - DNA, 442 bp, Unknown
  Bacterial polypeptide expressing nucleotide sequence isolated from the Sargasso Sea
atggatgttacaccatcaaaaaatgatgaaaatgaaaaaaaagaatttcacaaaattttaaaaaatatgtgtgatagacataatatgaattactatagaaaatataaaaagtggtgtgaccaatatttttacttacctcacagaaaagaaacaagaggaattggaggaattttctttgattataaaaaaaatgattttgaaaaagattttaaattcgtaagagatgttggaataacatttcagacaatttttcaaaatattattttaaaaaagataaaaaaaaaatggactaaaaaagataaagaaatacagtatacaaaaagaggaaggtatatagaatttaatttactttatgatagaggtacaaagtttggtttacaaacaggtggaaatattgaaggaatattgatgtcaatacctcctttagctaaatggaaataat

SEQ ID NO: 218349 - DNA, 397 bp, Unknown
  Bacterial polypeptide expressing nucleotide sequence isolated from the Sargasso Sea
tttcatcaaactttaaaaaaaatgtgtgatcaacataataaatattattacagaaaatataaaaaattatgtgatgaatatttctatctaccacatagaaaagaacatagggggattggtggaatcttttttgactacaaaaaagataattttgaaaaagattttcaatttgtaagagatgtaggggttacatttcaaatattatttaataaaataatcagaaaaaaactaaaaaaaaaatggactgttaaagataaagaaattcaatatattaaaagaggtagatatacagaatttaacttgctttacgatagaggtaccaaatttggattacaaactgatggaaatgttgagggaattttaatgtctcttcctcctttagcaaaatggaaataat

SEQ ID NO: 218350 - DNA, 607 bp, Unknown
  Bacterial polypeptide expressing nucleotide sequence isolated from the Sargasso Sea
tctggaacattttccaaaaagtttcaggaagcaaattcctggagcacaaaaaaatgggaaatattgggcttctggaatttcagttgttgcacatatgaaaaatccaaaaattccagccattcattttaatacaagatatatagttacttcaaaaacttggtttggtggtggcatagatttaactccaagctttaaagacaaaacagaagaaatttattttcactcaaagttaaaacgtgtttgtgaaagtaatagtaaaaattataaaaaatacagagaatggtgtgataaatatttttttttaccacacagaaatgagccaagaggagtaggtggtattttttttgattatgaaaatagaaattgggagaaagactttaaatttgtaagagaagtaggaatgagttttcttgaaatatcaacacatataattaaaagaaaaatgaaaattaaatataataatacagataaagataaacaattatttaaaagaggaagatatatagaatttaatcttttgtacgatagaggaacgaagtttggtctcaactctggtggaaatactgaggcaattttaatgtctttaccgccaaaagctaaatggtaa

SEQ ID NO: 218351 - DNA, 568 bp, Unknown
  Bacterial polypeptide expressing nucleotide sequence isolated from the Sargasso Sea
tatggatcaaacaattaaaaaaaaattagcccgaaattggtttaagactttgcaagaagtaatttgtcaagaaatagaggaattagaggcaaaaaaaaatatcttcaaaattaaaaattgggaaagaggtaaaaactcaaatgagggtgggggccaatttagaattttagaaaatggaaaaatttttgaaaaagtaggtgtaaatttttcagaagtgtatggaaaattttcaaaagaatttagaaacagaatccctgggggggataaaaatccaaacttttgggcaacaggtatatcagtagtaatgcatatgcaaaaccctcatgttcctgctatgcattttaacactagatatatttatacctctcatggttggtttggtggagggatggatgttaccccttgcctaaaagataaacttttagaaaaatggtttcataatgaattaaagaaatcttgtgacaaacataataaaaatttttataaaaaatataaaaaatggtgtgatgaatatttttatttgccacataggaaagaaccaagaggtataggggggaattttttttga

SEQ ID NO: 218352 - DNA, 295 bp, Unknown
  Bacterial polypeptide expressing nucleotide sequence isolated from the Sargasso Sea
tatggatatcacgccatgtataaaggatgaaaaagaaaaaaaatattttcacagcagtttaaaaaaaatgtgcaatattcataatgagaagtattattctaaatataaatcgtggtgtgacaaatatttttatttaaatcatagaaaagaacctagaggaataggtggaatttttttcgactataaaatgaatgactggcaaaaagattttttgtttattaaagatgttggtactttttttgctaatatagttaatgttataataagagaaaaaatgcgtaaaaaatggggaaaa

SEQ ID NO: 218353 - DNA, 829 bp, Unknown
  Bacterial polypeptide expressing nucleotide sequence isolated from the Sargasso Sea
aatggacttagatattaaaaaagacttagtaagcaattggtttaaattattacaaaaatcaatttgcaatgatattaatgatttagaaaatcaaaaaataaaatttaaaactactatttggaaaagaaattcaaaaagagatgagggaggtggtgagtataggatactaaaagatggtaaaatttttgataaagtaggtgttaatttttcaaaggtttatggaaaatttcctaaaaaatttcaaaaaaaaatattcggtgctaatagaaatcccaaattttgggcatcaggaatatcagtagtaatgcatatgagaaatccattgatcccagcaatgcattttaataccaggtttatatgtacaactcatcaatggtttggtggtggtatagatgtaactccatcaaaaaaagatgatttggaaaaaaaatactttcatcaaactttaaaaaaaatgtgcgataagcataataagaattattataaagaatataaaaaattatgtgatgaatatttttatttaccccatcgaaaagaaacaagaggtataggtggaattttttttgattataaaagagataattttgaaaaagattttaaatttacaagagatgttggcatcacctttcaaatgttattcaatagaattataagaaaaaaaataaataaaaattggtctactcatgataaagaattacaatatattaaaagaggaaggtatgccgagtttaatttattatatgatagaggtacacaatttggattacaaacaggtggaaatgttgaaggaaattttatgtctcttcccccattagctaaatggaaatga

SEQ ID NO: 218354 - DNA, 654 bp, Unknown
  Bacterial polypeptide expressing nucleotide sequence isolated from the Sargasso Sea
tgagtggtttaaatttttacagtttaaaattgttgaagaatttcaaaatcttgaaaaagaaaattcaatatcgaaacgcgcagagattaaatattttaaaaaaaatgagtggaaaaagaaaaatactaaagatggtggaggaacatactatctattaaaaaatggcaatttatttgataaagttggaataaatcactcaacagttcaaggtttgtttccaaagacgtttaaatcaaatattcctggtactaaaaagaataattcctattgggcttcaggaatatctgtcgtagcacatatgaagaatccaaaaataccagctatacattttaatacaagatttgtagtcacgtcaaaaagttggtttggaggaggaatggatgtaactcaaagttttaaagattttaaagaaaaaaaatttcttcataatgaactaagatttttatgcaaaaataataaaaaaaattatgataggtataaaaaatggtgtgataaatatttttatatcaaacacaaaaaagaaattagaggaattgggggaattttttttgattatctttacaatgaatgggaaaaaaattttaaatttattagagaacttggtatctgttttctgaatacctcaaaaattatcatacaaaaaaaatctttgca

SEQ ID NO: 218355 - DNA, 523 bp, Unknown
  Bacterial polypeptide expressing nucleotide sequence isolated from the Sargasso Sea
aatggacaaatatataaaaaagaaattaactaggaattggtttataaacctgcaagagatgatctgtaatacgatacagcaagttgaaggtggaaaaataaaattttttaagaagagctggaaaagaaatataaaaaaggatgaagggggtggctgttattatattcttgaaaacgggaaagtatttgacaaagttggtgtcaacttttcagaagtttatggaaaactgactgaagaatttaaaaagaaaattcctggtacaaaaaataatagagatttttgggcatctggtgtatccgtggttatgcacatgaaaaatcctcatgtaccagctatgcattttaataccagatatatttatacaaatcacggctggtttggaggaggaatggatgttaccccatgttttaatgatccagctattaaaaaactattatttaaaaaattaaaaaaagtgtgtgataggcataacaaaaaatattttaaaaaatataaaaaatggtgtgatgaatatttttattta

SEQ ID NO: 218356 - DNA, 292 bp, Unknown
  Bacterial polypeptide expressing nucleotide sequence isolated from the Sargasso Sea
gtaatatctaatggtaatttctttgataattgtgctgtaaatttctcgtcaatatatggtaaaaatatgcctacaagcgcacttggaaaaaaattagcaaaaaaaattgatcatggctatcaagccatgggtgtttctgtaatctctcacccaaaaaatccatatgttccaactagtcatatgaatgttcgtctatttggaatattagacaagaataaaaacataaaagattggtggattggaggtggctatgatttaacgccttatatatctttttcagaagataatatta

SEQ ID NO: 218357 - DNA, 580 bp, Unknown
  Bacterial polypeptide expressing nucleotide sequence isolated from the Sargasso Sea
aatattaggtgcagataaaaacccgaattattgggcatctggaatttcagttgtagcacacatgaaaaaccctaaaattccagctatgcattttaacacaagatttatagttacgtcaaaaaattggtttggtgggggtatggatgctactccatctttcaaagatgatagggagagaaaattttttcataataaaatcaagtttacatgtgataaatataataaaagatattatccaaaatataaaaaatggtgcgatagatatttttatttacctcacagaaaagaaacacgtggcataggcggtattttttttgattataaaaaaggtaattgggaaaatgatttcagttttgttagaaatgttggcttatgttttttagactgtgcaaaaaatataattaaaaaaaaatatagattaaaatggaccaaaaaccaaaaaaatgaacaattatataaaagaggtagatacatcgaatttaacctactttatgatagaggtactaaatttggtttaaatacaggtggaaacgttgaggcaattctgatgtctcttccacccaatgcaaaatggaaataa

SEQ ID NO: 218358 - DNA, 296 bp, Unknown
  Bacterial polypeptide expressing nucleotide sequence isolated from the Sargasso Sea
aactttagatcatggacttaaactatctcagaatgtttgtgaagcatttactaactcctatgtcgaaataataaataaacgaaaagatttaggctttgaagaaagagataaagaatttcaaaaatttagaagaggccgttacgtagaatttaatcttgtttatgacagacgaacactgtttggcatacacacaggcggaagaattgaatcaatattaatgtcattgcctaatgatgtggcatggagatataaatttgatgaaaatcttacagaaaaagaaaaaaatctctataagt

SEQ ID NO: 218359 - DNA, 118 bp, Unknown
  Bacterial polypeptide expressing nucleotide sequence isolated from the Sargasso Sea
gatgaatatttttacttgccgcataggaaagaaccaagaggtatagggggaattttttttgattataaaaaagaaaattgggaaaaagattttagttttgtaagagaagtgggaataa

SEQ ID NO: 218360 - DNA, 587 bp, Unknown
  Bacterial polypeptide expressing nucleotide sequence isolated from the Sargasso Sea
tttggatgatgtttgggaaaaaaaagatcttggccaaggcaattcaattgttatagacgatggaaattttttcgataaagcagggataaatttttcaagcatttcagggaagtccttacctgaatcgtcagtgggaaaaaaaagcaaatctatgggtttgcctttttttgctactggggtttcggtagttttccacccaaaaaatccgtatattcccacctcacaccttaatgtcagatatttctgcacctataaggaagacaaggtttttgaagaatggttcggtggaggatttgacctcacaccatatattttaaatgaagtagattgtaaaaaatggcatgagggcgctaaatatgcttgtaaattggttggtgctaatttttatgaaaaagctaagaagaattgtgacgaatatttctttattcctcatagaaaagagcacagaggcattggtggaattttttatgagaagcaaaaatttaatcagattgaagaaggcctgcacttttcagatagagtgagcgaacaatttattgaaaactacttagaaataatcaataaacacaaggacacaaaatatacaa

SEQ ID NO: 218361 - DNA, 841 bp, Unknown
  Bacterial polypeptide expressing nucleotide sequence isolated from the Sargasso Sea
atgattaaaaacattgagataaagaaacaatttgtgagtaattggtttgtttttttacaatcacaaatatgtgaacaattcgaagctattgaaaaaaaattttctaagaaaaaaataaaaaaaaataaaaaatttctagttagaaaatggtttaaaaagaataaagaggaagggggcggactatctttaattttagaaaatggaactgtatttgataaagtaggaattaatcagtcaacagtttccggaatatttaaaaaagagtttagatctaaaataccaggggccaaaaaagatggtaaatattgggcctctggaatatcaatagttgctcatatgaaaaatcctaaaatcccggcttttcattttaatactagatttattgtaactacaaaagaatggtttggaggaggaatagatgtcactcccagttataaagacttaaaagagaaaaagaaaattcataataaactgaaagcaatttgtttaaataataataaaaattatttaaaatataaaaagtggtgtgataaatacttttatttaccacatcataatgaaacaagaggaataggaggaattttttttgattatgaaacgaaggattggatcaacaattttgagtttgtaagaaatttaggtatttgttttatggatataactaaagaaattattaataaaaaaggtaaattaaagtggaacaaaaaagaaaaagaaaaacaaagttttaaaagaggaaaatatgtagagtttaaccttttgtatgatagaggtacaaaatttggtttaaattctggaggcaatattgaggcaatattgatgtcaattcctccaaaaccga

SEQ ID NO: 218362 - DNA, 541 bp, Unknown
  Bacterial polypeptide expressing nucleotide sequence isolated from the Sargasso Sea
atggatcaatacataaaaaagaaattagcaagaaattggtttaaaactttgcaagaagtactttgtagagaaatagaggaaaaagagagcaataaaattaaatttaaaattacaaattggaatagaagtaaaagtaatgatgaaggtggaggacaatacagaattttagaaaacggtaaaatttttgataaagttggagtaaatttttcagaagtttatggaaaattttcaaacgaatttaaaaataaagttccaggtacaaaaaagagctctaaattttgggcatctggaatatctgttgttatgcatatgaaaaatcctcatgtgcctgcgatgcattttaatacgaggtatatagtcacttcatttggttggtttggaggtggtatggatgttacaccttgtataaaagataagaaattagaaaattggtttcattcagaactaaaaaaatcgtgtgataaacataacaaaaattattataaaaaatataaaaaatggtgtgatgaatatttttatttaccgcataaggaaggagcca

SEQ ID NO: 218363 - DNA, 649 bp, Unknown
  Bacterial polypeptide expressing nucleotide sequence isolated from the Sargasso Sea
aatgaaaaaaattgaacaaaaaaaaaagctttcaagccaatggtttaaagaattaagggataatatctgtcaggaaatagaaaaattagagattactgggaaaaaatttaaaaaaaaaaagtggaacagggataaaaaagggaccaatgctctcggtggtggagaaatgagtgttctaagaggaaaaacttttgaaaaggcaggtgtcaatatatcaaccgtttttggccctatttcaaatgaactaaaaggcaaaattccaggttcaaaaactactaaaaatttttgggcttcgggaatatctgttgtaattcatccatactctccaaaaattccagccattcatatgaatactagatttatagtgactggcaaaaattggtttggcggtggaacagatatcactccaaataatttaaaatctgctaattctatcaaattagctaattactttcatggtaaacttaaagaaatatgtgaaaaatataaaaaagggagttatataaagtataaaaattggtgtgatgaatatttttttcttccccatagaaatgagcccagaggtttagggggaattttttatgattatttggactcaaaaaattgggaatcagatttttcttttacaaaagatgtcggacaaaccttt

SEQ ID NO: 218364 - DNA, 673 bp, Unknown
  Bacterial polypeptide expressing nucleotide sequence isolated from the Sargasso Sea
tatgacaaatactgaaattaaaaaaagtttagtaaataactggtttgattatcttcaattacaaatttgtggtgaatttgaaaatttagaaaatagtttaaatggcaaatcaaaaaggtttggtaaaagagtatggaaaaaaaaggatcttaatgaaggtgggggtgcctcttatttattatctaatggtaagctatttgataaagtcggagtcaataaatctacagtttctggagtttttaaaaaagaatttagatctaatattcttggtgctcaaaaagatggaaaatattgggcctcaggagtttcagttgtagctcatatgaaaaacccaaaaatacctgcttttcactttaatactcgatttattgtaacttcaaaagaatggtttggtggaggaatggacgctacacctagtttttcggataaaaaagagaaagagaaaattcataaaaaattaaaagaattgtgcttaacaaataagaaaaattataaaaaatataaaaaatggtgtgataggtatttttacctacctcatagaaaagaaccaagaggaattggtggtattttttttgattatgaaacaaaaaactgggagaaaaattttaaatttgttagagatttaggattaacttttatagaaattacaaaaggaagtatattaaaaaattga

SEQ ID NO: 218365 - DNA, 448 bp, Unknown
  Bacterial polypeptide expressing nucleotide sequence isolated from the Sargasso Sea
atgaccaatcgatcaaatcaagccatccaatttgcacaattagtgcaagatcggcaaaatgacatttgcaaggcccttgcggatgttgacggtggtgaatttaaagaagatatttgggagcgcccaggtggtggtggcggcaaaactcggattattactggtgacgtcattgaaaaaggtggggtaaacacatcggaagtgtttgggcatttaaaagcatccgaacttcccatgtttaaccagcttattcaacgggttgattcaacagctgaggcgactgaagacagctcgttttatgccactggaatcagtttggttattcacccacataaccctcatgttccaaccgttcacgcaaactttcggtattttgatattcagttggctgaccgaacgttgtggtggattggtggcggggctgatttgacccccctatattttatatgaa

SEQ ID NO: 218366 - DNA, 805 bp, Unknown
  Bacterial polypeptide expressing nucleotide sequence isolated from the Sargasso Sea
atgtcagataagcaatttaatctagcaaaagactggtttgaagatcttcgtaatcaattaatcaatttagtttctgaaattgatggtaaagaatttgttcaaacgaattggagtcatagacatgagggtgggggaaccatgtcgaaaataaaaggaccagttattgaaaaaggtggggttaatatttctagtgtttatggtgaattcaatagtgaaatgcaaaataaaatacctggagctaaaaaagatcctaaatataaagctacaggaattagtgttgttttgcatcctgtatcacccaaaataccatctatgcattttaatactcgttttttaataacctctgaaaaatggtttggtggaggaatggatataacgccttgtttagattttaataaaatagatgattatcatgatggtttaaaaaagttgtgtaatgaatattatccaaataaatattcagaatttaaaaaatggtgtgatgattatttttatcttcctcatagagatgagccaagaggagcgggaggtattttttttgattatttaaaaaataattgggaaaatgattttgaatttataaaaaatgtaggaaagtactttagagactttgttgaaaccactctaattgagttaaaaaatgaaaaatggaatgagagagaaaaaaatatccaacttgttaaacggagtcgctatgctgagtttaatttattgcatgataggggtacaaaatttggattagaaacaggaggtaatattgatgcaatcttaatgtctatgcctccaatagcaaaatgggattaat

SEQ ID NO: 218367 - DNA, 721 bp, Unknown
  Bacterial polypeptide expressing nucleotide sequence isolated from the Sargasso Sea
tatggacttaaatttagaaattcaaaaaaaactatcctctgagtggtttttatatcttcaatcacttatctgttatgaatttgaaaggattgaaaaagaggtatctaaaagaaaaaggatggtatcaaaaaaatttaaaaaaaatacttggagtaaaaaagatgttaatgaaggaggaggacaatactttatacttaaaaatggacaagtatttgaccaggtaggagtaaacttttcaagagttcagggaagatttcctaaaaattttagatcgaaaataccgggagcaaataaaaatccaaattactgggcatcaggaatttcggttgtcgctcacatgaaaaatcctaaagttcctgcggtacattttaatacaagatttattactacttctaaaagttggttcggcgggggtatggacgtaacaccgagttttaaagatactggagaagaaactttagtacataaaaatttaaaaaatttgtgcattaaaaataaaaaaaattataacaattataaaaagtggtgtgatagttacttctttataaaacatagagaagagccaagaggtattggaggaatttttttcgattatttgtataacgattgggatcaaaactttaaatttataagggagctgggactatgttttcttactacctctcaagaaattataaatagtaaaatcaaaaaaaaatggaataaaaaacataaatatgat

SEQ ID NO: 218368 - DNA, 907 bp, Unknown
  Bacterial polypeptide expressing nucleotide sequence isolated from the Sargasso Sea
aatgattgcaaatctagagagacagtttaaacaaattcagaccactatttatagtagttttagtcaattagaaagttctaatgaaatagatatttctgaagacgcatggaaaagaccggaaggcggaggaggcaaaactatagtaatggcttgcggcaacttttttgataattgtgcaataaattattcgtcaatatttggaaataagttaccaaaggcagccttggcaaaatctcttaataaaaacacaaagtatggttaccaagcgatggggatctcagtgatttcacatccaattaatcctcatatcccatcgagtcatatgaatgtcagattttttgggattttagataaagaaaaaaggataaacgattggtggattggcggagggtatgatttaactccattcataccatacgaagaggacattttaagttggcatagttctgcaaaagacaatctagactcatgggatactaatttttataaaattttttcggataattgtaataattacttcaacatccctcatagaaatgaaagaagaggcgtaggaggtattttttttgataacctatctgatttaagcattgataatagtattgattttctcaaatcagtagcccaaacctatttagattcatatttaaaaataataaataataggaaaatgcttaaatttacaaaggaggaaaaagattttcagcttataagaaggggaagatatgcagaatttaatttaatctatgatagaggcacagcttttggccttcagtccaatggaagaatagaatcaattctagcttcattaccatcagacgttaaatggtcatacaaaaagaataaagaatataaacacttagaaaaaaaattacttaaatcaattaacagagattggaatgtctaa

SEQ ID NO: 218369 - DNA, 641 bp, Unknown
  Bacterial polypeptide expressing nucleotide sequence isolated from the Sargasso Sea
aatgaaaataaaagaaaaacaaagattgacaaaaaagtggtttaaagatttacaaaatttaatttgtaaaaatatagaagatttagaaaaaaaatatggatctagaaaaaaatttaaaaaaaataagtgggaacatggtgagttcagaataattgagggggagttaattgaaaaaggaggtgtggcattttcaaatgttattggaaaatttcctaaaacctttgctaaaaatatacctggaactaaaaaaaagcttaatttttggtcatctggtgtttcggttgtattacaccctaatagccctaaaattcctgctatgcatttcaatacacgtttcatttgtacagaaaaaaactggtttggcggtggaatggatgcaactccttgctttaaagataacaaagaaaaaaaaatatttcataatgagttaaaaaaaatatgtgattatcataataaaaaatattatcctaagtataaaaaatggtgtgataactatttttatcttccacatagaaaagaacctagaggaataggtggtatattttttgattataaaatggataaatgggaaaaggattttttatttgtaaaagatgttggtttggtttttgtaaaacttataaataaaattatgaaaaaaa

SEQ ID NO: 218370 - DNA, 844 bp, Unknown
  Bacterial polypeptide expressing nucleotide sequence isolated from the Sargasso Sea
tatggagttaaatttagaaattcaaaaaaaactatcttctgagtggtttttgtatctccaatcaattatttgtgatgaatttgaaaggatcgaaaatgaagaatcaaaaagaaaaaggaaggtttcaaaaaaatttaaaaaaaatacttggagtaaaaaagatgttaatgaaggtggtggacaatactttatacttaaaaatggacaagtatttgaccaagttggtgtaaacttttcaaaagttcagggaaaatttcccaaaaattttagatcaaaaatacctggcgcaaataaaaaccccaattactgggcatcaggaatttcggttgtagctcatatgaaaaatcccaaaattcccgcagtacattttaatacaagatttattactacttcaagaagttggtttggtggaggtatggacgtaacaccaagttttaaagataataaagaaaaaatatttgtgcacagaaatttgaagaatttatgtgctaaaaataaaaaaaattatatcaattataaaaagtggtgtgataaatatttctttataaagcatagagaagaaccgagaggtattggaggaattttttttgattatttgtataacgactgggataaaaattttaagtttataagagaattaggactatgttttcttacaacctctaaagatatcataaataataaaatctcaaaaaaatggaataaaaaacaaaaaaatgatcagtatctaaaaagaaaaaggtacgttgagtttaatttattatatgataggggtacaaaatttggattaaatactggtggaaatgtagatgcaatttttatgtcatttcctccactaaattaa

SEQ ID NO: 218371 - DNA, 814 bp, Unknown
  Bacterial polypeptide expressing nucleotide sequence isolated from the Sargasso Sea
ttggaaatagaagaaaaaaaagatctagccagttcatggtttagaaatttaagagatcagttttgtaaggaattcgaaaccttggatggatctagttttgagagaacagaatggaaccattctggaagcggtggtggtgaaattagtattatgaaaggtaatgtatttgaaaaagttggtgtgaatatttcaacagtaagtggagaatttaaagaagattacagaagtaatgtgtcaggaactgaggaatcaccagaatattgggctagtggattaagtattgttgcacatatgaactctccttttgtacctgcatttcattttaatacgcgttttatagttactggaaaaagttggtttggtgggggcgcagatatgactcctacttatatttataatgatgacacagaggattttcataattctcttaaagatgcttgtgataaatataataaaaattactaccctgattttaaaaaaaattgtgcagagtattttttcttaccacatagaggtgaagaaagaggagtaggcggtattttctttgaccatcttaaaacagatgattgggaaactgatttttcatttgtaaaggatgttggattatctttttataaaatagttcctcacataattaacaaaagaaaggatgacaattggacagaggaagaaaagaataagcagttattaaaaaggggaagatatgttgaatttaatctgctgtgggatagaggtacacaatttgggattaaaaccggcggtaatactgatgcgattctaatgtccatgcctccagatgcgcgttgggaataat

SEQ ID NO: 218372 - DNA, 244 bp, Unknown
  Bacterial polypeptide expressing nucleotide sequence isolated from the Sargasso Sea
cgccatggcagctgtaccgacgggggcgctacgtgggagttcaacctcgtccatgaccgtggcaccctgtttggcttgcaaaccaatggccgcaccgaggccatattgatgtcgctgccgcccctcgtgcgctgggagtacgggcacacgcctgacgaggggacccccgaggcggcgctgatggcagactttttgcggccgcgcgactggttggcggtcgacgcgggtgcggcggccagctgat

SEQ ID NO: 218373 - DNA, 502 bp, Unknown
  Bacterial polypeptide expressing nucleotide sequence isolated from the Sargasso Sea
aaatcctaaaattcctgcaatacattttaatacaagatttatcactacttctaaaagttggtttggtggcggtatggacgtaacaccaagttttaaagacaatagagaaaaaatattagtacataaaaatttaaaaaatttatgtattaaaaataaaaaaagttataataattataaaaagtggtgtgataagtacttctttataaaacatagagaagaaccaagaggtattggaggaatttttttcgattatttgtataacgattgggatcaaaactttaaatttataagggagttgggactgtgttttcttactacctctcaagagattataaatagtaaaatcaaaaaaaaatggaataaaaaacataaatatgatcagaacttaaaaagaaaaaggtatgtcgaatttaatttgttatatgatagaggtacaaaatttggattaaataccggtggaaatgtagacgcaatttttatgtcatttcctccattaaattaa

SEQ ID NO: 218374 - DNA, 907 bp, Unknown
  Bacterial polypeptide expressing nucleotide sequence isolated from the Sargasso Sea
aatgactgttaaattagaaaagtactttaagaatattcaatccactatttataatagttttgaagaattggagaaccctaatacagtaaatatatctaaagattcatggaaaagacctgagggcggtggaggaaaaactattgtgctggctgatggcagtttctttgataattgtgcagtaaattattcatcaatttccggcaaagatttacctgaagcagctttagctaattcacttaataaagatacaaaatttggttaccaggcaatgggggtttctgttatttcacatccaaagaatccacatataccaacaagccatatgaatgtaagacttttcggtattttagacaagaaaggtaagatgacggattggtggattggaggaggatatgacttaactccttttataccataccaagatgatattttagcttggcataaatctgctaaaaaaaatttagatagctggaacactggcttttataaaatcttctctgataattgcaataattactttaatattcctcataggaatgaaagaaggggcgtaggaggtattttttttgataatttatcagaatttagtgttgaaaaaagtattgatttccttaaatcagtagctttatgttatttaaactcatacttaaaaattgtaaataatagaaaaatgcagacatttactcaggatgaaaaagattttcagcttttaaggagaggaagatatgctgaatttaatttaatttatgacagaggcacagcatttggccttcaatcaaatggaagaattgaatcaatattagcttctcttccatcaaacgttaagtggtcatataaaaagagtaaagaatataaatccttagaaaaaaaattacttaaagttgtaaacagagactggaatgtctaa

SEQ ID NO: 218375 - DNA, 814 bp, Unknown
  Bacterial polypeptide expressing nucleotide sequence isolated from the Sargasso Sea
cttggaaatagaagaaaaaaaagatttagcaagttcatggtttaggaatctcagagatcagttttgtaaagaattcgaaacactagatggctcaaagtttgaaagaacggaatggaatcattctggaagtggtggcggtgaaattagtctcatgaaaggtaatgtattcgaaaaagttggcgtaaatatttctacagtaagtggagaatttaaagaagattatagaagtaatgtttcaggaactgaggattcaccagaatattgggctagcggattaagtattgttgcacacatgaactctccttttgtacctgcatttcattttaatacgcgttttatagttactgggaaaagttggtttggcgggggtgcagatatgacccctacttacatctataatgatgacacagaggattttcataattctcttaaagatgcttgtgataaatatgataaaaattactaccctgattttaaaaaaaattgtgcagaatattttttcttaccacatagaggagaagaaagaggagtaggcggcattttctttgatcaccttacaacagataattgggaaactgatttttcatttgttagggatgttgggttatctttttttaaaatagttccccatattattaacaagagaaaagatgataattggacagaggaagaaaagaataagcaattattaaaaagaggaagatatgtcgaatttaacctgctatgggatagaggtacgcaatttgggattaaaaccggcggtaatactgatgcaattctaatgtctatgcctccagatgcacgttgggaataa

SEQ ID NO: 218376 - DNA, 532 bp, Unknown
  Bacterial polypeptide expressing nucleotide sequence isolated from the Sargasso Sea
atggatcaaacaattaaaaaaaaactagctcgaaattggtttaagactttacaagaagtaatttgtcaagaaattgaggaattagaagcgaaaaaaaatatcttcaaaattaaaaattgggaaagaggtaaaaactcaaatgaaggtggggggcaatttagaattttagaaaatggaaaaatttttgaaaaagtaggtgtaaatttttcagaagtgtatggaaaattttcaaaagaatttagaaacagaattcctgggggagataaaaatccaaacttttgggcagcgggtatatcagtagtaatgcatatgaaaaatcctcatgttcctgctatgcattttaacactagatatatttatacttctcatggatggtttggtggagggatggatgttacaccttgcctgaaagataaaagtttagaaaaatggtttcataatgaattaaagaaatcttgtgacaaacacaataaaaatttttataaaaaatataaaaaatggtgtgatgaatatttttatttgccacaatagg

SEQ ID NO: 218377 - DNA, 802 bp, Unknown
  Bacterial polypeptide expressing nucleotide sequence isolated from the Sargasso Sea
atggaaaaggcctgaaggtggcggaggaaaaacctttgtaatatctaacggtaatttctttgataattgtgctataaatttctcgtcaatatatggtaaaagtatgcctacaagtgcacttggaaaaaaattagcaaaaaaaattgatcatggctatcaagccatgggtgtttctgtgatctctcacccaaaaaatccatatgttccaactagtcatatgaatgttcgtctatttggaatattagacaagaataaaaacataaaagattggtggattggaggtggctatgatttaacaccttatatatctttttcagaagataatattcgttggcataactcagcaaaagaaactcttgataaatataacaaaaatttttataagtcattttctgagaattgtaataaatatttttatatacctcatagaaaagaaagaaggggtattggaggtatcttttttgataatctatctagctttagccttgacgatagcgtaaaaatgctaaattctattgcaagcacctatttaaattcatatttagatattgtttctaaaagaaagaaaataaagtattcctcagatgagaaagattttcagctaattaggagaggaagatatgctgaatttaatctaatatatgacagaggaacgtcatttgggcttcaatcaaacggaagaattgaatcaatcttagcttcacttccaacagaagttaaatggaagtataaaaaaaataaaaaatacaaaataatggaaagagccctccttaaaaatcttaatagagattggaatgaataa

SEQ ID NO: 218378 - DNA, 829 bp, Unknown
  Bacterial polypeptide expressing nucleotide sequence isolated from the Sargasso Sea
aatggatatctcaataaaaaaagacttagcaagtaattggtttaaactattacaaaatgcaatatgcgatgacattttaaaaatcgaaaaaaacaaattaaattttcagtcaacttcttggaaaagaagtaataatagagatgaaggtggtggtgaatatagaattcttaataatggaaaaatttttgaaaaagtaggtgtaaatttttcaaaagtttatggaaaatttcctaagcaatttcaaaggaatataccaggtgcaagtaaggatcctagattttgggcatctggaatatcaatagttatgcatatgcaaaatcctcatattcctgcaatgcattttaataccagatttatttgtacaacaaaaaattggtttggcggaggaatggatgtaaccccaacaataaaagatgaaaaggagaagaaaaattttcataaaatattaaaagctatgtgcgatagatataataaaaattattataaaaaatataaaaagtggtgtgatgaatacttttatctacctcacagaaaagaggcaagaggaataggtggaatattttttgactataaaaatgataattttgaaaatgattttaaatttgtcagagatgttggtgttacatttcaaatgctatttaatgaaataattaataaaaaaataaaaaggaaatggactttaaaagataaagagtttcagtatattaaaagaggtcgatatgcagaatttaatttgctctatgacagaggaacgaaatttgggctacaaactggtggtaatgttgaaggaattttaatgtcattacctccgattgcaaaatggaaataa

SEQ ID NO: 218379 - DNA, 640 bp, Unknown
  Bacterial polypeptide expressing nucleotide sequence isolated from the Sargasso Sea
atggaattaataacaaaaaaaaaaatcattaaaaactggtttatgatacttcaagatataattactaatgatattgaaaaaatagaaaagaaaaaaaatatatttaaatcaaaacattggtcaagaggctttaatcagggaggtggtgagtttagaatttttgaaaatggtaaaatatttgaaaaagttggagtaaatttttcagaagtttatggaaaattgtctcataaatttaagggacaaattcctggaacggataaaaactcaaatttttgggcatcaggtatatctgttgttatgcatatgaaaaatccacacataccggcaatgcattttaatactagatatatagttacatcgcatggatggtttggtggaggtatggatgtaacgccatgcttaaaagatataaattttaaaaattggctgcataaagaacttaaaaagacatgtgataagcataataaaaattattataaaaaatataaaaaatggtgcgaaagatatttttacttaccacacagaaatgaagaaagaggaattggaggaatattttttgattataaaaaagggaattgggataaagattttgcatttgtaagagatgttggattattatttactaaaatatttaaatgaa
